United States Patent Application Publication US 2002/0048763 A1 - sequence listing, part 10

SEQ ID NO: 35942 - protein, 128 aa, Homo sapiens
  MAP TO AL031258.5; EXPRESSED IN BT474, SIGNAL = 2.6; EXPRESSED IN FETAL LIVER, SIGNAL = 3.1; EXPRESSED IN ADULT LIVER, SIGNAL = 2.8; EXPRESSED IN HBL100, SIGNAL = 2.5; EXPRESSED IN HELA, SIGNAL = 1.9; EXPRESSED IN PLACENTA, SIGNAL =   3; EXPRESSED IN HEART, SIGNAL = 2.9; EXPRESSED IN BRAIN, SIGNAL =   3; EXPRESSED IN BONE MARROW, SIGNAL = 3.9; EXPRESSED IN LUNG, SIGNAL = 2.3; EST_HUMAN HIT: BE142186.1, EVALUE 6.00e-01; SWISSPROT HIT: P06333, EVALUE 3.30e-01
HCHLHVHTVTYMCVPACTHSITPVHAPPDTSCAWAQAVHRWPVLWGSRSSSMSSGLKQTPMVGVTGPPWDPDAPAPAPAGTLTAHLIPGALQSSGLTLLLSLAAHCSGPQAKVLSPGGLDASGANLWA

SEQ ID NO: 35943 - protein, 117 aa, Homo sapiens
  MAP TO AL031258.5; EXPRESSED IN BT474, SIGNAL = 2.6; EXPRESSED IN FETAL LIVER, SIGNAL = 3.1; EXPRESSED IN ADULT LIVER, SIGNAL = 2.8; EXPRESSED IN HBL100, SIGNAL = 2.5; EXPRESSED IN HELA, SIGNAL = 1.9; EXPRESSED IN PLACENTA, SIGNAL =   3; EXPRESSED IN HEART, SIGNAL = 2.9; EXPRESSED IN BRAIN, SIGNAL =   3; EXPRESSED IN BONE MARROW, SIGNAL = 3.9; EXPRESSED IN LUNG, SIGNAL = 2.3; EST_HUMAN HIT: BE561245.1, EVALUE 1.00e-03; SWISSPROT HIT: P51787, EVALUE 1.70e-01
TLSLTRAHCHLHVRACMHPQHHACACSTRHVLRLGPGCAQVASAVGLQKFLHVLWPQADPHGGGHRSTLGPGCPGPCSRRDPHSPPYSRCPAELRPHPPAVPCCPLLWAPGQGSFPR

SEQ ID NO: 35944 - protein, 44 aa, Homo sapiens
  MAP TO AL035404.19; EXPRESSED IN PLACENTA, SIGNAL = 6.1; EXPRESSED IN HELA, SIGNAL = 4.8; EXPRESSED IN HEART, SIGNAL = 4.8; EXPRESSED IN BRAIN, SIGNAL = 3.9; EXPRESSED IN BT474, SIGNAL = 2.3; EXPRESSED IN HBL100, SIGNAL = 3.1; EXPRESSED IN LUNG, SIGNAL = 6.8; EXPRESSED IN BONE MARROW, SIGNAL = 4.8; EXPRESSED IN ADULT LIVER, SIGNAL = 3.8; EXPRESSED IN FETAL LIVER, SIGNAL = 3.7; EST_HUMAN HIT: BE298149.1, EVALUE 9.00e-20; SWISSPROT HIT: O62732, EVALUE 3.50e+00
GPTGSAAYVAVPTPNSSSPGPAGRPAGAMLYHSWVSEITEIGAF

SEQ ID NO: 35945 - protein, 32 aa, Homo sapiens
  MAP TO AL035665.22; EXPRESSED IN BONE MARROW, SIGNAL = 3.2; EXPRESSED IN LUNG, SIGNAL = 1.9; EXPRESSED IN ADULT LIVER, SIGNAL = 2.2; EXPRESSED IN PLACENTA, SIGNAL = 1.9; EXPRESSED IN BRAIN, SIGNAL = 1.6; EXPRESSED IN FETAL LIVER, SIGNAL = 1.4; EXPRESSED IN BT474, SIGNAL = 1.1; EXPRESSED IN HEART, SIGNAL = 1.6; EXPRESSED IN HELA, SIGNAL = 1.2; EXPRESSED IN HBL100, SIGNAL = 1.7; EST_HUMAN HIT: AI990414.1, EVALUE 1.00e-03
CEDRGRHWSDTATSQGMSGATRSWKSLGRILH

SEQ ID NO: 35946 - protein, 42 aa, Homo sapiens
  MAP TO AL121759.1; EXPRESSED IN BT474, SIGNAL = 1.1; EXPRESSED IN ADULT LIVER, SIGNAL = 1.3; EXPRESSED IN FETAL LIVER, SIGNAL = 1.2; EXPRESSED IN HBL100, SIGNAL =   1; EXPRESSED IN HELA, SIGNAL = 1.1; EXPRESSED IN PLACENTA, SIGNAL = 0.97; EXPRESSED IN HEART, SIGNAL =   1; EXPRESSED IN BRAIN, SIGNAL = 1.4; EXPRESSED IN BONE MARROW, SIGNAL = 1.7; EXPRESSED IN LUNG, SIGNAL =   1
MPSAAEAEAEADALRLYHMQQAVAAVATVATVDGRKKVGPGG

SEQ ID NO: 35947 - protein, 69 aa, Homo sapiens
  MAP TO AC011347.1; EXPRESSED IN BONE MARROW, SIGNAL = 4.6; EXPRESSED IN LUNG, SIGNAL = 8.3; EXPRESSED IN PLACENTA, SIGNAL = 3.8; EXPRESSED IN BRAIN, SIGNAL = 3.4; EXPRESSED IN ADULT LIVER, SIGNAL = 3.8; EXPRESSED IN FETAL LIVER, SIGNAL = 3.7; EXPRESSED IN BT474, SIGNAL = 2.5; EXPRESSED IN HEART, SIGNAL = 3.5; EXPRESSED IN HELA, SIGNAL = 3.6; EXPRESSED IN HBL100, SIGNAL = 2.7; EST_HUMAN HIT: AA724298.1, EVALUE 3.00e-11; SWISSPROT HIT: P03360, EVALUE 1.10e-02
SAYSTDELLYLFHPGDKVPLKSWKNQGPNQQLAEKWTGSHDEMLTSHSSVNLSRTKPWVHHSEIKVASP

SEQ ID NO: 35948 - protein, 19 aa, Homo sapiens
  MAP TO AC011347.1; EXPRESSED IN BONE MARROW, SIGNAL = 4.6; EXPRESSED IN LUNG, SIGNAL = 8.3; EXPRESSED IN PLACENTA, SIGNAL = 3.8; EXPRESSED IN BRAIN, SIGNAL = 3.4; EXPRESSED IN ADULT LIVER, SIGNAL = 3.8; EXPRESSED IN FETAL LIVER, SIGNAL = 3.7; EXPRESSED IN BT474, SIGNAL = 2.5; EXPRESSED IN HEART, SIGNAL = 3.5; EXPRESSED IN HELA, SIGNAL = 3.6; EXPRESSED IN HBL100, SIGNAL = 2.7
LPTPQMSFFTCSIQGTRCH

SEQ ID NO: 35949 - protein, 33 aa, Homo sapiens
  MAP TO AL035413.19; EXPRESSED IN ADULT LIVER, SIGNAL = 1.3; EXPRESSED IN BT474, SIGNAL =   3; EXPRESSED IN FETAL LIVER, SIGNAL = 0.98; EXPRESSED IN PLACENTA, SIGNAL = 2.4; EXPRESSED IN HBL100, SIGNAL = 3.5; EXPRESSED IN HELA, SIGNAL = 2.3; EXPRESSED IN HEART, SIGNAL = 1.7; EXPRESSED IN BRAIN, SIGNAL = 1.5; EXPRESSED IN BONE MARROW, SIGNAL = 2.2; EXPRESSED IN LUNG, SIGNAL = 4.1; EST_HUMAN HIT: BF037407.1, EVALUE 7.00e-13; SWISSPROT HIT: P79136, EVALUE 5.00e-14
DHGFAGVILIKKAGDGSKKIKGCWDSIHVVEVQ

SEQ ID NO: 35950 - protein, 31 aa, Homo sapiens
  MAP TO AC011368.1; EXPRESSED IN BONE MARROW, SIGNAL = 1.4; EXPRESSED IN LUNG, SIGNAL =   1; EXPRESSED IN BT474, SIGNAL = 1.2; EXPRESSED IN ADULT LIVER, SIGNAL = 1.4; EXPRESSED IN FETAL LIVER, SIGNAL =   1; EXPRESSED IN HELA, SIGNAL = 1.1; EXPRESSED IN PLACENTA, SIGNAL = 1.1; EXPRESSED IN HBL100, SIGNAL = 1.3; EXPRESSED IN HEART, SIGNAL = 1.3; EXPRESSED IN BRAIN, SIGNAL = 1.4
AVVFKGSKHLIEATGLVNGFMAATEKGGGLS

SEQ ID NO: 35951 - protein, 101 aa, Homo sapiens
  MAP TO AL049756.16; EXPRESSED IN BRAIN, SIGNAL = 6.9; EXPRESSED IN BONE MARROW, SIGNAL = 5.3; EXPRESSED IN LUNG, SIGNAL = 2.1; EXPRESSED IN BT474, SIGNAL =   2; EXPRESSED IN FETAL LIVER, SIGNAL =  14; EXPRESSED IN ADULT LIVER, SIGNAL = 4.8; EXPRESSED IN HELA, SIGNAL = 2.8; EXPRESSED IN PLACENTA, SIGNAL = 9.3; EXPRESSED IN HBL100, SIGNAL = 2.2; EXPRESSED IN HEART, SIGNAL = 2.9
MAAVDKGCIGAQQVQEQKKAAFQRPVTTQLTVQGKMGLGANDNNDKFAHVPVKSDERCVCVCVCVYMCAYVSVYVSVCVCLYMCVYVYVCMYMCVCVYVCM

SEQ ID NO: 35952 - protein, 24 aa, Homo sapiens
  MAP TO AL049756.16; EXPRESSED IN BRAIN, SIGNAL = 6.9; EXPRESSED IN BONE MARROW, SIGNAL = 5.3; EXPRESSED IN LUNG, SIGNAL = 2.1; EXPRESSED IN BT474, SIGNAL =   2; EXPRESSED IN FETAL LIVER, SIGNAL =  14; EXPRESSED IN ADULT LIVER, SIGNAL = 4.8; EXPRESSED IN HELA, SIGNAL = 2.8; EXPRESSED IN PLACENTA, SIGNAL = 9.3; EXPRESSED IN HBL100, SIGNAL = 2.2; EXPRESSED IN HEART, SIGNAL = 2.9
EWQGMCFVFVSPALGPSRAPGGRQ

SEQ ID NO: 35953 - protein, 45 aa, Homo sapiens
  MAP TO AL034380.21; EXPRESSED IN PLACENTA, SIGNAL =   1; EXPRESSED IN HBL100, SIGNAL = 1.5; EXPRESSED IN HEART, SIGNAL = 1.6; EXPRESSED IN BRAIN, SIGNAL = 0.95; EXPRESSED IN BONE MARROW, SIGNAL = 1.2; EXPRESSED IN LUNG, SIGNAL =  10; EXPRESSED IN BT474, SIGNAL = 1.5; EXPRESSED IN FETAL LIVER, SIGNAL = 0.93; EXPRESSED IN HELA, SIGNAL = 1.1; EST_HUMAN HIT: BE676284.1, EVALUE 6.00e-22; SWISSPROT HIT: Q09701, EVALUE 2.00e-08
RFDHHCPWVGNCVGRRNYRFFYAFILSLSFLTAFIFACVVTHLTL

SEQ ID NO: 35954 - protein, 31 aa, Homo sapiens
  MAP TO AL034380.21; EXPRESSED IN PLACENTA, SIGNAL =   1; EXPRESSED IN HBL100, SIGNAL = 1.5; EXPRESSED IN HEART, SIGNAL = 1.6; EXPRESSED IN BRAIN, SIGNAL = 0.95; EXPRESSED IN BONE MARROW, SIGNAL = 1.2; EXPRESSED IN LUNG, SIGNAL =  10; EXPRESSED IN BT474, SIGNAL = 1.5; EXPRESSED IN FETAL LIVER, SIGNAL = 0.93; EXPRESSED IN HELA, SIGNAL = 1.1; EST_HUMAN HIT: BE676622.1, EVALUE 8.00e-12
NDLTITAPGWATVWGDGTIASSTRLFSPSHS

SEQ ID NO: 35955 - protein, 53 aa, Homo sapiens
  MAP TO AL034405.4; EXPRESSED IN PLACENTA, SIGNAL =   5; EXPRESSED IN HBL100, SIGNAL =   3; EXPRESSED IN BONE MARROW, SIGNAL = 4.3; EXPRESSED IN FETAL LIVER, SIGNAL = 3.8; EXPRESSED IN HELA, SIGNAL = 4.4; EXPRESSED IN HEART, SIGNAL =   6; EXPRESSED IN BRAIN, SIGNAL = 4.3; EXPRESSED IN LUNG, SIGNAL = 2.8; EXPRESSED IN BT474, SIGNAL = 2.9; EXPRESSED IN ADULT LIVER, SIGNAL = 6.3; EST_HUMAN HIT: AA025948.1, EVALUE 1.10e+00
LAPLNIVITTTGRRATKNSLQYSARMGLAGCGRMLSIVPGWSPPGRASLTQAS

SEQ ID NO: 35956 - protein, 18 aa, Homo sapiens
  MAP TO AL034405.4; EXPRESSED IN PLACENTA, SIGNAL =   5; EXPRESSED IN HBL100, SIGNAL =   3; EXPRESSED IN BONE MARROW, SIGNAL = 4.3; EXPRESSED IN FETAL LIVER, SIGNAL = 3.8; EXPRESSED IN HELA, SIGNAL = 4.4; EXPRESSED IN HEART, SIGNAL =   6; EXPRESSED IN BRAIN, SIGNAL = 4.3; EXPRESSED IN LUNG, SIGNAL = 2.8; EXPRESSED IN BT474, SIGNAL = 2.9; EXPRESSED IN ADULT LIVER, SIGNAL = 6.3
LCASPCFPSSTVWPLSIL

SEQ ID NO: 35957 - protein, 62 aa, Homo sapiens
  MAP TO AL096678.8; EXPRESSED IN BT474, SIGNAL = 1.8; EXPRESSED IN PLACENTA, SIGNAL = 2.5; EXPRESSED IN HBL100, SIGNAL = 1.5; EXPRESSED IN HEART, SIGNAL = 1.9; EXPRESSED IN ADULT LIVER, SIGNAL = 1.5; EXPRESSED IN FETAL LIVER, SIGNAL = 2.8; EXPRESSED IN HELA, SIGNAL = 1.1; EXPRESSED IN BRAIN, SIGNAL = 2.4; EXPRESSED IN LUNG, SIGNAL = 1.4; EXPRESSED IN BONE MARROW, SIGNAL =   2; EST_HUMAN HIT: AV750540.1, EVALUE 2.00e-32; SWISSPROT HIT: P16329, EVALUE 1.00e-01
VSAFSDPTPPADQQPGHQKNLHAHNHPKKRNRHRCSSPPPPHEFRAYQLYTLYRGKDGKVMQ

SEQ ID NO: 35958 - protein, 34 aa, Homo sapiens
  MAP TO AL050318.12; EXPRESSED IN BT474, SIGNAL = 4.4; EXPRESSED IN ADULT LIVER, SIGNAL = 2.9; EXPRESSED IN PLACENTA, SIGNAL = 3.4; EXPRESSED IN HBL100, SIGNAL = 2.4; EXPRESSED IN HEART, SIGNAL = 2.9; EXPRESSED IN BONE MARROW, SIGNAL = 4.8; EXPRESSED IN FETAL LIVER, SIGNAL = 3.4; EXPRESSED IN HELA, SIGNAL = 3.9; EXPRESSED IN BRAIN, SIGNAL = 3.5; EXPRESSED IN LUNG, SIGNAL = 7.2; EST_HUMAN HIT: BE252937.1, EVALUE 1.30e-02
RWTLQHATTHTPRAGQRGLQQLPAAGGGGATEGC

SEQ ID NO: 35959 - protein, 36 aa, Homo sapiens
  MAP TO AL031963.11; EXPRESSED IN PLACENTA, SIGNAL = 3.6; EXPRESSED IN BONE MARROW, SIGNAL = 4.9; EXPRESSED IN HELA, SIGNAL = 3.2; EXPRESSED IN HBL100, SIGNAL = 7.3; EXPRESSED IN HEART, SIGNAL = 4.1; EXPRESSED IN BRAIN, SIGNAL = 7.3; EXPRESSED IN LUNG, SIGNAL = 3.5; EXPRESSED IN BT474, SIGNAL = 6.1; EXPRESSED IN ADULT LIVER, SIGNAL = 4.1; EXPRESSED IN FETAL LIVER, SIGNAL = 7.6; SWISSPROT HIT: P02554, EVALUE 2.00e-16; EST_HUMAN HIT: BE261994.1, EVALUE 2.00e-15
FWEVISDEHGIDPTGSYHGDSDLQLERINVYYNEAA

SEQ ID NO: 35960 - protein, 36 aa, Homo sapiens
  MAP TO AL031963.11; EXPRESSED IN PLACENTA, SIGNAL = 3.6; EXPRESSED IN BONE MARROW, SIGNAL = 4.9; EXPRESSED IN HELA, SIGNAL = 3.2; EXPRESSED IN HBL100, SIGNAL = 7.3; EXPRESSED IN HEART, SIGNAL = 4.1; EXPRESSED IN BRAIN, SIGNAL = 7.3; EXPRESSED IN LUNG, SIGNAL = 3.5; EXPRESSED IN BT474, SIGNAL = 6.1; EXPRESSED IN ADULT LIVER, SIGNAL = 4.1; EXPRESSED IN FETAL LIVER, SIGNAL = 7.6; SWISSPROT HIT: Q9UKP5, EVALUE 4.90e+00; EST_HUMAN HIT: BE797638.1, EVALUE 6.00e-08
PQAVTMETVTCSWRESTCTTMRLLVSSGMCVPRNPC

SEQ ID NO: 35961 - protein, 35 aa, Homo sapiens
  MAP TO AL096816.12; EXPRESSED IN BONE MARROW, SIGNAL = 1.6; EXPRESSED IN LUNG, SIGNAL = 1.5; EXPRESSED IN BRAIN, SIGNAL = 1.1; EXPRESSED IN PLACENTA, SIGNAL = 1.2; EXPRESSED IN ADULT LIVER, SIGNAL = 1.7; EXPRESSED IN FETAL LIVER, SIGNAL = 1.1; EXPRESSED IN HEART, SIGNAL = 1.5; EXPRESSED IN HELA, SIGNAL = 1.3; EXPRESSED IN HBL100, SIGNAL = 1.1
GETEFIDYSVLKWQVRVTGVNGDGFVNREGPSPHH

SEQ ID NO: 35962 - protein, 67 aa, Homo sapiens
  MAP TO AL034346.18; EXPRESSED IN PLACENTA, SIGNAL = 1.5; EXPRESSED IN HELA, SIGNAL = 1.1; EXPRESSED IN HEART, SIGNAL = 1.5; EXPRESSED IN BRAIN, SIGNAL = 1.1; EXPRESSED IN BT474, SIGNAL = 1.1; EXPRESSED IN HBL100, SIGNAL = 1.1; EXPRESSED IN LUNG, SIGNAL = 4.7; EXPRESSED IN BONE MARROW, SIGNAL = 1.4; EXPRESSED IN ADULT LIVER, SIGNAL = 1.5; EXPRESSED IN FETAL LIVER, SIGNAL = 1.6; EST_HUMAN HIT: BE390969.1, EVALUE 9.50e-01; SWISSPROT HIT: Q06355, EVALUE 2.50e+00
SQYDPNRAARDHADDRFSGAPSPQPQHSYGAIRKLRTQQLNIGNIRVPSMKLERGGIHDRKNPGAED

SEQ ID NO: 35963 - protein, 49 aa, Homo sapiens
  MAP TO AL109942.4; EXPRESSED IN BT474, SIGNAL = 2.3; EXPRESSED IN BONE MARROW, SIGNAL = 1.5; EXPRESSED IN LUNG, SIGNAL = 2.9; EXPRESSED IN FETAL LIVER, SIGNAL = 1.2; EXPRESSED IN PLACENTA, SIGNAL = 2.3; EXPRESSED IN HELA, SIGNAL = 2.3; EXPRESSED IN HBL100, SIGNAL = 1.3; EXPRESSED IN HEART, SIGNAL = 1.1; EXPRESSED IN ADULT LIVER, SIGNAL = 2.4; EXPRESSED IN BRAIN, SIGNAL =   2; EST_HUMAN HIT: BE707262.1, EVALUE 3.90e+00
FHSLPKIFSEAKEAMVFCRGVSDFQIQVPLLFGPTSSHYHRANEGELDV

SEQ ID NO: 35964 - protein, 134 aa, Homo sapiens
  MAP TO AL049692.11; EXPRESSED IN LUNG, SIGNAL = 9.3; EXPRESSED IN BT474, SIGNAL = 1.3; EXPRESSED IN PLACENTA, SIGNAL = 1.3; EXPRESSED IN BRAIN, SIGNAL = 2.2; EXPRESSED IN BONE MARROW, SIGNAL =   2; EXPRESSED IN ADULT LIVER, SIGNAL = 1.9; EXPRESSED IN FETAL LIVER, SIGNAL = 2.3; EXPRESSED IN HEART, SIGNAL = 2.8; EXPRESSED IN HELA, SIGNAL = 1.4; EXPRESSED IN HBL100, SIGNAL = 1.6; SWISSPROT HIT: O33915, EVALUE 6.50e-01; EST_HUMAN HIT: BE267331.1, EVALUE 5.20e-02
DAHPPLVVAAAQHVPLAKEKAHKEAELCGCLGGDSPACRKGSATIAAEHQDGPENLRRTATMPAVVTLSQSKAHVMGWQEPRALPRRLTCQKENEVEKHEKQDRQRSHREQSLAVTPTVSSSRPQEPTRHSHQM

SEQ ID NO: 35965 - protein, 17 aa, Homo sapiens
  MAP TO AL121656.1; EXPRESSED IN BONE MARROW, SIGNAL = 1.2; EXPRESSED IN LUNG, SIGNAL = 3.8; EXPRESSED IN ADULT LIVER, SIGNAL = 1.2; EXPRESSED IN PLACENTA, SIGNAL = 1.3; EXPRESSED IN BRAIN, SIGNAL = 1.2; EXPRESSED IN FETAL LIVER, SIGNAL = 1.7; EXPRESSED IN BT474, SIGNAL = 3.1; EXPRESSED IN HEART, SIGNAL = 3.3; EXPRESSED IN HELA, SIGNAL = 1.1; EXPRESSED IN HBL100, SIGNAL = 1.1
LESDNLGLESGSAAYYC

SEQ ID NO: 35966 - protein, 36 aa, Homo sapiens
  MAP TO AL096775.9; EXPRESSED IN PLACENTA, SIGNAL = 9.9; EXPRESSED IN HBL100, SIGNAL = 6.5; EXPRESSED IN HELA, SIGNAL = 8.5; EXPRESSED IN HEART, SIGNAL =  11; EXPRESSED IN BONE MARROW, SIGNAL =  11; EXPRESSED IN LUNG, SIGNAL =  11; EXPRESSED IN BRAIN, SIGNAL =   8; EXPRESSED IN ADULT LIVER, SIGNAL = 9.3; EXPRESSED IN BT474, SIGNAL = 4.7; EXPRESSED IN FETAL LIVER, SIGNAL = 9.1
CTFLESGGRGGRKGEEEGPSSSVGGPGHSPTTDCPR

SEQ ID NO: 35967 - protein, 31 aa, Homo sapiens
  MAP TO AL118555.1; EXPRESSED IN BONE MARROW, SIGNAL = 1.8; EXPRESSED IN BT474, SIGNAL = 1.4; EXPRESSED IN FETAL LIVER, SIGNAL = 1.1; EXPRESSED IN HEART, SIGNAL = 1.7; EXPRESSED IN BRAIN, SIGNAL =   1; EXPRESSED IN LUNG, SIGNAL = 1.7; EXPRESSED IN ADULT LIVER, SIGNAL = 1.4; EXPRESSED IN PLACENTA, SIGNAL = 1.5; EXPRESSED IN HELA, SIGNAL = 1.3; EXPRESSED IN HBL100, SIGNAL = 1.4; SWISSPROT HIT: Q61151, EVALUE 7.00e-12; EST_HUMAN HIT: BE929768.1, EVALUE 3.00e-10
RDYLKTVLHRIYGKFLGLRAFIRKQINNIFL

SEQ ID NO: 35968 - protein, 46 aa, Homo sapiens
  MAP TO AL096776.9; EXPRESSED IN BONE MARROW, SIGNAL = 4.3; EXPRESSED IN LUNG, SIGNAL = 9.3; EXPRESSED IN BRAIN, SIGNAL =   3; EXPRESSED IN BT474, SIGNAL = 2.3; EXPRESSED IN PLACENTA, SIGNAL = 5.2; EXPRESSED IN HBL100, SIGNAL = 2.5; EXPRESSED IN HEART, SIGNAL = 5.2; EXPRESSED IN ADULT LIVER, SIGNAL = 4.3; EXPRESSED IN FETAL LIVER, SIGNAL = 3.7; EXPRESSED IN HELA, SIGNAL = 4.1; EST_HUMAN HIT: AV741999.1, EVALUE 1.10e-02; SWISSPROT HIT: Q92968, EVALUE 3.50e+00
TKVTCLDPRIQRLGKQKHKLTVKSSKYQKHNRSRSFMTLKLEAEIA

SEQ ID NO: 35969 - protein, 19 aa, Homo sapiens
  MAP TO AL023755.5; EXPRESSED IN HBL100, SIGNAL = 0.92; EXPRESSED IN HEART, SIGNAL = 0.98; EXPRESSED IN LUNG, SIGNAL = 2.9; EXPRESSED IN FETAL LIVER, SIGNAL = 1.1; EXPRESSED IN BT474, SIGNAL = 1.7; EXPRESSED IN HELA, SIGNAL = 0.94; EST_HUMAN HIT: AA127077.1, EVALUE 2.20e-01
KENWENYFIKAQKSATSHC

SEQ ID NO: 35970 - protein, 53 aa, Homo sapiens
  MAP TO AL118512.2; EXPRESSED IN HBL100, SIGNAL = 0.92; EXPRESSED IN HEART, SIGNAL = 0.91; EXPRESSED IN LUNG, SIGNAL = 2.5; EXPRESSED IN FETAL LIVER, SIGNAL = 1.2; EXPRESSED IN BT474, SIGNAL = 1.1; EST_HUMAN HIT: F00969.1, EVALUE 3.00e-04; SWISSPROT HIT: Q62234, EVALUE 2.00e-05
PPSVIGPKSENLTVVVNNFISLTCEVSGFPPPDLSWLKNEQPIKLNTNTLIVP

SEQ ID NO: 35971 - protein, 168 aa, Homo sapiens
  MAP TO AC007688.15; EXPRESSED IN HBL100, SIGNAL = 1.3; EXPRESSED IN HELA, SIGNAL =  30; EXPRESSED IN HEART, SIGNAL = 0.88; EXPRESSED IN BRAIN, SIGNAL = 5.6; EXPRESSED IN BT474, SIGNAL =  44; EXPRESSED IN LUNG, SIGNAL = 1.7; EXPRESSED IN BONE MARROW, SIGNAL = 1.1; EXPRESSED IN ADULT LIVER, SIGNAL = 7.6; EXPRESSED IN FETAL LIVER, SIGNAL =  13; EST_HUMAN HIT: BE378525.1, EVALUE 5.00e-76; SWISSPROT HIT: P10660, EVALUE 1.00e-76
MKLNISFPVTGCQKLIEVDDECKLRTFYEKLMATEVAADTLGEEWKGYVVRISGGNNKQGFPMKQGVLTHGRVHLLLSKGHSCYRPRRTGERKRKSVRGCIVDANLSILNLIIVKKKKKVKKDIPGLTDTMVPCRLGPKKASRICKLSNLSEEDDVRQYVVRKPSNKG

SEQ ID NO: 35972 - protein, 29 aa, Homo sapiens
  MAP TO AL008723.8; EXPRESSED IN HBL100, SIGNAL = 4.9; EXPRESSED IN HELA, SIGNAL = 3.7; EXPRESSED IN HEART, SIGNAL = 4.9; EXPRESSED IN LUNG, SIGNAL = 3.5; EXPRESSED IN BT474, SIGNAL =   5; EXPRESSED IN PLACENTA, SIGNAL = 4.7; EXPRESSED IN BRAIN, SIGNAL = 3.8; EXPRESSED IN BONE MARROW, SIGNAL = 5.7; EXPRESSED IN ADULT LIVER, SIGNAL = 4.6; EXPRESSED IN FETAL LIVER, SIGNAL = 4.1; EST_HUMAN HIT: BF348283.1, EVALUE 6.00e-09; SWISSPROT HIT: Q10570, EVALUE 1.00e-06
TGMAFMVDRQLYIHQMISVRNFILAADLM

SEQ ID NO: 35973 - protein, 57 aa, Homo sapiens
  MAP TO AL096773.6; EXPRESSED IN FETAL LIVER, SIGNAL = 2.1; EXPRESSED IN ADULT LIVER, SIGNAL = 1.9; EXPRESSED IN PLACENTA, SIGNAL = 5.8; EXPRESSED IN HELA, SIGNAL = 6.6; EXPRESSED IN HEART, SIGNAL =   5; EXPRESSED IN BRAIN, SIGNAL = 2.2; EXPRESSED IN BT474, SIGNAL =  10; EXPRESSED IN HBL100, SIGNAL = 5.8; EXPRESSED IN LUNG, SIGNAL = 4.5; EXPRESSED IN BONE MARROW, SIGNAL =   3; EST_HUMAN HIT: AU125309.1, EVALUE 2.00e-26; SWISSPROT HIT: O75534, EVALUE 2.00e-27
PKELPFGDKDTKSKVTLLEGDHVRFNISTDRRDKLERATNIEVLSNTFQFTNEAREM

SEQ ID NO: 35974 - protein, 53 aa, Homo sapiens
  MAP TO AF181450.1; EXPRESSED IN BRAIN, SIGNAL = 1.5; EXPRESSED IN BONE MARROW, SIGNAL = 1.2; EXPRESSED IN LUNG, SIGNAL = 1.3; EXPRESSED IN BT474, SIGNAL = 1.1; EXPRESSED IN FETAL LIVER, SIGNAL = 0.9; EXPRESSED IN ADULT LIVER, SIGNAL =   1; EXPRESSED IN HEART, SIGNAL = 6.9; EST_HUMAN HIT: BF478161.1, EVALUE 5.00e-10; SWISSPROT HIT: Q06455, EVALUE 4.00e-11
GQTLQAQQQGDTPAVSSSVTPNSGAGSPMDTPPAATPRSTTPGTPSTIETTPR

SEQ ID NO: 35975 - protein, 35 aa, Homo sapiens
  MAP TO AF181450.1; EXPRESSED IN BRAIN, SIGNAL = 1.5; EXPRESSED IN BONE MARROW, SIGNAL = 1.2; EXPRESSED IN LUNG, SIGNAL = 1.3; EXPRESSED IN BT474, SIGNAL = 1.1; EXPRESSED IN FETAL LIVER, SIGNAL = 0.9; EXPRESSED IN ADULT LIVER, SIGNAL =   1; EXPRESSED IN HEART, SIGNAL = 6.9; SWISSPROT HIT: O15303, EVALUE 8.20e+00; EST_HUMAN HIT: BF478161.1, EVALUE 7.00e-15
AAGGVSIGLPAPLLGVTEELTAGVSPCCWACRVCP

SEQ ID NO: 35976 - protein, 56 aa, Homo sapiens
  MAP TO AL096867.15; EXPRESSED IN ADULT LIVER, SIGNAL = 1.2; EXPRESSED IN HELA, SIGNAL = 1.8; EXPRESSED IN HEART, SIGNAL = 1.4; EXPRESSED IN LUNG, SIGNAL = 1.3; SWISSPROT HIT: Q09358, EVALUE 4.50e+00
IPFSEEITEIMEKTISMNKLCEVLRAIAKPNQIKIQINNSCRMIMKIKMPSLSCIL

SEQ ID NO: 35977 - protein, 17 aa, Homo sapiens
  MAP TO AC011457.1; EXPRESSED IN BRAIN, SIGNAL = 8.4; EXPRESSED IN BONE MARROW, SIGNAL = 7.5; EXPRESSED IN LUNG, SIGNAL = 5.5; EXPRESSED IN BT474, SIGNAL = 7.4; EXPRESSED IN ADULT LIVER, SIGNAL =   5; EXPRESSED IN FETAL LIVER, SIGNAL = 5.4; EXPRESSED IN HBL100, SIGNAL = 6.7; EXPRESSED IN HELA, SIGNAL = 5.6; EXPRESSED IN PLACENTA, SIGNAL = 9.9; EXPRESSED IN HEART, SIGNAL = 3.9; EST_HUMAN HIT: AA361275.1, EVALUE 1.10e+00
VSCQYEQSDVESTENDD

SEQ ID NO: 35978 - protein, 90 aa, Homo sapiens
  MAP TO AC011457.1; EXPRESSED IN BRAIN, SIGNAL = 8.4; EXPRESSED IN BONE MARROW, SIGNAL = 7.5; EXPRESSED IN LUNG, SIGNAL = 5.5; EXPRESSED IN BT474, SIGNAL = 7.4; EXPRESSED IN ADULT LIVER, SIGNAL =   5; EXPRESSED IN FETAL LIVER, SIGNAL = 5.4; EXPRESSED IN HBL100, SIGNAL = 6.7; EXPRESSED IN HELA, SIGNAL = 5.6; EXPRESSED IN PLACENTA, SIGNAL = 9.9; EXPRESSED IN HEART, SIGNAL = 3.9; EST_HUMAN HIT: AW949650.1, EVALUE 1.00e-34; SWISSPROT HIT: Q14585, EVALUE 2.00e-35
HLKVHYRIHTGEKPYACKECGKTFSHRSQLIQHQTVHTGRKLYECKECGKAFNQGSTLIRHQRIHTGEKPYECKVCGKAFRVSSQLKQHQ

SEQ ID NO: 35979 - protein, 65 aa, Homo sapiens
  MAP TO AF179633.1; EXPRESSED IN HEART, SIGNAL = 0.86; EXPRESSED IN BRAIN, SIGNAL = 1.1; EXPRESSED IN BONE MARROW, SIGNAL =  38; EXPRESSED IN LUNG, SIGNAL = 2.8; EXPRESSED IN FETAL LIVER, SIGNAL = 1.1; EXPRESSED IN ADULT LIVER, SIGNAL = 1.1; SWISSPROT HIT: O62829, EVALUE 4.50e+00; EST_HUMAN HIT: BE079241.1, EVALUE 3.70e+00
DPNHAAIWSQELTKIYPLQLEGEKLENELFLQVVCHGVWELANRGSQELMTVQKICKPVIEHCHD

SEQ ID NO: 35980 - protein, 96 aa, Homo sapiens
  MAP TO AC000026.3; EXPRESSED IN HBL100, SIGNAL = 5.1; EXPRESSED IN HELA, SIGNAL = 4.6; EXPRESSED IN HEART, SIGNAL = 3.6; EXPRESSED IN LUNG, SIGNAL = 2.2; EXPRESSED IN ADULT LIVER, SIGNAL =   3; EXPRESSED IN PLACENTA, SIGNAL =   4; EXPRESSED IN BRAIN, SIGNAL = 3.8; EXPRESSED IN BONE MARROW, SIGNAL = 3.7; EXPRESSED IN FETAL LIVER, SIGNAL = 2.4; EXPRESSED IN BT474, SIGNAL =   5; SWISSPROT HIT: P52303, EVALUE 7.00e-44; EST_HUMAN HIT: AU140744.1, EVALUE 9.00e-41
LIPPLPWPMAGSPQDCEDPNPLIRALAVRTMGCIRVDKITEYLCEPLRKCLKDEDPYVRKTAAVCVAKLHDINAQLVEDQGFLDTLKDLISDSNPM

SEQ ID NO: 35981 - protein, 37 aa, Homo sapiens
  MAP TO AB020863.1; EXPRESSED IN ADULT LIVER, SIGNAL = 3.9; EXPRESSED IN BT474, SIGNAL = 2.5; EXPRESSED IN FETAL LIVER, SIGNAL = 4.8; EXPRESSED IN PLACENTA, SIGNAL = 5.5; EXPRESSED IN HELA, SIGNAL = 2.5; EXPRESSED IN HEART, SIGNAL = 1.2; EXPRESSED IN LUNG, SIGNAL = 6.7; EST_HUMAN HIT: AI026966.1, EVALUE 6.00e-14
INIERTKAKVSFKRDIYEKVTLIYRTLPSPAVVDRKY

SEQ ID NO: 35982 - protein, 58 aa, Homo sapiens
  MAP TO AF181895.1; EXPRESSED IN HBL100, SIGNAL =   5; EXPRESSED IN HEART, SIGNAL = 1.1; EXPRESSED IN BRAIN, SIGNAL = 1.3; EXPRESSED IN BONE MARROW, SIGNAL =   1; EXPRESSED IN LUNG, SIGNAL = 2.4; EXPRESSED IN BT474, SIGNAL = 1.7; EXPRESSED IN ADULT LIVER, SIGNAL = 1.3; EXPRESSED IN FETAL LIVER, SIGNAL = 0.97; EST_HUMAN HIT: AW878571.1, EVALUE 1.60e-01; SWISSPROT HIT: Q15491, EVALUE 4.00e-30
MPEPQTEDGRTPGLVGLAVPCCACLEAERLRGCLNSEKICIVPILACLVSLCLCIAGL

SEQ ID NO: 35983 - protein, 100 aa, Homo sapiens
  MAP TO AL078638.6; EXPRESSED IN BONE MARROW, SIGNAL = 1.6; EXPRESSED IN BRAIN, SIGNAL = 1.8; EXPRESSED IN ADULT LIVER, SIGNAL = 1.4; EXPRESSED IN BT474, SIGNAL = 1.8; EXPRESSED IN FETAL LIVER, SIGNAL = 1.4; EXPRESSED IN PLACENTA, SIGNAL = 3.7; EXPRESSED IN HELA, SIGNAL = 1.7; EXPRESSED IN HBL100, SIGNAL = 2.4; EXPRESSED IN HEART, SIGNAL =  10; EXPRESSED IN LUNG, SIGNAL = 9.3; SWISSPROT HIT: Q13642, EVALUE 2.00e-29; EST_HUMAN HIT: N56922.1, EVALUE 3.00e-33
PSSYKVGTMAEKFDCHYCRDPLQGKKYVQKDGHHCCLKCFDKFCANTCVECRKPIGADSKVTGIPMCQWEGLGFGVSFAHNHGSSSWLLGFPSITAATLR

SEQ ID NO: 35984 - protein, 24 aa, Homo sapiens
  MAP TO AC007919.18; EXPRESSED IN HEART, SIGNAL = 0.9; EXPRESSED IN LUNG, SIGNAL = 2.1; EXPRESSED IN BRAIN, SIGNAL =   1; EXPRESSED IN BONE MARROW, SIGNAL = 1.2; EXPRESSED IN ADULT LIVER, SIGNAL = 0.94; EXPRESSED IN FETAL LIVER, SIGNAL = 0.91; EST_HUMAN HIT: AI478104.1, EVALUE 2.00e-05; SWISSPROT HIT: Q07636, EVALUE 1.70e+00
GIPEGVVVIGGDSSMHVTARLSLR

SEQ ID NO: 35985 - protein, 80 aa, Homo sapiens
  MAP TO AC010854.1; EXPRESSED IN PLACENTA, SIGNAL = 7.1; EXPRESSED IN HELA, SIGNAL = 5.7; EXPRESSED IN BONE MARROW, SIGNAL = 6.5; EXPRESSED IN BT474, SIGNAL = 3.2; EXPRESSED IN HBL100, SIGNAL = 3.8; EXPRESSED IN HEART, SIGNAL = 5.2; EXPRESSED IN BRAIN, SIGNAL = 5.3; EXPRESSED IN LUNG, SIGNAL =  11; EXPRESSED IN ADULT LIVER, SIGNAL = 8.3; EXPRESSED IN FETAL LIVER, SIGNAL = 3.9; EST_HUMAN HIT: BE005637.1, EVALUE 3.00e-25; SWISSPROT HIT: P22158, EVALUE 1.90e+00
WKELALLQMRLWTWTFELKLECVKTLGDCWKGMIVFLKCEDMRFWSGQRWNDTVWLCPHPNLILNCSSHNPHMLWEEPDE

SEQ ID NO: 35986 - protein, 70 aa, Homo sapiens; identical to SEQ ID NO: 33329
  MAP TO AP000506.1; EXPRESSED IN BT474, SIGNAL = 4.6; EXPRESSED IN FETAL LIVER, SIGNAL = 2.2; EXPRESSED IN ADULT LIVER, SIGNAL = 1.6; EXPRESSED IN PLACENTA, SIGNAL = 4.1; EXPRESSED IN BONE MARROW, SIGNAL = 3.3; EXPRESSED IN HELA, SIGNAL = 6.6; EXPRESSED IN HBL100, SIGNAL =   6; EXPRESSED IN HEART, SIGNAL = 2.2; EXPRESSED IN BRAIN, SIGNAL = 1.5; EXPRESSED IN LUNG, SIGNAL = 9.8; SWISSPROT HIT: Q13838, EVALUE 4.00e-36; EST_HUMAN HIT: T31710.1, EVALUE 5.00e-35

SEQ ID NO: 35987 - protein, 60 aa, Homo sapiens
  MAP TO AC011408.1; EXPRESSED IN LUNG, SIGNAL = 5.7; EXPRESSED IN BRAIN, SIGNAL = 1.3; EXPRESSED IN BT474, SIGNAL = 1.5; EXPRESSED IN ADULT LIVER, SIGNAL = 2.1; EXPRESSED IN PLACENTA, SIGNAL = 1.7; EXPRESSED IN BONE MARROW, SIGNAL = 1.7; EXPRESSED IN FETAL LIVER, SIGNAL = 1.1; EXPRESSED IN HEART, SIGNAL = 1.4; EXPRESSED IN HELA, SIGNAL = 0.96; EXPRESSED IN HBL100, SIGNAL = 1.5; EST_HUMAN HIT: BE617047.1, EVALUE 2.00e-12
FLVCCRVKQHGCSQPSPHGSRASQAHPGYLGYCPHHPGHHCHHDLVVAVPSHCSNHLSHA

SEQ ID NO: 35988 - protein, 40 aa, Homo sapiens
  MAP TO AL079338.9; EXPRESSED IN HBL100, SIGNAL = 0.99; EXPRESSED IN HEART, SIGNAL = 0.92; EXPRESSED IN LUNG, SIGNAL = 1.9; EXPRESSED IN BONE MARROW, SIGNAL = 1.4; EXPRESSED IN BRAIN, SIGNAL = 1.2; EXPRESSED IN ADULT LIVER, SIGNAL = 1.1; EXPRESSED IN BT474, SIGNAL = 1.1; EST_HUMAN HIT: BF541030.1, EVALUE 7.00e-17; SWISSPROT HIT: P14336, EVALUE 3.60e+00
LSCLDPHLLHWEMKSVIILMVSGWVLREEDAKMEAEVQDK

SEQ ID NO: 35989 - protein, 28 aa, Homo sapiens
  MAP TO AL079338.9; EXPRESSED IN HBL100, SIGNAL = 0.99; EXPRESSED IN HEART, SIGNAL = 0.92; EXPRESSED IN LUNG, SIGNAL = 1.9; EXPRESSED IN BONE MARROW, SIGNAL = 1.4; EXPRESSED IN BRAIN, SIGNAL = 1.2; EXPRESSED IN ADULT LIVER, SIGNAL = 1.1; EXPRESSED IN BT474, SIGNAL = 1.1; EST_HUMAN HIT: AI392661.1, EVALUE 1.40e-02
SFLPGSPPPPLGNEECNNTDGVRLGLEG

SEQ ID NO: 35990 - protein, 19 aa, Homo sapiens
  MAP TO AF152363.1; EXPRESSED IN BT474, SIGNAL =  90; EXPRESSED IN FETAL LIVER, SIGNAL =  20; EXPRESSED IN ADULT LIVER, SIGNAL =   8; EXPRESSED IN PLACENTA, SIGNAL =  11; EXPRESSED IN HEART, SIGNAL =  10; EXPRESSED IN BONE MARROW, SIGNAL = 9.8; EXPRESSED IN HELA, SIGNAL =  81; EXPRESSED IN HBL100, SIGNAL =  26; EXPRESSED IN BRAIN, SIGNAL = 7.8; EXPRESSED IN LUNG, SIGNAL =  17; EST_HUMAN HIT: AI243224.1, EVALUE 1.00e-03
KGTRKTWNPKGTAVKAQRF

SEQ ID NO: 35991 - protein, 67 aa, Homo sapiens
  MAP TO AC005082.2; EXPRESSED IN BT474, SIGNAL = 1.9; EXPRESSED IN HBL100, SIGNAL = 1.5; EXPRESSED IN HELA, SIGNAL = 1.1; EXPRESSED IN HEART, SIGNAL = 3.2; EXPRESSED IN LUNG, SIGNAL = 7.9; EXPRESSED IN FETAL LIVER, SIGNAL = 2.1; EST_HUMAN HIT: T07303.1, EVALUE 2.00e-34; SWISSPROT HIT: Q04652, EVALUE 2.00e-05
GLDNVEYYDIKLNEWKMVSPMPWKGVTVKCAAVGSIVYVLAGFQGVGRLGHILEYNTETDKWVANSK

SEQ ID NO: 35992 - protein, 24 aa, Homo sapiens
  MAP TO AC009406.1; EXPRESSED IN FETAL LIVER, SIGNAL = 3.1; EXPRESSED IN ADULT LIVER, SIGNAL = 6.5; EXPRESSED IN PLACENTA, SIGNAL = 7.4; EXPRESSED IN HELA, SIGNAL =  19; EXPRESSED IN HEART, SIGNAL = 3.5; EXPRESSED IN BRAIN, SIGNAL = 2.6; EXPRESSED IN BT474, SIGNAL = 1.4; EXPRESSED IN HBL100, SIGNAL = 2.6; EXPRESSED IN LUNG, SIGNAL =  11; EXPRESSED IN BONE MARROW, SIGNAL = 3.3; EST_HUMAN HIT: BE866607.1, EVALUE 2.00e-04
MLPDCLRSPVDHHGRRALGNSHSG

SEQ ID NO: 35993 - protein, 46 aa, Homo sapiens
  MAP TO AP000343.1; EXPRESSED IN BONE MARROW, SIGNAL = 2.5; EXPRESSED IN LUNG, SIGNAL = 9.6; EXPRESSED IN BT474, SIGNAL = 6.3; EXPRESSED IN FETAL LIVER, SIGNAL = 2.8; EXPRESSED IN ADULT LIVER, SIGNAL = 1.8; EXPRESSED IN HBL100, SIGNAL = 3.9; EXPRESSED IN HELA, SIGNAL = 4.3; EXPRESSED IN PLACENTA, SIGNAL = 5.1; EXPRESSED IN HEART, SIGNAL = 2.4; EXPRESSED IN BRAIN, SIGNAL = 2.6; EST_HUMAN HIT: BF531091.1, EVALUE 7.00e-19; SWISSPROT HIT: P11274, EVALUE 5.00e-20
RERSKVPYIVRQCVEEIERRGMEEVGIYRVSGVATDIQALKAAFDV

SEQ ID NO: 35994 - protein, 36 aa, Homo sapiens
  MAP TO AP000343.1; EXPRESSED IN BONE MARROW, SIGNAL = 2.5; EXPRESSED IN LUNG, SIGNAL = 9.6; EXPRESSED IN BT474, SIGNAL = 6.3; EXPRESSED IN FETAL LIVER, SIGNAL = 2.8; EXPRESSED IN ADULT LIVER, SIGNAL = 1.8; EXPRESSED IN HBL100, SIGNAL = 3.9; EXPRESSED IN HELA, SIGNAL = 4.3; EXPRESSED IN PLACENTA, SIGNAL = 5.1; EXPRESSED IN HEART, SIGNAL = 2.4; EXPRESSED IN BRAIN, SIGNAL = 2.6; EST_HUMAN HIT: AW593895.1, EVALUE 7.00e-05
PRCPTSCASAWRRSSAEAWRRWASTACPVWPRTSRH

SEQ ID NO: 35995 - protein, 34 aa, Homo sapiens
  MAP TO AC007690.11; EXPRESSED IN BONE MARROW, SIGNAL =  14; EXPRESSED IN LUNG, SIGNAL =  31; EXPRESSED IN BT474, SIGNAL =  76; EXPRESSED IN ADULT LIVER, SIGNAL =   6; EXPRESSED IN PLACENTA, SIGNAL =  17; EXPRESSED IN BRAIN, SIGNAL = 3.5; EXPRESSED IN FETAL LIVER, SIGNAL =  14; EXPRESSED IN HEART, SIGNAL =  14; EXPRESSED IN HELA, SIGNAL =  28; EXPRESSED IN HBL100, SIGNAL =  25; EST_HUMAN HIT: BF035038.1, EVALUE 4.00e-11; SWISSPROT HIT: P17075, EVALUE 7.00e-12
MAFKDTGKAPVEPEVAIHRIRITLTSRSVKSLEK

SEQ ID NO: 35996 - protein, 52 aa, Homo sapiens
  MAP TO AL034422.18; EXPRESSED IN FETAL LIVER, SIGNAL = 2.7; EXPRESSED IN ADULT LIVER, SIGNAL = 1.4; EXPRESSED IN PLACENTA, SIGNAL = 9.3; EXPRESSED IN HBL100, SIGNAL = 5.2; EXPRESSED IN HELA, SIGNAL =  12; EXPRESSED IN HEART, SIGNAL = 2.6; EXPRESSED IN BT474, SIGNAL =   3; EXPRESSED IN BRAIN, SIGNAL = 1.1; EXPRESSED IN LUNG, SIGNAL = 6.3; EXPRESSED IN BONE MARROW, SIGNAL = 2.1; EST_HUMAN HIT: AW579225.1, EVALUE 2.00e-23; SWISSPROT HIT: P04844, EVALUE 2.00e-24
TFVRLHNQKTGQEVVFVAEPDNKNVYKFELDTSERKIEFDSASGTYTLYLII

SEQ ID NO: 35997 - protein, 59 aa, Homo sapiens
  MAP TO AL034422.18; EXPRESSED IN FETAL LIVER, SIGNAL = 2.7; EXPRESSED IN ADULT LIVER, SIGNAL = 1.4; EXPRESSED IN PLACENTA, SIGNAL = 9.3; EXPRESSED IN HBL100, SIGNAL = 5.2; EXPRESSED IN HELA, SIGNAL =  12; EXPRESSED IN HEART, SIGNAL = 2.6; EXPRESSED IN BT474, SIGNAL =   3; EXPRESSED IN BRAIN, SIGNAL = 1.1; EXPRESSED IN LUNG, SIGNAL = 6.3; EXPRESSED IN BONE MARROW, SIGNAL = 2.1; SWISSPROT HIT: Q01107, EVALUE 8.80e-01; EST_HUMAN HIT: R62350.1, EVALUE 2.00e-23
MKDCIILPSRHLSDSITRRLARKWCLLPSQTTRTCTSLNWIPLKERLNLTLPLAPTLST

SEQ ID NO: 35998 - protein, 106 aa, Homo sapiens
  MAP TO AL031685.15; EXPRESSED IN FETAL LIVER, SIGNAL = 2.5; EXPRESSED IN ADULT LIVER, SIGNAL = 2.4; EXPRESSED IN PLACENTA, SIGNAL = 2.2; EXPRESSED IN HELA, SIGNAL = 2.2; EXPRESSED IN HEART, SIGNAL = 2.2; EXPRESSED IN BRAIN, SIGNAL = 2.2; EXPRESSED IN BT474, SIGNAL = 1.9; EXPRESSED IN HBL100, SIGNAL = 2.8; EXPRESSED IN LUNG, SIGNAL = 5.1; EXPRESSED IN BONE MARROW, SIGNAL = 2.9; EST_HUMAN HIT: BE384874.1, EVALUE 5.00e-49
MDTKFKDDLFRKYVQFHESKVDTTTSRQRPGSDECLRVAASTLLSLHKVDPFYRFRLIQFYEVVESSLRSLSSSSLRALHGAFSMLETVGINLFLYPWKKEFRSIK

SEQ ID NO: 35999 - protein, 21 aa, Homo sapiens
  MAP TO AL031685.15; EXPRESSED IN FETAL LIVER, SIGNAL = 2.5; EXPRESSED IN ADULT LIVER, SIGNAL = 2.4; EXPRESSED IN PLACENTA, SIGNAL = 2.2; EXPRESSED IN HELA, SIGNAL = 2.2; EXPRESSED IN HEART, SIGNAL = 2.2; EXPRESSED IN BRAIN, SIGNAL = 2.2; EXPRESSED IN BT474, SIGNAL = 1.9; EXPRESSED IN HBL100, SIGNAL = 2.8; EXPRESSED IN LUNG, SIGNAL = 5.1; EXPRESSED IN BONE MARROW, SIGNAL = 2.9; EST_HUMAN HIT: BE384874.1, EVALUE 6.00e-08
CGWQPQPCSACTRWIPFIDSG

SEQ ID NO: 36000 - protein, 156 aa, Homo sapiens
  MAP TO AL034380.21; EXPRESSED IN HBL100, SIGNAL = 1.3; EXPRESSED IN HELA, SIGNAL = 1.1; EXPRESSED IN HEART, SIGNAL = 0.9; EXPRESSED IN BRAIN, SIGNAL = 1.2; EXPRESSED IN BONE MARROW, SIGNAL = 0.98; EXPRESSED IN LUNG, SIGNAL = 2.1; EXPRESSED IN BT474, SIGNAL = 1.9; EXPRESSED IN FETAL LIVER, SIGNAL = 1.3; EXPRESSED IN ADULT LIVER, SIGNAL = 1.2; EST_HUMAN HIT: AI813708.1, EVALUE 2.00e-42; SWISSPROT HIT: Q09712, EVALUE 5.00e-08
VFTLGLPFALFQYYAYTQFCLPGSARPIPEPLVQLAVDKGYRIAEGNEPPWCFWDVPLIYSYIQDVYWNVGFLKYYELKQVPNFLLAAPVAILVAWATWTYVTTHPWLCLTLGLQRSKNNKTLEKPDLGFLSPQVFVYVVHAAVLLLFGGLCMHVQ

SEQ ID NO: 36001 - protein, 34 aa, Homo sapiens
  MAP TO AL034380.21; EXPRESSED IN HBL100, SIGNAL = 1.3; EXPRESSED IN HELA, SIGNAL = 1.1; EXPRESSED IN HEART, SIGNAL = 0.9; EXPRESSED IN BRAIN, SIGNAL = 1.2; EXPRESSED IN BONE MARROW, SIGNAL = 0.98; EXPRESSED IN LUNG, SIGNAL = 2.1; EXPRESSED IN BT474, SIGNAL = 1.9; EXPRESSED IN FETAL LIVER, SIGNAL = 1.3; EXPRESSED IN ADULT LIVER, SIGNAL = 1.2; EST_HUMAN HIT: AA078328.1, EVALUE 1.30e+00
CSHLAFPLPSFSIMPTPNSVCQAQPAPFLSLWYS

SEQ ID NO: 36002 - protein, 31 aa, Homo sapiens
  MAP TO AF146367.1; EXPRESSED IN ADULT LIVER, SIGNAL = 2.9; EXPRESSED IN BT474, SIGNAL = 9.1; EXPRESSED IN FETAL LIVER, SIGNAL = 2.3; EXPRESSED IN PLACENTA, SIGNAL = 2.2; EXPRESSED IN HBL100, SIGNAL = 2.3; EXPRESSED IN HELA, SIGNAL = 2.5; EXPRESSED IN HEART, SIGNAL = 2.2; EXPRESSED IN BONE MARROW, SIGNAL = 3.2; EXPRESSED IN LUNG, SIGNAL = 1.2; EXPRESSED IN BRAIN, SIGNAL = 2.5; EST_HUMAN HIT: BE730035.1, EVALUE 6.00e-02
PLVAGPLLPPLEEAGPPRNSLGHCDYHQDDA

SEQ ID NO: 36003 - protein, 136 aa, Homo sapiens
  MAP TO AL009030.4; EXPRESSED IN PLACENTA, SIGNAL = 5.8; EXPRESSED IN HEART, SIGNAL = 1.7; EXPRESSED IN BRAIN, SIGNAL = 3.1; EXPRESSED IN BONE MARROW, SIGNAL = 6.5; EXPRESSED IN LUNG, SIGNAL = 5.1; EXPRESSED IN BT474, SIGNAL = 2.7; EXPRESSED IN ADULT LIVER, SIGNAL =  11; EXPRESSED IN FETAL LIVER, SIGNAL = 4.9; EXPRESSED IN HBL100, SIGNAL = 3.3; EXPRESSED IN HELA, SIGNAL = 5.4; SWISSPROT HIT: Q03372, EVALUE 3.80e-01; EST_HUMAN HIT: BF377897.1, EVALUE 8.00e-38
APTMDAQQDRPKSQDSLGLLAPLASAAEVPSTAPVSGKKHRPPGPLFSSSDPLPATSYHSRDTAQVTSLIPATFTAASRDAGMRRTRSAPAAATAAPPPSTLNNTSGSLLNAVDGGPSHFLASATAAARAQRSEVR

SEQ ID NO: 36004 - protein, 26 aa, Homo sapiens
  MAP TO AL009030.4; EXPRESSED IN PLACENTA, SIGNAL = 5.8; EXPRESSED IN HEART, SIGNAL = 1.7; EXPRESSED IN BRAIN, SIGNAL = 3.1; EXPRESSED IN BONE MARROW, SIGNAL = 6.5; EXPRESSED IN LUNG, SIGNAL = 5.1; EXPRESSED IN BT474, SIGNAL = 2.7; EXPRESSED IN ADULT LIVER, SIGNAL =  11; EXPRESSED IN FETAL LIVER, SIGNAL = 4.9; EXPRESSED IN HBL100, SIGNAL = 3.3; EXPRESSED IN HELA, SIGNAL = 5.4; EST_HUMAN HIT: AW630166.1, EVALUE 1.00e-08
ISLLTSGHVLQLWLRPRNVRGLHPLH

SEQ ID NO: 36005 - protein, 23 aa, Homo sapiens
  MAP TO AL035414.18; EXPRESSED IN BT474, SIGNAL = 7.7; EXPRESSED IN FETAL LIVER, SIGNAL = 4.9; EXPRESSED IN HBL100, SIGNAL = 7.6; EXPRESSED IN HELA, SIGNAL =  12; EXPRESSED IN HEART, SIGNAL = 5.2; EXPRESSED IN LUNG, SIGNAL = 5.8; EXPRESSED IN ADULT LIVER, SIGNAL = 6.4; EXPRESSED IN PLACENTA, SIGNAL = 7.1; EXPRESSED IN BRAIN, SIGNAL = 4.3; EXPRESSED IN BONE MARROW, SIGNAL = 9.7; EST_HUMAN HIT: AU132044.1, EVALUE 1.60e-02
TGSECSIHQGNALPERVGGEHGG

SEQ ID NO: 36006 - protein, 33 aa, Homo sapiens
  MAP TO AC009974.2; EXPRESSED IN BRAIN, SIGNAL = 5.8; EXPRESSED IN BONE MARROW, SIGNAL =  13; EXPRESSED IN LUNG, SIGNAL =  28; EXPRESSED IN ADULT LIVER, SIGNAL = 7.6; EXPRESSED IN BT474, SIGNAL =  52; EXPRESSED IN FETAL LIVER, SIGNAL =  15; EXPRESSED IN PLACENTA, SIGNAL =  21; EXPRESSED IN HBL100, SIGNAL =  25; EXPRESSED IN HELA, SIGNAL =  47; EXPRESSED IN HEART, SIGNAL = 7.7; EST_HUMAN HIT: BE388436.1, EVALUE 2.00e-11
PNQGVDLGHINVIELLHSPCDLVLVGFNIHNEH

SEQ ID NO: 36007 - protein, 99 aa, Homo sapiens
  MAP TO AL078639.3; EXPRESSED IN PLACENTA, SIGNAL = 1.2; EXPRESSED IN HEART, SIGNAL = 3.2; EXPRESSED IN BRAIN, SIGNAL =  34; EXPRESSED IN BONE MARROW, SIGNAL = 0.94; EXPRESSED IN LUNG, SIGNAL = 8.3; EXPRESSED IN BT474, SIGNAL =   6; EXPRESSED IN FETAL LIVER, SIGNAL = 7.4; EST_HUMAN HIT: H18350.1, EVALUE 9.90e-01
SKKSGSSRKSVSSSKSTSSNKAMSSRLSMSSRKSLSSLKSIASEKSRSSRKSVSSSKSTSSNKAMSSIKLMSSSLLVSSNKGTSSNKGTSSNKGMSSNK

SEQ ID NO: 36008 - protein, 142 aa, Homo sapiens
  MAP TO AL078639.3; EXPRESSED IN PLACENTA, SIGNAL = 1.2; EXPRESSED IN HEART, SIGNAL = 3.2; EXPRESSED IN BRAIN, SIGNAL =  34; EXPRESSED IN BONE MARROW, SIGNAL = 0.94; EXPRESSED IN LUNG, SIGNAL = 8.3; EXPRESSED IN BT474, SIGNAL =   6; EXPRESSED IN FETAL LIVER, SIGNAL = 7.4; EST_HUMAN HIT: W26363.1, EVALUE 3.00e-59; SWISSPROT HIT: P19228, EVALUE 5.00e-03
FQKIRVFQEIRVFQQVHVFQQSHVFQTIHVFQKILVFPQIHSFRKIQVFQEIRVFQQIHVFQQSHVFHQINVFQPTCVFQQRYVFQQRYVFQQRYVFQQRYVFQKIHVFQPSHVFQKIHVFQKIYVFQLSYVFQQIHVFLYL

SEQ ID NO: 36009 - protein, 30 aa, Homo sapiens
  MAP TO AP000506.1; EXPRESSED IN HELA, SIGNAL = 2.6; EXPRESSED IN HBL100, SIGNAL = 0.93; EXPRESSED IN HEART, SIGNAL =   1; EXPRESSED IN BRAIN, SIGNAL = 1.2; EXPRESSED IN BONE MARROW, SIGNAL = 1.3; EXPRESSED IN LUNG, SIGNAL = 9.2; EXPRESSED IN BT474, SIGNAL = 1.2; EXPRESSED IN FETAL LIVER, SIGNAL =   1; EXPRESSED IN ADULT LIVER, SIGNAL =   1; EST_HUMAN HIT: AW961093.1, EVALUE 9.00e-15
SEGGAVWPCCGTHWSYHHLHQPRAAGHKEC

SEQ ID NO: 36010 - protein, 46 aa, Homo sapiens
  MAP TO AL109956.8; EXPRESSED IN ADULT LIVER, SIGNAL = 7.9; EXPRESSED IN BT474, SIGNAL = 3.4; EXPRESSED IN FETAL LIVER, SIGNAL = 3.3; EXPRESSED IN HELA, SIGNAL = 6.2; EXPRESSED IN PLACENTA, SIGNAL = 7.9; EXPRESSED IN HBL100, SIGNAL = 3.4; EXPRESSED IN HEART, SIGNAL = 4.6; EXPRESSED IN BONE MARROW, SIGNAL = 6.9; EXPRESSED IN BRAIN, SIGNAL = 2.6; EXPRESSED IN LUNG, SIGNAL = 6.1; EST_HUMAN HIT: AW173044.1, EVALUE 1.40e-01
PAVAIVSLTLRPPCFSVENRVLGILVSEACEPEQLHLKQELEMRLK

SEQ ID NO: 36011 - protein, 49 aa, Homo sapiens
  MAP TO AC010739.2; EXPRESSED IN HEART, SIGNAL = 5.5; EXPRESSED IN BRAIN, SIGNAL =   4; EXPRESSED IN BONE MARROW, SIGNAL = 5.6; EXPRESSED IN LUNG, SIGNAL = 3.6; EXPRESSED IN ADULT LIVER, SIGNAL = 6.2; EXPRESSED IN BT474, SIGNAL = 3.3; EXPRESSED IN FETAL LIVER, SIGNAL = 3.1; EXPRESSED IN PLACENTA, SIGNAL = 6.9; EXPRESSED IN HBL100, SIGNAL = 3.6; EXPRESSED IN HELA, SIGNAL = 6.1; EST_HUMAN HIT: AI884381.1, EVALUE 5.00e-18; SWISSPROT HIT: O52847, EVALUE 2.70e+00
QFWTFGFTPVVCQGLLGVWPQTEGCTVGFRTFEVLGLRLIHHWLSCSSS

SEQ ID NO: 36012 - protein, 49 aa, Homo sapiens
  MAP TO AC010739.2; EXPRESSED IN HEART, SIGNAL = 5.5; EXPRESSED IN BRAIN, SIGNAL =   4; EXPRESSED IN BONE MARROW, SIGNAL = 5.6; EXPRESSED IN LUNG, SIGNAL = 3.6; EXPRESSED IN ADULT LIVER, SIGNAL = 6.2; EXPRESSED IN BT474, SIGNAL = 3.3; EXPRESSED IN FETAL LIVER, SIGNAL = 3.1; EXPRESSED IN PLACENTA, SIGNAL = 6.9; EXPRESSED IN HBL100, SIGNAL = 3.6; EXPRESSED IN HELA, SIGNAL = 6.1; EST_HUMAN HIT: AI884381.1, EVALUE 9.00e-16; SWISSPROT HIT: O59736, EVALUE 1.20e+00
QLEEQESQWWISLSPKTSKVRKPTVQPSVCGQTPKSPWQTTGVNPKVQN

SEQ ID NO: 36013 - protein, 32 aa, Homo sapiens
  MAP TO AL034396.6; EXPRESSED IN HELA, SIGNAL =  14; EXPRESSED IN PLACENTA, SIGNAL =  22; EXPRESSED IN HBL100, SIGNAL =  20; EXPRESSED IN HEART, SIGNAL = 2.2; EXPRESSED IN BRAIN, SIGNAL = 2.6; EXPRESSED IN BONE MARROW, SIGNAL =   3; EXPRESSED IN LUNG, SIGNAL = 7.2; EXPRESSED IN BT474, SIGNAL =  38; EXPRESSED IN ADULT LIVER, SIGNAL =   4; EXPRESSED IN FETAL LIVER, SIGNAL = 3.1; EST_HUMAN HIT: T15351.1, EVALUE 4.00e-05; SWISSPROT HIT: P05787, EVALUE 2.00e-05
SGMEVITAVMVNQSLLSPINLEVDLNIQAMHT

SEQ ID NO: 36014 - protein, 141 aa, Homo sapiens
  MAP TO AC011242.1; EXPRESSED IN HEART, SIGNAL =   1; EXPRESSED IN LUNG, SIGNAL = 2.2; EXPRESSED IN BONE MARROW, SIGNAL =   1; EXPRESSED IN ADULT LIVER, SIGNAL = 1.2; EXPRESSED IN BT474, SIGNAL = 1.1; EXPRESSED IN FETAL LIVER, SIGNAL = 1.1; SWISSPROT HIT: P17290, EVALUE 4.20e-01; EST_HUMAN HIT: AW451832.1, EVALUE 7.00e-54
VVGFDASTTVEEFLNTLNQDTGMRKPAQSGFALFTDDPSGRDLEHCLQGNIKVKPSPFQEPSPTNSKEATLYKKSKLCKKFNSGVFQNFNQSNLHDKKKKMQDFVKPIEFLIHNLYIYTFHIKERKGVSNGNDTLSIRIIR

SEQ ID NO: 36015 - protein, 76 aa, Homo sapiens
  MAP TO AC007038.3; EXPRESSED IN PLACENTA, SIGNAL = 8.1; EXPRESSED IN HBL100, SIGNAL =  10; EXPRESSED IN BONE MARROW, SIGNAL = 4.1; EXPRESSED IN FETAL LIVER, SIGNAL = 6.7; EXPRESSED IN HELA, SIGNAL = 9.2; EXPRESSED IN HEART, SIGNAL = 4.2; EXPRESSED IN BRAIN, SIGNAL = 3.2; EXPRESSED IN LUNG, SIGNAL = 7.5; EXPRESSED IN BT474, SIGNAL = 9.6; EXPRESSED IN ADULT LIVER, SIGNAL = 5.9; EST_HUMAN HIT: AI276526.1, EVALUE 1.00e-40; SWISSPROT HIT: P49790, EVALUE 1.70e+00
SLWWERRAFPLKGEDMAALLCQDEKKDQVERSSTAFHGEIFGTSVPENGHHPKKQSDGMEEYKTFGLGLTNVKKNR

SEQ ID NO: 36016 - protein, 62 aa, Homo sapiens
  MAP TO AC008053.1; EXPRESSED IN ADULT LIVER, SIGNAL = 0.91; EXPRESSED IN PLACENTA, SIGNAL = 1.1; EXPRESSED IN HEART, SIGNAL = 0.97; EST_HUMAN HIT: BE176836.1, EVALUE 1.00e-30; SWISSPROT HIT: P79400, EVALUE 3.40e+00
LLEHACPPTMSNTEMCIMKNIKQLFLMYIIPYSITFSMSSLYQFLCALYRDHIIFCCTAIIT

SEQ ID NO: 36017 - protein, 35 aa, Homo sapiens
  MAP TO AC007678.1; EXPRESSED IN HBL100, SIGNAL = 1.3; EXPRESSED IN HEART, SIGNAL = 1.4; EXPRESSED IN LUNG, SIGNAL = 2.5; EXPRESSED IN BONE MARROW, SIGNAL = 2.5; EXPRESSED IN BRAIN, SIGNAL = 1.4; EXPRESSED IN ADULT LIVER, SIGNAL = 2.1; EXPRESSED IN BT474, SIGNAL = 1.3; EXPRESSED IN FETAL LIVER, SIGNAL = 1.5; EXPRESSED IN PLACENTA, SIGNAL = 1.7; EXPRESSED IN HELA, SIGNAL = 1.5
SLSTLGHGSPKGSSTPPPSLGRHWLKTPRSFLPET

SEQ ID NO: 36018 - protein, 44 aa, Homo sapiens
  MAP TO AC004975.2; EXPRESSED IN ADULT LIVER, SIGNAL = 1.5; EXPRESSED IN PLACENTA, SIGNAL = 1.8; EXPRESSED IN HBL100, SIGNAL = 1.1; EXPRESSED IN HEART, SIGNAL = 1.4; EXPRESSED IN BONE MARROW, SIGNAL = 2.1; EXPRESSED IN FETAL LIVER, SIGNAL = 2.3; EXPRESSED IN HELA, SIGNAL = 2.6; EXPRESSED IN BRAIN, SIGNAL = 1.4; EXPRESSED IN LUNG, SIGNAL = 6.1; EST_HUMAN HIT: AI144487.1, EVALUE 4.00e-03; SWISSPROT HIT: P14181, EVALUE 1.60e+00
QNAIQASVIQPFFASYSSAELYQEGVLIQTPKEGSRISRKKEFE

SEQ ID NO: 36019 - protein, 41 aa, Homo sapiens
  MAP TO AC008080.1; EXPRESSED IN PLACENTA, SIGNAL = 2.2; EXPRESSED IN HELA, SIGNAL = 5.2; EXPRESSED IN BONE MARROW, SIGNAL = 2.1; EXPRESSED IN BRAIN, SIGNAL = 2.2; EXPRESSED IN BT474, SIGNAL = 1.3; EXPRESSED IN HEART, SIGNAL = 2.1; EXPRESSED IN HBL100, SIGNAL = 1.5; EXPRESSED IN LUNG, SIGNAL = 2.4; EXPRESSED IN ADULT LIVER, SIGNAL = 2.7; EXPRESSED IN FETAL LIVER, SIGNAL = 1.8; EST_HUMAN HIT: AU123713.1, EVALUE 7.10e+00
EAKHLLAYLRFSDRRAFGPCIPFKSSYLGFHKIECERRSSL

SEQ ID NO: 36020 - protein, 54 aa, Homo sapiens
  MAP TO AC006323.3; EXPRESSED IN BRAIN, SIGNAL = 0.99; EXPRESSED IN BT474, SIGNAL = 2.8; EXPRESSED IN ADULT LIVER, SIGNAL = 0.94; EXPRESSED IN HEART, SIGNAL = 0.97; EXPRESSED IN PLACENTA, SIGNAL = 1.6; EXPRESSED IN BONE MARROW, SIGNAL = 0.96; EXPRESSED IN FETAL LIVER, SIGNAL = 0.98; EXPRESSED IN HELA, SIGNAL = 1.4; EXPRESSED IN HBL100, SIGNAL = 1.2; SWISSPROT HIT: Q13616, EVALUE 2.00e-25; EST_HUMAN HIT: AU130517.1, EVALUE 3.00e-24
AEARLLEEQRRVQVYLHESTQDELARKCEQVLIEKHLEIFHTEFQNLLDADKNE

SEQ ID NO: 36021 - protein, 32 aa, Homo sapiens
  MAP TO AC009405.2; EXPRESSED IN HBL100, SIGNAL = 0.93; EXPRESSED IN HELA, SIGNAL = 0.93; EXPRESSED IN PLACENTA, SIGNAL = 1.1; EXPRESSED IN BONE MARROW, SIGNAL =   1; EXPRESSED IN ADULT LIVER, SIGNAL = 1.3; EXPRESSED IN BT474, SIGNAL =   1; EXPRESSED IN HEART, SIGNAL = 1.1; EST_HUMAN HIT: BE245928.1, EVALUE 9.00e-08
MMDWIHWGHPRMTGSKTFDKKATGCRWPPCSW

SEQ ID NO: 36022 - protein, 56 aa, Homo sapiens
  MAP TO AC004938.2; EXPRESSED IN LUNG, SIGNAL = 2.4; EXPRESSED IN BRAIN, SIGNAL = 1.6; EXPRESSED IN BT474, SIGNAL =   4; EXPRESSED IN FETAL LIVER, SIGNAL = 2.1; EXPRESSED IN ADULT LIVER, SIGNAL = 2.3; EXPRESSED IN PLACENTA, SIGNAL = 2.7; EXPRESSED IN BONE MARROW, SIGNAL =   2; EXPRESSED IN HEART, SIGNAL = 2.4; EXPRESSED IN HELA, SIGNAL = 2.8; EXPRESSED IN HBL100, SIGNAL = 2.2; SWISSPROT HIT: P42305, EVALUE 2.00e-02; EST_HUMAN HIT: BE264394.1, EVALUE 4.00e-16
AVLMEKPDVVVGTPSRILSHLQQDSLKLRDSLELLVVDEADLLFSFGFEEELKSLL

SEQ ID NO: 36023 - protein, 25 aa, Homo sapiens
  MAP TO AC007970.3; EXPRESSED IN FETAL LIVER, SIGNAL = 1.2; EXPRESSED IN ADULT LIVER, SIGNAL =   2; EXPRESSED IN PLACENTA, SIGNAL = 1.6; EXPRESSED IN HBL100, SIGNAL = 1.5; EXPRESSED IN HELA, SIGNAL = 1.6; EXPRESSED IN BRAIN, SIGNAL = 1.2; EXPRESSED IN BT474, SIGNAL = 1.5; EXPRESSED IN HEART, SIGNAL = 1.8; EXPRESSED IN LUNG, SIGNAL = 1.6; EXPRESSED IN BONE MARROW, SIGNAL = 1.8
LLSPLPSPTLSINVDPDVRLHLPPT

SEQ ID NO: 36024 - protein, 55 aa, Homo sapiens
  MAP TO AC005095.2; EXPRESSED IN FETAL LIVER, SIGNAL = 1.4; EXPRESSED IN ADULT LIVER, SIGNAL = 2.1; EXPRESSED IN PLACENTA, SIGNAL = 1.3; EXPRESSED IN HELA, SIGNAL = 1.2; EXPRESSED IN BT474, SIGNAL = 1.2; EXPRESSED IN HEART, SIGNAL = 1.1; EXPRESSED IN HBL100, SIGNAL = 1.4; EXPRESSED IN BRAIN, SIGNAL = 1.1; EXPRESSED IN LUNG, SIGNAL = 2.1; EXPRESSED IN BONE MARROW, SIGNAL = 1.9; EST_HUMAN HIT: AW996316.1, EVALUE 1.00e-13; SWISSPROT HIT: Q9ZCN6, EVALUE 1.30e-01
DPPQEEPQAGPSGGIPEEGTVIIGDDSSMHVTAPEDLPLGQVEEVEDSDIDDQEA

SEQ ID NO: 36025 - protein, 23 aa, Homo sapiens
  MAP TO AC005095.2; EXPRESSED IN FETAL LIVER, SIGNAL = 1.4; EXPRESSED IN ADULT LIVER, SIGNAL = 2.1; EXPRESSED IN PLACENTA, SIGNAL = 1.3; EXPRESSED IN HELA, SIGNAL = 1.2; EXPRESSED IN BT474, SIGNAL = 1.2; EXPRESSED IN HEART, SIGNAL = 1.1; EXPRESSED IN HBL100, SIGNAL = 1.4; EXPRESSED IN BRAIN, SIGNAL = 1.1; EXPRESSED IN LUNG, SIGNAL = 2.1; EXPRESSED IN BONE MARROW, SIGNAL = 1.9
VTLLKKNHKQDLQEEFQKKALLS

SEQ ID NO: 36026 - protein, 104 aa, Homo sapiens
  MAP TO AC008119.6; EXPRESSED IN BONE MARROW, SIGNAL = 4.1; EXPRESSED IN LUNG, SIGNAL = 4.9; EXPRESSED IN FETAL LIVER, SIGNAL = 2.8; EXPRESSED IN ADULT LIVER, SIGNAL = 3.8; EXPRESSED IN PLACENTA, SIGNAL = 3.2; EXPRESSED IN HELA, SIGNAL = 4.3; EXPRESSED IN BT474, SIGNAL = 2.6; EXPRESSED IN HEART, SIGNAL = 3.5; EXPRESSED IN HBL100, SIGNAL = 2.5; EXPRESSED IN BRAIN, SIGNAL = 3.4; EST_HUMAN HIT: AU124928.1, EVALUE 7.00e-35; SWISSPROT HIT: Q98936, EVALUE 1.80e+00
MATAAETSASEPEAESKAGPKADGEEDEVKAARTRRKVLSRAVAAATYKTMGPAWDQQEEGVSESDGDEYAMASSAESSPGEYEWEYDEEEEKNQLEIERLEEQ

SEQ ID NO: 36027 - protein, 61 aa, Homo sapiens
  MAP TO AL021807.1; EXPRESSED IN HELA, SIGNAL = 1.1; EXPRESSED IN BRAIN, SIGNAL = 1.3; EXPRESSED IN BONE MARROW, SIGNAL = 1.3; EXPRESSED IN LUNG, SIGNAL = 3.9; EXPRESSED IN FETAL LIVER, SIGNAL = 1.8; EXPRESSED IN PLACENTA, SIGNAL = 0.94; EXPRESSED IN HBL100, SIGNAL =   1; EXPRESSED IN HEART, SIGNAL = 1.1; EST_HUMAN HIT: BF572039.1, EVALUE 1.60e+00; SWISSPROT HIT: P16763, EVALUE 4.40e+00
ELSKQASTESGLLLRADTGMLMRLQLRSPTSVCLFSNPERKTVGSSCARACACLTECWRGN

SEQ ID NO: 36028 - protein, 23 aa, Homo sapiens
  MAP TO AC011309.1; EXPRESSED IN ADULT LIVER, SIGNAL = 2.7; EXPRESSED IN BT474, SIGNAL = 2.3e+02; EXPRESSED IN FETAL LIVER, SIGNAL = 2.8; EXPRESSED IN HELA, SIGNAL = 2.4; EXPRESSED IN HEART, SIGNAL = 3.3; EXPRESSED IN PLACENTA, SIGNAL = 3.2; EXPRESSED IN HBL100, SIGNAL = 3.2; EXPRESSED IN BRAIN, SIGNAL = 2.6; EXPRESSED IN BONE MARROW, SIGNAL = 2.7; EXPRESSED IN LUNG, SIGNAL = 1.3
IWDDDDDDDDDDDDDDDDDKGLR

SEQ ID NO: 36029 - protein, 32 aa, Homo sapiens
  MAP TO AC011309.1; EXPRESSED IN ADULT LIVER, SIGNAL = 2.7; EXPRESSED IN BT474, SIGNAL = 2.3e+02; EXPRESSED IN FETAL LIVER, SIGNAL = 2.8; EXPRESSED IN HELA, SIGNAL = 2.4; EXPRESSED IN HEART, SIGNAL = 3.3; EXPRESSED IN PLACENTA, SIGNAL = 3.2; EXPRESSED IN HBL100, SIGNAL = 3.2; EXPRESSED IN BRAIN, SIGNAL = 2.6; EXPRESSED IN BONE MARROW, SIGNAL = 2.7; EXPRESSED IN LUNG, SIGNAL = 1.3
SSSSSSSSSSSHISWTSHPQVIALIWRVNITG

SEQ ID NO: 36030 - protein, 100 aa, Homo sapiens
  MAP TO AC010966.1; EXPRESSED IN FETAL LIVER, SIGNAL = 2.3; EXPRESSED IN BT474, SIGNAL = 5.8; EXPRESSED IN HELA, SIGNAL = 5.3; EXPRESSED IN PLACENTA, SIGNAL =  14; EXPRESSED IN HBL100, SIGNAL = 5.5; EXPRESSED IN LUNG, SIGNAL = 3.1; EXPRESSED IN BRAIN, SIGNAL = 2.8; EXPRESSED IN BONE MARROW, SIGNAL = 4.7; EXPRESSED IN ADULT LIVER, SIGNAL = 3.4; EXPRESSED IN HEART, SIGNAL =   3; EST_HUMAN HIT: AU138248.1, EVALUE 1.00e-30; SWISSPROT HIT: P40618, EVALUE 4.00e-27
  unsure 92
  unsure 98
EFHPKIKFINPGISIGDMAKKLGKMRNNLNDSEKQPYTTKAAKLKEKYEKDVSDYKLKGKFDGEKGPAKVAQKKVEEEDEDEQDEKEEGGEXGGRRRXDE

SEQ ID NO: 36031 - protein, 100 aa, Homo sapiens
  MAP TO AC011382.1; EXPRESSED IN HEART, SIGNAL = 1.2; EXPRESSED IN PLACENTA, SIGNAL = 2.9; EXPRESSED IN LUNG, SIGNAL = 2.4; EXPRESSED IN ADULT LIVER, SIGNAL =   1; EST_HUMAN HIT: AW605347.1, EVALUE 5.00e-09; SWISSPROT HIT: P09619, EVALUE 1.00e-38
SPDLFTAPLLADPTVGFLPNDAEELFIFLTEITEITIPCRVTDPQLVVTLHEKKGDVALPVPYDHQRGFSGIFEDRSYICKTTIGDREVDSDAYYVYRLQ

SEQ ID NO: 36032 - protein, 32 aa, Homo sapiens
  MAP TO AC011382.1; EXPRESSED IN HEART, SIGNAL = 1.2; EXPRESSED IN PLACENTA, SIGNAL = 2.9; EXPRESSED IN LUNG, SIGNAL = 2.4; EXPRESSED IN ADULT LIVER, SIGNAL =   1; EST_HUMAN HIT: BE616855.1, EVALUE 3.40e+00
VPLIYSRLHSWQIPPWASSLMMPRNYSSFSRK

SEQ ID NO: 36033 - protein, 65 aa, Homo sapiens
  MAP TO AL118516.6; EXPRESSED IN BRAIN, SIGNAL = 1.3; EXPRESSED IN BT474, SIGNAL = 0.95; EXPRESSED IN HELA, SIGNAL = 0.96; EXPRESSED IN PLACENTA, SIGNAL = 0.96; EXPRESSED IN LUNG, SIGNAL = 3.5; EXPRESSED IN BONE MARROW, SIGNAL = 1.7; EXPRESSED IN ADULT LIVER, SIGNAL = 1.4; EXPRESSED IN FETAL LIVER, SIGNAL = 0.93; EXPRESSED IN HEART, SIGNAL = 1.1; SWISSPROT HIT: Q17134, EVALUE 9.10e-02; EST_HUMAN HIT: BE151562.1, EVALUE 8.00e-03
SQPCHSALLPSPHEHGPQHLLQLPSHRCHPDTAPFNCDAVKACPGHATAALEHPYLSGRQSPPSP

SEQ ID NO: 36034 - protein, 63 aa, Homo sapiens
  MAP TO AL049822.17; EXPRESSED IN PLACENTA, SIGNAL = 1.5; EXPRESSED IN BONE MARROW, SIGNAL = 1.9; EXPRESSED IN LUNG, SIGNAL =   1; EXPRESSED IN BRAIN, SIGNAL = 2.3; EXPRESSED IN ADULT LIVER, SIGNAL = 1.4; EXPRESSED IN FETAL LIVER, SIGNAL = 1.6; EXPRESSED IN BT474, SIGNAL = 2.1; EXPRESSED IN HEART, SIGNAL = 1.3; EXPRESSED IN HELA, SIGNAL = 0.97; EXPRESSED IN HBL100, SIGNAL = 1.3
HLLPTTVEGNSSRRGGGKKKKKAPFFSRGWFRSIDLWVMGPARFRCATLLTENTLLLFLFIMQ

SEQ ID NO: 36035 - protein, 136 aa, Homo sapiens [sequence omitted]

SEQ ID NO: 36036 - protein, 35 aa, Homo sapiens
  MAP TO AL109798.8; EXPRESSED IN ADULT LIVER, SIGNAL = 7.4; EXPRESSED IN PLACENTA, SIGNAL = 8.8; EXPRESSED IN BONE MARROW, SIGNAL = 8.6; EXPRESSED IN LUNG, SIGNAL = 6.1; EXPRESSED IN BRAIN, SIGNAL = 6.8; EXPRESSED IN FETAL LIVER, SIGNAL = 6.5; EXPRESSED IN BT474, SIGNAL =  13; EXPRESSED IN HEART, SIGNAL = 8.2; EXPRESSED IN HELA, SIGNAL = 7.1; EXPRESSED IN HBL100, SIGNAL =  10
SIGNVISFNFITSSSSLETRSMVGIKIFTFVLVGR

SEQ ID NO: 36037 - protein, 43 aa, Homo sapiens
  MAP TO AL109798.8; EXPRESSED IN ADULT LIVER, SIGNAL = 7.4; EXPRESSED IN PLACENTA, SIGNAL = 8.8; EXPRESSED IN BONE MARROW, SIGNAL = 8.6; EXPRESSED IN LUNG, SIGNAL = 6.1; EXPRESSED IN BRAIN, SIGNAL = 6.8; EXPRESSED IN FETAL LIVER, SIGNAL = 6.5; EXPRESSED IN BT474, SIGNAL =  13; EXPRESSED IN HEART, SIGNAL = 8.2; EXPRESSED IN HELA, SIGNAL = 7.1; EXPRESSED IN HBL100, SIGNAL =  10
LGDLVWQSIGPKRRCGSLLLLLLLLLQQLFARAQLLCKESSGC

SEQ ID NO: 36038 - protein, 42 aa, Homo sapiens
  MAP TO AL118496.4; EXPRESSED IN HELA, SIGNAL = 4.6; EXPRESSED IN HEART, SIGNAL = 6.7; EXPRESSED IN BRAIN, SIGNAL = 2.8; EXPRESSED IN BONE MARROW, SIGNAL =   3; EXPRESSED IN LUNG, SIGNAL = 3.4; EXPRESSED IN ADULT LIVER, SIGNAL =   5; EXPRESSED IN BT474, SIGNAL = 3.5; EXPRESSED IN FETAL LIVER, SIGNAL = 3.9; EXPRESSED IN PLACENTA, SIGNAL = 6.3; EXPRESSED IN HBL100, SIGNAL = 3.6
KYVCEKYGGSWLVLSSNFTHWNMKNWTCENVALIPEEVRRTA

SEQ ID NO: 36039 - protein, 40 aa, Homo sapiens
  MAP TO AL049692.11; EXPRESSED IN HELA, SIGNAL = 1.2; EXPRESSED IN PLACENTA, SIGNAL = 0.94; EXPRESSED IN HBL100, SIGNAL = 1.2; EXPRESSED IN HEART, SIGNAL = 1.4; EXPRESSED IN BRAIN, SIGNAL = 1.5; EXPRESSED IN BONE MARROW, SIGNAL = 1.7; EXPRESSED IN LUNG, SIGNAL = 1.5; EXPRESSED IN BT474, SIGNAL = 1.4; EXPRESSED IN ADULT LIVER, SIGNAL = 1.3; EXPRESSED IN FETAL LIVER, SIGNAL =   2; EST_HUMAN HIT: BE512862.1, EVALUE 6.30e-01
MLDCALFVATFLISARGKRGQSTGLGSEDLVPSIFFSTNE

SEQ ID NO: 36040 - protein, 38 aa, Homo sapiens
  MAP TO AL049692.11; EXPRESSED IN HELA, SIGNAL = 1.2; EXPRESSED IN PLACENTA, SIGNAL = 0.94; EXPRESSED IN HBL100, SIGNAL = 1.2; EXPRESSED IN HEART, SIGNAL = 1.4; EXPRESSED IN BRAIN, SIGNAL = 1.5; EXPRESSED IN BONE MARROW, SIGNAL = 1.7; EXPRESSED IN LUNG, SIGNAL = 1.5; EXPRESSED IN BT474, SIGNAL = 1.4; EXPRESSED IN ADULT LIVER, SIGNAL = 1.3; EXPRESSED IN FETAL LIVER, SIGNAL =   2; EST_HUMAN HIT: AW300726.1, EVALUE 1.70e+00
AGLCFVCGHFSDLSQGKEGTEHWTWVRRPGSKYLLLHQ

SEQ ID NO: 36041 - protein, 99 aa, Homo sapiens
  MAP TO AL049812.3; EXPRESSED IN LUNG, SIGNAL = 2.3; EXPRESSED IN ADULT LIVER, SIGNAL = 1.3; EXPRESSED IN BT474, SIGNAL = 1.6; EXPRESSED IN FETAL LIVER, SIGNAL = 1.1; EXPRESSED IN HELA, SIGNAL =   1; EXPRESSED IN PLACENTA, SIGNAL = 1.3; EXPRESSED IN HBL100, SIGNAL = 1.4; EXPRESSED IN HEART, SIGNAL = 1.7; EXPRESSED IN BONE MARROW, SIGNAL = 1.6; EXPRESSED IN BRAIN, SIGNAL = 1.7; EST_HUMAN HIT: BE743126.1, EVALUE 1.60e-01; SWISSPROT HIT: Q9UKP4, EVALUE 7.60e+00
EWRRCVFCSSTSWKRLRLLGVTALLPPATSFRGLWHQTFAVWTSVTLRCSLGHKRGPPSSHLTCMGLRPQPFCTPSPAWALTVQHSLAGQLCPQQFLIK

SEQ ID NO: 36042 - protein, 55 aa, Homo sapiens
  MAP TO AL050332.15; EXPRESSED IN BT474, SIGNAL = 4.8; EXPRESSED IN FETAL LIVER, SIGNAL = 8.4; EXPRESSED IN ADULT LIVER, SIGNAL =  12; EXPRESSED IN HELA, SIGNAL = 7.9; EXPRESSED IN PLACENTA, SIGNAL = 9.8; EXPRESSED IN HBL100, SIGNAL = 4.9; EXPRESSED IN HEART, SIGNAL = 8.5; EXPRESSED IN BRAIN, SIGNAL = 7.1; EXPRESSED IN BONE MARROW, SIGNAL = 7.6; EXPRESSED IN LUNG, SIGNAL = 5.8; SWISSPROT HIT: P40349, EVALUE 5.90e+00
RSLRQKMRGRRRTNATGQAKLVAAGGEGAGTLEERNDACANEDPCRETGGTSASW

SEQ ID NO: 36043 - protein, 277 aa, Homo sapiens
  MAP TO AF124523.1; EXPRESSED IN BONE MARROW, SIGNAL =  15; EXPRESSED IN HELA, SIGNAL =  19; EXPRESSED IN LUNG, SIGNAL =  15; EXPRESSED IN BRAIN, SIGNAL =  14; EXPRESSED IN BT474, SIGNAL =  38; EXPRESSED IN ADULT LIVER, SIGNAL = 7.6; EXPRESSED IN FETAL LIVER, SIGNAL =  17; EXPRESSED IN PLACENTA, SIGNAL =  17; EXPRESSED IN HEART, SIGNAL = 9.6; EXPRESSED IN HBL100, SIGNAL =  27; SWISSPROT HIT: P52742, EVALUE 1.00e-113; EST_HUMAN HIT: AV725534.1, EVALUE 1.00e-118
ECLECRKAFTQLSHLIQHQRIHTGERPYVCPLCGKAFNHSTVLRSHQRVHTGEKPHRCNECGKTFSVKRTLLQHQRIHTGEKPYTCSECGKAFSDRSVLIQHHNVHTGEKPYECSECGKTFSHRSTLMNHERIHTEEKPYACYECGKAFVQHSHLIQHQRVHTGEKPYVCGECGHAFSARRSLIQHERIHTGEKPFQCTECGKAFSLKATLIVHLRTHTGEKPYECNSCGKAFSQYSVLIQHQRIHTGEKPYECGECGRAFNQHGHLIQHQKVHRKL

SEQ ID NO: 36044 - protein, 66 aa, Homo sapiens
  MAP TO AF124523.1; EXPRESSED IN BONE MARROW, SIGNAL =  15; EXPRESSED IN HELA, SIGNAL =  19; EXPRESSED IN LUNG, SIGNAL =  15; EXPRESSED IN BRAIN, SIGNAL =  14; EXPRESSED IN BT474, SIGNAL =  38; EXPRESSED IN ADULT LIVER, SIGNAL = 7.6; EXPRESSED IN FETAL LIVER, SIGNAL =  17; EXPRESSED IN PLACENTA, SIGNAL =  17; EXPRESSED IN HEART, SIGNAL = 9.6; EXPRESSED IN HBL100, SIGNAL =  27; EST_HUMAN HIT: BE885790.1, EVALUE 2.00e-32; SWISSPROT HIT: P31373, EVALUE 5.70e+00
NVLSVGKPSLNSHISFSTSGSTREKGHMCVRCVGKPSTIALFCGATRGYTLGRSLTGAMSVGKPSV

SEQ ID NO: 36045 - protein, 74 aa, Homo sapiens
  MAP TO Z83844.5; EXPRESSED IN BONE MARROW, SIGNAL = 7.6; EXPRESSED IN LUNG, SIGNAL = 7.8; EXPRESSED IN BRAIN, SIGNAL = 4.2; EXPRESSED IN ADULT LIVER, SIGNAL =   4; EXPRESSED IN BT474, SIGNAL =   2; EXPRESSED IN FETAL LIVER, SIGNAL = 4.1; EXPRESSED IN HELA, SIGNAL = 4.1; EXPRESSED IN PLACENTA, SIGNAL = 3.3; EXPRESSED IN HBL100, SIGNAL = 4.2; EXPRESSED IN HEART, SIGNAL = 3.1; EST_HUMAN HIT: BE312076.1, EVALUE 3.40e-02; SWISSPROT HIT: P28166, EVALUE 4.90e-01
LDTEMPPGRPRPPATPNLTPSPSSQTHQMPSISVSPPNTSPFSSLHLCVLGTEMHPGPPPHHARPQSLPSYSRT

SEQ ID NO: 36046 - protein, 49 aa, Homo sapiens
  MAP TO Z98744.1; EXPRESSED IN BONE MARROW, SIGNAL =   5; EXPRESSED IN FETAL LIVER, SIGNAL = 2.7; EXPRESSED IN HELA, SIGNAL = 2.1; EXPRESSED IN BRAIN, SIGNAL = 1.7; EXPRESSED IN LUNG, SIGNAL = 2.8; EXPRESSED IN BT474, SIGNAL = 8.8; EXPRESSED IN ADULT LIVER, SIGNAL = 0.93; EXPRESSED IN PLACENTA, SIGNAL = 1.8; EXPRESSED IN HEART, SIGNAL = 1.1; EXPRESSED IN HBL100, SIGNAL = 6.3; EST_HUMAN HIT: AI399887.1, EVALUE 7.00e-21; SWISSPROT HIT: P08898, EVALUE 5.00e-22
SAVMALQEACEAYLVGLFEDTNLCAIHAKRVTIMPKDIQLARRIRGERA

SEQ ID NO: 36047 - protein, 688 aa, Homo sapiens
  MAP TO AB023048.1; EXPRESSED IN PLACENTA, SIGNAL =   1; EXPRESSED IN HBL100, SIGNAL = 1.4; EXPRESSED IN HEART, SIGNAL = 1.1; EXPRESSED IN FETAL LIVER, SIGNAL = 1.5; EXPRESSED IN ADULT LIVER, SIGNAL = 1.5; EXPRESSED IN HELA, SIGNAL = 1.1; EXPRESSED IN BRAIN, SIGNAL =   2; EXPRESSED IN LUNG, SIGNAL = 4.7; EXPRESSED IN BONE MARROW, SIGNAL = 2.1; EXPRESSED IN BT474, SIGNAL = 1.4
SERTITSTEGSETTTVSATGSETTVSTEGSGTTTVSITGSETTKVSTTGSETTTTSTEGSEITTASITGSETTTASTEGSETTTASTEGSETTSASTTGSETTTASTTSSETTMASIMGSETTMASTIGSETTKVSTASSKMTTVFTENSETTIASTTASETTTVSTAGSETIPASTAGSETTTTTSTEGSETTTASTEGSETTTASTESSETTTATTIGSETTTASTEGSETTTTSTEGSETTTASTEGSEITTVSTTGSETTTASTEGSETTTASTEGSELTTVSTTGSETITVSAEGSETTTVTTMGSETTTASTAGSETTTVSTAGSETTTASIEGSETTTVSSTGSETTTVSTTGTETTITSTEGSETTTVTTAGSETTAVYTTGSETTTTSTEGSETTTVSTTGSETTTASTADLETTTVSTSGSGTTTASTAGSETTTVYITGSKTTTASTEGSEATTVSTTSSETTTASTTGSEMTTVFTTVSETTTVSTIGSEATTSSAAGSEATTTSTEGSETTTASTAGSETTTASTAGSETTTASTSGSETNTACTTGSETSTPSSAGSETNTAFIIGSESTIASTASLEPTATSLTGSETTTVSITASGATAASTTVSSTTFVLTKATDVSIQPITNTPMSGTNPHVFFEPTHFNSSGNHQLFTCFYHLCPGSSQASTQLDIISS

SEQ ID NO: 36048 - protein, 331 aa, Homo sapiens
  MAP TO AB023048.1; EXPRESSED IN PLACENTA, SIGNAL =   1; EXPRESSED IN HBL100, SIGNAL = 1.4; EXPRESSED IN HEART, SIGNAL = 1.1; EXPRESSED IN FETAL LIVER, SIGNAL = 1.5; EXPRESSED IN ADULT LIVER, SIGNAL = 1.5; EXPRESSED IN HELA, SIGNAL = 1.1; EXPRESSED IN BRAIN, SIGNAL =   2; EXPRESSED IN LUNG, SIGNAL = 4.7; EXPRESSED IN BONE MARROW, SIGNAL = 2.1; EXPRESSED IN BT474, SIGNAL = 1.4
TAGSETTVSTAGSETTAASTEDSETNTAFTEDSKTTTASTTGFETTAASTTGSEPTMASTMGSETTMASTIGPETTKVSTASSEVTTVFAAGSETIRASTVGSETTTVSTTGSETTTASIMGSETSTDSTTGSETTTASTEGSETTTASTEGSEATTVSTTGSETTTVSITDSETTTTCTEGSEMTAVSTTVFETTTASTEGSEITIASTSDSETTTASTEGSETTTVTTAGSETKTAYTTGSETTTASNTGLETTTVFTIGSDTTTASTEGSETTAVSATGSEMTTVSTEGSENTTVSTTGSETTTVSTTGLETTTTSTEGSEMTTVSTT

SEQ ID NO: 36049 - protein, 214 aa, Homo sapiens
  MAP TO AC011301.1; EXPRESSED IN BONE MARROW, SIGNAL = 2.8; EXPRESSED IN FETAL LIVER, SIGNAL = 1.7; EXPRESSED IN HELA, SIGNAL = 2.8; EXPRESSED IN BRAIN, SIGNAL = 5.4; EXPRESSED IN LUNG, SIGNAL = 3.4; EXPRESSED IN BT474, SIGNAL = 2.1; EXPRESSED IN ADULT LIVER, SIGNAL = 2.1; EXPRESSED IN PLACENTA, SIGNAL = 2.1; EXPRESSED IN HEART, SIGNAL =   2; EXPRESSED IN HBL100, SIGNAL = 2.7; EST_HUMAN HIT: BF530661.1, EVALUE 2.00e-15; SWISSPROT HIT: Q9QYC0, EVALUE 1.30e+00
NMNDRNYADSMSQQDSRNMNYVMLGKPMNNGLMEKMVEESDEEVCLSSLECLRNQCFDLARKLSETNPQERNPQQNMNIRQHVRPEEDFPGRTPDRNYSDMLNLMRLEEQLSPRSRVFASCAKEDGCHERDDDTTSVNSDRSEEVFDMTKGNLTLLEKAIALETERAKAMREKMAMEAGRRDNMRSYEDQSPRQLPGEDRKPKSSDSHVKKPYY

SEQ ID NO: 36050 - protein, 186 aa, Homo sapiens
  MAP TO AC011309.1; EXPRESSED IN PLACENTA, SIGNAL =  72; EXPRESSED IN HBL100, SIGNAL =  59; EXPRESSED IN HEART, SIGNAL = 2.9; EXPRESSED IN FETAL LIVER, SIGNAL = 7.7; EXPRESSED IN ADULT LIVER, SIGNAL = 8.8; EXPRESSED IN HELA, SIGNAL =  44; EXPRESSED IN BRAIN, SIGNAL = 5.5; EXPRESSED IN LUNG, SIGNAL =  16; EXPRESSED IN BONE MARROW, SIGNAL = 3.5; EXPRESSED IN BT474, SIGNAL = 1.5e+02; EST_HUMAN HIT: BE870853.1, EVALUE 9.00e-68; SWISSPROT HIT: P05787, EVALUE 1.00e-68
VTQKSYKVSTSGLRAFSSCSHMSGPGAHLSSLSFSRVGSTSFRAGLGRGYGGASSMGGITAVMVNQNLLSPLNLEVDPNIQAMRTQEKEQIKTLNKKFPSFIDKIRFLEQQNKMLETKGSLLQQQKMAWSNVDMFESYINNFMQRLETLSQEKPKLEAELGNMQRLAENFKKKYEDEINKRTEMEN

SEQ ID NO: 36051 - protein, 326 aa, Homo sapiens
  MAP TO AC009497.2; EXPRESSED IN PLACENTA, SIGNAL = 2.4; EXPRESSED IN FETAL LIVER, SIGNAL = 1.6; EXPRESSED IN ADULT LIVER, SIGNAL = 1.3; EXPRESSED IN HEART, SIGNAL = 1.1; EXPRESSED IN HELA, SIGNAL = 3.1; EXPRESSED IN HBL100, SIGNAL = 2.2; EXPRESSED IN BRAIN, SIGNAL = 1.6; EXPRESSED IN LUNG, SIGNAL = 3.5; EXPRESSED IN BONE MARROW, SIGNAL =   2; EXPRESSED IN BT474, SIGNAL = 3.9; EST_HUMAN HIT: AU131494.1, EVALUE 1.00e-116; SWISSPROT HIT: P32583, EVALUE 1.20e-02
ESLETKEEKPEETPKMELSLENVTVEGNACKVTESNLEKAKTMELNVGNEASFHGQERTKTGISEEAAIEENKRNDDSEADTAKLNAKEVATEEFNSDISLSDNTTPVKLNAQTEISEQTAAGELDGGNDVSDLHSSEETNTKMKNNEEMMIGEAMAETGHDGETENEGITTKTSKPDEAETNMLTAEMDNFVCDTVEMSTEEGIIDANKTETNTEYSKSEEKLDNNQMVMESDILQEDHHTSQKVEEPSQCLASGTAISELIIEDNNASPQKLRELDPSLVSANDSPSGMQTRCVWSPLASPSTSILKRGLKRSQEDEISSPVNK

SEQ ID NO: 36052 - protein, 17 aa, Homo sapiens
  MAP TO AC009497.2; EXPRESSED IN PLACENTA, SIGNAL = 2.4; EXPRESSED IN FETAL LIVER, SIGNAL = 1.6; EXPRESSED IN ADULT LIVER, SIGNAL = 1.3; EXPRESSED IN HEART, SIGNAL = 1.1; EXPRESSED IN HELA, SIGNAL = 3.1; EXPRESSED IN HBL100, SIGNAL = 2.2; EXPRESSED IN BRAIN, SIGNAL = 1.6; EXPRESSED IN LUNG, SIGNAL = 3.5; EXPRESSED IN BONE MARROW, SIGNAL =   2; EXPRESSED IN BT474, SIGNAL = 3.9
NLWRQKKKNQKKPQKWN

SEQ ID NO: 36053 - protein, 20 aa, Homo sapiens
  MAP TO AP000508.1; EXPRESSED IN BONE MARROW, SIGNAL =  35; EXPRESSED IN BT474, SIGNAL = 1.3e+02; EXPRESSED IN HBL100, SIGNAL =  68; EXPRESSED IN LUNG, SIGNAL =  66; EXPRESSED IN BRAIN, SIGNAL =  20; EXPRESSED IN ADULT LIVER, SIGNAL =  22; EXPRESSED IN FETAL LIVER, SIGNAL =  34; EXPRESSED IN PLACENTA, SIGNAL =  64; EXPRESSED IN HEART, SIGNAL =  10; EXPRESSED IN HELA, SIGNAL =  94; EST_HUMAN HIT: AU123676.1, EVALUE 3.00e-05
FALGHPDDVDHLILPKHLVH

SEQ ID NO: 36054 - protein, 274 aa, Homo sapiens
  MAP TO AP000508.1; EXPRESSED IN BONE MARROW, SIGNAL =  35; EXPRESSED IN BT474, SIGNAL = 1.3e+02; EXPRESSED IN HBL100, SIGNAL =  68; EXPRESSED IN LUNG, SIGNAL =  66; EXPRESSED IN BRAIN, SIGNAL =  20; EXPRESSED IN ADULT LIVER, SIGNAL =  22; EXPRESSED IN FETAL LIVER, SIGNAL =  34; EXPRESSED IN PLACENTA, SIGNAL =  64; EXPRESSED IN HEART, SIGNAL =  10; EXPRESSED IN HELA, SIGNAL =  94; EST_HUMAN HIT: BE253743.1, EVALUE 0.00e+00; SWISSPROT HIT: P39023, EVALUE 0.00e+00
RKFSTPRHGSLGFLPWKRSSRHCGKVKSFPKDDPSKPVHLTAFLGYKAGMTHIVREVDRPGSKVNKKEVVEAVTIVERPPVGIVGCVETPQGFRTCKTVFAEHISDECKRRFYKNWHKSKKKAFTKYCKKWQDEDGKKQLEKDFSSMKKYCQVICVIAHTQMQLLPLCQKKAHLMEIQVNGGTVAEKLDWAGERLKHQVPVNQVFGQDEMIDVIRVTKGKGYKRVTSRWHTKKLPRKTHQGLCKVACIGAWHPARVGFSVVRGGQKGYHHRTEI

SEQ ID NO: 36055 - protein, 38 aa, Homo sapiens
  MAP TO Z99716.4; EXPRESSED IN BT474, SIGNAL = 2.8; EXPRESSED IN PLACENTA, SIGNAL = 1.1; EXPRESSED IN BONE MARROW, SIGNAL = 1.2; EXPRESSED IN FETAL LIVER, SIGNAL = 1.2; EXPRESSED IN ADULT LIVER, SIGNAL = 0.95; EXPRESSED IN HEART, SIGNAL = 0.96; EXPRESSED IN HELA, SIGNAL = 2.8; EXPRESSED IN HBL100, SIGNAL =   2; EXPRESSED IN BRAIN, SIGNAL = 2.4; EXPRESSED IN LUNG, SIGNAL = 1.5; EST_HUMAN HIT: BE312629.1, EVALUE 6.00e-15; SWISSPROT HIT: Q60429, EVALUE 7.00e-16
MHKSGVLRKAIDYIKYLQQVNHKLRQENMVLKLANQKN

SEQ ID NO: 36056 - protein, 31 aa, Homo sapiens
  MAP TO AC008125.9; EXPRESSED IN BT474, SIGNAL = 2.6; EXPRESSED IN BONE MARROW, SIGNAL = 6.5; EXPRESSED IN LUNG, SIGNAL = 2.9; EXPRESSED IN BRAIN, SIGNAL = 6.5; EXPRESSED IN ADULT LIVER, SIGNAL = 5.8; EXPRESSED IN FETAL LIVER, SIGNAL = 1.8; EXPRESSED IN PLACENTA, SIGNAL =   5; EXPRESSED IN HEART, SIGNAL = 1.1; EXPRESSED IN HELA, SIGNAL = 3.8; EXPRESSED IN HBL100, SIGNAL =   3
DDDGYGGDDADGDDDGYGGDDADGDDGGDSD

SEQ ID NO: 36057 - protein, 23 aa, Homo sapiens
  MAP TO AC008125.9; EXPRESSED IN BT474, SIGNAL = 2.6; EXPRESSED IN BONE MARROW, SIGNAL = 6.5; EXPRESSED IN LUNG, SIGNAL = 2.9; EXPRESSED IN BRAIN, SIGNAL = 6.5; EXPRESSED IN ADULT LIVER, SIGNAL = 5.8; EXPRESSED IN FETAL LIVER, SIGNAL = 1.8; EXPRESSED IN PLACENTA, SIGNAL =   5; EXPRESSED IN HEART, SIGNAL = 1.1; EXPRESSED IN HELA, SIGNAL = 3.8; EXPRESSED IN HBL100, SIGNAL =   3
TMLMVMTMVVVMVMMLMVMMVVM

SEQ ID NO: 36058 - protein, 67 aa, Homo sapiens
  MAP TO AL121758.5; EXPRESSED IN HEART, SIGNAL = 1.8; EXPRESSED IN BT474, SIGNAL = 2.9; EXPRESSED IN HBL100, SIGNAL = 2.2; EXPRESSED IN HELA, SIGNAL = 2.4; EXPRESSED IN PLACENTA, SIGNAL = 2.3; EXPRESSED IN ADULT LIVER, SIGNAL = 1.9; EXPRESSED IN FETAL LIVER, SIGNAL = 2.1; EXPRESSED IN BRAIN, SIGNAL =   3; EXPRESSED IN LUNG, SIGNAL = 2.3; EXPRESSED IN BONE MARROW, SIGNAL = 2.5; SWISSPROT HIT: P36077, EVALUE 5.00e-07; EST_HUMAN HIT: BE784636.1, EVALUE 2.00e-18
EDPDSVPPIDVLWIKGAQGGDYFYSFGGCHRYAAYQQLQRETIPAKLVQSTLSDLRVYLGASTPDLQ

SEQ ID NO: 36059 - protein, 32 aa, Homo sapiens
  MAP TO AL121758.5; EXPRESSED IN HEART, SIGNAL = 1.8; EXPRESSED IN BT474, SIGNAL = 2.9; EXPRESSED IN HBL100, SIGNAL = 2.2; EXPRESSED IN HELA, SIGNAL = 2.4; EXPRESSED IN PLACENTA, SIGNAL = 2.3; EXPRESSED IN ADULT LIVER, SIGNAL = 1.9; EXPRESSED IN FETAL LIVER, SIGNAL = 2.1; EXPRESSED IN BRAIN, SIGNAL =   3; EXPRESSED IN LUNG, SIGNAL = 2.3; EXPRESSED IN BONE MARROW, SIGNAL = 2.5; EST_HUMAN HIT: AI750362.1, EVALUE 6.00e-07; SWISSPROT HIT: Q28173, EVALUE 1.20e+00
VPCPLTLCLFSPGGPRQRAPHRCPLDQRGPGR

SEQ ID NO: 36060 - protein, 31 aa, Homo sapiens
  MAP TO AJ009615.1; EXPRESSED IN LUNG, SIGNAL = 5.7; EXPRESSED IN BONE MARROW, SIGNAL = 6.6; EXPRESSED IN BRAIN, SIGNAL = 4.4; EXPRESSED IN HBL100, SIGNAL = 7.3; EXPRESSED IN HELA, SIGNAL = 7.7; EXPRESSED IN PLACENTA, SIGNAL = 3.7; EXPRESSED IN ADULT LIVER, SIGNAL = 5.3; EXPRESSED IN HEART, SIGNAL =   6; EXPRESSED IN BT474, SIGNAL = 5.9; EXPRESSED IN FETAL LIVER, SIGNAL = 6.9; EST_HUMAN HIT: AA582456.1, EVALUE 3.00e-05; SWISSPROT HIT: P71353, EVALUE 8.30e+00
AAQGSHQSFCSQIDRDLYSEGFVGAWTPLEA

SEQ ID NO: 36061 - protein, 47 aa, Homo sapiens
  MAP TO AP000010.2; EXPRESSED IN HBL100, SIGNAL = 2.4; EXPRESSED IN HELA, SIGNAL = 1.1; EXPRESSED IN PLACENTA, SIGNAL = 0.98; EXPRESSED IN HEART, SIGNAL = 1.7; EXPRESSED IN BT474, SIGNAL = 1.6; EXPRESSED IN BONE MARROW, SIGNAL = 1.6; EXPRESSED IN BRAIN, SIGNAL = 1.5; EST_HUMAN HIT: BE386363.1, EVALUE 9.00e-07
AQLRRSVQATGLEERPALPERLQQEGSEEAGGLSGAEAALPRRARGS

SEQ ID NO: 36062 - protein, 182 aa, Homo sapiens
  MAP TO AC004950.2; EXPRESSED IN BONE MARROW, SIGNAL = 2.3; EXPRESSED IN LUNG, SIGNAL = 3.3; EXPRESSED IN BRAIN, SIGNAL = 3.5; EXPRESSED IN HELA, SIGNAL = 4.2; EXPRESSED IN HBL100, SIGNAL = 5.2; EXPRESSED IN PLACENTA, SIGNAL = 3.7; EXPRESSED IN ADULT LIVER, SIGNAL = 3.8; EXPRESSED IN HEART, SIGNAL = 2.4; EXPRESSED IN BT474, SIGNAL = 2.9; EXPRESSED IN FETAL LIVER, SIGNAL = 4.7; EST_HUMAN HIT: BE856375.1, EVALUE 2.00e-67; SWISSPROT HIT: P34896, EVALUE 2.00e-84
GGPHNHTIAGVAVALKQAMTLEFEVYQHHVVANCRALSEALTELGYQTVTGCSDKHLILVDLHSIKGTDGRRAEKVLEACSIACNKNTCPDDRNTLRPSGLRLGNPALTSLGLLEKGFQKVAHFIHRGIELTLQIQSNAGIRATLKEFKERLAGHKYQGCVQALQEEVESFTLFPLPGLPDF

SEQ ID NO: 36063 - protein, 34 aa, Homo sapiens
  MAP TO AL121763.5; EXPRESSED IN PLACENTA, SIGNAL = 0.95; EXPRESSED IN HEART, SIGNAL = 1.1; EXPRESSED IN BT474, SIGNAL = 1.5; EXPRESSED IN BONE MARROW, SIGNAL = 1.5; EXPRESSED IN BRAIN, SIGNAL = 1.1; EXPRESSED IN HBL100, SIGNAL = 2.1
SGEFPIKEDLNGSREHVTVGFVSQKDGAEYCFIG

SEQ ID NO: 36064 - protein, 246 aa, Homo sapiens
  MAP TO AC006313.1; EXPRESSED IN LUNG, SIGNAL = 2.9; EXPRESSED IN BRAIN, SIGNAL = 3.3; EXPRESSED IN HBL100, SIGNAL = 3.4; EXPRESSED IN HELA, SIGNAL = 3.2; EXPRESSED IN HEART, SIGNAL = 2.8; EXPRESSED IN PLACENTA, SIGNAL = 2.1; EXPRESSED IN BT474, SIGNAL = 1.9; EXPRESSED IN ADULT LIVER, SIGNAL = 4.4; EXPRESSED IN FETAL LIVER, SIGNAL = 2.6; EXPRESSED IN BONE MARROW, SIGNAL = 3.7; EST_HUMAN HIT: AI148854.1, EVALUE 1.00e-35; SWISSPROT HIT: P23266, EVALUE 2.00e-76
LSEFILLGLSSRSEDQRPLFALFLIIYLVTLMGNLLIILAIHSDPRLQNPMYFFLSILSFADICYTTVIVPKMLVNFLSEKKTISYAECLAQMYFFLVFGNIDSYLLAAMAINRCVAICNPFHYVTVMNRRCCVLLLAFPITFSYFHSLLHVLLVNRLTFCTSNVIHHFFCDVNPVLKLSCSSTFVNEIVAMTEGLASVMAPFVCIIISYLRILIAVLKIPSAAGKHKAFSTCSSHLTVVILFYGS

SEQ ID NO: 36065 - protein, 78 aa, Homo sapiens
  MAP TO AL033530.1; EXPRESSED IN PLACENTA, SIGNAL = 1.2; EXPRESSED IN ADULT LIVER, SIGNAL = 1.2; EXPRESSED IN BT474, SIGNAL = 1.4; EXPRESSED IN HBL100, SIGNAL = 1.4; EXPRESSED IN HELA, SIGNAL = 1.4; EXPRESSED IN HEART, SIGNAL = 1.5; EXPRESSED IN FETAL LIVER, SIGNAL = 1.2; EXPRESSED IN BRAIN, SIGNAL = 1.3; EXPRESSED IN LUNG, SIGNAL = 1.5; EXPRESSED IN BONE MARROW, SIGNAL = 1.4; EST_HUMAN HIT: BE142399.1, EVALUE 8.80e-01; SWISSPROT HIT: P27176, EVALUE 4.00e-01
ASEDLFQEADEEFPLHSSSASSFQFEFLLLIRQHFCCLRENAIWGSYSGFLPLCFKDSIFTLMLDMQTLHIFHLALDP

SEQ ID NO: 36066 - protein, 147 aa, Homo sapiens
  MAP TO AC006475.3; EXPRESSED IN BONE MARROW, SIGNAL = 3.2; EXPRESSED IN HELA, SIGNAL = 2.3; EXPRESSED IN PLACENTA, SIGNAL = 4.2; EXPRESSED IN BT474, SIGNAL = 2.4; EXPRESSED IN BRAIN, SIGNAL = 2.6; EXPRESSED IN HEART, SIGNAL = 2.2; EXPRESSED IN HBL100, SIGNAL = 2.3; EXPRESSED IN ADULT LIVER, SIGNAL = 3.5; EXPRESSED IN FETAL LIVER, SIGNAL = 2.4; EXPRESSED IN LUNG, SIGNAL = 3.3; SWISSPROT HIT: P40201, EVALUE 6.20e+00; EST_HUMAN HIT: AV750850.1, EVALUE 2.00e-28
TLVSPHEESTSLCPEEQLVIERLQGEKEQKEDSELSTGLMDSEMTPTIEGCVKDVSYQGGKSIKLSSETESSFSLSADISKADVSSSPTPSSDLPSHDMLHNYPSALSSSAGNIMPTTYISVTPKIGMGKPAITKRKFSPSRPRSKQ

SEQ ID NO: 36067 - protein, 29 aa, Homo sapiens
  MAP TO AL033539.17; EXPRESSED IN BONE MARROW, SIGNAL = 1.6; EXPRESSED IN HEART, SIGNAL = 1.4; EXPRESSED IN FETAL LIVER, SIGNAL = 1.2; EXPRESSED IN ADULT LIVER, SIGNAL = 1.9; EXPRESSED IN BT474, SIGNAL = 1.8; EXPRESSED IN LUNG, SIGNAL = 1.5; EXPRESSED IN PLACENTA, SIGNAL = 1.6; EXPRESSED IN HELA, SIGNAL = 1.5; EXPRESSED IN HBL100, SIGNAL = 1.6; EXPRESSED IN BRAIN, SIGNAL = 1.5; EST_HUMAN HIT: AV732757.1, EVALUE 2.00e-10
FPGPLKESGGNDDAQETIHDHSEFLTTMA

SEQ ID NO: 36068 - protein, 41 aa, Homo sapiens
  MAP TO AL118499.5; EXPRESSED IN HBL100, SIGNAL = 5.2; EXPRESSED IN HELA, SIGNAL = 5.3; EXPRESSED IN FETAL LIVER, SIGNAL = 5.4; EXPRESSED IN HEART, SIGNAL = 4.6; EXPRESSED IN PLACENTA, SIGNAL = 5.6; EXPRESSED IN ADULT LIVER, SIGNAL = 5.5; EXPRESSED IN BT474, SIGNAL = 5.5; EXPRESSED IN BRAIN, SIGNAL = 4.9; EXPRESSED IN LUNG, SIGNAL = 5.7; EXPRESSED IN BONE MARROW, SIGNAL = 4.5; EST_HUMAN HIT: BE830632.1, EVALUE 3.00e-13
VSFLSAPIGAQNVPGMMKRRSRRCVGNKLVLENAAAIGKKK

SEQ ID NO: 36069 - protein, 230 aa, Homo sapiens
  MAP TO AC004230.1; EXPRESSED IN HEART, SIGNAL = 5.9; EXPRESSED IN ADULT LIVER, SIGNAL = 1.8; EXPRESSED IN BT474, SIGNAL = 5.3; EXPRESSED IN BRAIN, SIGNAL = 1.9; EXPRESSED IN HBL100, SIGNAL = 1.6; EXPRESSED IN HELA, SIGNAL = 2.2; EXPRESSED IN PLACENTA, SIGNAL = 6.5; EXPRESSED IN FETAL LIVER, SIGNAL = 1.6; EXPRESSED IN LUNG, SIGNAL = 6.3; EXPRESSED IN BONE MARROW, SIGNAL = 1.6; SWISSPROT HIT: gi1351900, EVALUE 6.00e-75; EST_HUMAN HIT: BF512391.1, EVALUE 9.00e-56
TAYTVDVTGREGAKDIDISSPEFKIKIPRHELTEISNVDVETQSGKTVIRLPSGSGAASPTGSAVDIRAGAISASGPELQGAGHSKLQVTMPGIKVGGSGVNVNAKGLDLGGRGGVQVPAVDISSSLGGRAVEVQGPSLESGDHGKIKFPTMKVPKFGVSTGREGQTPKAGLRVSAPEVSVGHKGGKPGLTIQAPQLEVSVPSANIEGLEGKLKGPQITGPSLEGDLGLK

SEQ ID NO: 36070 - protein, 165 aa, Homo sapiens
  MAP TO AL021026.1; EXPRESSED IN BT474, SIGNAL = 1.3; EXPRESSED IN FETAL LIVER, SIGNAL = 1.1; EXPRESSED IN BONE MARROW, SIGNAL = 1.4; EXPRESSED IN LUNG, SIGNAL = 1.4; EXPRESSED IN BRAIN, SIGNAL = 1.1; EXPRESSED IN HBL100, SIGNAL = 2.7; EXPRESSED IN PLACENTA, SIGNAL = 1.3; EXPRESSED IN HELA, SIGNAL = 1.2; EXPRESSED IN ADULT LIVER, SIGNAL = 1.4; EXPRESSED IN HEART, SIGNAL = 1.1; EST_HUMAN HIT: AI052149.1, EVALUE 2.00e-48; SWISSPROT HIT: P32417, EVALUE 1.00e-52
NCHERRESVALMLMFNCLMLFQCYGLLQVFLGNELFTARVFASHCCSSLRKEPVFNDELPSRILCGTLSIKPSVKEFTETSAVFEDGTMFEAIDSVIFATGYDYSYPFLDETIMKSRNNEVTLFKGIFPPLMEKPTLAVIGLVQSLGAAIPTADLQAWWAAKVFA

SEQ ID NO: 36071 - protein, 96 aa, Homo sapiens
  MAP TO AC004505.1; EXPRESSED IN BRAIN, SIGNAL = 1.3; EXPRESSED IN BONE MARROW, SIGNAL = 0.96; EXPRESSED IN HELA, SIGNAL = 1.4; EXPRESSED IN PLACENTA, SIGNAL = 0.93; EXPRESSED IN HEART, SIGNAL = 1.6; EXPRESSED IN BT474, SIGNAL =   1; EXPRESSED IN FETAL LIVER, SIGNAL = 1.3; EST_HUMAN HIT: BE154504.1, EVALUE 7.00e-52; SWISSPROT HIT: P44132, EVALUE 4.90e-01
HVRLPNEAHNCMDKMTAVYANILSDSYWSGLGLGFKLSNSERRNCDTRNGSNKSDFDWHQDALSKSLQQNLPSRSVSKPSLFSSVQLYRQSSKMCG

SEQ ID NO: 36072 - protein, 17 aa, Homo sapiens
  MAP TO AC004505.1; EXPRESSED IN BRAIN, SIGNAL = 1.3; EXPRESSED IN BONE MARROW, SIGNAL = 0.96; EXPRESSED IN HELA, SIGNAL = 1.4; EXPRESSED IN PLACENTA, SIGNAL = 0.93; EXPRESSED IN HEART, SIGNAL = 1.6; EXPRESSED IN BT474, SIGNAL =   1; EXPRESSED IN FETAL LIVER, SIGNAL = 1.3; EST_HUMAN HIT: BE154480.1, EVALUE 4.00e-03
PVGFLLVRPGPWLQAVQ

SEQ ID NO: 36073 - protein, 66 aa, Homo sapiens
  MAP TO AP000065.1; EXPRESSED IN LUNG, SIGNAL = 6.3; EXPRESSED IN BONE MARROW, SIGNAL = 7.8; EXPRESSED IN BRAIN, SIGNAL = 6.5; EXPRESSED IN HELA, SIGNAL = 6.8; EXPRESSED IN PLACENTA, SIGNAL = 6.5; EXPRESSED IN HBL100, SIGNAL = 9.3; EXPRESSED IN HEART, SIGNAL = 8.4; EXPRESSED IN BT474, SIGNAL = 6.7; EXPRESSED IN FETAL LIVER, SIGNAL = 7.6; EXPRESSED IN ADULT LIVER, SIGNAL =   9; SWISSPROT HIT: P38537, EVALUE 4.30e+00; EST_HUMAN HIT: AI872481.1, EVALUE 2.00e-31
LKLTPEYLQLMKYKAIASNSKIYFGKDIPNMFMDSAGSVSKQFEGLADKLSFGLEDEPLETATKEN

SEQ ID NO: 36074 - protein, 59 aa, Homo sapiens
  MAP TO AL008720.1; EXPRESSED IN BT474, SIGNAL = 1.1; EXPRESSED IN PLACENTA, SIGNAL = 0.89; EXPRESSED IN HBL100, SIGNAL = 1.1; EXPRESSED IN HELA, SIGNAL =   1; EXPRESSED IN HEART, SIGNAL = 1.8; EXPRESSED IN FETAL LIVER, SIGNAL = 1.2
TTMRMMMVMKMKMMVVMERMIIMMTMMMIMIMMGRRTRRMMVIVVMMKMIMRRMRMIWW

SEQ ID NO: 36075 - protein, 86 aa, Homo sapiens; identical to SEQ ID NO: 34817
  MAP TO AL109823.11; EXPRESSED IN PLACENTA, SIGNAL =  16; EXPRESSED IN HEART, SIGNAL = 2.6; EXPRESSED IN HBL100, SIGNAL = 0.96; EXPRESSED IN HELA, SIGNAL =   1; EXPRESSED IN ADULT LIVER, SIGNAL = 1.2; EXPRESSED IN FETAL LIVER, SIGNAL = 2.4; EXPRESSED IN LUNG, SIGNAL =  12; EXPRESSED IN BONE MARROW, SIGNAL =   1; SWISSPROT HIT: P21980, EVALUE 1.00e-44; EST_HUMAN HIT: AA534623.1, EVALUE 2.00e-44

SEQ ID NO: 36076 - protein, 31 aa, Homo sapiens
  MAP TO AL031662.24; EXPRESSED IN PLACENTA, SIGNAL = 2.1; EXPRESSED IN ADULT LIVER, SIGNAL = 2.1; EXPRESSED IN BT474, SIGNAL = 2.4; EXPRESSED IN HELA, SIGNAL = 1.9; EXPRESSED IN HBL100, SIGNAL = 2.1; EXPRESSED IN HEART, SIGNAL = 1.9; EXPRESSED IN FETAL LIVER, SIGNAL =   2; EXPRESSED IN BRAIN, SIGNAL = 2.3; EXPRESSED IN LUNG, SIGNAL = 1.7; EXPRESSED IN BONE MARROW, SIGNAL = 2.3
CVLQRAGPLPGKDIPLPVTVQRTPLNWKELD

SEQ ID NO: 36077 - protein, 32 aa, Homo sapiens
  MAP TO AL031662.24; EXPRESSED IN PLACENTA, SIGNAL = 2.1; EXPRESSED IN ADULT LIVER, SIGNAL = 2.1; EXPRESSED IN BT474, SIGNAL = 2.4; EXPRESSED IN HELA, SIGNAL = 1.9; EXPRESSED IN HBL100, SIGNAL = 2.1; EXPRESSED IN HEART, SIGNAL = 1.9; EXPRESSED IN FETAL LIVER, SIGNAL =   2; EXPRESSED IN BRAIN, SIGNAL = 2.3; EXPRESSED IN LUNG, SIGNAL = 1.7; EXPRESSED IN BONE MARROW, SIGNAL = 2.3; EST_HUMAN HIT: BE386725.1, EVALUE 5.20e+00
LCPAEGWPAPWQGYTPTCDCAEDTTQLERAGQ

SEQ ID NO: 36078 - protein, 40 aa, Homo sapiens
  MAP TO AC007912.2; EXPRESSED IN HBL100, SIGNAL = 0.67; EXPRESSED IN PLACENTA, SIGNAL = 0.64; EXPRESSED IN ADULT LIVER, SIGNAL = 0.97; EXPRESSED IN HEART, SIGNAL = 0.88; EST_HUMAN HIT: W26357.1, EVALUE 1.90e-01
SDARQAISFYLCIQGHRVGSLKTAMLGIVTPWELPNSTQQ

SEQ ID NO: 36079 - protein, 110 aa, Homo sapiens
  MAP TO AL031665.18; EXPRESSED IN BRAIN, SIGNAL =  18; EXPRESSED IN BONE MARROW, SIGNAL =  26; EXPRESSED IN HEART, SIGNAL =  43; EXPRESSED IN FETAL LIVER, SIGNAL =  16; EXPRESSED IN ADULT LIVER, SIGNAL = 5.7; EXPRESSED IN BT474, SIGNAL =  45; EXPRESSED IN LUNG, SIGNAL =  35; EXPRESSED IN PLACENTA, SIGNAL =  30; EXPRESSED IN HELA, SIGNAL =  25; EXPRESSED IN HBL100, SIGNAL =  36; EST_HUMAN HIT: BE259544.1, EVALUE 2.00e-37; SWISSPROT HIT: P00544, EVALUE 7.00e-37
PPPITMEEEITILVIDNGSSMCKAGFAGDDAPGTMFPSTVRCPQHQGMMVGMGQKVFYLGDKAQSKHGILTMKYPIEHRIFTSWEGMEKIWHHTLQQAACVPGGAPGAAD

SEQ ID NO: 36080 - protein, 23 aa, Homo sapiens
  MAP TO AL031665.18; EXPRESSED IN BRAIN, SIGNAL =  18; EXPRESSED IN BONE MARROW, SIGNAL =  26; EXPRESSED IN HEART, SIGNAL =  43; EXPRESSED IN FETAL LIVER, SIGNAL =  16; EXPRESSED IN ADULT LIVER, SIGNAL = 5.7; EXPRESSED IN BT474, SIGNAL =  45; EXPRESSED IN LUNG, SIGNAL =  35; EXPRESSED IN PLACENTA, SIGNAL =  30; EXPRESSED IN HELA, SIGNAL =  25; EXPRESSED IN HBL100, SIGNAL =  36
LPTALPPSSSTDHNGRRDHHTRH

SEQ ID NO: 36081 - protein, 46 aa, Homo sapiens
  MAP TO AL049553.15; EXPRESSED IN BONE MARROW, SIGNAL = 1.1; EXPRESSED IN HELA, SIGNAL =   1; EXPRESSED IN HEART, SIGNAL = 1.4; EXPRESSED IN PLACENTA, SIGNAL = 0.97; EXPRESSED IN HBL100, SIGNAL = 0.97; EXPRESSED IN ADULT LIVER, SIGNAL = 1.1; EXPRESSED IN BT474, SIGNAL = 1.2; EXPRESSED IN FETAL LIVER, SIGNAL = 1.2; EXPRESSED IN BRAIN, SIGNAL = 1.3; SWISSPROT HIT: Q61490, EVALUE 9.10e-01; EST_HUMAN HIT: BF195188.1, EVALUE 2.00e-20
PAQAQIVHAGQACVVKEDNISERVYTIREGDTLMLQCLVTGHPRPQ

SEQ ID NO: 36082 - protein, 42 aa, Homo sapiens
  MAP TO AL049553.15; EXPRESSED IN BONE MARROW, SIGNAL = 1.1; EXPRESSED IN HELA, SIGNAL =   1; EXPRESSED IN HEART, SIGNAL = 1.4; EXPRESSED IN PLACENTA, SIGNAL = 0.97; EXPRESSED IN HBL100, SIGNAL = 0.97; EXPRESSED IN ADULT LIVER, SIGNAL = 1.1; EXPRESSED IN BT474, SIGNAL = 1.2; EXPRESSED IN FETAL LIVER, SIGNAL = 1.2; EXPRESSED IN BRAIN, SIGNAL = 1.3; EST_HUMAN HIT: AW014039.1, EVALUE 7.00e-14; SWISSPROT HIT: Q10809, EVALUE 2.70e+00
PPPPSSPASSSPGADRACGPGMCGERGQYQRACLHHPGGGHP

SEQ ID NO: 36083 - protein, 437 aa, Homo sapiens
  MAP TO AL021579.1; EXPRESSED IN HBL100, SIGNAL = 4.9; EXPRESSED IN HEART, SIGNAL = 1.3; EXPRESSED IN BT474, SIGNAL = 3.2; EXPRESSED IN BRAIN, SIGNAL = 1.7; EXPRESSED IN BONE MARROW, SIGNAL = 2.3; EXPRESSED IN PLACENTA, SIGNAL = 3.4; EXPRESSED IN HELA, SIGNAL = 3.9; EXPRESSED IN ADULT LIVER, SIGNAL = 2.2; EXPRESSED IN FETAL LIVER, SIGNAL = 1.9; EXPRESSED IN LUNG, SIGNAL = 4.3; EST_HUMAN HIT: BE279691.1, EVALUE 1.00e-82; SWISSPROT HIT: P48634, EVALUE 3.00e-13
ERPRPDSRPAVKKESTLPPRTYWKEARERDWFPDQGYRGRGRGEYYSRGRSYRGSYGGRGRGGRGHTRDYPQYRDNKPRAEHIPSGPLRQREESETRSESSDFEVVPKRRRQRGSETDTDSEIHESASDKDSLSKGKLPKREERPENKKPVKPHSSFKPDNHVRIDNRLLEKPYVRDDDKAKPGFLPKGEPTRRGRGGTFRRGGRDPGGRPSRPSTLRRPAYRDNQWNPRQSEVPKPEDGEPPRRHEQFIPIAADKRPPKFERKFDPARERPRRQRPTRPPRQDKPPRFRRLREREAASKSNEVVAVPTNGTVNNVAQEPVNTLGDISGNKTPDLSNQNSSDQANEEWETASESSDFNERRERDEKKNADLNAQTVVKVGENVLPPKREIAKRSFSSQRPVDRQNRRGNNGPPKSGRNFSGPRNERRSGPPSKSGKR

SEQ ID NO: 36084 - protein, 343 aa, Homo sapiens
  MAP TO AC005079.1; EXPRESSED IN BT474, SIGNAL =  90; EXPRESSED IN BONE MARROW, SIGNAL =  62; EXPRESSED IN BRAIN, SIGNAL =  48; EXPRESSED IN HEART, SIGNAL =  25; EXPRESSED IN ADULT LIVER, SIGNAL = 8.4; EXPRESSED IN FETAL LIVER, SIGNAL = 1.1e+02; EXPRESSED IN LUNG, SIGNAL = 1.4e+02; EXPRESSED IN HELA, SIGNAL = 1.3e+02; EXPRESSED IN PLACENTA, SIGNAL =  75; EXPRESSED IN HBL100, SIGNAL =  72; EST_HUMAN HIT: AU119714.1, EVALUE 0.00e+00; SWISSPROT HIT: P04720, EVALUE 0.00e+00
MGKEKTHINIVVIGHVDSGKSTTTGHLIYKCGGIDKRTIEKFEKEAAEMGKGSFKYAWVLDKLKAERERGITIDISLWKFETSKYYVTIIDAPGHRDFIKNMITGTSQADCAVLIVAAGVGEFEAGISKNGQTREHALLAYTLGVKQLIVGVNKMDSTEPPYSQKRYEEIVKEVSTYIKKIGYNPDTVAFVPISGWNGDNMLEPSANMPWFKGWKVTRKDGNASGTTLLEALDCILPPTHPTDKPLRLPLQDVYKIGGIGTVPVGRVETGVLKPGMVVTFAPVNVTTEVKSVEMHHEALSEALPGDNVGFNVKNVSVKDVRRGNVAGDSKNDPPMEAAGFTAQ

SEQ ID NO: 36085 - protein, 28 aa, Homo sapiens
  MAP TO AC005079.1; EXPRESSED IN BT474, SIGNAL =  90; EXPRESSED IN BONE MARROW, SIGNAL =  62; EXPRESSED IN BRAIN, SIGNAL =  48; EXPRESSED IN HEART, SIGNAL =  25; EXPRESSED IN ADULT LIVER, SIGNAL = 8.4; EXPRESSED IN FETAL LIVER, SIGNAL = 1.1e+02; EXPRESSED IN LUNG, SIGNAL = 1.4e+02; EXPRESSED IN HELA, SIGNAL = 1.3e+02; EXPRESSED IN PLACENTA, SIGNAL =  75; EXPRESSED IN HBL100, SIGNAL =  72; SWISSPROT HIT: P21561, EVALUE 2.20e+00; EST_HUMAN HIT: AU118310.1, EVALUE 5.00e-12
GKGKDSYQHCRHWTRRFRQVHHYWPSDL

SEQ ID NO: 36086 - protein, 63 aa, Homo sapiens
  MAP TO AL118522.7; EXPRESSED IN BRAIN, SIGNAL = 4.5; EXPRESSED IN PLACENTA, SIGNAL = 4.8; EXPRESSED IN HEART, SIGNAL = 4.9; EXPRESSED IN HBL100, SIGNAL = 4.5; EXPRESSED IN HELA, SIGNAL = 5.6; EXPRESSED IN BT474, SIGNAL = 4.7; EXPRESSED IN FETAL LIVER, SIGNAL = 4.8; EXPRESSED IN ADULT LIVER, SIGNAL =   6; EXPRESSED IN BONE MARROW, SIGNAL = 5.4; EXPRESSED IN LUNG, SIGNAL = 5.6; EST_HUMAN HIT: BF689789.1, EVALUE 8.90e-01; SWISSPROT HIT: P42496, EVALUE 5.10e-01
MKLSGLEAACWCHYLSLIFSNSISKFNIPISAQTSEEQKPGLKSQSRSEWGSKDPQPNKSPKR

SEQ ID NO: 36087 - protein, 30 aa, Homo sapiens; identical to SEQ ID NO: 35460
  MAP TO AL049629.14; EXPRESSED IN BT474, SIGNAL = 7.4; EXPRESSED IN BRAIN, SIGNAL = 7.4; EXPRESSED IN BONE MARROW, SIGNAL = 7.2; EXPRESSED IN HEART, SIGNAL = 7.6; EXPRESSED IN PLACENTA, SIGNAL =  18; EXPRESSED IN ADULT LIVER, SIGNAL =  12; EXPRESSED IN FETAL LIVER, SIGNAL = 8.2; EXPRESSED IN LUNG, SIGNAL =  10; EXPRESSED IN HELA, SIGNAL =  13; EXPRESSED IN HBL100, SIGNAL = 6.9; EST_HUMAN HIT: AA968816.1, EVALUE 4.00e-12

SEQ ID NO: 36088 - protein, 32 aa, Homo sapiens
  MAP TO AC007066.4; EXPRESSED IN HELA, SIGNAL = 5.9; EXPRESSED IN PLACENTA, SIGNAL = 5.3; EXPRESSED IN HBL100, SIGNAL = 5.9; EXPRESSED IN HEART, SIGNAL = 4.6; EXPRESSED IN ADULT LIVER, SIGNAL = 5.9; EXPRESSED IN BT474, SIGNAL =  13; EXPRESSED IN BONE MARROW, SIGNAL = 5.4; EXPRESSED IN BRAIN, SIGNAL =   5; EXPRESSED IN FETAL LIVER, SIGNAL = 5.7; EXPRESSED IN LUNG, SIGNAL = 5.7
VSTFLVRLAGGWVGDTNFVLQILAVDTLVVDD

SEQ ID NO: 36089 - protein, 53 aa, Homo sapiens
  MAP TO AC007114.7; EXPRESSED IN FETAL LIVER, SIGNAL = 4.5; EXPRESSED IN LUNG, SIGNAL = 4.4; EXPRESSED IN HELA, SIGNAL = 4.6; EXPRESSED IN PLACENTA, SIGNAL = 4.5; EXPRESSED IN BT474, SIGNAL = 3.8; EXPRESSED IN ADULT LIVER, SIGNAL = 4.6; EXPRESSED IN BONE MARROW, SIGNAL = 4.4; EXPRESSED IN BRAIN, SIGNAL = 3.8; EXPRESSED IN HEART, SIGNAL = 3.5; EXPRESSED IN HBL100, SIGNAL =   4; SWISSPROT HIT: P24008, EVALUE 8.90e-01
CQAPSWTTLQKTLVTITLLSHPYGRYEQQWPGGDAMKDSADEDSCKFHYHRKV

SEQ ID NO: 36090 - protein, 36 aa, Homo sapiens
  MAP TO AC007114.7; EXPRESSED IN FETAL LIVER, SIGNAL = 4.5; EXPRESSED IN LUNG, SIGNAL = 4.4; EXPRESSED IN HELA, SIGNAL = 4.6; EXPRESSED IN PLACENTA, SIGNAL = 4.5; EXPRESSED IN BT474, SIGNAL = 3.8; EXPRESSED IN ADULT LIVER, SIGNAL = 4.6; EXPRESSED IN BONE MARROW, SIGNAL = 4.4; EXPRESSED IN BRAIN, SIGNAL = 3.8; EXPRESSED IN HEART, SIGNAL = 3.5; EXPRESSED IN HBL100, SIGNAL =   4
DAKPHHGRPSRKRWSPSHSFLIHMADMSNSGQEEMQ

SEQ ID NO: 36091 - protein, 303 aa, Homo sapiens
  MAP TO AC003002.1; EXPRESSED IN PLACENTA, SIGNAL = 1.6; EXPRESSED IN HBL100, SIGNAL = 0.95; EXPRESSED IN BT474, SIGNAL = 1.6; EXPRESSED IN BONE MARROW, SIGNAL = 1.1; EXPRESSED IN HEART, SIGNAL = 1.6; EXPRESSED IN FETAL LIVER, SIGNAL = 2.2; EXPRESSED IN BRAIN, SIGNAL = 1.5; EXPRESSED IN LUNG, SIGNAL = 1.8; EXPRESSED IN HELA, SIGNAL = 2.1; SWISSPROT HIT: P52740, EVALUE 2.00e-83; EST_HUMAN HIT: AU141046.1, EVALUE 8.00e-74
CCHGAEDEEAPLEPGVSVGVSQVMAPKPCLSTQNTQPCETCSSLLKDILRLAEHDGTHPEQGLYTCPAHLHQHQKEQIREKLSRGDGGRPTFVKNHRVHMAGKTFLCSECGKAFSHKHKLSDHQKIHTGERTYKCSKCGILFMERSTLNRHQRTHTGERPYECNECGKAFLCKSHLVRHQTIHSGERPYECSECGKLFMWSSTLITHQRVHTGKRPYGCSECGKFFKCNSNLFRHYRIHTGKRSYGCSECGKFFMERSTLSRHQRVHTGERPYECNECGKFFSLKSVLIQHQRVHTGERPYEC

SEQ ID NO: 36092 - protein, 89 aa, Homo sapiens
  MAP TO AC007336.2; EXPRESSED IN BT474, SIGNAL = 1.3; EXPRESSED IN FETAL LIVER, SIGNAL = 1.2; EXPRESSED IN BONE MARROW, SIGNAL = 1.3; EXPRESSED IN HEART, SIGNAL = 1.1; EXPRESSED IN BRAIN, SIGNAL = 1.2; EXPRESSED IN LUNG, SIGNAL = 1.4; EXPRESSED IN PLACENTA, SIGNAL = 1.4; EXPRESSED IN HELA, SIGNAL = 1.3; EXPRESSED IN HBL100, SIGNAL = 1.2; EXPRESSED IN ADULT LIVER, SIGNAL = 1.4; SWISSPROT HIT: P06813, EVALUE 1.00e-06; EST_HUMAN HIT: BE564219.1, EVALUE 5.00e-14
ALLEGADRGLGEALGGLFGGGGQRREGGGRNIGGIVGGIVNFISEAAAAQYTPEPPPTQQHFTSVEASESEEVRRFRQQFTQLAGPDME

SEQ ID NO: 36093 - protein, 27 aa, Homo sapiens
  MAP TO AC007336.2; EXPRESSED IN BT474, SIGNAL = 1.3; EXPRESSED IN FETAL LIVER, SIGNAL = 1.2; EXPRESSED IN BONE MARROW, SIGNAL = 1.3; EXPRESSED IN HEART, SIGNAL = 1.1; EXPRESSED IN BRAIN, SIGNAL = 1.2; EXPRESSED IN LUNG, SIGNAL = 1.4; EXPRESSED IN PLACENTA, SIGNAL = 1.4; EXPRESSED IN HELA, SIGNAL = 1.3; EXPRESSED IN HBL100, SIGNAL = 1.2; EXPRESSED IN ADULT LIVER, SIGNAL = 1.4
EVLEKLLEASLEEVVREEKEEEEILEG

SEQ ID NO: 36094 - protein, 67 aa, Homo sapiens
  MAP TO AL035416.7; EXPRESSED IN BT474, SIGNAL =   1; EXPRESSED IN HEART, SIGNAL = 0.88; SWISSPROT HIT: O51214, EVALUE 3.40e-02; EST_HUMAN HIT: BF371309.1, EVALUE 1.00e-13
ATSDKANKLESTVEIYRQKLQDLNDLRKQVKTLQETNMMYMHNTVSLEEELKKANAARTQLETYKRQ

SEQ ID NO: 36095 - protein, 22 aa, Homo sapiens
  MAP TO AL035416.7; EXPRESSED IN BT474, SIGNAL =   1; EXPRESSED IN HEART, SIGNAL = 0.88
LPLIKQINWSQQLRYIVRSYKI

SEQ ID NO: 36096 - protein, 187 aa, Homo sapiens; identical to SEQ ID NO: 35716
  MAP TO AL109798.13; EXPRESSED IN FETAL LIVER, SIGNAL = 2.7; EXPRESSED IN BONE MARROW, SIGNAL = 2.5; EXPRESSED IN HELA, SIGNAL = 2.7; EXPRESSED IN HBL100, SIGNAL = 2.5; EXPRESSED IN BT474, SIGNAL = 2.4; EXPRESSED IN ADULT LIVER, SIGNAL = 2.6; EXPRESSED IN BRAIN, SIGNAL = 2.3; EXPRESSED IN LUNG, SIGNAL = 3.3; EXPRESSED IN PLACENTA, SIGNAL = 2.5; EXPRESSED IN HEART, SIGNAL = 2.4; SWISSPROT HIT: O76039, EVALUE 1.00e-104; EST_HUMAN HIT: BE831003.1, EVALUE 3.00e-59

SEQ ID NO: 36097 - protein, 21 aa, Homo sapiens
  MAP TO AC008018.18; EXPRESSED IN ADULT LIVER, SIGNAL = 1.9; EXPRESSED IN BT474, SIGNAL = 1.5; EXPRESSED IN FETAL LIVER, SIGNAL = 1.8; EXPRESSED IN BRAIN, SIGNAL = 1.5; EXPRESSED IN BONE MARROW, SIGNAL = 1.7; EXPRESSED IN HBL100, SIGNAL = 1.4; EXPRESSED IN HEART, SIGNAL =   2; EXPRESSED IN LUNG, SIGNAL = 1.8; EXPRESSED IN PLACENTA, SIGNAL = 1.5; EXPRESSED IN HELA, SIGNAL = 1.6
MTSTRTTASRPSTTNFFFMAL

SEQ ID NO: 36098 - protein, 33 aa, Homo sapiens
  MAP TO AC007350.1; EXPRESSED IN PLACENTA, SIGNAL = 4.9; EXPRESSED IN HELA, SIGNAL = 5.3; EXPRESSED IN ADULT LIVER, SIGNAL = 5.6; EXPRESSED IN BT474, SIGNAL = 4.8; EXPRESSED IN BRAIN, SIGNAL = 4.4; EXPRESSED IN BONE MARROW, SIGNAL = 4.9; EXPRESSED IN HEART, SIGNAL =   4; EXPRESSED IN HBL100, SIGNAL = 5.5; EXPRESSED IN FETAL LIVER, SIGNAL = 4.3; EXPRESSED IN LUNG, SIGNAL = 3.9
KCLTSLLGAASFEVMFMTMDPHFCTITAQLVPA

SEQ ID NO: 36099 - protein, 34 aa, Homo sapiens
  MAP TO AC007350.1; EXPRESSED IN PLACENTA, SIGNAL = 4.9; EXPRESSED IN HELA, SIGNAL = 5.3; EXPRESSED IN ADULT LIVER, SIGNAL = 5.6; EXPRESSED IN BT474, SIGNAL = 4.8; EXPRESSED IN BRAIN, SIGNAL = 4.4; EXPRESSED IN BONE MARROW, SIGNAL = 4.9; EXPRESSED IN HEART, SIGNAL =   4; EXPRESSED IN HBL100, SIGNAL = 5.5; EXPRESSED IN FETAL LIVER, SIGNAL = 4.3; EXPRESSED IN LUNG, SIGNAL = 3.9; SWISSPROT HIT: Q28295, EVALUE 1.60e+00; EST_HUMAN HIT: BF339426.1, EVALUE 7.50e+00
KVFDLPFGSCLFRSDVYDNGSSFLYDNCTACTCR

SEQ ID NO: 36100 - protein, 246 aa, Homo sapiens [sequence omitted]

SEQ ID NO: 36101 - protein, 190 aa, Homo sapiens
  MAP TO AC005544.1; EXPRESSED IN HELA, SIGNAL = 1.1; EXPRESSED IN HEART, SIGNAL = 1.3; EXPRESSED IN FETAL LIVER, SIGNAL = 1.6; EXPRESSED IN BT474, SIGNAL = 0.93; EXPRESSED IN BRAIN, SIGNAL = 0.97; EXPRESSED IN LUNG, SIGNAL = 1.4; EXPRESSED IN BONE MARROW, SIGNAL = 1.1; EXPRESSED IN PLACENTA, SIGNAL = 0.96; EST_HUMAN HIT: AU138399.1, EVALUE 3.00e-38; SWISSPROT HIT: P42694, EVALUE 3.00e-39
VDLESNPQNRSPESRPSVVYPSTKFPRKDNLNPRHINLPLPAPHAQYAIPNRHFHPLPQLPRPPFPIPQQHTLLNQQQNNLPEQPNQIPPQPNQVVQQQSQLNQQPQQPPPQLSPAYQAGPNNAFFNSAVAHRPQSPPAEAVIPEQQPPPMLQEGHSPLRAIAQPGPILPSHLNSFIDENPSGLPIGEAL

SEQ ID NO: 36102 - protein, 46 aa, Homo sapiens
  MAP TO AC005544.1; EXPRESSED IN HELA, SIGNAL = 1.1; EXPRESSED IN HEART, SIGNAL = 1.3; EXPRESSED IN FETAL LIVER, SIGNAL = 1.6; EXPRESSED IN BT474, SIGNAL = 0.93; EXPRESSED IN BRAIN, SIGNAL = 0.97; EXPRESSED IN LUNG, SIGNAL = 1.4; EXPRESSED IN BONE MARROW, SIGNAL = 1.1; EXPRESSED IN PLACENTA, SIGNAL = 0.96
SRLICRRKLRRWLLRLLIQLTLLLDYLIWLRWYLIWLFRQIILLLI

SEQ ID NO: 36103 - protein, 44 aa, Homo sapiens
  MAP TO AL109933.8; EXPRESSED IN BT474, SIGNAL =   2; EXPRESSED IN BRAIN, SIGNAL =   2; EXPRESSED IN HBL100, SIGNAL = 1.8; EXPRESSED IN HELA, SIGNAL = 1.6; EXPRESSED IN PLACENTA, SIGNAL = 1.7; EXPRESSED IN FETAL LIVER, SIGNAL = 3.3; EXPRESSED IN LUNG, SIGNAL = 1.6; EXPRESSED IN BONE MARROW, SIGNAL = 1.9; EXPRESSED IN HEART, SIGNAL = 1.6; EXPRESSED IN ADULT LIVER, SIGNAL = 2.5; EST_HUMAN HIT: T73184.1, EVALUE 2.00e-10; SWISSPROT HIT: P00747, EVALUE 3.00e-11
QGEPLDDYVNTQGASLFSVTKKQLGAGSIEECAAKCEEDEEFTC

SEQ ID NO: 36104 - protein, 84 aa, Homo sapiens
  MAP TO AC008925.2; EXPRESSED IN BRAIN, SIGNAL = 5.5; EXPRESSED IN LUNG, SIGNAL = 6.1; EXPRESSED IN HELA, SIGNAL = 6.1; EXPRESSED IN PLACENTA, SIGNAL = 5.2; EXPRESSED IN ADULT LIVER, SIGNAL = 6.4; EXPRESSED IN FETAL LIVER, SIGNAL =   6; EXPRESSED IN BT474, SIGNAL = 5.7; EXPRESSED IN BONE MARROW, SIGNAL = 5.4; EXPRESSED IN HEART, SIGNAL =   5; EXPRESSED IN HBL100, SIGNAL = 5.9; EST_HUMAN HIT: BE543930.1, EVALUE 8.00e-36; SWISSPROT HIT: Q12599, EVALUE 2.60e+00
LPKPEFRFKGQSTKSDSAEDYLLWKRLQGVSAACPAPSSAAHQLEHLSAKLQKIDEQLLAIQNIAENIEQDFPKPEMLDLHCDK

SEQ ID NO: 36105 - protein, 44 aa, Homo sapiens
  MAP TO AC008925.2; EXPRESSED IN BRAIN, SIGNAL = 5.5; EXPRESSED IN LUNG, SIGNAL = 6.1; EXPRESSED IN HELA, SIGNAL = 6.1; EXPRESSED IN PLACENTA, SIGNAL = 5.2; EXPRESSED IN ADULT LIVER, SIGNAL = 6.4; EXPRESSED IN FETAL LIVER, SIGNAL =   6; EXPRESSED IN BT474, SIGNAL = 5.7; EXPRESSED IN BONE MARROW, SIGNAL = 5.4; EXPRESSED IN HEART, SIGNAL =   5; EXPRESSED IN HBL100, SIGNAL = 5.9; EST_HUMAN HIT: BE081896.1, EVALUE 1.00e-11
VCQNQSSDSKDRAQSQTLQKIIYCGNGCKVSLQLALHQALQLTN

SEQ ID NO: 36106 - protein, 58 aa, Homo sapiens
  MAP TO AC007361.1; EXPRESSED IN ADULT LIVER, SIGNAL = 5.4; EXPRESSED IN BRAIN, SIGNAL = 3.6; EXPRESSED IN LUNG, SIGNAL = 3.8; EXPRESSED IN BONE MARROW, SIGNAL = 3.6; EXPRESSED IN PLACENTA, SIGNAL =   5; EXPRESSED IN HEART, SIGNAL =   3; EXPRESSED IN HELA, SIGNAL = 4.4; EXPRESSED IN HBL100, SIGNAL = 3.9; EXPRESSED IN BT474, SIGNAL = 3.4; EXPRESSED IN FETAL LIVER, SIGNAL = 3.7; SWISSPROT HIT: P02870, EVALUE 4.50e+00; EST_HUMAN HIT: AI792832.1, EVALUE 1.00e-15
SHGLGQLHPYGFAGYSLPPGCFNGLVLSVCNFSRHTVQVFMNLPFWGLEDGDPFFTAP

SEQ ID NO: 36107 - protein, 26 aa, Homo sapiens
  MAP TO AC007361.1; EXPRESSED IN ADULT LIVER, SIGNAL = 5.4; EXPRESSED IN BRAIN, SIGNAL = 3.6; EXPRESSED IN LUNG, SIGNAL = 3.8; EXPRESSED IN BONE MARROW, SIGNAL = 3.6; EXPRESSED IN PLACENTA, SIGNAL =   5; EXPRESSED IN HEART, SIGNAL =   3; EXPRESSED IN HELA, SIGNAL = 4.4; EXPRESSED IN HBL100, SIGNAL = 3.9; EXPRESSED IN BT474, SIGNAL = 3.4; EXPRESSED IN FETAL LIVER, SIGNAL = 3.7; EST_HUMAN HIT: AI792832.1, EVALUE 6.00e-06
PTVLGSSTPMALQGTASLLAALMGWC

SEQ ID NO: 36108 - protein, 44 aa, Homo sapiens
  MAP TO AL118501.4; EXPRESSED IN BONE MARROW, SIGNAL = 1.8; EXPRESSED IN LUNG, SIGNAL = 2.2; EXPRESSED IN BRAIN, SIGNAL = 1.6; EXPRESSED IN PLACENTA, SIGNAL =   2; EXPRESSED IN HELA, SIGNAL = 1.6; EXPRESSED IN HEART, SIGNAL = 1.5; EXPRESSED IN HBL100, SIGNAL = 1.7; EXPRESSED IN BT474, SIGNAL = 1.7; EXPRESSED IN FETAL LIVER, SIGNAL = 1.7; EXPRESSED IN ADULT LIVER, SIGNAL = 1.7; EST_HUMAN HIT: AI261297.1, EVALUE 7.00e-07; SWISSPROT HIT: P08547, EVALUE 4.00e-04
VIKKMQIKSTMRYYFTPIRIAVIKRQTITRFGEDVGKLELTYTA

SEQ ID NO: 36109 - protein, 55 aa, Homo sapiens
  MAP TO AC007444.1; EXPRESSED IN PLACENTA, SIGNAL = 3.3; EXPRESSED IN HELA, SIGNAL = 4.8; EXPRESSED IN HEART, SIGNAL = 3.1; EXPRESSED IN ADULT LIVER, SIGNAL = 4.4; EXPRESSED IN BT474, SIGNAL = 1.7; EXPRESSED IN FETAL LIVER, SIGNAL = 3.5; EXPRESSED IN BRAIN, SIGNAL = 3.4; EXPRESSED IN BONE MARROW, SIGNAL = 4.8; EXPRESSED IN HBL100, SIGNAL = 4.2; EXPRESSED IN LUNG, SIGNAL = 3.1; EST_HUMAN HIT: BE798023.1, EVALUE 3.70e+00; SWISSPROT HIT: P19690, EVALUE 8.90e-01
MDSAWFQNIFREDIPLVTLGGGLRASLNLGYHTRGKVVELSSPEKQSQGWDQEVA

SEQ ID NO: 36110 - protein, 22 aa, Homo sapiens
  MAP TO AC007444.1; EXPRESSED IN PLACENTA, SIGNAL = 3.3; EXPRESSED IN HELA, SIGNAL = 4.8; EXPRESSED IN HEART, SIGNAL = 3.1; EXPRESSED IN ADULT LIVER, SIGNAL = 4.4; EXPRESSED IN BT474, SIGNAL = 1.7; EXPRESSED IN FETAL LIVER, SIGNAL = 3.5; EXPRESSED IN BRAIN, SIGNAL = 3.4; EXPRESSED IN BONE MARROW, SIGNAL = 4.8; EXPRESSED IN HBL100, SIGNAL = 4.2; EXPRESSED IN LUNG, SIGNAL = 3.1; EST_HUMAN HIT: BF129798.1, EVALUE 8.20e+00
GLCLVSEHFQGGYSLSDTWRWS

SEQ ID NO: 36111 - protein, 29 aa, Homo sapiens
  MAP TO AL118511.6; EXPRESSED IN PLACENTA, SIGNAL =  14; EXPRESSED IN HEART, SIGNAL = 8.9; EXPRESSED IN FETAL LIVER, SIGNAL =  12; EXPRESSED IN BONE MARROW, SIGNAL =  10; EXPRESSED IN HELA, SIGNAL =  11; EXPRESSED IN HBL100, SIGNAL =  11; EXPRESSED IN BT474, SIGNAL =  34; EXPRESSED IN ADULT LIVER, SIGNAL =  16; EXPRESSED IN BRAIN, SIGNAL =  10; EXPRESSED IN LUNG, SIGNAL =  14
KSPSAGMTESTRAGEEGPGRSGASISRGK

SEQ ID NO: 36112 - protein, 26 aa, Homo sapiens
  MAP TO AL118511.6; EXPRESSED IN PLACENTA, SIGNAL =  14; EXPRESSED IN HEART, SIGNAL = 8.9; EXPRESSED IN FETAL LIVER, SIGNAL =  12; EXPRESSED IN BONE MARROW, SIGNAL =  10; EXPRESSED IN HELA, SIGNAL =  11; EXPRESSED IN HBL100, SIGNAL =  11; EXPRESSED IN BT474, SIGNAL =  34; EXPRESSED IN ADULT LIVER, SIGNAL =  16; EXPRESSED IN BRAIN, SIGNAL =  10; EXPRESSED IN LUNG, SIGNAL =  14
QVTQCRHDREHQSRRGGPRPVWSIHF

SEQ ID NO: 36113 - protein, 34 aa, Homo sapiens
  MAP TO AL050344.11; EXPRESSED IN HBL100, SIGNAL = 1.5; EXPRESSED IN BRAIN, SIGNAL = 1.4; EXPRESSED IN LUNG, SIGNAL = 1.8; EXPRESSED IN BONE MARROW, SIGNAL = 1.6; EXPRESSED IN PLACENTA, SIGNAL = 1.5; EXPRESSED IN HEART, SIGNAL = 1.4; EXPRESSED IN HELA, SIGNAL = 1.6; EXPRESSED IN BT474, SIGNAL = 1.5; EXPRESSED IN ADULT LIVER, SIGNAL = 1.6; EXPRESSED IN FETAL LIVER, SIGNAL = 1.7
ASLQFLLLSSHRLFLQLRLLLHPSEKDNPGYSPY

SEQ ID NO: 36114 - protein, 36 aa, Homo sapiens
  MAP TO AL050344.11; EXPRESSED IN HBL100, SIGNAL = 1.5; EXPRESSED IN BRAIN, SIGNAL = 1.4; EXPRESSED IN LUNG, SIGNAL = 1.8; EXPRESSED IN BONE MARROW, SIGNAL = 1.6; EXPRESSED IN PLACENTA, SIGNAL = 1.5; EXPRESSED IN HEART, SIGNAL = 1.4; EXPRESSED IN HELA, SIGNAL = 1.6; EXPRESSED IN BT474, SIGNAL = 1.5; EXPRESSED IN ADULT LIVER, SIGNAL = 1.6; EXPRESSED IN FETAL LIVER, SIGNAL = 1.7; EST_HUMAN HIT: AV717817.1, EVALUE 2.00e-09
VMTEAEIGAMHFEMEEEATSQGMQVPLESDKKKGNG

SEQ ID NO: 36115 - protein, 24 aa, Homo sapiens
  MAP TO AL096708.14; EXPRESSED IN BT474, SIGNAL = 1.2; EXPRESSED IN FETAL LIVER, SIGNAL = 1.3; EXPRESSED IN BONE MARROW, SIGNAL = 1.4; EXPRESSED IN LUNG, SIGNAL = 1.4; EXPRESSED IN BRAIN, SIGNAL = 1.5; EXPRESSED IN PLACENTA, SIGNAL =   2; EXPRESSED IN HELA, SIGNAL = 1.4; EXPRESSED IN HEART, SIGNAL = 1.7; EXPRESSED IN HBL100, SIGNAL = 1.5; EXPRESSED IN ADULT LIVER, SIGNAL = 1.9; EST_HUMAN HIT: AA670373.1, EVALUE 8.00e-06
EFIKELLSRIRGMRKLSPPQKKSV

SEQ ID NO: 36116 - protein, 221 aa, Homo sapiens
  MAP TO AF130358.1; EXPRESSED IN LUNG, SIGNAL = 2.4; EXPRESSED IN HELA, SIGNAL = 2.9; EXPRESSED IN PLACENTA, SIGNAL = 2.3; EXPRESSED IN HEART, SIGNAL = 1.6; EXPRESSED IN FETAL LIVER, SIGNAL = 2.3; EXPRESSED IN ADULT LIVER, SIGNAL = 2.1; EXPRESSED IN BT474, SIGNAL =   2; EXPRESSED IN BONE MARROW, SIGNAL = 2.5; EXPRESSED IN HBL100, SIGNAL = 3.1; EXPRESSED IN BRAIN, SIGNAL = 2.1; SWISSPROT HIT: P48723, EVALUE 1.00e-124; EST_HUMAN HIT: AU136868.1, EVALUE 1.00e-54
NNKLGGQDFNQRLLQYLYKQIYQTYGFVPSRKEEIHRLRQAVEMVKLNLTLHQSAQLSVLLTVEEQDRKEPHSSDTELPKDKLSSADDHRVNSGFGRGLSDKKSGESQVLFETEISRKLFDTLNEDLFQKILVPIQQVLKEGHLEKTEIDEVVLVGGSTRIPRIRQVIQEFFGKDPNTSVDPDLAVVTGVAIQAGIDGGSWPLQVSALEIPNKHLQKTNFN

SEQ ID NO: 36117 - protein, 38 aa, Homo sapiens
  MAP TO AF130358.1; EXPRESSED IN LUNG, SIGNAL = 2.4; EXPRESSED IN HELA, SIGNAL = 2.9; EXPRESSED IN PLACENTA, SIGNAL = 2.3; EXPRESSED IN HEART, SIGNAL = 1.6; EXPRESSED IN FETAL LIVER, SIGNAL = 2.3; EXPRESSED IN ADULT LIVER, SIGNAL = 2.1; EXPRESSED IN BT474, SIGNAL =   2; EXPRESSED IN BONE MARROW, SIGNAL = 2.5; EXPRESSED IN HBL100, SIGNAL = 3.1; EXPRESSED IN BRAIN, SIGNAL = 2.1; EST_HUMAN HIT: H85311.1, EVALUE 1.00e-15
ETINLEDRTSIRDCFSTYINRSIKHMASCPLGKRKSTD

SEQ ID NO: 36118 - protein, 1394 aa, Homo sapiens
  MAP TO AC000119.1; EXPRESSED IN FETAL LIVER, SIGNAL = 1.3; EXPRESSED IN ADULT LIVER, SIGNAL = 1.2; EXPRESSED IN BONE MARROW, SIGNAL = 0.94; EXPRESSED IN LUNG, SIGNAL = 1.9; EXPRESSED IN HELA, SIGNAL = 1.1; EXPRESSED IN PLACENTA, SIGNAL = 1.3; EXPRESSED IN HBL100, SIGNAL =   1; EXPRESSED IN HEART, SIGNAL = 1.1; SWISSPROT HIT: Q60462, EVALUE 1.40e-01; EST_HUMAN HIT: BE894071.1, EVALUE 1.00e-112
TLQPETGALNLIDPIHEFKALTNTETATEVDIKMKFSNEVFRFASACMNSRTNGTIHFGVKDKPHGEIVGVKITSKAAFIDHFNVMIKKYFEESEINEAKKCIREPRFVEVLLQNNTPSDRFVIEVDTIPKHSICNDKYFYIQMQICKDKIWKQNQNLSLFVREGASSRDILANSKQRDVDFKAFLQNLKSLVASRKEAEEEYGMKAMKKESEGLKLVKLLIGNRDSLDNSYYDWYILVTNKCHPNQIKHLDFLKEIKWFAVLEFDPESMINGVVKAYKESRVANLHFPNQYEDKTTNMWEKISTLNLYQQPSWIFCNGRSDLKSETYKPLEPHLWQRERASEVRKLILFLTDENIMTRGKFLVVFLLLSSVESPGDPLIETFWAFYQALKGMENMLCISVNSHIYQRWKDLLQTRMKMEDELTNHSISTLNIELVNSTILKLKSVTRSSRRFLPARGSSSVILEKKKEDVLTALEILCENECTETDIEKDKSKFLEFKKSKEEHFYRGGKVSWWNFYFSSENYSSDFVKRDSYEKLKDLIHCWAESPKPIFAKIINLYHHPGCGGTTLAMHVLWDLKKNFRCAVLKNKTTDFAEIAEQVINLVTYRAKSHQDYIPVLLLVDDFEEQENVYFLQNAIHSVLAEKDLRYEKTLVIILNCMRSRNPDESAKLADSIALNYQLSSKEQRAFGAKLKEIEKQHKNCENFYSFMIMKSNFDETYIENVVRNILKGQDVDSKEAQLISFLALLSSYVTDSTISVSQCEIFLGIIYTSTPWEPESLEDKMGTYSTLLIKTEVAEYGRYTGVRIIHPLIALYCLKELERSYHLDKCQIALNILEENLFYDSGIGRDKFQHDVQTLLLTRQRKVYGDETDTLFSPLMEALQNKDIEKVLSAGSRRFPQNAFICQALARHFYIKEKDFNTALDWARQAKMKAPKNSYISDTLGQVYKSEIKWWLDGNKNCRSITVNDLTHLLEAAEKASRAFKESQRQTDSKNYETENWSPQKSQRRYDMYNTACFLGEIEVGLYTIQILQLTPFFHKENELSKKHMVQFLSGKWTIPPDPRNECYLALSKFTSHLKNLQSDLKRCFDFFIDYMVLLKMRYTQKEIAEIMLSKKVSRCFRKYTELFCHLDPCLLQSKESQLLQEENCRKKLEALRADRFAGLLEYLNPNYKDATTMESIVNEYAFLLQQNSKKPMTNEKQNSILANIILSCLKPNSKLIQPLTTLKKQLREVLQFVGLSHQYPGPYFLACLLFWPENQELDQDSKLIEKYVSSLNRSFRGQYKRMCRSKQASTLFYLGKRKGLNSIVHKAKIEQYFDKAQNTNSLWHSGDVWKKNEVKDLLRRLTGQAEGKLISVEYGTEEKIKIPVISVYSGPLRSGRNIERVSFYLGFSIEG

SEQ ID NO: 36119 - protein, 45 aa, Homo sapiens
  MAP TO AC007563.1; EXPRESSED IN PLACENTA, SIGNAL = 1.1; EXPRESSED IN HELA, SIGNAL = 0.59; EXPRESSED IN HEART, SIGNAL =   1; EXPRESSED IN BRAIN, SIGNAL = 1.4; EXPRESSED IN ADULT LIVER, SIGNAL = 0.79; EXPRESSED IN HBL100, SIGNAL = 0.67; EXPRESSED IN BONE MARROW, SIGNAL = 0.76; EXPRESSED IN BT474, SIGNAL = 0.87; EXPRESSED IN LUNG, SIGNAL = 0.73; EXPRESSED IN FETAL LIVER, SIGNAL = 0.64; EST_HUMAN HIT: R51284.1, EVALUE 1.20e+00
GGTSAGRTHGLGVAVNEAEQVWLGPNCELPCGSCELLPSSSSTAQ

SEQ ID NO: 36120 - protein, 64 aa, Homo sapiens
  MAP TO AC007963.1; EXPRESSED IN ADULT LIVER, SIGNAL = 1.3; EXPRESSED IN BRAIN, SIGNAL = 1.2; EXPRESSED IN HEART, SIGNAL = 1.2; EXPRESSED IN BONE MARROW, SIGNAL = 1.6; EXPRESSED IN HBL100, SIGNAL = 0.94; EXPRESSED IN LUNG, SIGNAL = 1.3; EXPRESSED IN HELA, SIGNAL = 1.1; EXPRESSED IN PLACENTA, SIGNAL =   1; EXPRESSED IN BT474, SIGNAL = 0.96; EXPRESSED IN FETAL LIVER, SIGNAL = 1.3; SWISSPROT HIT: P48819, EVALUE 9.00e+00; EST_HUMAN HIT: BE242150.1, EVALUE 3.00e-07
  unsure 2
TXAIRAGGHGPDRVRPLPAASSGMKSSKSSTSLAFESRLSRVWIKMHRARQSAWIPWVGRIEEG

SEQ ID NO: 36121 - protein, 43 aa, Homo sapiens
  MAP TO AC007963.1; EXPRESSED IN ADULT LIVER, SIGNAL = 1.3; EXPRESSED IN BRAIN, SIGNAL = 1.2; EXPRESSED IN HEART, SIGNAL = 1.2; EXPRESSED IN BONE MARROW, SIGNAL = 1.6; EXPRESSED IN HBL100, SIGNAL = 0.94; EXPRESSED IN LUNG, SIGNAL = 1.3; EXPRESSED IN HELA, SIGNAL = 1.1; EXPRESSED IN PLACENTA, SIGNAL =   1; EXPRESSED IN BT474, SIGNAL = 0.96; EXPRESSED IN FETAL LIVER, SIGNAL = 1.3; EST_HUMAN HIT: BE242150.1, EVALUE 9.00e-16
  unsure 42
HTLLSRDSKAKEVEDLELFMPEEAAGRGRTRSGPWPPALMAXV

SEQ ID NO: 36122 - protein, 93 aa, Homo sapiens
  MAP TO AL109919.6; EXPRESSED IN BT474, SIGNAL =   2; EXPRESSED IN FETAL LIVER, SIGNAL = 2.4; EXPRESSED IN ADULT LIVER, SIGNAL = 5.3; EXPRESSED IN BONE MARROW, SIGNAL =   2; EXPRESSED IN LUNG, SIGNAL = 1.8; EXPRESSED IN BRAIN, SIGNAL = 2.5; EXPRESSED IN PLACENTA, SIGNAL = 1.9; EXPRESSED IN HELA, SIGNAL = 2.4; EXPRESSED IN HEART, SIGNAL =   2; EXPRESSED IN HBL100, SIGNAL = 2.3; SWISSPROT HIT: P35446, EVALUE 1.60e+00; EST_HUMAN HIT: BF667906.1, EVALUE 4.80e+00
TTICSGQSPVNSLLWKALFSQTVQITQMNEVLSPGKLNNEIRRQSGKAKGGITEKGQEAEKGHEGAVEAEVTAIFKYREAVIKQMFSGCLRKD

SEQ ID NO: 36123 - protein, 102 aa, Homo sapiens
  MAP TO AC006390.8; EXPRESSED IN FETAL LIVER, SIGNAL = 1.2; EXPRESSED IN LUNG, SIGNAL = 0.85; EXPRESSED IN HELA, SIGNAL = 1.1; EXPRESSED IN PLACENTA, SIGNAL = 1.2; EXPRESSED IN BT474, SIGNAL = 1.5; EXPRESSED IN HEART, SIGNAL = 1.1; EXPRESSED IN BRAIN, SIGNAL = 1.3; EXPRESSED IN ADULT LIVER, SIGNAL = 1.2; EXPRESSED IN HBL100, SIGNAL = 1.3; EXPRESSED IN BONE MARROW, SIGNAL = 0.85; SWISSPROT HIT: P35210, EVALUE 4.80e+00; EST_HUMAN HIT: BF574467.1, EVALUE 1.40e+00
VISLKISLKIALLTQQLNNIKVLSKLLCNSLHVPFTVTRSCSNPKQHIFIGHHVKRNSDNSRRPVPSDRTVASIFFIYLNSQISYVSSIEQGFPQISSTVYG

SEQ ID NO: 36124 - protein, 44 aa, Homo sapiens
  MAP TO AL118523.9; EXPRESSED IN FETAL LIVER, SIGNAL = 8.7; EXPRESSED IN ADULT LIVER, SIGNAL =  11; EXPRESSED IN HELA, SIGNAL = 8.5; EXPRESSED IN HBL100, SIGNAL = 7.8; EXPRESSED IN BT474, SIGNAL = 7.5; EXPRESSED IN BRAIN, SIGNAL = 7.5; EXPRESSED IN LUNG, SIGNAL =  10; EXPRESSED IN BONE MARROW, SIGNAL = 8.5; EXPRESSED IN PLACENTA, SIGNAL = 9.1; EXPRESSED IN HEART, SIGNAL = 7.1; SWISSPROT HIT: P23622, EVALUE 3.50e+00
VDFENIVDVFTSIIARVYIFPSASGTNKAWHSSTLAKAEGRFED

SEQ ID NO: 36125 - protein, 78 aa, Homo sapiens
  MAP TO AC007632.4; EXPRESSED IN FETAL LIVER, SIGNAL = 0.61; EXPRESSED IN LUNG, SIGNAL = 0.73; EXPRESSED IN HELA, SIGNAL = 0.68; EXPRESSED IN BONE MARROW, SIGNAL = 0.69; EXPRESSED IN ADULT LIVER, SIGNAL = 1.1; EXPRESSED IN HEART, SIGNAL = 0.83; EXPRESSED IN PLACENTA, SIGNAL = 0.81; EXPRESSED IN BT474, SIGNAL = 0.8; SWISSPROT HIT: Q03656, EVALUE 1.90e+00; EST_HUMAN HIT: BF347585.1, EVALUE 3.80e+00
ILTLSDTKILLGEVQSQNSYSDHDTNKNNKNRKVGDDNGKRNKETSEEEMKKEESDMEEKGGRGMAYGVPTAMEPKSV

SEQ ID NO: 36126 - protein, 18 aa, Homo sapiens
  MAP TO AC007632.4; EXPRESSED IN FETAL LIVER, SIGNAL = 0.61; EXPRESSED IN LUNG, SIGNAL = 0.73; EXPRESSED IN HELA, SIGNAL = 0.68; EXPRESSED IN BONE MARROW, SIGNAL = 0.69; EXPRESSED IN ADULT LIVER, SIGNAL = 1.1; EXPRESSED IN HEART, SIGNAL = 0.83; EXPRESSED IN PLACENTA, SIGNAL = 0.81; EXPRESSED IN BT474, SIGNAL = 0.8
YTHSIRYQNPVRGGTEPE

SEQ ID NO: 36127 - protein, 112 aa, Homo sapiens
  MAP TO AC010899.2; EXPRESSED IN BT474, SIGNAL =   1; EXPRESSED IN ADULT LIVER, SIGNAL = 1.3; EXPRESSED IN BRAIN, SIGNAL = 1.3; EXPRESSED IN LUNG, SIGNAL = 1.3; EXPRESSED IN BONE MARROW, SIGNAL = 1.2; EXPRESSED IN PLACENTA, SIGNAL =   1; EXPRESSED IN HEART, SIGNAL = 1.2; EXPRESSED IN HELA, SIGNAL = 1.1; EXPRESSED IN HBL100, SIGNAL = 1.1; EXPRESSED IN FETAL LIVER, SIGNAL = 1.2; EST_HUMAN HIT: T07733.1, EVALUE 4.00e-51; SWISSPROT HIT: P54764, EVALUE 5.00e-64
PPSAPLNLISNVNETSVNLEWSSPQNTGGRQDISYNVVCKKCGAGDPSKCRPCGSGVHYTPQQNGLKTTKVSITDLLAHTNYTFEIWAVNGVSKYNPNPDQSVSVTVTTNQA

SEQ ID NO: 36128 - protein, 100 aa, Homo sapiens
  MAP TO AC010491.2; EXPRESSED IN FETAL LIVER, SIGNAL =  42; EXPRESSED IN BT474, SIGNAL =  43; EXPRESSED IN ADULT LIVER, SIGNAL = 4.3; EXPRESSED IN BRAIN, SIGNAL =  21; EXPRESSED IN PLACENTA, SIGNAL =  26; EXPRESSED IN LUNG, SIGNAL =  67; EXPRESSED IN BONE MARROW, SIGNAL =  23; EXPRESSED IN HEART, SIGNAL =  19; EXPRESSED IN HELA, SIGNAL =  48; EXPRESSED IN HBL100, SIGNAL =  50; EST_HUMAN HIT: BF315949.1, EVALUE 3.00e-53; SWISSPROT HIT: P17408, EVALUE 1.10e+00
HLCQFLVGMVTTCWSQVLTCLGSRDGKSPVRMAMPVEPCCLRLWTASYHQLVQLTSPCACLSRMSTKLVVLVVFLLAEWRLVFSNPVWWSPLLQSTLQQK

SEQ ID NO: 36129 - protein, 94 aa, Homo sapiens
  MAP TO AC007111.1; EXPRESSED IN HBL100, SIGNAL = 2.6; EXPRESSED IN HEART, SIGNAL = 1.2; EXPRESSED IN BT474, SIGNAL = 0.98; EXPRESSED IN BONE MARROW, SIGNAL = 0.92; EXPRESSED IN BRAIN, SIGNAL = 1.9; EXPRESSED IN HELA, SIGNAL = 2.2; EXPRESSED IN PLACENTA, SIGNAL = 1.2; EST_HUMAN HIT: AI561002.1, EVALUE 8.00e-49; SWISSPROT HIT: P15302, EVALUE 6.00e-10
TGCLVRAVEMAAQRQADIIGKPSRFIFDCVSQEYGINPERTVMVGDRLDTDILLGATCGLKTILTLTGVSTLGDVKNNQESDCVSKKKMVPDFY

SEQ ID NO: 36130 - protein, 87 aa, Homo sapiens
  MAP TO AC007111.1; EXPRESSED IN HBL100, SIGNAL = 2.6; EXPRESSED IN HEART, SIGNAL = 1.2; EXPRESSED IN BT474, SIGNAL = 0.98; EXPRESSED IN BONE MARROW, SIGNAL = 0.92; EXPRESSED IN BRAIN, SIGNAL = 1.9; EXPRESSED IN HELA, SIGNAL = 2.2; EXPRESSED IN PLACENTA, SIGNAL = 1.2; EST_HUMAN HIT: AI561002.1, EVALUE 8.00e-32
PLTRSPVPRRYRVSGPSRGDGRPAPGRHHREAQPLHFRLRVPGIRHQPRAHRHGGRPPGHRHPPRRHLWPEDHPDPHRSLHSRGCEE

SEQ ID NO: 36131 - protein, 68 aa, Homo sapiens
  MAP TO AL121575.6; EXPRESSED IN LUNG, SIGNAL = 1.4; EXPRESSED IN HELA, SIGNAL = 1.5; EXPRESSED IN PLACENTA, SIGNAL = 0.95; EXPRESSED IN HBL100, SIGNAL = 1.2; EXPRESSED IN HEART, SIGNAL = 1.1; EXPRESSED IN ADULT LIVER, SIGNAL = 0.99; EXPRESSED IN FETAL LIVER, SIGNAL = 1.3; EXPRESSED IN BONE MARROW, SIGNAL = 1.3; EXPRESSED IN BRAIN, SIGNAL =   1; EST_HUMAN HIT: AA325467.1, EVALUE 3.00e-11; SWISSPROT HIT: P09807, EVALUE 8.90e+00
AFFKQNNVPQESRFNLKKNVEEEYRKWKSMSNENDIITHFSMQGSPPLFLCLLWKMLLETDHINQIGY

SEQ ID NO: 36132 - protein, 605 aa, Homo sapiens
  MAP TO AC005261.1; EXPRESSED IN HEART, SIGNAL = 1.9; EXPRESSED IN FETAL LIVER, SIGNAL = 1.7; EXPRESSED IN BT474, SIGNAL = 1.5; EXPRESSED IN LUNG, SIGNAL = 1.2; EXPRESSED IN BRAIN, SIGNAL = 1.6; EXPRESSED IN HELA, SIGNAL = 1.5; EXPRESSED IN PLACENTA, SIGNAL = 1.2; EXPRESSED IN HBL100, SIGNAL = 1.2; EST_HUMAN HIT: AF150239.1, EVALUE 1.00e-111; EST_HUMAN HIT: AF150239.1, EVALUE 1.00e-111; SWISSPROT HIT: P52740, EVALUE 0.00e+00
FWCEAEHEAPSEQSVSVEGVSQVRTAESGLFQKAHPCEMCDPLLKDILHLAEHQGSHLTQKLCTRGLCRRRFSFSANFYQHQKQHNGENCFRGDDGGASFVKSCTVHMLGRSFTCREEGMDLPDSSGLFQHQTTYNRVSPCRRTECMESFPHSSSLRQHQGDYDGQMLFSCGDEGKAFLDTFTLLDSQMTHAEVRPFRCLPCGNVFKEKSALINHRKIHSGEISHVCKECGKAFIHLHHLKMHQKFHTGKRHYTCSECGKAFSRKDTLVQHQRVHTGERSYDCSECGKAYSRSSHLVQHQRIHTGERPYKCNKCGKAFSRKDTLVQHQRFHTGERPYECSECGKFFSQSSHLIEHWRIHTGARPYECIECGKFFSHNSSLIKHRRVHTGARSYVCSKCGKAFGCKDTLVQHQIIHTGARPYECSECGKAFSRKDTLVQHQKIHTGERPYECGECGKFFSHSSNLIVHQRIHTGAKPYECNECGKCFSHNSSLILHQRVHTGARPYVCSECGKAYISSSHLVQHKKVHTGARPYECSECGKFFSRNSGLILHQRVHTGEKPYVCSECGKAYSRSSHLVRHQKAHTGERAHECNSFGGPLAASLKLV

SEQ ID NO: 36133 - protein, 237 aa, Homo sapiens
  MAP TO AC005366.1; EXPRESSED IN LUNG, SIGNAL = 1.4; EXPRESSED IN BRAIN, SIGNAL =   2; EXPRESSED IN HELA, SIGNAL = 1.3; EXPRESSED IN PLACENTA, SIGNAL =   1; EXPRESSED IN HBL100, SIGNAL = 1.1; EXPRESSED IN BT474, SIGNAL = 0.95; EXPRESSED IN BONE MARROW, SIGNAL = 0.97; EXPRESSED IN HEART, SIGNAL = 1.5; EXPRESSED IN ADULT LIVER, SIGNAL = 1.1; EXPRESSED IN FETAL LIVER, SIGNAL = 1.2; SWISSPROT HIT: Q01056, EVALUE 6.00e+00; EST_HUMAN HIT: AW444963.1, EVALUE 4.00e-03
VRTAVPIPADLPPQKLVIVVKDSGSPPLSTSVTLLVSLEEDTHPVVPDLRESSAPREGESRLTLYLAVSLVAICFVSFGSFVALLSKCLRGAACGVTCFPAGTCACLTRSRRREGLPPSNGILRIQLGSDDPIKFVDVGGHSHGCTPLASAPTRSDSFMMVKSPSAPMAGEPVRPSCPPSDLLYGLEVRPLQAQQMLEGYSDPGIWLGHVLESTGLSVSAHSDVTIFVRGNYVVDAV

SEQ ID NO: 36134 - protein, 53 aa, Homo sapiens
  MAP TO AL121763.5; EXPRESSED IN BT474, SIGNAL = 0.98; EXPRESSED IN BRAIN, SIGNAL = 0.99; EXPRESSED IN BONE MARROW, SIGNAL = 1.5; EXPRESSED IN PLACENTA, SIGNAL = 1.2; EXPRESSED IN HBL100, SIGNAL = 1.2; EXPRESSED IN HELA, SIGNAL = 0.94; EXPRESSED IN HEART, SIGNAL = 1.1; EXPRESSED IN FETAL LIVER, SIGNAL = 1.2; EXPRESSED IN ADULT LIVER, SIGNAL = 1.2; EST_HUMAN HIT: AL039044.1, EVALUE 3.00e-08; SWISSPROT HIT: O51596, EVALUE 5.90e+00
EESKMVVELPSKDVQVKASGDGDAESQKLDDEATALLHFRIRAKKLNLRHPLV

SEQ ID NO: 36135 - protein, 55 aa, Homo sapiens
  MAP TO AC007126.5; EXPRESSED IN BONE MARROW, SIGNAL = 1.3; EXPRESSED IN LUNG, SIGNAL = 1.3; EXPRESSED IN BRAIN, SIGNAL = 1.3; EXPRESSED IN HELA, SIGNAL = 1.5; EXPRESSED IN PLACENTA, SIGNAL = 1.2; EXPRESSED IN HBL100, SIGNAL = 1.2; EXPRESSED IN HEART, SIGNAL = 1.1; EXPRESSED IN FETAL LIVER, SIGNAL = 1.3; EXPRESSED IN BT474, SIGNAL =   1; EXPRESSED IN ADULT LIVER, SIGNAL = 1.6; SWISSPROT HIT: Q9WXC3, EVALUE 6.10e+00; EST_HUMAN HIT: BE223006.1, EVALUE 3.70e+00
KTHRQRNDCHEGRSPLTVLMPLYARPCREAAGSDPWAEGRRGTGGKSLCCGFQRN

SEQ ID NO: 36136 - protein, 26 aa, Homo sapiens
  MAP TO AC007681.2; EXPRESSED IN FETAL LIVER, SIGNAL = 0.69; EXPRESSED IN LUNG, SIGNAL = 0.74; EXPRESSED IN HELA, SIGNAL =   1; EXPRESSED IN BT474, SIGNAL = 0.84; EXPRESSED IN PLACENTA, SIGNAL = 1.2; EXPRESSED IN HEART, SIGNAL = 1.3; EXPRESSED IN BRAIN, SIGNAL =   1; EXPRESSED IN ADULT LIVER, SIGNAL = 1.1; EXPRESSED IN HBL100, SIGNAL = 0.79; EXPRESSED IN BONE MARROW, SIGNAL = 0.78; EST_HUMAN HIT: BE165698.1, EVALUE 4.20e+00
REMKMISTSSILWTLLWPNCCQPPGF

SEQ ID NO: 36137 - protein, 49 aa, Homo sapiens
  MAP TO AC007200.1; EXPRESSED IN BRAIN, SIGNAL = 6.4; EXPRESSED IN LUNG, SIGNAL =  12; EXPRESSED IN HEART, SIGNAL = 6.4; EXPRESSED IN FETAL LIVER, SIGNAL = 6.7; EXPRESSED IN BONE MARROW, SIGNAL = 6.1; EXPRESSED IN PLACENTA, SIGNAL = 6.8; EXPRESSED IN HELA, SIGNAL = 8.1; EXPRESSED IN HBL100, SIGNAL = 6.9; EXPRESSED IN BT474, SIGNAL =   7; EXPRESSED IN ADULT LIVER, SIGNAL = 6.5; SWISSPROT HIT: P05630, EVALUE 4.60e+00; EST_HUMAN HIT: H94222.1, EVALUE 1.00e-07
RSMGLGAVEQGAVLLQEAGAAQEPMAGGGRLMHGRLQVPSPALRGQLRP

SEQ ID NO: 36138 - protein, 25 aa, Homo sapiens
  MAP TO AC005497.2; EXPRESSED IN ADULT LIVER, SIGNAL = 1.3; EXPRESSED IN BONE MARROW, SIGNAL = 0.95; EXPRESSED IN HELA, SIGNAL =   1; EXPRESSED IN BRAIN, SIGNAL =   1; EXPRESSED IN HEART, SIGNAL = 0.95; EXPRESSED IN PLACENTA, SIGNAL = 0.84; EXPRESSED IN BT474, SIGNAL = 0.94; EXPRESSED IN HBL100, SIGNAL = 1.1; EXPRESSED IN FETAL LIVER, SIGNAL =   1; EXPRESSED IN LUNG, SIGNAL =   1; EST_HUMAN HIT: AA868218.1, EVALUE 4.00e-03
PCHTPCEGNKETLPVSTGALPEIPE

SEQ ID NO: 36139 - protein, 33 aa, Homo sapiens
  MAP TO AC007221.1; EXPRESSED IN HBL100, SIGNAL = 3.9; EXPRESSED IN HELA, SIGNAL = 4.1; EXPRESSED IN HEART, SIGNAL = 3.9; EXPRESSED IN FETAL LIVER, SIGNAL = 4.1; EXPRESSED IN BT474, SIGNAL = 4.4; EXPRESSED IN ADULT LIVER, SIGNAL = 4.6; EXPRESSED IN BRAIN, SIGNAL = 3.4; EXPRESSED IN PLACENTA, SIGNAL = 3.8; EXPRESSED IN LUNG, SIGNAL = 3.9; EXPRESSED IN BONE MARROW, SIGNAL = 3.5; EST_HUMAN HIT: BE964136.2, EVALUE 7.60e+00; SWISSPROT HIT: P48016, EVALUE 6.30e+00
HEIVDWKSQHMTIASNGIHDHGDDDNVEEKEML

SEQ ID NO: 36140 - protein, 82 aa, Homo sapiens
  MAP TO AC010947.2; EXPRESSED IN HBL100, SIGNAL =   3; EXPRESSED IN HELA, SIGNAL = 3.1; EXPRESSED IN HEART, SIGNAL = 5.9; EXPRESSED IN FETAL LIVER, SIGNAL = 3.2; EXPRESSED IN BT474, SIGNAL = 2.9; EXPRESSED IN ADULT LIVER, SIGNAL =   4; EXPRESSED IN BRAIN, SIGNAL = 2.9; EXPRESSED IN PLACENTA, SIGNAL = 3.1; EXPRESSED IN LUNG, SIGNAL = 3.3; EXPRESSED IN BONE MARROW, SIGNAL = 3.2
PRRGEERVGARGGGGRGGRGGGRRGGAREGPRGDGGKGGGEGGAREGWRGEGGRGGEGEERGGGEEEEEEMEEEEECQPDIV

SEQ ID NO: 36141 - protein, 36 aa, Homo sapiens
  MAP TO AC008872.2; EXPRESSED IN ADULT LIVER, SIGNAL = 2.3; EXPRESSED IN FETAL LIVER, SIGNAL = 2.5; EXPRESSED IN LUNG, SIGNAL =   2; EXPRESSED IN BRAIN, SIGNAL = 2.3; EXPRESSED IN HBL100, SIGNAL = 2.2; EXPRESSED IN HELA, SIGNAL = 2.1; EXPRESSED IN PLACENTA, SIGNAL = 2.5; EXPRESSED IN HEART, SIGNAL = 1.7; EXPRESSED IN BT474, SIGNAL = 1.9; EXPRESSED IN BONE MARROW, SIGNAL =   2; SWISSPROT HIT: P50012, EVALUE 7.20e-01
VIQNVLLTAFKGMIQALDVLFSILLLCPFVQLFKLL

SEQ ID NO: 36142 - protein, 24 aa, Homo sapiens
  MAP TO AC007159.4; EXPRESSED IN BRAIN, SIGNAL = 3.3; EXPRESSED IN HELA, SIGNAL =  13; EXPRESSED IN HBL100, SIGNAL =  17; EXPRESSED IN HEART, SIGNAL = 3.2; EXPRESSED IN FETAL LIVER, SIGNAL =   4; EXPRESSED IN BONE MARROW, SIGNAL = 4.1; EXPRESSED IN LUNG, SIGNAL = 3.6; EXPRESSED IN PLACENTA, SIGNAL = 6.2; EXPRESSED IN ADULT LIVER, SIGNAL =   2; EXPRESSED IN BT474, SIGNAL = 6.8
DDDDDDDDDDFDDEETEEKAPVKK

SEQ ID NO: 36143 - protein, 33 aa, Homo sapiens
  MAP TO AC007159.4; EXPRESSED IN BRAIN, SIGNAL = 3.3; EXPRESSED IN HELA, SIGNAL =  13; EXPRESSED IN HBL100, SIGNAL =  17; EXPRESSED IN HEART, SIGNAL = 3.2; EXPRESSED IN FETAL LIVER, SIGNAL =   4; EXPRESSED IN BONE MARROW, SIGNAL = 4.1; EXPRESSED IN LUNG, SIGNAL = 3.6; EXPRESSED IN PLACENTA, SIGNAL = 6.2; EXPRESSED IN ADULT LIVER, SIGNAL =   2; EXPRESSED IN BT474, SIGNAL = 6.8; EST_HUMAN HIT: AW378490.1, EVALUE 1.30e+00
SSSSKSSSSSSSSSSSASSYHHLHQQQVLLFSV

SEQ ID NO: 36144 - protein, 79 aa, Homo sapiens
  MAP TO AC007228.1; EXPRESSED IN BONE MARROW, SIGNAL = 1.7; EXPRESSED IN BRAIN, SIGNAL = 1.6; EXPRESSED IN LUNG, SIGNAL = 1.8; EXPRESSED IN PLACENTA, SIGNAL = 1.5; EXPRESSED IN HELA, SIGNAL = 1.7; EXPRESSED IN HBL100, SIGNAL = 1.5; EXPRESSED IN HEART, SIGNAL = 1.7; EXPRESSED IN BT474, SIGNAL = 1.4; EXPRESSED IN FETAL LIVER, SIGNAL = 1.5; EXPRESSED IN ADULT LIVER, SIGNAL = 1.8; SWISSPROT HIT: P55194, EVALUE 7.10e-01; EST_HUMAN HIT: BE273019.1, EVALUE 7.10e-02
PERTLEQEEKEKLVSEAPPPPGAMQSLRPEQTRGLLEPERTKTLLPRESRAWEKPPHPACTKDWEAVEVGASSHDSDEK

SEQ ID NO: 36145 - protein, 150 aa, Homo sapiens
  MAP TO AC005829.1; EXPRESSED IN HEART, SIGNAL = 1.3; EXPRESSED IN FETAL LIVER, SIGNAL = 1.8; EXPRESSED IN ADULT LIVER, SIGNAL = 2.1; EXPRESSED IN BT474, SIGNAL = 1.7; EXPRESSED IN BRAIN, SIGNAL = 1.9; EXPRESSED IN BONE MARROW, SIGNAL = 2.9; EXPRESSED IN LUNG, SIGNAL = 3.1; EXPRESSED IN HELA, SIGNAL = 2.8; EXPRESSED IN PLACENTA, SIGNAL = 3.4; EXPRESSED IN HBL100, SIGNAL = 2.2; EST_HUMAN HIT: H15570.1, EVALUE 2.00e-21; SWISSPROT HIT: Q02455, EVALUE 1.20e+00
SDTRITALLRRQADIESRARRLQKRLQVVQAKQVERHIQHQLGGFLEKTLSKLPNLESLRPRSQLMLTRKAEAALRKAASETTTSEGLSNFLKSNSISEELERFTASGIANLRCSEQAFDSDVTDSSSGGESDIEEEELTRADPEQRHVP

SEQ ID NO: 36146 - protein, 51 aa, Homo sapiens
  MAP TO AC005829.1; EXPRESSED IN HEART, SIGNAL = 1.3; EXPRESSED IN FETAL LIVER, SIGNAL = 1.8; EXPRESSED IN ADULT LIVER, SIGNAL = 2.1; EXPRESSED IN BT474, SIGNAL = 1.7; EXPRESSED IN BRAIN, SIGNAL = 1.9; EXPRESSED IN BONE MARROW, SIGNAL = 2.9; EXPRESSED IN LUNG, SIGNAL = 3.1; EXPRESSED IN HELA, SIGNAL = 2.8; EXPRESSED IN PLACENTA, SIGNAL = 3.4; EXPRESSED IN HBL100, SIGNAL = 2.2; SWISSPROT HIT: P22533, EVALUE 6.00e+00; EST_HUMAN HIT: BE742019.1, EVALUE 8.00e-15
TQQLKHTISGSNWLPHPLPCPLAVPKITATPTSLLLPTEPKEKPLLQRIPA

SEQ ID NO: 36147 - protein, 23 aa, Homo sapiens
  MAP TO AC003682.1; EXPRESSED IN PLACENTA, SIGNAL = 6.2; EXPRESSED IN ADULT LIVER, SIGNAL = 5.8; EXPRESSED IN HBL100, SIGNAL = 5.4; EXPRESSED IN HELA, SIGNAL = 5.7; EXPRESSED IN HEART, SIGNAL =   5; EXPRESSED IN FETAL LIVER, SIGNAL = 6.8; EXPRESSED IN BT474, SIGNAL = 5.8; EXPRESSED IN LUNG, SIGNAL = 6.2; EXPRESSED IN BRAIN, SIGNAL = 4.6; EXPRESSED IN BONE MARROW, SIGNAL = 4.9
AFCRERFCGRTVTGQDSKGRYIH

SEQ ID NO: 36148 - protein, 536 aa, Homo sapiens
  MAP TO AC003682.1; EXPRESSED IN PLACENTA, SIGNAL = 6.2; EXPRESSED IN ADULT LIVER, SIGNAL = 5.8; EXPRESSED IN HBL100, SIGNAL = 5.4; EXPRESSED IN HELA, SIGNAL = 5.7; EXPRESSED IN HEART, SIGNAL =   5; EXPRESSED IN FETAL LIVER, SIGNAL = 6.8; EXPRESSED IN BT474, SIGNAL = 5.8; EXPRESSED IN LUNG, SIGNAL = 6.2; EXPRESSED IN BRAIN, SIGNAL = 4.6; EXPRESSED IN BONE MARROW, SIGNAL = 4.9; EST_HUMAN HIT: AF150239.1, EVALUE 1.00e-104; SWISSPROT HIT: P52740, EVALUE 0.00e+00; EST_HUMAN HIT: AF150239.1, EVALUE 1.00e-104
CWCGAVDEGTPSAESVSVEELSQGRTPKADTSTDKSHPCEICTPVLRDILQMIELHASPCGQKLYLGGASRDFWMSSNLHQLQKLDNGEKLFKVDGDQASFMMNCRFHVSGKPFTFGEVGRDFSATSGLLQHQVTPTIERPHSRIRHLRVPTGRKPLKYTESRKSFREKSVFIQHQRADSGERPYKCSECGKSFSQSSGFLRHRKAHGRTRTHECSECGKSFSRKTHLTQHQRVHTGERPYDCSECGKSFRQVSVLIQHQRVHTGERPYECSECGKSFSHSTNLYRHRSAHTSTRPYECSECGKSFSHSTNLFRHWRVHTGVRPYECSECGKAFSCNIYLIHHQRFHTGERPYVCSECGKSFGQKSVLIQHQRVHTGERPYECSECGKVFSQSSGLFRHRRAHTKTKPYECSECEKSFSCKTDLIRHQTVHTGERPYECSVCGKSFIRKTHLIRHQTVHTNERPYECDECGKSYSQSSALLQHRRVHTGERPYECRECGKSFTRKNHLIQHKTVHTGERPYECSECGKSFSQSSGL

SEQ ID NO: 36149 - protein, 251 aa, Homo sapiens
  MAP TO AC005866.3; EXPRESSED IN LUNG, SIGNAL = 7.4; EXPRESSED IN HELA, SIGNAL = 6.9; EXPRESSED IN PLACENTA, SIGNAL =   7; EXPRESSED IN HBL100, SIGNAL = 6.4; EXPRESSED IN ADULT LIVER, SIGNAL = 8.4; EXPRESSED IN BT474, SIGNAL = 6.1; EXPRESSED IN BONE MARROW, SIGNAL = 6.2; EXPRESSED IN BRAIN, SIGNAL = 6.6; EXPRESSED IN HEART, SIGNAL = 5.6; EXPRESSED IN FETAL LIVER, SIGNAL = 8.1; EST_HUMAN HIT: BF341969.1, EVALUE 2.00e-06; SWISSPROT HIT: Q51389, EVALUE 4.40e-01
HVVAGIFTFSRAVAGVFTLFRAVAGIFTLFCAVAGVFLLSHAVACVFTLFRAVAGVFTLFHAVAGVFTHSCAVAGVFTLFCAVAGVFILFCAVAGVFTLFCVVAGVFTLFPAVAGVFTLFRAVAGVFTLSCAVAGVFTLFPAVADVFTLFCAVAGVFTLFPAVADVFTLFCAVAGVFTLFRAVAGVFTFFHAVAGVFVLSRAVAGVFTPSHAVGSVFTLFWSTLLFSCSRDPAELTEFFFLIYKLPQMTTH

SEQ ID NO: 36150 - protein, 44 aa, Homo sapiens
  MAP TO AL121879.4; EXPRESSED IN BONE MARROW, SIGNAL = 1.7; EXPRESSED IN PLACENTA, SIGNAL = 1.5; EXPRESSED IN FETAL LIVER, SIGNAL = 1.2; EXPRESSED IN ADULT LIVER, SIGNAL = 2.1; EXPRESSED IN BT474, SIGNAL = 1.5; EXPRESSED IN HEART, SIGNAL = 0.94; EXPRESSED IN HELA, SIGNAL = 1.8; EXPRESSED IN HBL100, SIGNAL = 2.3; EXPRESSED IN BRAIN, SIGNAL = 1.1; SWISSPROT HIT: Q57065, EVALUE 2.10e+00; EST_HUMAN HIT: AW857579.1, EVALUE 3.00e-12
RLASPVNPPSKQDTPIAVGNWMMTTLATSSWIGVKKGPAVVVSS

SEQ ID NO: 36151 - protein, 349 aa, Homo sapiens
  MAP TO AC005726.1; EXPRESSED IN FETAL LIVER, SIGNAL = 3.1; EXPRESSED IN LUNG, SIGNAL = 3.4; EXPRESSED IN HBL100, SIGNAL = 2.8; EXPRESSED IN HELA, SIGNAL = 6.6; EXPRESSED IN PLACENTA, SIGNAL = 3.3; EXPRESSED IN BT474, SIGNAL = 3.5; EXPRESSED IN ADULT LIVER, SIGNAL = 2.2; EXPRESSED IN BRAIN, SIGNAL = 3.6; EXPRESSED IN BONE MARROW, SIGNAL = 2.6; EXPRESSED IN HEART, SIGNAL = 2.7; EST_HUMAN HIT: BE763527.1, EVALUE 1.00e-31; SWISSPROT HIT: Q13685, EVALUE 1.10e+00
HMYLYQHVLATLQCRDLLRATVFPETVPSLALETSGTTSELEGRAPEPLPPKRLLNLTLEVSTAKLTAFVAEDKFITLAAESVSLSRHGGSLQAYCPELAAGFDGNSIFNFKEVEVQLLPELEEMILHRNPFPALQTLRNRVWLLSFGSVSVEFPYQYDFSRTLDEAVGVQKWLKGLHQGTRAWASPSPVPLPPDLLLKVEHFSWVFLDDVFEVKLHDNYELMKDESKESAKRLQLLDAKVAALRKQHGELLPARKIEELYASLERKNIEIYIQRSRRLYGNTPMRRALLTWSLAGLELVALADASFHGPEHVVEQVQELDPGSPFPPEGLDLVIQWCRMLKCNVKSFL

SEQ ID NO: 36152 - protein, 32 aa, Homo sapiens
  MAP TO AC005726.1; EXPRESSED IN FETAL LIVER, SIGNAL = 3.1; EXPRESSED IN LUNG, SIGNAL = 3.4; EXPRESSED IN HBL100, SIGNAL = 2.8; EXPRESSED IN HELA, SIGNAL = 6.6; EXPRESSED IN PLACENTA, SIGNAL = 3.3; EXPRESSED IN BT474, SIGNAL = 3.5; EXPRESSED IN ADULT LIVER, SIGNAL = 2.2; EXPRESSED IN BRAIN, SIGNAL = 3.6; EXPRESSED IN BONE MARROW, SIGNAL = 2.6; EXPRESSED IN HEART, SIGNAL = 2.7; EST_HUMAN HIT: AI125709.1, EVALUE 1.00e-12; SWISSPROT HIT: O85133, EVALUE 2.80e+00
DLTLEPPRSHVPVPACPGHSTVPRPTKSHCVS

SEQ ID NO: 36153 - protein, 229 aa, Homo sapiens
  MAP TO AB011399.1; EXPRESSED IN BT474, SIGNAL = 3.8; EXPRESSED IN BRAIN, SIGNAL = 3.2; EXPRESSED IN BONE MARROW, SIGNAL = 2.7; EXPRESSED IN HELA, SIGNAL = 3.3; EXPRESSED IN ADULT LIVER, SIGNAL = 3.3; EXPRESSED IN FETAL LIVER, SIGNAL = 3.5; EXPRESSED IN LUNG, SIGNAL = 5.8; EXPRESSED IN PLACENTA, SIGNAL = 4.9; EXPRESSED IN HEART, SIGNAL = 3.2; EXPRESSED IN HBL100, SIGNAL = 3.2; EST_HUMAN HIT: N26539.1, EVALUE 1.00e-40; SWISSPROT HIT: P55196, EVALUE 1.00e-89
RVTRSQEELREDKAYQLERHRIEAAMDRKSDSDMWINQSSSLDSSTSSQEHLNHSSKSVTPASTLTKSGPGRWKTPAAIPATPVAVSQPIRTDLPPPPPPPPVHYAGDFDGMSMDLPLPPPPSANQIGLPSAQVAAAERRKREEHQRWYEKEKARLEEERERKRREQERKLGQMRTQSLNPAPFSPLTAQQMKPEKPSTLQRPQETVIRELQPQQQPRTIERRDLQYIT

SEQ ID NO: 36154 - protein, 45 aa, Homo sapiens
  MAP TO AB011399.1; EXPRESSED IN BT474, SIGNAL = 3.8; EXPRESSED IN BRAIN, SIGNAL = 3.2; EXPRESSED IN BONE MARROW, SIGNAL = 2.7; EXPRESSED IN HELA, SIGNAL = 3.3; EXPRESSED IN ADULT LIVER, SIGNAL = 3.3; EXPRESSED IN FETAL LIVER, SIGNAL = 3.5; EXPRESSED IN LUNG, SIGNAL = 5.8; EXPRESSED IN PLACENTA, SIGNAL = 4.9; EXPRESSED IN HEART, SIGNAL = 3.2; EXPRESSED IN HBL100, SIGNAL = 3.2; EST_HUMAN HIT: AI940198.1, EVALUE 2.10e-02
WLLLNGEREKNISVGMRRRRPAWRRSGRGSGESRRGSWARCALSP

SEQ ID NO: 36155 - protein, 57 aa, Homo sapiens
  MAP TO D87675.1; EXPRESSED IN BONE MARROW, SIGNAL = 2.2; EXPRESSED IN HELA, SIGNAL = 3.7; EXPRESSED IN HEART, SIGNAL = 4.3; EXPRESSED IN ADULT LIVER, SIGNAL = 1.2; EXPRESSED IN BRAIN, SIGNAL = 7.5; EXPRESSED IN LUNG, SIGNAL = 4.4; EXPRESSED IN PLACENTA, SIGNAL = 5.9; EXPRESSED IN HBL100, SIGNAL = 3.3; EXPRESSED IN BT474, SIGNAL = 3.7; EXPRESSED IN FETAL LIVER, SIGNAL =   2; EST_HUMAN HIT: AU124116.1, EVALUE 3.00e-14; SWISSPROT HIT: Q95241, EVALUE 3.00e-15
ERQQLVETHMARVEAMLNDRRRLALENYITALQAVPPRVGLAAAEFTLQVTAQTVRV

SEQ ID NO: 36156 - protein, 80 aa, Homo sapiens
  MAP TO AC010807.2; EXPRESSED IN BT474, SIGNAL = 3.3; EXPRESSED IN FETAL LIVER, SIGNAL = 3.3; EXPRESSED IN PLACENTA, SIGNAL = 3.4; EXPRESSED IN ADULT LIVER, SIGNAL = 5.1; EXPRESSED IN BRAIN, SIGNAL = 2.9; EXPRESSED IN LUNG, SIGNAL = 3.4; EXPRESSED IN BONE MARROW, SIGNAL = 2.5; EXPRESSED IN HEART, SIGNAL = 2.9; EXPRESSED IN HELA, SIGNAL = 3.5; EXPRESSED IN HBL100, SIGNAL = 3.3; EST_HUMAN HIT: BF345179.1, EVALUE 9.30e+00; SWISSPROT HIT: Q64617, EVALUE 1.00e+00
VRGVIMDVMPNYIYSSESLMGYGNPCSVVWKESLAVEGLYKSVMSFIREGNAEDSGFSMSANRRFNVSTFSFKSVLGRVC

SEQ ID NO: 36157 - protein, 60 aa, Homo sapiens
  MAP TO AP000168.1; EXPRESSED IN LUNG, SIGNAL = 0.69; EXPRESSED IN BRAIN, SIGNAL = 0.88; EXPRESSED IN HEART, SIGNAL = 0.95; EXPRESSED IN BONE MARROW, SIGNAL = 3.7; EXPRESSED IN BT474, SIGNAL = 0.75; EXPRESSED IN ADULT LIVER, SIGNAL = 0.79; EXPRESSED IN HELA, SIGNAL = 0.79; EXPRESSED IN FETAL LIVER, SIGNAL = 0.66; EXPRESSED IN HBL100, SIGNAL = 0.69; EST_HUMAN HIT: BE614221.1, EVALUE 6.00e+00; SWISSPROT HIT: O78516, EVALUE 1.50e+00
VVGTLLSSHSCLNSAVTLISNHQEKSLCFLWPVSHNHQVSRGSIGGRHYLYPEEIAKDIQ

SEQ ID NO: 36158 - protein, 54 aa, Homo sapiens
  MAP TO AC011281.2; EXPRESSED IN BT474, SIGNAL = 1.2; EXPRESSED IN BRAIN, SIGNAL = 1.2; EXPRESSED IN LUNG, SIGNAL = 1.8; EXPRESSED IN PLACENTA, SIGNAL = 1.3; EXPRESSED IN HBL100, SIGNAL = 0.99; EXPRESSED IN HELA, SIGNAL = 1.3; EXPRESSED IN HEART, SIGNAL = 1.3; EXPRESSED IN FETAL LIVER, SIGNAL = 1.1; EST_HUMAN HIT: BF110702.1, EVALUE 1.00e-19
VLFGLPSWQSYSTMESSLLLEMTVWPLGLKSKQLILSEFSQNTLATRKLRNTLS

SEQ ID NO: 36159 - protein, 315 aa, Homo sapiens
  MAP TO AC011281.2; EXPRESSED IN BT474, SIGNAL = 1.2; EXPRESSED IN BRAIN, SIGNAL = 1.2; EXPRESSED IN LUNG, SIGNAL = 1.8; EXPRESSED IN PLACENTA, SIGNAL = 1.3; EXPRESSED IN HBL100, SIGNAL = 0.99; EXPRESSED IN HELA, SIGNAL = 1.3; EXPRESSED IN HEART, SIGNAL = 1.3; EXPRESSED IN FETAL LIVER, SIGNAL = 1.1; SWISSPROT HIT: P36104, EVALUE 5.00e-42; EST_HUMAN HIT: BF568186.1, EVALUE 2.00e-82
LPSPPAAMKLTDSVLRSFRVARVFCENSDKINCFDFSPNGQTVISSSNDDSIVLYDCQEGKPKRTLYSKKYGVDLIRYTHEANTAVYSSNKIDDTIRYLSLHDNKYIRYFPGHSKRVVALSMSPVDDIFISGSLDKTIRLWDLRAPNCQGLMSLQGKPVCSFDPEGLILAAGVNSEMVKLYDLRSFDKGPFTTFRMQCNRTCEWTGLKFSNDGKVILISTNGSFISLIDAFKGVVMHTFEGYANSKAVTLEASFTPDSQFIMIGSEDGKIHVWNGESGIKVAVLDGKHTGPITCLQFNPKFMTFASACSSMVFWL

SEQ ID NO: 36160 - protein, 55 aa, Homo sapiens
  MAP TO AC007743.2; EXPRESSED IN FETAL LIVER, SIGNAL = 0.66; EXPRESSED IN LUNG, SIGNAL = 5.9; EXPRESSED IN HELA, SIGNAL = 0.62; EXPRESSED IN ADULT LIVER, SIGNAL = 0.94; EXPRESSED IN BRAIN, SIGNAL = 0.73; EXPRESSED IN PLACENTA, SIGNAL = 0.86; EXPRESSED IN BT474, SIGNAL = 0.74; EXPRESSED IN BONE MARROW, SIGNAL = 0.67; EXPRESSED IN HEART, SIGNAL = 1.1; EST_HUMAN HIT: BE735145.1, EVALUE 6.30e+00
SSSSSPTAMLPWPPPPLTCRFAVGPCSPSPAFSHSLLGSQFTPSISCTVTKSTPQ

SEQ ID NO: 36161 - protein, 26 aa, Homo sapiens
  MAP TO AC007496.2; EXPRESSED IN LUNG, SIGNAL = 2.3; EXPRESSED IN BONE MARROW, SIGNAL = 2.1; EXPRESSED IN HELA, SIGNAL = 2.3; EXPRESSED IN HEART, SIGNAL = 1.8; EXPRESSED IN PLACENTA, SIGNAL = 2.1; EXPRESSED IN BT474, SIGNAL =   2; EXPRESSED IN ADULT LIVER, SIGNAL = 2.8; EXPRESSED IN BRAIN, SIGNAL = 2.2; EXPRESSED IN HBL100, SIGNAL = 2.5; EXPRESSED IN FETAL LIVER, SIGNAL = 2.1
SLNIPAVAHMTVPESFCSGRQAAVAP

SEQ ID NO: 36162 - protein, 47 aa, Homo sapiens
  MAP TO AC007496.2; EXPRESSED IN LUNG, SIGNAL = 2.3; EXPRESSED IN BONE MARROW, SIGNAL = 2.1; EXPRESSED IN HELA, SIGNAL = 2.3; EXPRESSED IN HEART, SIGNAL = 1.8; EXPRESSED IN PLACENTA, SIGNAL = 2.1; EXPRESSED IN BT474, SIGNAL =   2; EXPRESSED IN ADULT LIVER, SIGNAL = 2.8; EXPRESSED IN BRAIN, SIGNAL = 2.2; EXPRESSED IN HBL100, SIGNAL = 2.5; EXPRESSED IN FETAL LIVER, SIGNAL = 2.1; SWISSPROT HIT: P52887, EVALUE 4.60e+00
GATAACLPLQKLSGTVMWATAGMFRLLWEKMACPIRLSSDAGAMYES

SEQ ID NO: 36163 - protein, 66 aa, Homo sapiens
  MAP TO AC012067.1; EXPRESSED IN FETAL LIVER, SIGNAL = 6.4; EXPRESSED IN BT474, SIGNAL = 4.8; EXPRESSED IN ADULT LIVER, SIGNAL = 7.1; EXPRESSED IN BRAIN, SIGNAL = 5.2; EXPRESSED IN LUNG, SIGNAL =   6; EXPRESSED IN BONE MARROW, SIGNAL = 4.4; EXPRESSED IN PLACENTA, SIGNAL = 5.7; EXPRESSED IN HEART, SIGNAL =   5; EXPRESSED IN HELA, SIGNAL = 6.3; EXPRESSED IN HBL100, SIGNAL = 4.5; SWISSPROT HIT: P15293, EVALUE 5.00e-01; EST_HUMAN HIT: BF364203.1, EVALUE 9.00e-20
SQRRVTFHLPEGSQESSSDGGLGDHDAGSLTSTSHGLPLGYPQEEYFDRATPSNRTEGDGNSDPES

SEQ ID NO: 36164 - protein, 64 aa, Homo sapiens
  MAP TO AC012067.1; EXPRESSED IN FETAL LIVER, SIGNAL = 6.4; EXPRESSED IN BT474, SIGNAL = 4.8; EXPRESSED IN ADULT LIVER, SIGNAL = 7.1; EXPRESSED IN BRAIN, SIGNAL = 5.2; EXPRESSED IN LUNG, SIGNAL =   6; EXPRESSED IN BONE MARROW, SIGNAL = 4.4; EXPRESSED IN PLACENTA, SIGNAL = 5.7; EXPRESSED IN HEART, SIGNAL =   5; EXPRESSED IN HELA, SIGNAL = 6.3; EXPRESSED IN HBL100, SIGNAL = 4.5; SWISSPROT HIT: P31975, EVALUE 3.30e+00
GVSHFTCQKALRKAAVMVDWETMMQAALPAHPMACPLAILRRSTLIVLHPAIALKGMATPILNL

SEQ ID NO: 36165 - protein, 63 aa, Homo sapiens
  MAP TO AL078602.10; EXPRESSED IN PLACENTA, SIGNAL = 2.1; EXPRESSED IN HELA, SIGNAL =   2; EXPRESSED IN HEART, SIGNAL = 1.8; EXPRESSED IN FETAL LIVER, SIGNAL =   2; EXPRESSED IN ADULT LIVER, SIGNAL = 2.4; EXPRESSED IN BT474, SIGNAL = 1.9; EXPRESSED IN BRAIN, SIGNAL = 1.9; EXPRESSED IN BONE MARROW, SIGNAL = 2.4; EXPRESSED IN LUNG, SIGNAL = 2.1; EXPRESSED IN HBL100, SIGNAL =   1; SWISSPROT HIT: Q01456, EVALUE 4.00e-06; EST_HUMAN HIT: W92301.1, EVALUE 1.70e+00
ILAGMMTLAGVMTLEGVMTPAGVMTLAGVIIPAVVMTLAGVTTLAGVMTLTGVMTLAGVMTLA

SEQ ID NO: 36166 - protein, 37 aa, Homo sapiens
  MAP TO AC007652.1; EXPRESSED IN HBL100, SIGNAL = 0.82; EXPRESSED IN HELA, SIGNAL = 0.92; EXPRESSED IN ADULT LIVER, SIGNAL = 0.88; EXPRESSED IN HEART, SIGNAL = 3.9; EXPRESSED IN PLACENTA, SIGNAL = 0.97; EXPRESSED IN BRAIN, SIGNAL = 0.95; EXPRESSED IN LUNG, SIGNAL = 0.98; EXPRESSED IN FETAL LIVER, SIGNAL = 0.88; EXPRESSED IN BONE MARROW, SIGNAL = 0.95; EXPRESSED IN BT474, SIGNAL = 0.7; EST_HUMAN HIT: AI628331.1, EVALUE 7.50e-01
TEQRPPHPLALWGLKEPGGVLTPHAILESHTDFGVCE

SEQ ID NO: 36167 - protein, 37 aa, Homo sapiens
  MAP TO AC007652.1; EXPRESSED IN HBL100, SIGNAL = 0.82; EXPRESSED IN HELA, SIGNAL = 0.92; EXPRESSED IN ADULT LIVER, SIGNAL = 0.88; EXPRESSED IN HEART, SIGNAL = 3.9; EXPRESSED IN PLACENTA, SIGNAL = 0.97; EXPRESSED IN BRAIN, SIGNAL = 0.95; EXPRESSED IN LUNG, SIGNAL = 0.98; EXPRESSED IN FETAL LIVER, SIGNAL = 0.88; EXPRESSED IN BONE MARROW, SIGNAL = 0.95; EXPRESSED IN BT474, SIGNAL = 0.7; SWISSPROT HIT: P97609, EVALUE 6.20e+00; EST_HUMAN HIT: BE619770.1, EVALUE 1.50e+00
HRTETATPSCAVGTEGAGGSPDSSCHSGEPHRLWCLR

SEQ ID NO: 36168 - protein, 114 aa, Homo sapiens
  MAP TO AC011301.3; EXPRESSED IN HBL100, SIGNAL = 8.9; EXPRESSED IN HELA, SIGNAL =  10; EXPRESSED IN HEART, SIGNAL = 9.5; EXPRESSED IN FETAL LIVER, SIGNAL =  12; EXPRESSED IN BT474, SIGNAL = 9.3; EXPRESSED IN ADULT LIVER, SIGNAL =  11; EXPRESSED IN BRAIN, SIGNAL = 9.3; EXPRESSED IN PLACENTA, SIGNAL = 9.2; EXPRESSED IN LUNG, SIGNAL =  11; EXPRESSED IN BONE MARROW, SIGNAL =   8
CPLAKKRKTQDKQPQEPAPKRKPFAVKADSSSVDECDDSDGTEDMDEKEEDEGEEYSEDNDEPGDEDEEDEEGDREEEEEIEEEDEDDDEDGEDVEDEEEEEEEEEEEEEEEEN

SEQ ID NO: 36169 - protein, 240 aa, Homo sapiens
  MAP TO AL008628.1; EXPRESSED IN BONE MARROW, SIGNAL =   1; EXPRESSED IN BRAIN, SIGNAL = 1.8; EXPRESSED IN LUNG, SIGNAL = 1.1; EXPRESSED IN HELA, SIGNAL = 1.1; EXPRESSED IN PLACENTA, SIGNAL = 1.4; EXPRESSED IN HBL100, SIGNAL = 1.2; EXPRESSED IN BT474, SIGNAL = 1.1; EXPRESSED IN ADULT LIVER, SIGNAL = 1.6; EXPRESSED IN HEART, SIGNAL = 1.4; EXPRESSED IN FETAL LIVER, SIGNAL = 1.5; EST_HUMAN HIT: AW265110.1, EVALUE 8.00e-04; SWISSPROT HIT: P05227, EVALUE 1.00e-14
TAAGCTLHSLPLMAAGCDPHSLPQKAAGHAPHSLPLMGVEHTTHSLSLMGAECAHHSLFLMGARHTSQSLLLMAAGWAHRSLFLMGVEHTTHSLSLMGAECAHHSLFLMGARHTGQSLLLMAAGWAHRSFPLVEAGHATHSLALMRAECAHHSLPLMGAGHAHQSLLMIDAGHAHHSLPLMGAGHAHHSLPLMAAGHAHHSLPLMAAGCAHHSLPLMAAGCAHHSLPLVGAGHATDSLPL

SEQ ID NO: 36170 - protein, 215 aa, Homo sapiens
  MAP TO AC005185.1; EXPRESSED IN PLACENTA, SIGNAL = 3.9; EXPRESSED IN HBL100, SIGNAL = 2.2; EXPRESSED IN HEART, SIGNAL =   2; EXPRESSED IN BT474, SIGNAL = 2.6; EXPRESSED IN BRAIN, SIGNAL = 2.2; EXPRESSED IN BONE MARROW, SIGNAL = 2.4; EXPRESSED IN HELA, SIGNAL = 2.6; EXPRESSED IN ADULT LIVER, SIGNAL = 5.5; EXPRESSED IN FETAL LIVER, SIGNAL =   3; EXPRESSED IN LUNG, SIGNAL = 3.6; EST_HUMAN HIT: AI479347.1, EVALUE 1.00e-56; SWISSPROT HIT: O15481, EVALUE 1.00e-105
TKAEMLKIISKKYKEHFPEIFRKVSQRTELVFGLALKEVNPTTHSYILVSMLGPNDGNQSSAWTLPRNGLLMPLLSVIFLNGNCAREEEIWEFLNMLGIYDGKRHLIFGEPRKLITQDLVQEKYLEYQQVPNSDPPRYQFLWGPRAHAETSKMKVLEFLAKVNDTTPNNFPLLYEEALRDEEERAGARPRVAARRGTTAMTSAYSRATSSSSSQP

SEQ ID NO: 36171 - protein, 18 aa, Homo sapiens
  MAP TO AC005185.1; EXPRESSED IN PLACENTA, SIGNAL = 3.9; EXPRESSED IN HBL100, SIGNAL = 2.2; EXPRESSED IN HEART, SIGNAL =   2; EXPRESSED IN BT474, SIGNAL = 2.6; EXPRESSED IN BRAIN, SIGNAL = 2.2; EXPRESSED IN BONE MARROW, SIGNAL = 2.4; EXPRESSED IN HELA, SIGNAL = 2.6; EXPRESSED IN ADULT LIVER, SIGNAL = 5.5; EXPRESSED IN FETAL LIVER, SIGNAL =   3; EXPRESSED IN LUNG, SIGNAL = 3.6; EST_HUMAN HIT: X85717.1, EVALUE 6.60e-01
YKGRNAEDHQQKVQGALP

SEQ ID NO: 36172 - protein, 87 aa, Homo sapiens
  MAP TO L47234.1; EXPRESSED IN HEART, SIGNAL = 3.2; EXPRESSED IN FETAL LIVER, SIGNAL = 3.2; EXPRESSED IN ADULT LIVER, SIGNAL = 2.2; EXPRESSED IN BT474, SIGNAL = 3.8; EXPRESSED IN BRAIN, SIGNAL = 3.3; EXPRESSED IN LUNG, SIGNAL = 2.2; EXPRESSED IN BONE MARROW, SIGNAL = 3.4; EXPRESSED IN PLACENTA, SIGNAL =   3; EXPRESSED IN HELA, SIGNAL = 3.3; EXPRESSED IN HBL100, SIGNAL = 3.4; SWISSPROT HIT: P18074, EVALUE 2.00e-22; EST_HUMAN HIT: AW044536.1, EVALUE 2.00e-21
ARLEYLRDQFQIRENDFLTFDAMRHAAQCVGRAIRGKTDYGLMVFADKVQLQGCPCAPIPGSKNQAVSRSFPRWGGLQGGEWPRLPE

SEQ ID NO: 36173 - protein, 39 aa, Homo sapiens
  MAP TO AC012069.2; EXPRESSED IN HELA, SIGNAL = 1.3; EXPRESSED IN HEART, SIGNAL = 0.94; SWISSPROT HIT: Q15303, EVALUE 2.00e-18
YLNPVEENPFVSRRKNGDLQALDNPEYHNASNGPPKAED

SEQ ID NO: 36174 - protein, 34 aa, Homo sapiens
  MAP TO AC012069.2; EXPRESSED IN HELA, SIGNAL = 1.3; EXPRESSED IN HEART, SIGNAL = 0.94; SWISSPROT HIT: P47445, EVALUE 6.30e+00
TLLFLGEKMETFKHWIIPNITMHPMVHPRPRMSM

SEQ ID NO: 36175 - protein, 63 aa, Homo sapiens
  MAP TO AC010825.2; EXPRESSED IN PLACENTA, SIGNAL = 6.1; EXPRESSED IN HELA, SIGNAL = 6.1; EXPRESSED IN ADULT LIVER, SIGNAL = 6.3; EXPRESSED IN FETAL LIVER, SIGNAL = 4.8; EXPRESSED IN BT474, SIGNAL = 4.8; EXPRESSED IN BRAIN, SIGNAL = 4.1; EXPRESSED IN LUNG, SIGNAL =   8; EXPRESSED IN BONE MARROW, SIGNAL = 2.5; EXPRESSED IN HEART, SIGNAL = 4.3; EXPRESSED IN HBL100, SIGNAL = 4.8; EST_HUMAN HIT: N66951.1, EVALUE 1.00e-20; SWISSPROT HIT: O75593, EVALUE 2.90e-01
AAPCQAELGPNSSSASAPPPYNLFITSPPHTWSGLQFRSLTSPPPPAQQFTLKKVAGAKGIVK

SEQ ID NO: 36176 - protein, 56 aa, Homo sapiens
  MAP TO AC011330.4; EXPRESSED IN BONE MARROW, SIGNAL = 1.8; EXPRESSED IN BRAIN, SIGNAL = 1.9; EXPRESSED IN LUNG, SIGNAL = 1.8; EXPRESSED IN PLACENTA, SIGNAL = 1.6; EXPRESSED IN HELA, SIGNAL =   2; EXPRESSED IN HBL100, SIGNAL = 1.8; EXPRESSED IN HEART, SIGNAL =   2; EXPRESSED IN FETAL LIVER, SIGNAL = 2.1; EXPRESSED IN BT474, SIGNAL = 2.4; EXPRESSED IN ADULT LIVER, SIGNAL =   2; EST_HUMAN HIT: BF695478.1, EVALUE 6.30e+00; SWISSPROT HIT: P42789, EVALUE 5.90e+00
VPPSEEQALGRLTALLLQRYPRLTSQLFIDLSPLIPFLAVSDLMRFPPSLLANDSV

SEQ ID NO: 36177 - protein, 73 aa, Homo sapiens
  MAP TO AC006432.15; EXPRESSED IN FETAL LIVER, SIGNAL = 0.67; EXPRESSED IN HELA, SIGNAL = 1.1; EXPRESSED IN ADULT LIVER, SIGNAL = 0.79; EXPRESSED IN PLACENTA, SIGNAL = 0.75; EXPRESSED IN BT474, SIGNAL = 0.8; EXPRESSED IN BONE MARROW, SIGNAL = 0.82; EXPRESSED IN HEART, SIGNAL = 0.82; EST_HUMAN HIT: BE695987.1, EVALUE 7.00e-11; SWISSPROT HIT: P20742, EVALUE 8.00e-12
GSDKECVLPITSSSSSSGSANLSFLIPDTITQWEASGFCVNGDVGFGISSTTTLEVSQPFFIEIASPFSVVQN

SEQ ID NO: 36178 - protein, 32 aa, Homo sapiens
  MAP TO AC009490.4; EXPRESSED IN FETAL LIVER, SIGNAL = 1.6; EXPRESSED IN LUNG, SIGNAL = 1.8; EXPRESSED IN BONE MARROW, SIGNAL = 1.5; EXPRESSED IN HELA, SIGNAL = 1.7; EXPRESSED IN HEART, SIGNAL = 1.5; EXPRESSED IN PLACENTA, SIGNAL = 1.9; EXPRESSED IN BT474, SIGNAL = 1.6; EXPRESSED IN ADULT LIVER, SIGNAL =   2; EXPRESSED IN BRAIN, SIGNAL = 1.7; EXPRESSED IN HBL100, SIGNAL = 1.7
HPEPMEIPGSTGRGAAEKKRRKEAARHQREAA

SEQ ID NO: 36179 - protein, 126 aa, Homo sapiens
  MAP TO AC011440.4; EXPRESSED IN PLACENTA, SIGNAL = 1.5; EXPRESSED IN HBL100, SIGNAL = 1.6; EXPRESSED IN HELA, SIGNAL = 1.9; EXPRESSED IN HEART, SIGNAL = 1.6; EXPRESSED IN FETAL LIVER, SIGNAL = 1.8; EXPRESSED IN BT474, SIGNAL = 1.5; EXPRESSED IN ADULT LIVER, SIGNAL =   2; EXPRESSED IN BRAIN, SIGNAL = 1.7; EXPRESSED IN LUNG, SIGNAL = 2.2; EXPRESSED IN BONE MARROW, SIGNAL = 1.7; EST_HUMAN HIT: R59266.1, EVALUE 2.00e-51; SWISSPROT HIT: P25304, EVALUE 2.50e-02
TMVGDHTRLEFHNIETGIMTEKRYISVVPSSFIGHLQSLMFNGLLYIDLCKNGDIDYCELKARFGLRNIIADPVTFKTKSSYLSLATLQAYTSMHLFFQFKTTSPDGFILFNSGDGNDFIAVELVK

SEQ ID NO: 36180 - protein, 242 aa, Homo sapiens
  MAP TO AL022333.1; EXPRESSED IN HEART, SIGNAL = 4.4; EXPRESSED IN FETAL LIVER, SIGNAL = 3.5; EXPRESSED IN LUNG, SIGNAL =   2; EXPRESSED IN BRAIN, SIGNAL = 4.4; EXPRESSED IN HBL100, SIGNAL = 3.3; EXPRESSED IN HELA, SIGNAL = 3.3; EXPRESSED IN PLACENTA, SIGNAL =   3; EXPRESSED IN BT474, SIGNAL = 3.2; EXPRESSED IN BONE MARROW, SIGNAL = 3.4; EXPRESSED IN ADULT LIVER, SIGNAL = 1.9
HMATRAGAVLNFLLCLLLFLLLPLPSASFSFSSFFLLLLLLPLPPPSSSTSSLLLFLLLLFLPFLLFLLPPPLFPPPPLPPSFFLPPPPLSPLLLLLFLPFFLLLLFFPLLPLFFLFFLFLLLPSCSSSSLLLLFLPFSSLSSSPSFSSFSSPSSSSFPFLLPFFLFLLSLFLFLLSLLCFSLLPPPPFFLLLLLLFLLPSPFSLSSSSSSVSQQHIGSRRSCSCLLCLLLGAGHLESCLLT

SEQ ID NO: 36181 - protein, 141 aa, Homo sapiens
  MAP TO AL022333.1; EXPRESSED IN HEART, SIGNAL = 4.4; EXPRESSED IN FETAL LIVER, SIGNAL = 3.5; EXPRESSED IN LUNG, SIGNAL =   2; EXPRESSED IN BRAIN, SIGNAL = 4.4; EXPRESSED IN HBL100, SIGNAL = 3.3; EXPRESSED IN HELA, SIGNAL = 3.3; EXPRESSED IN PLACENTA, SIGNAL =   3; EXPRESSED IN BT474, SIGNAL = 3.2; EXPRESSED IN BONE MARROW, SIGNAL = 3.4; EXPRESSED IN ADULT LIVER, SIGNAL = 1.9
ERREEEEEERSRGGKGGRGRGKGGRGRREGGRGKKRRRGRRKRRKKERKRGRRKGERGGGGRKRNKKGGGERGRRGRKEGGEGRRGGGERRGGREGGEGEKEEEEGGRRKEEEEEGEKEEEGGGRGGKGGRGGGGRGGGRR

SEQ ID NO: 36182 - protein, 617 aa, Homo sapiens
  MAP TO AC005529.7; EXPRESSED IN HELA, SIGNAL = 1.3; EXPRESSED IN HBL100, SIGNAL = 0.94; EXPRESSED IN HEART, SIGNAL = 1.3; EXPRESSED IN ADULT LIVER, SIGNAL = 1.1; EXPRESSED IN FETAL LIVER, SIGNAL = 1.3; EXPRESSED IN BRAIN, SIGNAL = 5.6; SWISSPROT HIT: P12036, EVALUE 2.00e-33; EST_HUMAN HIT: BF445754.1, EVALUE 3.00e-22
KLLEGEECRIGFGPIPFSLPEGLPKIPSVSTHIKVKSEEKIKVVEKSEKETVIVEEQTEETQVTEEVTEEEEKEAKEEEGKEEEGGEEEEAEGGEEETKSPPAEEAASPEKEAKSPVKEEAKSPAEAKSPEKEEAKSPAEVKSPEKAKSPAKEEAKSPPEAKSPEKEEAKSPAEVKSPEKAKSPAKEEAKSPAEAKSPEKAKSPVKEEAKSPAEAKSPVKEEAKSPAEVKSPEKAKSPTKEEAKSPEKAKSPEKEEAKSPEKAKSPVKAEAKSPEKAKSPVKAEAKSPEKAKSPVKEEAKSPEKAKSPVKEEAKSPEKAKSPVKEEAKTPEKAKSPVKEEAKSPEKAKSPEKAKTLDVKSPEAKTPAKEEARSPADKFPEKAKSPVKEEVKSPEKAKSPLKADAKAPEKEIPKKEEVKSPVKEEEKPQEVKVKEPPKKAEEEKAPATPKTEEKKDSKKEEAPKKEAPKPKVEEKKEPAVEKPKESKVEAKKEEAEDKKKVPTPEKEAPAKVEVKEDAKPKEKTEVAKKEPDDAKAKEPSKPAEKKEAAPEKKDTKEEKAKKPEEKPKTEAKAKEDDKTLSKEPSKPKAEKAEKSSSTDQKDSKPPEKATEDKAAKGK

SEQ ID NO: 36183 - protein, 32 aa, Homo sapiens
  MAP TO AC005529.7; EXPRESSED IN HELA, SIGNAL = 1.3; EXPRESSED IN HBL100, SIGNAL = 0.94; EXPRESSED IN HEART, SIGNAL = 1.3; EXPRESSED IN ADULT LIVER, SIGNAL = 1.1; EXPRESSED IN FETAL LIVER, SIGNAL = 1.3; EXPRESSED IN BRAIN, SIGNAL = 5.6; EST_HUMAN HIT: BE251014.1, EVALUE 4.00e-12
NSWKVKSVGLALAQFLSRFQKDSPKFPLCPLT

SEQ ID NO: 36184 - protein, 17 aa, Homo sapiens
  MAP TO AP000129.1; EXPRESSED IN HEART, SIGNAL = 0.79; EXPRESSED IN PLACENTA, SIGNAL = 0.89; EXPRESSED IN BT474, SIGNAL = 2.1; EXPRESSED IN BONE MARROW, SIGNAL =   1; EXPRESSED IN FETAL LIVER, SIGNAL = 0.93; EXPRESSED IN LUNG, SIGNAL = 0.69; EXPRESSED IN HELA, SIGNAL = 0.82; EXPRESSED IN ADULT LIVER, SIGNAL = 0.86; EXPRESSED IN HBL100, SIGNAL = 1.7
SPLTVLLEEFFLVLRHW

SEQ ID NO: 36185 - protein, 100 aa, Homo sapiens; identical to SEQ ID NO: 35700
  MAP TO AC009892.2; EXPRESSED IN FETAL LIVER, SIGNAL = 9.3; EXPRESSED IN ADULT LIVER, SIGNAL =  12; EXPRESSED IN BT474, SIGNAL = 8.6; EXPRESSED IN BRAIN, SIGNAL = 7.6; EXPRESSED IN BONE MARROW, SIGNAL = 7.6; EXPRESSED IN LUNG, SIGNAL =  11; EXPRESSED IN PLACENTA, SIGNAL = 9.6; EXPRESSED IN HELA, SIGNAL =  10; EXPRESSED IN HBL100, SIGNAL = 8.4; EXPRESSED IN HEART, SIGNAL = 7.9; SWISSPROT HIT: P43626, EVALUE 2.00e-11; EST_HUMAN HIT: AU120189.1, EVALUE 2.00e-25

SEQ ID NO: 36186 - protein, 33 aa, Homo sapiens
  MAP TO AC012111.1; EXPRESSED IN ADULT LIVER, SIGNAL = 1.3; EXPRESSED IN BONE MARROW, SIGNAL = 1.9; EXPRESSED IN BRAIN, SIGNAL = 1.6; EXPRESSED IN LUNG, SIGNAL = 1.2; EXPRESSED IN PLACENTA, SIGNAL = 1.2; EXPRESSED IN HELA, SIGNAL = 1.3; EXPRESSED IN HBL100, SIGNAL = 1.6; EXPRESSED IN HEART, SIGNAL = 2.5; EXPRESSED IN BT474, SIGNAL = 1.6; EXPRESSED IN FETAL LIVER, SIGNAL = 1.5
REGRRKRGRGGEGHGGGKRKGEGGRGRGEGGRG

SEQ ID NO: 36187 - protein, 86 aa, Homo sapiens
  MAP TO Z95325.2; EXPRESSED IN ADULT LIVER, SIGNAL = 1.4; EXPRESSED IN BRAIN, SIGNAL = 0.77; EXPRESSED IN HEART, SIGNAL = 0.93; EXPRESSED IN PLACENTA, SIGNAL = 1.2; EXPRESSED IN HELA, SIGNAL = 1.6; EXPRESSED IN LUNG, SIGNAL = 1.2; EXPRESSED IN FETAL LIVER, SIGNAL = 1.3; EXPRESSED IN HBL100, SIGNAL = 1.4; EXPRESSED IN BONE MARROW, SIGNAL = 1.4; EXPRESSED IN BT474, SIGNAL = 1.4; EST_HUMAN HIT: AA971603.1, EVALUE 5.00e-20
GVEVEVASLTITPSDPLAKFLLSVPTTLHSPGLEVLVPAGGMLPPGDTTIPLNWKLILPPGHFGLLLPLSQQAKKAVTVLARVIDP

SEQ ID NO: 36188 - protein, 31 aa, Homo sapiens
  MAP TO AC011236.1; EXPRESSED IN HEART, SIGNAL =  10; EST_HUMAN HIT: BF337038.1, EVALUE 2.00e+00
PKGSGVKGSWASKGGDSEISLGLQLHRWEQR

SEQ ID NO: 36189 - protein, 34 aa, Homo sapiens
  MAP TO AC009301.1; EXPRESSED IN PLACENTA, SIGNAL = 1.1; EXPRESSED IN BT474, SIGNAL = 0.87; EXPRESSED IN LUNG, SIGNAL = 1.2; EXPRESSED IN ADULT LIVER, SIGNAL = 1.3; EXPRESSED IN HEART, SIGNAL = 1.3; EXPRESSED IN BONE MARROW, SIGNAL = 1.2; EXPRESSED IN HBL100, SIGNAL = 0.83; EXPRESSED IN FETAL LIVER, SIGNAL = 0.93; EXPRESSED IN HELA, SIGNAL = 0.96; EXPRESSED IN BRAIN, SIGNAL = 1.4; SWISSPROT HIT: P54729, EVALUE 1.60e+00; EST_HUMAN HIT: N88070.1, EVALUE 6.70e+00
NHHLSSLPAALNEEASPSPSTRPNPAGSNSKTAL

SEQ ID NO: 36190 - protein, 29 aa, Homo sapiens
  MAP TO AC007393.3; EXPRESSED IN HEART, SIGNAL = 8.9; EXPRESSED IN HBL100, SIGNAL = 5.9; EXPRESSED IN BRAIN, SIGNAL =  10; EXPRESSED IN BT474, SIGNAL = 5.9; EXPRESSED IN BONE MARROW, SIGNAL =  11; EXPRESSED IN FETAL LIVER, SIGNAL = 6.6; EXPRESSED IN HELA, SIGNAL =  10; EXPRESSED IN ADULT LIVER, SIGNAL =   9; EXPRESSED IN PLACENTA, SIGNAL = 9.1; EXPRESSED IN LUNG, SIGNAL =  10; SWISSPROT HIT: O43913, EVALUE 6.00e-11; EST_HUMAN HIT: BE707579.1, EVALUE 8.00e-10
SERDTRKLWRNIEPHLKKAMQTVYLREIS

SEQ ID NO: 36191 - protein, 29 aa, Homo sapiens
  MAP TO AL122018.4; EXPRESSED IN PLACENTA, SIGNAL = 4.4; EXPRESSED IN HBL100, SIGNAL = 2.5; EXPRESSED IN ADULT LIVER, SIGNAL = 2.3; EXPRESSED IN BT474, SIGNAL = 2.3; EXPRESSED IN BONE MARROW, SIGNAL = 2.7; EXPRESSED IN BRAIN, SIGNAL = 2.6; EXPRESSED IN HEART, SIGNAL = 2.2; EXPRESSED IN FETAL LIVER, SIGNAL = 2.8; EXPRESSED IN LUNG, SIGNAL = 2.3; EXPRESSED IN HELA, SIGNAL = 1.7
QREVIDNSWPQGCAYKGPLAHGAILGSQW

SEQ ID NO: 36192 - protein, 29 aa, Homo sapiens
  MAP TO AL122018.4; EXPRESSED IN PLACENTA, SIGNAL = 4.4; EXPRESSED IN HBL100, SIGNAL = 2.5; EXPRESSED IN ADULT LIVER, SIGNAL = 2.3; EXPRESSED IN BT474, SIGNAL = 2.3; EXPRESSED IN BONE MARROW, SIGNAL = 2.7; EXPRESSED IN BRAIN, SIGNAL = 2.6; EXPRESSED IN HEART, SIGNAL = 2.2; EXPRESSED IN FETAL LIVER, SIGNAL = 2.8; EXPRESSED IN LUNG, SIGNAL = 2.3; EXPRESSED IN HELA, SIGNAL = 1.7; SWISSPROT HIT: Q09456, EVALUE 2.80e+00; EST_HUMAN HIT: BE311653.1, EVALUE 7.80e+00
AEGSHRQQLAPGLCLQGAPGPWSNPGLPM

SEQ ID NO: 36193 - protein, 72 aa, Homo sapiens
  MAP TO AC012127.1; EXPRESSED IN BONE MARROW, SIGNAL = 1.3; EXPRESSED IN HBL100, SIGNAL = 1.2; EXPRESSED IN HEART, SIGNAL = 2.2; EXPRESSED IN BT474, SIGNAL = 1.3; EXPRESSED IN FETAL LIVER, SIGNAL = 1.2; EXPRESSED IN ADULT LIVER, SIGNAL = 1.4; EXPRESSED IN BRAIN, SIGNAL = 1.1; EXPRESSED IN LUNG, SIGNAL = 1.4; EXPRESSED IN PLACENTA, SIGNAL = 1.2; EXPRESSED IN HELA, SIGNAL = 1.5; SWISSPROT HIT: O61608, EVALUE 7.60e+00; EST_HUMAN HIT: BE789526.1, EVALUE 8.10e-01
LCILLLSLAIFVFPKRSRISECQLPRPGVNVYPKEQQNEFLIPASLTLFGILVKVIQLHNNARPTARMLVLN

SEQ ID NO: 36194 - protein, 65 aa, Homo sapiens
  MAP TO AC012127.1; EXPRESSED IN BONE MARROW, SIGNAL = 1.3; EXPRESSED IN HBL100, SIGNAL = 1.2; EXPRESSED IN HEART, SIGNAL = 2.2; EXPRESSED IN BT474, SIGNAL = 1.3; EXPRESSED IN FETAL LIVER, SIGNAL = 1.2; EXPRESSED IN ADULT LIVER, SIGNAL = 1.4; EXPRESSED IN BRAIN, SIGNAL = 1.1; EXPRESSED IN LUNG, SIGNAL = 1.4; EXPRESSED IN PLACENTA, SIGNAL = 1.2; EXPRESSED IN HELA, SIGNAL = 1.5; EST_HUMAN HIT: AW168759.1, EVALUE 2.90e+00; SWISSPROT HIT: P29957, EVALUE 3.30e+00
CVSCCCPWQSSCSPNGQGLVNVNFRGQESMFIQKNNRMNFSSLHPSPSLEYLSKLSNCITMQDPQ

SEQ ID NO: 36195 - protein, 54 aa, Homo sapiens
  MAP TO AC012132.1; EXPRESSED IN PLACENTA, SIGNAL = 2.5; EXPRESSED IN HELA, SIGNAL =   2; EXPRESSED IN ADULT LIVER, SIGNAL = 2.4; EXPRESSED IN HEART, SIGNAL = 2.5; EXPRESSED IN BT474, SIGNAL = 2.3; EXPRESSED IN FETAL LIVER, SIGNAL = 2.4; EXPRESSED IN BRAIN, SIGNAL =   2; EXPRESSED IN BONE MARROW, SIGNAL = 2.6; EXPRESSED IN LUNG, SIGNAL = 2.3; EXPRESSED IN HBL100, SIGNAL = 2.3; EST_HUMAN HIT: BE262534.1, EVALUE 4.20e+00
AFHCSKEDIAHACFRGHIHGCIRAMKMNHRLIDIRIWREHFDYAMPVPSEIVSK

SEQ ID NO: 36196 - protein, 21 aa, Homo sapiens
  MAP TO AC012132.1; EXPRESSED IN PLACENTA, SIGNAL = 2.5; EXPRESSED IN HELA, SIGNAL =   2; EXPRESSED IN ADULT LIVER, SIGNAL = 2.4; EXPRESSED IN HEART, SIGNAL = 2.5; EXPRESSED IN BT474, SIGNAL = 2.3; EXPRESSED IN FETAL LIVER, SIGNAL = 2.4; EXPRESSED IN BRAIN, SIGNAL =   2; EXPRESSED IN BONE MARROW, SIGNAL = 2.6; EXPRESSED IN LUNG, SIGNAL = 2.3; EXPRESSED IN HBL100, SIGNAL = 2.3
LFTVAKKTLHMHVSEDTYMDA

SEQ ID NO: 36197 - protein, 42 aa, Homo sapiens
  MAP TO AC010136.2; EXPRESSED IN HEART, SIGNAL = 0.95; EXPRESSED IN PLACENTA, SIGNAL = 1.1; EXPRESSED IN HBL100, SIGNAL = 0.98; EXPRESSED IN ADULT LIVER, SIGNAL = 1.1; EXPRESSED IN FETAL LIVER, SIGNAL = 1.5; EXPRESSED IN BONE MARROW, SIGNAL = 1.4; EXPRESSED IN LUNG, SIGNAL = 1.8; EST_HUMAN HIT: BE140372.1, EVALUE 6.00e-04; SWISSPROT HIT: Q28807, EVALUE 1.10e-01
HGQQYSKLVDAVTDPAPVLWLHRAAAIMLFCYRFTLHTLFKA

SEQ ID NO: 36198 - protein, 223 aa, Homo sapiens
  MAP TO AC002041.1; EXPRESSED IN ADULT LIVER, SIGNAL = 4.5; EXPRESSED IN BT474, SIGNAL = 4.4; EXPRESSED IN BRAIN, SIGNAL = 3.8; EXPRESSED IN BONE MARROW, SIGNAL = 3.9; EXPRESSED IN HBL100, SIGNAL = 4.2; EXPRESSED IN HEART, SIGNAL =   4; EXPRESSED IN PLACENTA, SIGNAL = 4.7; EXPRESSED IN FETAL LIVER, SIGNAL = 4.2; EXPRESSED IN LUNG, SIGNAL = 4.5; EXPRESSED IN HELA, SIGNAL = 4.3; EST_HUMAN HIT: BE892238.1, EVALUE 2.00e-04; SWISSPROT HIT: P08775, EVALUE 6.00e-06
SPHTFPRSPHMSHRSPHTSPRSPHTFPRSPHTFPRSPHTSPRSPHTSPRSPHTFPRSPHTFPTSRHTSPRSPHTFPTSPHTSATSPHMSHRSPHTSPRSPHTSPRSPHTSPRSPHMSHRSPHTSPRSPHTFATSPHTYPRSPHTFPTSPHTSATSPHMSHRSPHTYPRSPHTSPRSPHTSHRSPHTSHRSPHTFPQVTSHIPQVTSHVPQVTSHVPQVTSHMP

SEQ ID NO: 36199 - protein, 72 aa, Homo sapiens
  MAP TO AC010826.2; EXPRESSED IN BONE MARROW, SIGNAL = 4.7; EXPRESSED IN LUNG, SIGNAL = 3.1; EXPRESSED IN HELA, SIGNAL = 3.8; EXPRESSED IN HBL100, SIGNAL = 3.5; EXPRESSED IN HEART, SIGNAL = 4.2; EXPRESSED IN BT474, SIGNAL = 2.6; EXPRESSED IN BRAIN, SIGNAL = 3.6; EXPRESSED IN PLACENTA, SIGNAL = 3.4; EXPRESSED IN ADULT LIVER, SIGNAL = 3.8; EXPRESSED IN FETAL LIVER, SIGNAL = 3.2
EEQEKEKEEEEEKQKQKKRRRGKGKRKRKGKRRRKVRRKKEKKKTTRGRGRGRRRRRRRRRRRRRRNKTRNK

SEQ ID NO: 36200 - protein, 39 aa, Homo sapiens
  MAP TO AC010826.2; EXPRESSED IN BONE MARROW, SIGNAL = 4.7; EXPRESSED IN LUNG, SIGNAL = 3.1; EXPRESSED IN HELA, SIGNAL = 3.8; EXPRESSED IN HBL100, SIGNAL = 3.5; EXPRESSED IN HEART, SIGNAL = 4.2; EXPRESSED IN BT474, SIGNAL = 2.6; EXPRESSED IN BRAIN, SIGNAL = 3.6; EXPRESSED IN PLACENTA, SIGNAL = 3.4; EXPRESSED IN ADULT LIVER, SIGNAL = 3.8; EXPRESSED IN FETAL LIVER, SIGNAL = 3.2
FKKRRSRRRRRRRRRRSRSRRRGGGGRGRGKGRGRGGGR

SEQ ID NO: 36201 - protein, 57 aa, Homo sapiens
  MAP TO AC010857.2; EXPRESSED IN FETAL LIVER, SIGNAL =  12; EXPRESSED IN BRAIN, SIGNAL = 7.2; EXPRESSED IN LUNG, SIGNAL =  12; EXPRESSED IN HELA, SIGNAL =  13; EXPRESSED IN HEART, SIGNAL = 6.4; EXPRESSED IN ADULT LIVER, SIGNAL =  15; EXPRESSED IN BT474, SIGNAL = 8.9; EXPRESSED IN BONE MARROW, SIGNAL = 8.4; EXPRESSED IN PLACENTA, SIGNAL =  13; EXPRESSED IN HBL100, SIGNAL =  12; EST_HUMAN HIT: BF588699.1, EVALUE 2.80e+00; SWISSPROT HIT: O43868, EVALUE 2.60e+00
QKFPGKSSDCLSLDQSPTSETTYEGYKNRLGLYSNMKIPGKNVTMPGEVTIHSKKKG

SEQ ID NO: 36202 - protein, 93 aa, Homo sapiens
  MAP TO AL118512.2; EXPRESSED IN HEART, SIGNAL = 1.2; SWISSPROT HIT: P11799, EVALUE 1.00e-09; EST_HUMAN HIT: BF356611.1, EVALUE 9.00e-12
RPTITNSGSHPTEIIVTRGKSISLECEVQGIPPPTVTWMKDGHPLIKAKGVEILDEGHILQLKNIHVSDTGRYVCVAVNVAGMTDKKYDLSVH

SEQ ID NO: 36203 - protein, 39 aa, Homo sapiens
  MAP TO AC011351.1; EXPRESSED IN HEART, SIGNAL = 0.92
TVLLLLLLVVEIIILLFPLLLMIMMIPSILLRNCGVPSI

SEQ ID NO: 36204 - protein, 70 aa, Homo sapiens
  MAP TO AC011592.2; EXPRESSED IN BRAIN, SIGNAL = 1.4; EXPRESSED IN HELA, SIGNAL = 1.4; EXPRESSED IN PLACENTA, SIGNAL = 1.4; EXPRESSED IN ADULT LIVER, SIGNAL = 1.5; EXPRESSED IN LUNG, SIGNAL = 1.3; EXPRESSED IN BONE MARROW, SIGNAL = 1.4; EXPRESSED IN HEART, SIGNAL = 1.2; EXPRESSED IN HBL100, SIGNAL = 1.8; EXPRESSED IN FETAL LIVER, SIGNAL = 1.5; EXPRESSED IN BT474, SIGNAL = 1.2; SWISSPROT HIT: P47208, EVALUE 2.50e+00
SKHRNEDNAWQDLQITQEASKKKKQNKLKLTWPHSDQIIIPEYGSGPRALRKQEYYIIDSVTRVKCASFS

SEQ ID NO: 36205 - protein, 37 aa, Homo sapiens
  MAP TO AC007561.2; EXPRESSED IN LUNG, SIGNAL = 1.2; EXPRESSED IN HELA, SIGNAL = 0.91; EXPRESSED IN PLACENTA, SIGNAL = 0.71; EXPRESSED IN FETAL LIVER, SIGNAL = 0.72; EXPRESSED IN ADULT LIVER, SIGNAL = 0.67; EXPRESSED IN HEART, SIGNAL = 0.84; EST_HUMAN HIT: AI752095.1, EVALUE 4.00e-17; SWISSPROT HIT: O60462, EVALUE 3.00e-18
MEIILQFLIFDLEHDPLQVGEGDCKYDWLDIWDGIPH

SEQ ID NO: 36206 - protein, 53 aa, Homo sapiens
  MAP TO AC007561.2; EXPRESSED IN LUNG, SIGNAL = 1.2; EXPRESSED IN HELA, SIGNAL = 0.91; EXPRESSED IN PLACENTA, SIGNAL = 0.71; EXPRESSED IN FETAL LIVER, SIGNAL = 0.72; EXPRESSED IN ADULT LIVER, SIGNAL = 0.67; EXPRESSED IN HEART, SIGNAL = 0.84; EST_HUMAN HIT: BE879879.1, EVALUE 5.00e-23; SWISSPROT HIT: Q04584, EVALUE 3.50e+00
VLFYIQALKIAQKTSQAPTGPSNLLGFLRSIHTTWTAPLPSWPNPRWRSSCSS

SEQ ID NO: 36207 - protein, 276 aa, Homo sapiens
  MAP TO AC011700.3; EXPRESSED IN PLACENTA, SIGNAL = 0.92; EXPRESSED IN HBL100, SIGNAL = 1.2; EXPRESSED IN FETAL LIVER, SIGNAL = 1.2; EXPRESSED IN ADULT LIVER, SIGNAL = 1.4; EXPRESSED IN BRAIN, SIGNAL = 1.1; EXPRESSED IN BONE MARROW, SIGNAL = 0.97; EXPRESSED IN HEART, SIGNAL = 0.97; EST_HUMAN HIT: AV647211.1, EVALUE 7.00e-62; SWISSPROT HIT: Q92786, EVALUE 0.00e+00
ALRGNENEREMAPQSVSPRESYRENKRKQKLPQQQQQSFQQLVSARKEQKREERRQLKQQLEDMQKQLRQLQEKFYQIYDSTDSENDEDGNLSEDSMRSEILDARAQDSVGRSDNEMCELDPGQFIDRARALIREQEMAENKPKREGNNKERDHGPNSLQPEGKHLAETLKQELNTAMSQVVDTVVKVFSAKPSRQVPQVFPPLQIPQARFAVNGENHNFHTANQRLQCFGDVIIPNPLDTFGNVQMASSTDQTEALPLVVRKNSSDQSASGPAAG

SEQ ID NO: 36208 - protein, 404 aa, Homo sapiens
  MAP TO AC004147.1; EXPRESSED IN LUNG, SIGNAL = 2.8; EXPRESSED IN HELA, SIGNAL = 3.3; EXPRESSED IN PLACENTA, SIGNAL = 2.8; EXPRESSED IN ADULT LIVER, SIGNAL = 2.3; EXPRESSED IN BT474, SIGNAL = 2.4; EXPRESSED IN BONE MARROW, SIGNAL = 2.7; EXPRESSED IN HBL100, SIGNAL = 4.3; EXPRESSED IN HEART, SIGNAL = 2.1; EXPRESSED IN FETAL LIVER, SIGNAL = 2.3; EXPRESSED IN BRAIN, SIGNAL = 2.8; SWISSPROT HIT: P34314, EVALUE 1.00e-120; EST_HUMAN HIT: AU118884.1, EVALUE 0.00e+00
PPAMGQAPPATNEQKQWKSKTNGAENETLTLKEYHEQEEIFKLRLGHLKKEEAEIQAELERLERVRKLHIREVKRIHNEDNSQFKYHPTLNDRYLLLHLLGRGGFSEVYKAFDLTEQRYVAVKIHQLNKNWRDEKKENYHKHACREYRIHKELDHPRIVKLYDYFSLDTDSFCTVLEYCEGNDLDFYLKQHKLMSEKEARSIIMQIVNALKYLNEIKPPIIHYDLKPGNILLENGTACGEIKITDFGLSKIMDDDSYNSVDGMELTSQGAGTYWYLPPECFVVGKEPPKISNKVDVWSVGVIFYQCLYGRKPFGHNQSQQDILQENTILKATEVQFPPKPVVTPEAKALIRRCLAYRKEDRIDVQQLACDPYLLPHIRKSVSTSSPAGAAIASTSGASNNSSSN

SEQ ID NO: 36209 - protein, 119 aa, Homo sapiens
  MAP TO AC012134.1; EXPRESSED IN HELA, SIGNAL = 2.4; EXPRESSED IN PLACENTA, SIGNAL = 2.8; EXPRESSED IN HBL100, SIGNAL = 2.8; EXPRESSED IN LUNG, SIGNAL =   3; EXPRESSED IN BRAIN, SIGNAL = 2.9; EXPRESSED IN HEART, SIGNAL = 2.6; EXPRESSED IN BT474, SIGNAL = 2.5; EXPRESSED IN ADULT LIVER, SIGNAL = 2.7; EXPRESSED IN FETAL LIVER, SIGNAL = 2.7; EXPRESSED IN BONE MARROW, SIGNAL = 3.4
LSSLSPLPPRPLSLLTPVSPPPSPLLPKLSLPQSSPSLPSLQHHHHHSSSASLPPSPSSPPPQLSSTLPTLPPSPPPSPLSQISPPSSSLPLTPSPLILVLPPSSPPPSQSSRTSSPPP

SEQ ID NO: 36210 - protein, 30 aa, Homo sapiens
  MAP TO AC012380.1; EXPRESSED IN BONE MARROW, SIGNAL = 8.1; EXPRESSED IN LUNG, SIGNAL = 8.2; EXPRESSED IN BRAIN, SIGNAL = 8.6; EXPRESSED IN HELA, SIGNAL = 8.4; EXPRESSED IN HEART, SIGNAL = 5.1; EXPRESSED IN PLACENTA, SIGNAL = 9.3; EXPRESSED IN HBL100, SIGNAL = 6.8; EXPRESSED IN ADULT LIVER, SIGNAL = 8.4; EXPRESSED IN BT474, SIGNAL = 6.6; EXPRESSED IN FETAL LIVER, SIGNAL = 7.1; EST_HUMAN HIT: BE061526.1, EVALUE 1.00e-11
QECQASEPKLSHHIPCDLHIHIEMAGSCLN

SEQ ID NO: 36211 - protein, 18 aa, Homo sapiens
  MAP TO AC009309.1; EXPRESSED IN HEART, SIGNAL =   1; EXPRESSED IN FETAL LIVER, SIGNAL = 1.1; EXPRESSED IN BRAIN, SIGNAL = 1.1; EXPRESSED IN PLACENTA, SIGNAL = 1.2; EXPRESSED IN BT474, SIGNAL = 0.83; EXPRESSED IN BONE MARROW, SIGNAL = 1.1; EXPRESSED IN HBL100, SIGNAL = 1.2; EXPRESSED IN LUNG, SIGNAL = 0.91; EXPRESSED IN HELA, SIGNAL =   1; EXPRESSED IN ADULT LIVER, SIGNAL = 0.98
GPYHPRLCSSAVLHAELR

SEQ ID NO: 36212 - protein, 83 aa, Homo sapiens
  MAP TO AC007899.2; EXPRESSED IN BONE MARROW, SIGNAL = 1.5; EXPRESSED IN FETAL LIVER, SIGNAL = 1.3; EXPRESSED IN LUNG, SIGNAL = 1.3; EXPRESSED IN HELA, SIGNAL = 1.5; EXPRESSED IN BRAIN, SIGNAL = 1.2; EXPRESSED IN PLACENTA, SIGNAL = 0.94; EXPRESSED IN BT474, SIGNAL = 1.4; EXPRESSED IN HBL100, SIGNAL =   1; EXPRESSED IN ADULT LIVER, SIGNAL = 1.1; EXPRESSED IN HEART, SIGNAL = 0.93; EST_HUMAN HIT: AA314462.1, EVALUE 8.00e-04; SWISSPROT HIT: P32898, EVALUE 1.20e+00
LLEIVTSVLLHPSMAARLAAAWCLRCVAVALPFQLTPFLDRCAERLNNLKTSPEAVSGYSFAMAALLGGVHQCPLGIPHAKGK

SEQ ID NO: 36213 - protein, 50 aa, Homo sapiens
  MAP TO AC011036.2; EXPRESSED IN BT474, SIGNAL = 5.7; EXPRESSED IN FETAL LIVER, SIGNAL = 5.8; EXPRESSED IN BRAIN, SIGNAL = 5.8; EXPRESSED IN LUNG, SIGNAL = 6.8; EXPRESSED IN HBL100, SIGNAL = 5.7; EXPRESSED IN HELA, SIGNAL = 6.6; EXPRESSED IN HEART, SIGNAL = 5.1; EXPRESSED IN ADULT LIVER, SIGNAL = 8.1; EXPRESSED IN BONE MARROW, SIGNAL = 5.2; EXPRESSED IN PLACENTA, SIGNAL = 6.1; SWISSPROT HIT: P20935, EVALUE 3.00e-28; EST_HUMAN HIT: AU118193.1, EVALUE 3.00e-27
CGEWQWSVCVPTSGDCGLGTREGTRTGAECKQTMKTQRCKIPCNWKKQFG

SEQ ID NO: 36214 - protein, 34 aa, Homo sapiens
  MAP TO AC011036.2; EXPRESSED IN BT474, SIGNAL = 5.7; EXPRESSED IN FETAL LIVER, SIGNAL = 5.8; EXPRESSED IN BRAIN, SIGNAL = 5.8; EXPRESSED IN LUNG, SIGNAL = 6.8; EXPRESSED IN HBL100, SIGNAL = 5.7; EXPRESSED IN HELA, SIGNAL = 6.6; EXPRESSED IN HEART, SIGNAL = 5.1; EXPRESSED IN ADULT LIVER, SIGNAL = 8.1; EXPRESSED IN BONE MARROW, SIGNAL = 5.2; EXPRESSED IN PLACENTA, SIGNAL = 6.1; EST_HUMAN HIT: BF664890.1, EVALUE 8.00e-14
TVENGSGVCVCPPVETVGWAHGRALGLELSASKP

SEQ ID NO: 36215 - protein, 45 aa, Homo sapiens
  MAP TO AF182108.1; EXPRESSED IN FETAL LIVER, SIGNAL = 1.1; EXPRESSED IN ADULT LIVER, SIGNAL = 1.1; EXPRESSED IN HELA, SIGNAL = 0.92; EXPRESSED IN HEART, SIGNAL = 1.1; EXPRESSED IN BRAIN, SIGNAL =   1; EXPRESSED IN BONE MARROW, SIGNAL = 1.1; EST_HUMAN HIT: AV650854.1, EVALUE 1.00e+00; SWISSPROT HIT: Q58883, EVALUE 2.10e+00
AFQLVNHKGMIEYHHFGIPNKIIGLVIDDQPKIIKKLNGSLIIKD

SEQ ID NO: 36216 - protein, 44 aa, Homo sapiens
  MAP TO AF182108.1; EXPRESSED IN FETAL LIVER, SIGNAL = 1.1; EXPRESSED IN ADULT LIVER, SIGNAL = 1.1; EXPRESSED IN HELA, SIGNAL = 0.92; EXPRESSED IN HEART, SIGNAL = 1.1; EXPRESSED IN BRAIN, SIGNAL =   1; EXPRESSED IN BONE MARROW, SIGNAL = 1.1
FYYQAPIKLFNDFRLIINDQTNYFIRNSKVVIFYHTFMIDQLEC

SEQ ID NO: 36217 - protein, 196 aa, Homo sapiens
  MAP TO AC004049.1; EXPRESSED IN HELA, SIGNAL = 1.8; EXPRESSED IN ADULT LIVER, SIGNAL = 1.3; EXPRESSED IN BT474, SIGNAL = 1.8; EXPRESSED IN BRAIN, SIGNAL = 1.5; EXPRESSED IN BONE MARROW, SIGNAL = 1.5; EXPRESSED IN HEART, SIGNAL = 1.3; EXPRESSED IN HBL100, SIGNAL =   2; EXPRESSED IN PLACENTA, SIGNAL = 1.8; EXPRESSED IN FETAL LIVER, SIGNAL = 1.9; EXPRESSED IN LUNG, SIGNAL = 1.5; EST_HUMAN HIT: BE873778.1, EVALUE 2.00e-63; SWISSPROT HIT: P11633, EVALUE 1.00e-01
VVDHFDDLADPSSSQDGSASAQYGVQTLDMLCGHDPWLDGARWGLLSGGLIMDLNHSIGTQYSANPPVTIDVLMIDMTSDLMGHSQLTTTDQSELSFQLGLSLRGGTILPPAQSPEDRISTTPSPTSSLHEVGVEDFWRQISSQKTVVVEAGKKQKFPKKRKKKDPNEPQKPVSAYALFFPDTRAAIKGQNPNATF

SEQ ID NO: 36218 - protein, 125 aa, Homo sapiens
  MAP TO AC004125.1; EXPRESSED IN PLACENTA, SIGNAL = 2.4; EXPRESSED IN ADULT LIVER, SIGNAL = 2.3; EXPRESSED IN BRAIN, SIGNAL = 3.8; EXPRESSED IN LUNG, SIGNAL = 1.8; EXPRESSED IN BONE MARROW, SIGNAL =   2; EXPRESSED IN HEART, SIGNAL = 1.6; EXPRESSED IN HELA, SIGNAL = 2.2; EXPRESSED IN HBL100, SIGNAL = 2.1; EXPRESSED IN BT474, SIGNAL =   2; EXPRESSED IN FETAL LIVER, SIGNAL = 2.5; EST_HUMAN HIT: AW904992.1, EVALUE 3.00e-22; SWISSPROT HIT: P19601, EVALUE 5.60e-02
IDSGGGQVLAPPSPDPETCPPSAKASTPSLPLTSRCSPSPGTPQRSPWGPSSTPTGTTLFYSSTIPHPKSSKSHCIIIRPTGAPRPSELTSDLCPTPSTALGEVYRDVSEVAWHGPCDGITFYKE

SEQ ID NO: 36219 - protein, 158 aa, Homo sapiens
  MAP TO AC004125.1; EXPRESSED IN PLACENTA, SIGNAL = 2.4; EXPRESSED IN ADULT LIVER, SIGNAL = 2.3; EXPRESSED IN BRAIN, SIGNAL = 3.8; EXPRESSED IN LUNG, SIGNAL = 1.8; EXPRESSED IN BONE MARROW, SIGNAL =   2; EXPRESSED IN HEART, SIGNAL = 1.6; EXPRESSED IN HELA, SIGNAL = 2.2; EXPRESSED IN HBL100, SIGNAL = 2.1; EXPRESSED IN BT474, SIGNAL =   2; EXPRESSED IN FETAL LIVER, SIGNAL = 2.5; SWISSPROT HIT: O60359, EVALUE 6.00e-72; EST_HUMAN HIT: AW905015.1, EVALUE 8.00e-41
LSNIIGIIVYISANAGDPGQRDSKKSYSYGWSFYFGAFSFIIAEIVGVVAVHIYIEKHQQLRAKSHSEFLKKSTFARLPPYRYRFRRRSSSRSTEPRSRDLSPISKGFHTIPSTDISMFTLSRDPSKITMGTLLNSDRDHAFLQFHNSTPKEFKESLH

SEQ ID NO: 36220 - protein, 31 aa, Homo sapiens
  MAP TO AC012130.1; EXPRESSED IN HBL100, SIGNAL =   4; EXPRESSED IN PLACENTA, SIGNAL = 5.8; EXPRESSED IN HELA, SIGNAL = 4.2; EXPRESSED IN HEART, SIGNAL = 3.7; EXPRESSED IN ADULT LIVER, SIGNAL = 4.6; EXPRESSED IN BT474, SIGNAL = 3.1; EXPRESSED IN FETAL LIVER, SIGNAL = 4.3; EXPRESSED IN BONE MARROW, SIGNAL =   4; EXPRESSED IN LUNG, SIGNAL = 4.4; EXPRESSED IN BRAIN, SIGNAL = 3.4
LDVGQLKGDQSSAGIKACCDVNEEPPVGLLE

SEQ ID NO: 36221 - protein, 31 aa, Homo sapiens
  MAP TO AC012441.1; EXPRESSED IN BT474, SIGNAL = 1.1; EXPRESSED IN BONE MARROW, SIGNAL = 1.2; EXPRESSED IN PLACENTA, SIGNAL = 1.1; EXPRESSED IN HBL100, SIGNAL = 1.1; EXPRESSED IN HELA, SIGNAL = 1.3; EXPRESSED IN ADULT LIVER, SIGNAL = 1.2; EXPRESSED IN FETAL LIVER, SIGNAL = 1.9; EXPRESSED IN BRAIN, SIGNAL = 1.3; EXPRESSED IN LUNG, SIGNAL = 1.3; EXPRESSED IN HEART, SIGNAL = 1.4
CGCLSHTITFQADLGAGDNMGLDSGLLTVGP

SEQ ID NO: 36222 - protein, 26 aa, Homo sapiens
  MAP TO AC012441.1; EXPRESSED IN BT474, SIGNAL = 1.1; EXPRESSED IN BONE MARROW, SIGNAL = 1.2; EXPRESSED IN PLACENTA, SIGNAL = 1.1; EXPRESSED IN HBL100, SIGNAL = 1.1; EXPRESSED IN HELA, SIGNAL = 1.3; EXPRESSED IN ADULT LIVER, SIGNAL = 1.2; EXPRESSED IN FETAL LIVER, SIGNAL = 1.9; EXPRESSED IN BRAIN, SIGNAL = 1.3; EXPRESSED IN LUNG, SIGNAL = 1.3; EXPRESSED IN HEART, SIGNAL = 1.4
VAASLTPSLSKLTLVLATTWDWILVS

SEQ ID NO: 36223 - protein, 40 aa, Homo sapiens
  MAP TO AC007744.1; EXPRESSED IN PLACENTA, SIGNAL = 0.89; EXPRESSED IN HBL100, SIGNAL = 1.1; EXPRESSED IN BRAIN, SIGNAL = 1.4; EXPRESSED IN HEART, SIGNAL = 0.92; EXPRESSED IN HELA, SIGNAL =   1; EXPRESSED IN BT474, SIGNAL =   1; EXPRESSED IN BONE MARROW, SIGNAL = 0.96; EXPRESSED IN FETAL LIVER, SIGNAL = 0.84; EXPRESSED IN LUNG, SIGNAL = 0.84; EXPRESSED IN ADULT LIVER, SIGNAL = 0.74; SWISSPROT HIT: P35840, EVALUE 4.70e+00
EDSTAAGNKQHGRIAFLQPVPMTLPTEPHSCAHAESQETV

SEQ ID NO: 36224 - protein, 103 aa, Homo sapiens
  MAP TO AP000192.1; EXPRESSED IN PLACENTA, SIGNAL = 0.62; EXPRESSED IN BT474, SIGNAL = 0.68; EXPRESSED IN BONE MARROW, SIGNAL = 0.91; EXPRESSED IN HBL100, SIGNAL = 0.71; EXPRESSED IN HEART, SIGNAL = 0.92; EXPRESSED IN FETAL LIVER, SIGNAL = 0.77; EXPRESSED IN LUNG, SIGNAL = 0.91; EXPRESSED IN HELA, SIGNAL = 0.76; EXPRESSED IN ADULT LIVER, SIGNAL = 0.85; EXPRESSED IN BRAIN, SIGNAL = 0.9; SWISSPROT HIT: P34216, EVALUE 2.00e-04; EST_HUMAN HIT: BE538712.1, EVALUE 1.00e-24
GKSANYFVFVLVGVVVLERFFYGHSCSQAMLLVCRALADMNNDGRMDQVEFSIAMKLIKLKLQGYQLPSALPPVMKQQPVAISSAPAFGKSENELVSVFSCIF

SEQ ID NO: 36225 - protein, 49 aa, Homo sapiens
  MAP TO AC005519.2; EXPRESSED IN BONE MARROW, SIGNAL = 0.86; EXPRESSED IN HELA, SIGNAL = 0.97; EXPRESSED IN BRAIN, SIGNAL = 0.85; EXPRESSED IN HEART, SIGNAL = 0.81; EXPRESSED IN PLACENTA, SIGNAL = 0.87; EXPRESSED IN BT474, SIGNAL = 0.68; EXPRESSED IN HBL100, SIGNAL = 0.8; EXPRESSED IN FETAL LIVER, SIGNAL = 0.73; EXPRESSED IN LUNG, SIGNAL = 0.82; EXPRESSED IN ADULT LIVER, SIGNAL = 0.72; SWISSPROT HIT: P26867, EVALUE 3.50e+00; EST_HUMAN HIT: BE964652.2, EVALUE 8.70e+00
LAIPALPFWKLGHQKQLCLSLNSVIPTVPDTKKVAQNNCFLSTPALNKQ

SEQ ID NO: 36226 - protein, 18 aa, Homo sapiens
  MAP TO AC005519.2; EXPRESSED IN BONE MARROW, SIGNAL = 0.86; EXPRESSED IN HELA, SIGNAL = 0.97; EXPRESSED IN BRAIN, SIGNAL = 0.85; EXPRESSED IN HEART, SIGNAL = 0.81; EXPRESSED IN PLACENTA, SIGNAL = 0.87; EXPRESSED IN BT474, SIGNAL = 0.68; EXPRESSED IN HBL100, SIGNAL = 0.8; EXPRESSED IN FETAL LIVER, SIGNAL = 0.73; EXPRESSED IN LUNG, SIGNAL = 0.82; EXPRESSED IN ADULT LIVER, SIGNAL = 0.72
LPFLPCHSGNLDTRNSFV

SEQ ID NO: 36227 - protein, 19 aa, Homo sapiens
  MAP TO AC012448.1; EXPRESSED IN BT474, SIGNAL = 1.2; EXPRESSED IN LUNG, SIGNAL = 1.2; EXPRESSED IN HEART, SIGNAL =   1; EXPRESSED IN FETAL LIVER, SIGNAL = 1.4; EXPRESSED IN HELA, SIGNAL = 1.5; EST_HUMAN HIT: AA525812.1, EVALUE 1.10e-02
ICVMLVSPSKNLWSPMKLK

SEQ ID NO: 36228 - protein, 17 aa, Homo sapiens
  MAP TO AP000053.1; EXPRESSED IN PLACENTA, SIGNAL = 0.91; EXPRESSED IN BT474, SIGNAL = 0.74; EXPRESSED IN BONE MARROW, SIGNAL = 0.73; EXPRESSED IN FETAL LIVER, SIGNAL = 0.83; EXPRESSED IN HELA, SIGNAL = 0.81; EXPRESSED IN ADULT LIVER, SIGNAL = 0.87; EXPRESSED IN BRAIN, SIGNAL = 0.97; EXPRESSED IN HBL100, SIGNAL = 0.9; EXPRESSED IN LUNG, SIGNAL = 0.89; EXPRESSED IN HEART, SIGNAL = 0.98
DVAGQPEDENHRVDADD

SEQ ID NO: 36229 - protein, 233 aa, Homo sapiens
  MAP TO AC009962.2; EXPRESSED IN BONE MARROW, SIGNAL = 3.8; EXPRESSED IN LUNG, SIGNAL = 5.3; EXPRESSED IN PLACENTA, SIGNAL = 6.1; EXPRESSED IN HELA, SIGNAL = 3.8; EXPRESSED IN FETAL LIVER, SIGNAL =   3; EXPRESSED IN ADULT LIVER, SIGNAL = 3.1; EXPRESSED IN BT474, SIGNAL = 4.7; EXPRESSED IN BRAIN, SIGNAL = 3.9; EXPRESSED IN HEART, SIGNAL = 1.9; EXPRESSED IN HBL100, SIGNAL = 3.7; EST_HUMAN HIT: AW842451.1, EVALUE 1.00e-22; SWISSPROT HIT: P39520, EVALUE 2.00e-05
RFRQIEVLTTVANAFSSLYSQVSGTPLQRIGSMSSVTSNKETDPPPPLTRSNTANRLMKTLSKLNLCVDKTEKGESSSPSPSAEKGKILNVSVIEESGNKNDQKSQKIMKKKESSSMLATVKEEVSGSSAAVTENADSDRISDEANSNFNQGTENEQSKETQSHESKLGEESGIVESKLDSDFNISSHSELENSSELKSVHISTPEKEPCAPLTIPSIRNIMTQQKDSFEMEE

SEQ ID NO: 36230 - protein, 25 aa, Homo sapiens
  MAP TO AC009962.2; EXPRESSED IN BONE MARROW, SIGNAL = 3.8; EXPRESSED IN LUNG, SIGNAL = 5.3; EXPRESSED IN PLACENTA, SIGNAL = 6.1; EXPRESSED IN HELA, SIGNAL = 3.8; EXPRESSED IN FETAL LIVER, SIGNAL =   3; EXPRESSED IN ADULT LIVER, SIGNAL = 3.1; EXPRESSED IN BT474, SIGNAL = 4.7; EXPRESSED IN BRAIN, SIGNAL = 3.9; EXPRESSED IN HEART, SIGNAL = 1.9; EXPRESSED IN HBL100, SIGNAL = 3.7; EST_HUMAN HIT: BE083092.1, EVALUE 4.00e-08
CVFFFIFSSLRDAPAENWKYVLSDL

SEQ ID NO: 36231 - protein, 29 aa, Homo sapiens
  MAP TO AP000210.1; EXPRESSED IN FETAL LIVER, SIGNAL = 0.7; EXPRESSED IN BRAIN, SIGNAL = 0.74; EXPRESSED IN BT474, SIGNAL = 0.82; EXPRESSED IN HEART, SIGNAL = 0.98; EXPRESSED IN HBL100, SIGNAL = 0.76; EXPRESSED IN PLACENTA, SIGNAL = 0.64; EXPRESSED IN BONE MARROW, SIGNAL = 0.67; EXPRESSED IN LUNG, SIGNAL = 0.63; EXPRESSED IN HELA, SIGNAL = 0.62; EXPRESSED IN ADULT LIVER, SIGNAL = 0.67
MLLLPEGAVVGDGSFEDMGGVGRGRGNDQ

SEQ ID NO: 36232 - protein, 88 aa, Homo sapiens
  MAP TO AP000116.1; EXPRESSED IN ADULT LIVER, SIGNAL = 0.68; EXPRESSED IN PLACENTA, SIGNAL = 0.71; EXPRESSED IN BONE MARROW, SIGNAL = 0.77; EXPRESSED IN HBL100, SIGNAL = 0.76; EXPRESSED IN FETAL LIVER, SIGNAL = 0.91; EXPRESSED IN LUNG, SIGNAL = 0.67; EXPRESSED IN HELA, SIGNAL =   1; EXPRESSED IN BT474, SIGNAL = 0.63; EXPRESSED IN HEART, SIGNAL = 0.94; SWISSPROT HIT: P34216, EVALUE 2.00e-04; EST_HUMAN HIT: BE538712.1, EVALUE 5.00e-24
GKSANYFVFVLVGVVVLERFFYGHSCSQAMLLVCRALADMNNDGRMDQVEFSIAMKLIKLKLQGYQLPSALPPVMKQQPVAISSAPAF

SEQ ID NO: 36233 - protein, 31 aa, Homo sapiens
  MAP TO AP000116.1; EXPRESSED IN ADULT LIVER, SIGNAL = 0.68; EXPRESSED IN PLACENTA, SIGNAL = 0.71; EXPRESSED IN BONE MARROW, SIGNAL = 0.77; EXPRESSED IN HBL100, SIGNAL = 0.76; EXPRESSED IN FETAL LIVER, SIGNAL = 0.91; EXPRESSED IN LUNG, SIGNAL = 0.67; EXPRESSED IN HELA, SIGNAL =   1; EXPRESSED IN BT474, SIGNAL = 0.63; EXPRESSED IN HEART, SIGNAL = 0.94; EST_HUMAN HIT: BE786696.1, EVALUE 2.00e-12
HSYETYQTEATRISATLCTSPCHETATSCYF

SEQ ID NO: 36234 - protein, 107 aa, Homo sapiens
  MAP TO AC004985.2; EXPRESSED IN LUNG, SIGNAL = 1.2; EXPRESSED IN ADULT LIVER, SIGNAL = 1.2; EXPRESSED IN HEART, SIGNAL = 0.8; EXPRESSED IN BONE MARROW, SIGNAL = 1.5; EXPRESSED IN FETAL LIVER, SIGNAL = 1.2; EXPRESSED IN HELA, SIGNAL = 1.6; EXPRESSED IN BRAIN, SIGNAL = 1.4; EXPRESSED IN PLACENTA, SIGNAL = 1.4; EXPRESSED IN BT474, SIGNAL = 1.7; EXPRESSED IN HBL100, SIGNAL = 1.8; EST_HUMAN HIT: AA977669.1, EVALUE 3.00e-05
EERVAPLLPVPPQGKGKERREQQCKWLAEAGKEQQRGKVGGGWRERAKRGRERGRDRQRGSQRERKKGRERQEETQTKRESKRKRDNARERERSSKEKTVYPIPLKA

SEQ ID NO: 36235 - protein, 29 aa, Homo sapiens
  MAP TO AC005075.2; EXPRESSED IN PLACENTA, SIGNAL = 0.89; EXPRESSED IN FETAL LIVER, SIGNAL = 0.9; EXPRESSED IN ADULT LIVER, SIGNAL = 1.1; EXPRESSED IN BT474, SIGNAL = 0.95; EXPRESSED IN HEART, SIGNAL = 0.86; EXPRESSED IN BRAIN, SIGNAL = 1.1; EXPRESSED IN HELA, SIGNAL = 1.6; EXPRESSED IN LUNG, SIGNAL =   1; EXPRESSED IN HBL100, SIGNAL = 0.8; EXPRESSED IN BONE MARROW, SIGNAL = 1.1
IFVIKKLEIRCFYHNEVMAMEVAQLLLTL

SEQ ID NO: 36236 - protein, 35 aa, Homo sapiens
  MAP TO AC007158.5; EXPRESSED IN BT474, SIGNAL = 1.1; EXPRESSED IN HBL100, SIGNAL = 1.9; EXPRESSED IN BONE MARROW, SIGNAL = 1.2; EXPRESSED IN LUNG, SIGNAL = 3.1; EXPRESSED IN BRAIN, SIGNAL = 0.96; EXPRESSED IN HEART, SIGNAL = 1.3; EXPRESSED IN ADULT LIVER, SIGNAL = 0.97
LRVWRSSGSGISCLLSLVKGLWLNWCSQLEQGRQE

SEQ ID NO: 36237 - protein, 52 aa, Homo sapiens
  MAP TO AP000056.1; EXPRESSED IN HEART, SIGNAL = 1.1; EXPRESSED IN PLACENTA, SIGNAL = 0.68; EXPRESSED IN BONE MARROW, SIGNAL = 0.64; EXPRESSED IN HELA, SIGNAL = 0.72; EXPRESSED IN ADULT LIVER, SIGNAL = 0.78; EXPRESSED IN BRAIN, SIGNAL = 0.71; EXPRESSED IN LUNG, SIGNAL = 0.85; SWISSPROT HIT: Q9Y696, EVALUE 4.00e-18; EST_HUMAN HIT: AW816405.1, EVALUE 5.00e-24
LRKLDNYLNSPLPDEIDAYSTEDVTVSGRKFLDGDELTLADCNLLPKLHIIK

SEQ ID NO: 36238 - protein, 42 aa, Homo sapiens
  MAP TO AP000126.1; EXPRESSED IN BT474, SIGNAL = 0.65; EXPRESSED IN ADULT LIVER, SIGNAL = 0.81; EXPRESSED IN BRAIN, SIGNAL = 1.5; EXPRESSED IN HEART, SIGNAL = 0.91; EXPRESSED IN BONE MARROW, SIGNAL = 0.78; EXPRESSED IN HELA, SIGNAL = 1.2; EXPRESSED IN PLACENTA, SIGNAL = 0.72; EXPRESSED IN LUNG, SIGNAL = 0.93; EXPRESSED IN FETAL LIVER, SIGNAL = 0.76; EXPRESSED IN HBL100, SIGNAL = 4.2; SWISSPROT HIT: Q26366, EVALUE 4.70e+00; EST_HUMAN HIT: BE731312.1, EVALUE 5.40e+00
LSPPLPTPCSATTSPGLSSQDATGAAMATRWDIALAVAMAAP

SEQ ID NO: 36239 - protein, 58 aa, Homo sapiens
  MAP TO AL078476.2; EXPRESSED IN HEART, SIGNAL = 1.2; EXPRESSED IN HBL100, SIGNAL = 0.8; EXPRESSED IN FETAL LIVER, SIGNAL = 0.65; EXPRESSED IN BRAIN, SIGNAL = 0.97; EXPRESSED IN PLACENTA, SIGNAL = 0.96; EXPRESSED IN BT474, SIGNAL = 0.81; EXPRESSED IN BONE MARROW, SIGNAL = 1.1; EXPRESSED IN HELA, SIGNAL = 0.91; EXPRESSED IN ADULT LIVER, SIGNAL = 0.86; EXPRESSED IN LUNG, SIGNAL = 0.96
KPLHMINLGISSSSSWRSSSVLSCVTCVFCNFMNFSLFLPSIWVERIFHSSLTENVWK

SEQ ID NO: 36240 - protein, 45 aa, Homo sapiens
  MAP TO AJ229043.1; EXPRESSED IN HBL100, SIGNAL = 1.7; EXPRESSED IN HELA, SIGNAL = 2.1; EXPRESSED IN BT474, SIGNAL = 1.6; EXPRESSED IN FETAL LIVER, SIGNAL =   2; EXPRESSED IN LUNG, SIGNAL = 1.8; EXPRESSED IN BONE MARROW, SIGNAL = 2.1; EXPRESSED IN PLACENTA, SIGNAL =   2; EXPRESSED IN HEART, SIGNAL = 1.7; EXPRESSED IN ADULT LIVER, SIGNAL = 2.4; EXPRESSED IN BRAIN, SIGNAL =   2
LQTGRNGYQNNSNSEKLLREVKVIAKLSLLKTLIPKLERSYNEKK

SEQ ID NO: 36241 - protein, 29 aa, Homo sapiens
  MAP TO AL049563.4; EXPRESSED IN FETAL LIVER, SIGNAL = 0.59; EXPRESSED IN ADULT LIVER, SIGNAL = 0.93; EXPRESSED IN HEART, SIGNAL = 0.98; EXPRESSED IN BONE MARROW, SIGNAL = 0.71; EXPRESSED IN LUNG, SIGNAL = 0.76; EXPRESSED IN HELA, SIGNAL = 0.65; EXPRESSED IN PLACENTA, SIGNAL = 0.71; EST_HUMAN HIT: R34716.1, EVALUE 2.00e-03; SWISSPROT HIT: Q9UL62, EVALUE 1.00e-09
MFGTYNVISLVVLLNMLIAMMNNSYQLIA

SEQ ID NO: 36242 - protein, 96 aa, Homo sapiens
  MAP TO AF024533.1; EXPRESSED IN FETAL LIVER, SIGNAL = 1.4; EXPRESSED IN LUNG, SIGNAL =   1; EXPRESSED IN BONE MARROW, SIGNAL = 1.3; EXPRESSED IN HELA, SIGNAL = 1.2; EXPRESSED IN HEART, SIGNAL =   1; EXPRESSED IN PLACENTA, SIGNAL = 1.3; EXPRESSED IN BT474, SIGNAL = 1.1; EXPRESSED IN ADULT LIVER, SIGNAL = 1.3; EXPRESSED IN BRAIN, SIGNAL = 1.2; EXPRESSED IN HBL100, SIGNAL = 1.2; EST_HUMAN HIT: AL041536.1, EVALUE 2.00e-14; SWISSPROT HIT: P39880, EVALUE 2.00e-41
PSQSESAGSVSEGEEMDTAEIARQVKEQLIKHNIGQRIFGHYVLGLSQGSVSEILARPKPWNKLTVRGKEPFHKMKQFLSDEQNILALRSIQGRQR

SEQ ID NO: 36243 - protein, 48 aa, Homo sapiens
  MAP TO AC012665.1; EXPRESSED IN HBL100, SIGNAL = 2.2; EXPRESSED IN ADULT LIVER, SIGNAL =   2; EXPRESSED IN FETAL LIVER, SIGNAL =   2; EXPRESSED IN LUNG, SIGNAL = 1.7; EXPRESSED IN HEART, SIGNAL = 1.7; EXPRESSED IN HELA, SIGNAL = 2.1; EXPRESSED IN PLACENTA, SIGNAL =   2; EXPRESSED IN BT474, SIGNAL =   2; EXPRESSED IN BRAIN, SIGNAL = 2.1; EXPRESSED IN BONE MARROW, SIGNAL = 1.8; EST_HUMAN HIT: BE535927.1, EVALUE 5.10e+00; SWISSPROT HIT: P40418, EVALUE 6.00e+00
MNQFDWKLCELLVSSAVHSFFESFPHFQDAPEPRILLLTLLLGTAAGS

SEQ ID NO: 36244 - protein, 205 aa, Homo sapiens
  MAP TO AL050305.9; EXPRESSED IN HEART, SIGNAL = 0.93; EXPRESSED IN FETAL LIVER, SIGNAL = 0.99; EXPRESSED IN LUNG, SIGNAL = 0.99; EXPRESSED IN PLACENTA, SIGNAL = 0.92; EXPRESSED IN BT474, SIGNAL = 1.9; EXPRESSED IN BONE MARROW, SIGNAL = 1.6; EXPRESSED IN HBL100, SIGNAL = 1.3; EXPRESSED IN HELA, SIGNAL = 0.96; EXPRESSED IN ADULT LIVER, SIGNAL = 0.9; EXPRESSED IN BRAIN, SIGNAL = 1.2; EST_HUMAN HIT: AI817732.1, EVALUE 1.00e-17; SWISSPROT HIT: Q09472, EVALUE 2.40e-01
PPGLGLQQPPARAIKPGAALQLPGHSPQGQLKASLPLPLQWNCPCYSQTNEGAKTLSALNKSPARCRQQRGGQSVSHRSQILPTAHNETEKPQLGPTAQTLHPGLIVQIADLHLSGVEPPADKQKTLRHKFPSSLPPGWGRNVNTEIIPELQWAAQGCHAKIYSQHSKGRGTHTLRALRGNTAVTVRKHREATQLSKSLPTEQYV

SEQ ID NO: 36245 - protein, 61 aa, Homo sapiens
  MAP TO AL049836.2; EXPRESSED IN PLACENTA, SIGNAL = 0.81; EXPRESSED IN HBL100, SIGNAL = 0.83; EXPRESSED IN FETAL LIVER, SIGNAL = 0.78; EXPRESSED IN BRAIN, SIGNAL = 0.82; EXPRESSED IN BT474, SIGNAL = 0.89; EXPRESSED IN BONE MARROW, SIGNAL = 0.95; EXPRESSED IN HELA, SIGNAL = 0.81; EXPRESSED IN ADULT LIVER, SIGNAL = 0.67; EXPRESSED IN LUNG, SIGNAL = 0.83; EXPRESSED IN HEART, SIGNAL = 0.8; SWISSPROT HIT: P50340, EVALUE 5.80e+00; EST_HUMAN HIT: BE812307.1, EVALUE 2.00e+00
LQLALDRAQDLMRKEQRGLLVLLQTSWGPEKDVTEILGRQHWKGLGHHNPTLLHLDLSFPI

SEQ ID NO: 36246 - protein, 35 aa, Homo sapiens
  MAP TO AP000086.1; EXPRESSED IN PLACENTA, SIGNAL = 0.97; EXPRESSED IN BT474, SIGNAL = 0.87; EXPRESSED IN BONE MARROW, SIGNAL = 0.8; EXPRESSED IN FETAL LIVER, SIGNAL = 0.79; EXPRESSED IN LUNG, SIGNAL = 0.83; EXPRESSED IN HELA, SIGNAL = 1.2; EXPRESSED IN ADULT LIVER, SIGNAL = 0.64; EXPRESSED IN BRAIN, SIGNAL = 1.2; EXPRESSED IN HEART, SIGNAL = 0.85; EXPRESSED IN HBL100, SIGNAL = 0.85; EST_HUMAN HIT: BE222256.1, EVALUE 1.00e-02; SWISSPROT HIT: P24046, EVALUE 8.20e+00
PLRTSSFLGWWGWVLRRISIVLPGNSLGGDGGGAF

SEQ ID NO: 36247 - protein, 47 aa, Homo sapiens
  MAP TO AC008074.1; EXPRESSED IN BT474, SIGNAL = 0.88; EXPRESSED IN LUNG, SIGNAL = 0.6; EXPRESSED IN PLACENTA, SIGNAL = 0.91; EXPRESSED IN FETAL LIVER, SIGNAL = 0.62; EXPRESSED IN HEART, SIGNAL = 0.89; EXPRESSED IN BONE MARROW, SIGNAL = 0.76; EXPRESSED IN ADULT LIVER, SIGNAL = 4.8; SWISSPROT HIT: Q07849, EVALUE 7.90e+00
VFVERLRKSLPGEMKAESPGKKGDGSLETGRKKVSGGDMSGADARSK

SEQ ID NO: 36248 - protein, 39 aa, Homo sapiens
  MAP TO AF064861.1; EXPRESSED IN BONE MARROW, SIGNAL =   2; EXPRESSED IN HEART, SIGNAL = 1.9; EXPRESSED IN ADULT LIVER, SIGNAL = 2.7; EXPRESSED IN BRAIN, SIGNAL = 2.6; EXPRESSED IN LUNG, SIGNAL =   2; EXPRESSED IN HELA, SIGNAL = 2.2; EXPRESSED IN HBL100, SIGNAL = 2.2; EXPRESSED IN PLACENTA, SIGNAL = 2.2; EXPRESSED IN BT474, SIGNAL = 2.3; EXPRESSED IN FETAL LIVER, SIGNAL = 1.9; EST_HUMAN HIT: BE348426.1, EVALUE 1.00e-14
LLQICQRIGPMLDKEIPPSISRVTSLLGAGRQSLLRTAK

SEQ ID NO: 36249 - protein, 334 aa, Homo sapiens
  MAP TO AL049767.9; EXPRESSED IN BONE MARROW, SIGNAL = 0.88; EXPRESSED IN ADULT LIVER, SIGNAL = 0.74; EXPRESSED IN BRAIN, SIGNAL = 0.71; EXPRESSED IN PLACENTA, SIGNAL = 0.68; EXPRESSED IN BT474, SIGNAL = 0.65; EXPRESSED IN LUNG, SIGNAL = 0.66; EXPRESSED IN HELA, SIGNAL = 0.65; EXPRESSED IN FETAL LIVER, SIGNAL = 0.72; EXPRESSED IN HEART, SIGNAL = 0.82; EST_HUMAN HIT: BE973809.1, EVALUE 1.00e-106; SWISSPROT HIT: P04279, EVALUE 0.00e+00
HHKGGKAHRGTQNPSQDQGNSPSGKGISSQYSNTEERLWVHGLSKEQTSVSGAQKGRKQGGSQSSYVLQTEELVANKQQRETKNSHQNKGHYQNVVEVREEHSSKVQTSLCPAHQDKLQHGSKDIFSTQDELLVYNKNQHQTKNLNQDQQHGRKANKISYQSSSTEERRLHYGENGVQKDVSQSSIYSQTEEKAQGKSQKQITIPSQEQEHSQKANKISYQSSSTEERRLHYGENGVQKDVSQRSIYSQTEKLVAGKSQIQAPNPKQEPWHGENAKGESGQSTNREQDLLSHEQKGRHQHGSHGGLDIVIIEQEDDSDRHLAQHLNNDRNPLFT

SEQ ID NO: 36250 - protein, 77 aa, Homo sapiens
  MAP TO AC009237.1; EXPRESSED IN BONE MARROW, SIGNAL = 0.89; EXPRESSED IN HBL100, SIGNAL = 0.69; EXPRESSED IN ADULT LIVER, SIGNAL = 0.86; EXPRESSED IN BRAIN, SIGNAL = 0.7; EXPRESSED IN PLACENTA, SIGNAL = 0.99; EXPRESSED IN BT474, SIGNAL = 0.87; EXPRESSED IN FETAL LIVER, SIGNAL = 0.77; EXPRESSED IN LUNG, SIGNAL = 0.8; EXPRESSED IN HELA, SIGNAL = 0.72; EXPRESSED IN HEART, SIGNAL = 0.78; EST_HUMAN HIT: BE892280.1, EVALUE 8.00e-16; SWISSPROT HIT: P19474, EVALUE 3.00e-04
GDVVLRAQMIRNEYRKLHPVLHKEEKQHLERLNKEYQEIFQQLQRSWVKMDQKSKHLKEMYQELMEMCHKPEVELLQ

SEQ ID NO: 36251 - protein, 30 aa, Homo sapiens
  MAP TO AC007370.7; EXPRESSED IN HEART, SIGNAL = 0.96; EXPRESSED IN BT474, SIGNAL = 0.63; EXPRESSED IN BRAIN, SIGNAL = 0.96; EXPRESSED IN PLACENTA, SIGNAL = 0.84; EXPRESSED IN BONE MARROW, SIGNAL = 0.76; EXPRESSED IN FETAL LIVER, SIGNAL = 1.5; EXPRESSED IN LUNG, SIGNAL = 0.8; EXPRESSED IN HELA, SIGNAL = 0.96; EXPRESSED IN ADULT LIVER, SIGNAL =   1
IHCPYCHHHRRHHHHHHHHFHHHYCSTGEL

SEQ ID NO: 36252 - protein, 30 aa, Homo sapiens
  MAP TO AC007370.7; EXPRESSED IN HEART, SIGNAL = 0.96; EXPRESSED IN BT474, SIGNAL = 0.63; EXPRESSED IN BRAIN, SIGNAL = 0.96; EXPRESSED IN PLACENTA, SIGNAL = 0.84; EXPRESSED IN BONE MARROW, SIGNAL = 0.76; EXPRESSED IN FETAL LIVER, SIGNAL = 1.5; EXPRESSED IN LUNG, SIGNAL = 0.8; EXPRESSED IN HELA, SIGNAL = 0.96; EXPRESSED IN ADULT LIVER, SIGNAL =   1
VFIALTVIIIVVIIIIIIIIFITIIAVQVN

SEQ ID NO: 36253 - protein, 69 aa, Homo sapiens
  MAP TO AC008039.1; EXPRESSED IN PLACENTA, SIGNAL =   1; EXPRESSED IN FETAL LIVER, SIGNAL =   1; EXPRESSED IN HEART, SIGNAL = 0.95; EXPRESSED IN HBL100, SIGNAL = 0.96; EXPRESSED IN BT474, SIGNAL = 0.97; EXPRESSED IN BONE MARROW, SIGNAL = 0.91; EXPRESSED IN LUNG, SIGNAL = 0.89; EXPRESSED IN HELA, SIGNAL = 0.86; EXPRESSED IN ADULT LIVER, SIGNAL = 0.92; EXPRESSED IN BRAIN, SIGNAL = 0.84; EST_HUMAN HIT: AA078165.1, EVALUE 4.00e-08; SWISSPROT HIT: Q09625, EVALUE 1.30e+00
TAGAPFSSDPRRSTPVSSILGSLPLGLVASILCWLLSMSPAPKLIITSLTTWEPLAATSSSWTCTGRWS

SEQ ID NO: 36254 - protein, 56 aa, Homo sapiens
  MAP TO AF067844.1; EXPRESSED IN BONE MARROW, SIGNAL = 1.9; EXPRESSED IN ADULT LIVER, SIGNAL = 1.7; EXPRESSED IN FETAL LIVER, SIGNAL = 2.7; EXPRESSED IN BRAIN, SIGNAL = 1.2; EXPRESSED IN LUNG, SIGNAL = 2.1; EXPRESSED IN HEART, SIGNAL = 1.8; EXPRESSED IN HELA, SIGNAL = 2.3; EXPRESSED IN HBL100, SIGNAL =   3; EXPRESSED IN PLACENTA, SIGNAL =   2; EXPRESSED IN BT474, SIGNAL =   2; EST_HUMAN HIT: AA134467.1, EVALUE 8.00e-03; SWISSPROT HIT: P45592, EVALUE 2.00e-03
MGSHVAVFDDVIKVFSDMKVCKSSTLEKVKKRKKLLLFCLSEYKKYIILAEAKKIL

SEQ ID NO: 36255 - protein, 49 aa, Homo sapiens
  MAP TO AF068862.1; EXPRESSED IN BT474, SIGNAL = 2.2; EXPRESSED IN FETAL LIVER, SIGNAL = 2.8; EXPRESSED IN LUNG, SIGNAL = 2.5; EXPRESSED IN BONE MARROW, SIGNAL =   2; EXPRESSED IN PLACENTA, SIGNAL = 2.3; EXPRESSED IN HEART, SIGNAL = 2.8; EXPRESSED IN ADULT LIVER, SIGNAL = 3.2; EXPRESSED IN BRAIN, SIGNAL = 1.7; EXPRESSED IN HELA, SIGNAL =   3; EXPRESSED IN HBL100, SIGNAL = 2.3; SWISSPROT HIT: Q16698, EVALUE 9.00e-24; EST_HUMAN HIT: AI625247.1, EVALUE 1.00e-22
GAFSRLDPTGTFEKEMIGRIPCGRLGTVEELANLAAFLCSDYASWINGA

SEQ ID NO: 36256 - protein, 49 aa, Homo sapiens
  MAP TO AC008277.1; EXPRESSED IN BONE MARROW, SIGNAL =   1; EXPRESSED IN HBL100, SIGNAL = 0.71; EXPRESSED IN ADULT LIVER, SIGNAL = 0.74; EXPRESSED IN BRAIN, SIGNAL = 1.1; EXPRESSED IN PLACENTA, SIGNAL = 1.1; EXPRESSED IN BT474, SIGNAL = 1.1; EXPRESSED IN LUNG, SIGNAL = 1.1; EXPRESSED IN HELA, SIGNAL = 0.74; EXPRESSED IN FETAL LIVER, SIGNAL = 0.93; EXPRESSED IN HEART, SIGNAL = 0.95; EST_HUMAN HIT: AW886112.1, EVALUE 3.00e-23; SWISSPROT HIT: P28337, EVALUE 7.80e+00
QQSQYRRKLFDASHSLRSVMFGQDRYRRRYWILPQCGGIFVEGMESGEG

SEQ ID NO: 36257 - protein, 18 aa, Homo sapiens
  MAP TO AC008277.1; EXPRESSED IN BONE MARROW, SIGNAL =   1; EXPRESSED IN HBL100, SIGNAL = 0.71; EXPRESSED IN ADULT LIVER, SIGNAL = 0.74; EXPRESSED IN BRAIN, SIGNAL = 1.1; EXPRESSED IN PLACENTA, SIGNAL = 1.1; EXPRESSED IN BT474, SIGNAL = 1.1; EXPRESSED IN LUNG, SIGNAL = 1.1; EXPRESSED IN HELA, SIGNAL = 0.74; EXPRESSED IN FETAL LIVER, SIGNAL = 0.93; EXPRESSED IN HEART, SIGNAL = 0.95; EST_HUMAN HIT: BE833928.1, EVALUE 7.00e-03
NRVSTEGSSLMRLTHCVQ

SEQ ID NO: 36258 - protein, 168 aa, Homo sapiens
  MAP TO AF134726.1; EXPRESSED IN HBL100, SIGNAL = 6.1; EXPRESSED IN FETAL LIVER, SIGNAL =  20; EXPRESSED IN LUNG, SIGNAL =  87; EXPRESSED IN BONE MARROW, SIGNAL =  15; EXPRESSED IN PLACENTA, SIGNAL = 4.9; EXPRESSED IN HEART, SIGNAL = 7.9; EXPRESSED IN HELA, SIGNAL =  11; EXPRESSED IN BT474, SIGNAL =   7; EXPRESSED IN ADULT LIVER, SIGNAL = 3.8; EXPRESSED IN BRAIN, SIGNAL = 3.7; SWISSPROT HIT: P08107, EVALUE 1.00e-74; EST_HUMAN HIT: AI132959.1, EVALUE 8.00e-74
IEVTFDIDANGILNVTATDKSTGKANKITITNDKGRLSKEEIERMVQEAEKYKAEDEVQRERVSAKNALESYAFNMKSAVEDEGLKGKISEADKKKVLDKCQEVISWLDANTLAEKDEFEHKRKELEQVCNPIISGLYQGAGGPGPGGFGAQGPKGGSGSGPTIEEVD

SEQ ID NO: 36259 - protein, 61 aa, Homo sapiens
  MAP TO AF134726.1; EXPRESSED IN HBL100, SIGNAL = 6.1; EXPRESSED IN FETAL LIVER, SIGNAL =  20; EXPRESSED IN LUNG, SIGNAL =  87; EXPRESSED IN BONE MARROW, SIGNAL =  15; EXPRESSED IN PLACENTA, SIGNAL = 4.9; EXPRESSED IN HEART, SIGNAL = 7.9; EXPRESSED IN HELA, SIGNAL =  11; EXPRESSED IN BT474, SIGNAL =   7; EXPRESSED IN ADULT LIVER, SIGNAL = 3.8; EXPRESSED IN BRAIN, SIGNAL = 3.7; EST_HUMAN HIT: AW630923.1, EVALUE 7.00e-22; SWISSPROT HIT: Q06428, EVALUE 1.60e+00
PGRGSRSCAPTCSEAPWSPWRRLCATPSWTRPRFTTWSWSGAPPASPRCRSCCRTSSTGAT

SEQ ID NO: 36260 - protein, 68 aa, Homo sapiens
  MAP TO AF070717.1; EXPRESSED IN BRAIN, SIGNAL = 1.4; EXPRESSED IN HBL100, SIGNAL = 2.4; EXPRESSED IN ADULT LIVER, SIGNAL = 2.1; EXPRESSED IN FETAL LIVER, SIGNAL = 2.2; EXPRESSED IN BONE MARROW, SIGNAL = 2.1; EXPRESSED IN LUNG, SIGNAL = 1.9; EXPRESSED IN PLACENTA, SIGNAL = 1.9; EXPRESSED IN HEART, SIGNAL =   2; EXPRESSED IN HELA, SIGNAL = 2.3; EXPRESSED IN BT474, SIGNAL = 1.9; SWISSPROT HIT: P36143, EVALUE 3.30e+00; EST_HUMAN HIT: AW845291.1, EVALUE 1.60e+00
MGEKYRFKTRSSNSNKGTDPAAGSDREFHSPLKQSPLGSFITGWRTTAHSQKHLKNKTVKRFKQARNV

SEQ ID NO: 36261 - protein, 67 aa, Homo sapiens
  MAP TO Z98051.6; EXPRESSED IN PLACENTA, SIGNAL = 1.1; EXPRESSED IN HBL100, SIGNAL =   1; EXPRESSED IN FETAL LIVER, SIGNAL = 0.97; EXPRESSED IN LUNG, SIGNAL = 1.3; EXPRESSED IN HELA, SIGNAL =   1; EXPRESSED IN BRAIN, SIGNAL = 0.9; EXPRESSED IN BT474, SIGNAL = 1.2; EXPRESSED IN BONE MARROW, SIGNAL = 1.3; EXPRESSED IN ADULT LIVER, SIGNAL = 0.73; EXPRESSED IN HEART, SIGNAL = 0.8; SWISSPROT HIT: P79944, EVALUE 3.40e-02; EST_HUMAN HIT: BE563571.1, EVALUE 2.00e-08
ADLATKVEKMRQSILEGVNMNHPPPSALLPSPTFVPPMVPSLYPVSLYSRAMGSMPLPPQGRSRGFA

SEQ ID NO: 36262 - protein, 22 aa, Homo sapiens
  MAP TO AF139813.1; EXPRESSED IN ADULT LIVER, SIGNAL = 5.5; EXPRESSED IN FETAL LIVER, SIGNAL = 4.7; EXPRESSED IN BRAIN, SIGNAL =   3; EXPRESSED IN LUNG, SIGNAL = 5.3; EXPRESSED IN BONE MARROW, SIGNAL = 4.1; EXPRESSED IN PLACENTA, SIGNAL = 4.3; EXPRESSED IN HEART, SIGNAL = 3.4; EXPRESSED IN HELA, SIGNAL = 5.7; EXPRESSED IN HBL100, SIGNAL = 3.8; EXPRESSED IN BT474, SIGNAL = 5.4
LATSRATSAVLAPPAPPSTGDS

SEQ ID NO: 36263 - protein, 112 aa, Homo sapiens
  MAP TO AF091512.1; EXPRESSED IN BT474, SIGNAL = 2.8; EXPRESSED IN HEART, SIGNAL =   2; EXPRESSED IN ADULT LIVER, SIGNAL = 2.4; EXPRESSED IN BRAIN, SIGNAL = 1.6; EXPRESSED IN LUNG, SIGNAL = 2.8; EXPRESSED IN BONE MARROW, SIGNAL = 2.5; EXPRESSED IN PLACENTA, SIGNAL = 1.9; EXPRESSED IN HELA, SIGNAL = 3.1; EXPRESSED IN HBL100, SIGNAL =   2; EXPRESSED IN FETAL LIVER, SIGNAL = 2.8; SWISSPROT HIT: P49910, EVALUE 4.00e-30; EST_HUMAN HIT: BE387349.1, EVALUE 2.00e-48
MAAPLEAQDQAPGEGEGLLIVKVEDSSWEQESAQHEDGRDSEACRQRFRQFCYGDVHGPHEAFSQLWELCCRWLRPELRTKEQILELLVLEQFLTVLPGEIQGWVREQHPGS

SEQ ID NO: 36264 - protein, 119 aa, Homo sapiens
  MAP TO AC008176.1; EXPRESSED IN HBL100, SIGNAL = 0.79; EXPRESSED IN FETAL LIVER, SIGNAL = 1.1; EXPRESSED IN BRAIN, SIGNAL = 0.94; EXPRESSED IN PLACENTA, SIGNAL = 0.91; EXPRESSED IN BT474, SIGNAL = 0.87; EXPRESSED IN BONE MARROW, SIGNAL = 1.1; EXPRESSED IN LUNG, SIGNAL = 0.84; EXPRESSED IN HELA, SIGNAL = 0.91; EXPRESSED IN ADULT LIVER, SIGNAL = 1.4; EXPRESSED IN HEART, SIGNAL = 0.93; EST_HUMAN HIT: AA315045.1, EVALUE 4.00e-05; SWISSPROT HIT: Q03460, EVALUE 1.60e-02
GTTFLGSLIFEKEIKMRIKATSEDGTVIAQAEYGSVDIGEEVLKKGFAEKCRLASRTDICEEKKLDPGQLVLRNLKSPIPLWGHRSNQSTFSRPKGHLSEKMTLDLKDENDAGNLITFP

SEQ ID NO: 36265 - protein, 56 aa, Homo sapiens
  MAP TO AC004890.2; EXPRESSED IN HEART, SIGNAL =   1; EXPRESSED IN FETAL LIVER, SIGNAL = 0.82; EXPRESSED IN PLACENTA, SIGNAL = 0.78; EXPRESSED IN BT474, SIGNAL = 0.77; EXPRESSED IN BONE MARROW, SIGNAL = 0.91; EXPRESSED IN HBL100, SIGNAL =   1; EXPRESSED IN LUNG, SIGNAL = 0.91; EXPRESSED IN ADULT LIVER, SIGNAL = 0.99; EXPRESSED IN BRAIN, SIGNAL = 1.5; EXPRESSED IN HELA, SIGNAL =   1; EST_HUMAN HIT: BE729675.1, EVALUE 3.20e-01; SWISSPROT HIT: P25067, EVALUE 2.60e+00
YNCSPRGDQRPLGWQMRSVLSPRPDRPLLILRGCVQARPGRLGRPGNWPLPAPAGL

SEQ ID NO: 36266 - protein, 117 aa, Homo sapiens
  MAP TO AL035420.14; EXPRESSED IN BONE MARROW, SIGNAL = 1.3; EXPRESSED IN HBL100, SIGNAL = 1.1; EXPRESSED IN FETAL LIVER, SIGNAL = 1.1; EXPRESSED IN ADULT LIVER, SIGNAL = 0.88; EXPRESSED IN BRAIN, SIGNAL = 1.4; EXPRESSED IN PLACENTA, SIGNAL = 1.1; EXPRESSED IN BT474, SIGNAL = 1.3; EXPRESSED IN LUNG, SIGNAL = 1.3; EXPRESSED IN HELA, SIGNAL = 1.3; EXPRESSED IN HEART, SIGNAL = 1.3; EST_HUMAN HIT: AA491139.1, EVALUE 1.00e-01; SWISSPROT HIT: P70796, EVALUE 9.20e-01
QHCLLRPAPPQLPAIALLMGVAKPAKPVSVPELSSKAQSFRGVGEAVDTKNQEGHRKALPGPASLGHMATAQRKDGRSQLSGSTTRNGVQQDSPGLLSPFGTKAGPLHRPLLWTLNL

SEQ ID NO: 36267 - protein, 135 aa, Homo sapiens
  MAP TO AL022314.1; EXPRESSED IN PLACENTA, SIGNAL = 3.8; EXPRESSED IN HEART, SIGNAL = 0.99; SWISSPROT HIT: P14784, EVALUE 9.00e-50
EIEACQVYFTYDPYSEEDPDEGVAGAPTGSSPQPLQPLSGEDDAYCTFPSRDDLLLFSPSLLGGPSPPSTAPGGSGAGEERMPPSLQERVPRDWDPQPLGPPTPGVPDLVDFQPPPELVLREAGEEVPDAGPREG

SEQ ID NO: 36268 - protein, 284 aa, Homo sapiens
  MAP TO AC006539.1; EXPRESSED IN ADULT LIVER, SIGNAL = 1.1; EXPRESSED IN LUNG, SIGNAL = 2.2; EXPRESSED IN BRAIN, SIGNAL = 2.2; EXPRESSED IN HBL100, SIGNAL = 1.3; EXPRESSED IN HELA, SIGNAL = 1.3; EXPRESSED IN PLACENTA, SIGNAL = 3.4; EXPRESSED IN BT474, SIGNAL = 2.4; EXPRESSED IN FETAL LIVER, SIGNAL = 1.7; EXPRESSED IN BONE MARROW, SIGNAL = 1.8; EXPRESSED IN HEART, SIGNAL = 1.9; EST_HUMAN HIT: AU123448.1, EVALUE 4.00e-81; SWISSPROT HIT: Q03923, EVALUE 1.00e-106
MSSHYTEDLLPEQCMQDSFQKVILRRYGSCGLEDLHLRKDGENVGECKDQKEIYNGLNQCLSTLPSKIFPYNKCVKVFSKSSNLNRENIRHTTEKLFKCMQCGKVFKSHSGLSYHKIIHTEEKLCICEECGKTFKWFSYLTKHKRIHTGEKPYKCEECGKAFNWCSSLTKHKRIHTGEKPYKCEECGKAFHWCSPFVRHKKIHTGEKPYTCEDCGRAFNRHSHLTKHKTIHTGKKPYKCKECGKAFNHCSLLTIHERTHTGEKPYKCEECGKAFNSSSILTEHK

SEQ ID NO: 36269 - protein, 41 aa, Homo sapiens
  MAP TO AC007095.2; EXPRESSED IN FETAL LIVER, SIGNAL = 1.7; EXPRESSED IN LUNG, SIGNAL = 1.6; EXPRESSED IN HELA, SIGNAL = 1.8; EXPRESSED IN HEART, SIGNAL = 1.4; EXPRESSED IN PLACENTA, SIGNAL = 2.6; EXPRESSED IN BT474, SIGNAL = 1.6; EXPRESSED IN BRAIN, SIGNAL = 2.7; EXPRESSED IN BONE MARROW, SIGNAL =   2; EXPRESSED IN HBL100, SIGNAL =   2; EXPRESSED IN ADULT LIVER, SIGNAL = 1.4; EST_HUMAN HIT: AW889386.1, EVALUE 4.00e-10
LKPSLLQKDYMSIFILTLNMPFIFCTTMLLYRLKEISSLHK

SEQ ID NO: 36270 - protein, 45 aa, Homo sapiens
  MAP TO AL049797.8; EXPRESSED IN PLACENTA, SIGNAL = 0.95; EXPRESSED IN LUNG, SIGNAL = 0.9; EXPRESSED IN HEART, SIGNAL = 0.93; EXPRESSED IN BT474, SIGNAL = 0.81; EXPRESSED IN BONE MARROW, SIGNAL = 0.94; EXPRESSED IN HBL100, SIGNAL = 0.72; EXPRESSED IN FETAL LIVER, SIGNAL = 0.91; EXPRESSED IN HELA, SIGNAL = 0.87; EXPRESSED IN BRAIN, SIGNAL = 0.75; EST_HUMAN HIT: BF678280.1, EVALUE 5.30e+00
KNLVNGFMVLICHLVDQLAHSNLGFSELEVFIFLYQNGLLTRNTS

SEQ ID NO: 36271 - protein, 42 aa, Homo sapiens
  MAP TO AL132719.1; EXPRESSED IN BONE MARROW, SIGNAL = 2.5; EXPRESSED IN BRAIN, SIGNAL = 1.6; EXPRESSED IN PLACENTA, SIGNAL =   1; EXPRESSED IN HBL100, SIGNAL = 1.2; EXPRESSED IN HEART, SIGNAL = 1.4; EXPRESSED IN ADULT LIVER, SIGNAL = 1.1; EXPRESSED IN FETAL LIVER, SIGNAL = 0.99; EXPRESSED IN BT474, SIGNAL = 1.7; SWISSPROT HIT: P11637, EVALUE 8.00e+00
KSQWISNTWPGPSTVIVLDVTILSHSAPVFLQTRRDSHFGQI

SEQ ID NO: 36272 - protein, 21 aa, Homo sapiens
  MAP TO AL132719.1; EXPRESSED IN BONE MARROW, SIGNAL = 2.5; EXPRESSED IN BRAIN, SIGNAL = 1.6; EXPRESSED IN PLACENTA, SIGNAL =   1; EXPRESSED IN HBL100, SIGNAL = 1.2; EXPRESSED IN HEART, SIGNAL = 1.4; EXPRESSED IN ADULT LIVER, SIGNAL = 1.1; EXPRESSED IN FETAL LIVER, SIGNAL = 0.99; EXPRESSED IN BT474, SIGNAL = 1.7
FAQSVSPSLSAGRLEQSVTGL

SEQ ID NO: 36273 - protein, 32 aa, Homo sapiens
  MAP TO AL022323.7; EXPRESSED IN BONE MARROW, SIGNAL =  13; EXPRESSED IN HBL100, SIGNAL =  14; EXPRESSED IN FETAL LIVER, SIGNAL =  19; EXPRESSED IN BT474, SIGNAL =  13; EXPRESSED IN LUNG, SIGNAL =  16; EXPRESSED IN PLACENTA, SIGNAL =  16; EXPRESSED IN HEART, SIGNAL =  11; EXPRESSED IN HELA, SIGNAL =  16; EXPRESSED IN ADULT LIVER, SIGNAL =  20; EXPRESSED IN BRAIN, SIGNAL =  12
DEMFTVAFWKVDACPNVDQAKGEADRVLQAGE

SEQ ID NO: 36274 - protein, 52 aa, Homo sapiens
  MAP TO AL034406.1; EXPRESSED IN HBL100, SIGNAL = 0.74; EXPRESSED IN FETAL LIVER, SIGNAL = 1.3; EXPRESSED IN LUNG, SIGNAL = 0.85; EXPRESSED IN BRAIN, SIGNAL = 0.9; EXPRESSED IN PLACENTA, SIGNAL = 0.89; EXPRESSED IN BT474, SIGNAL = 0.74; EXPRESSED IN BONE MARROW, SIGNAL = 0.94; EXPRESSED IN HELA, SIGNAL =   1; EXPRESSED IN ADULT LIVER, SIGNAL = 0.78; EXPRESSED IN HEART, SIGNAL = 1.4; EST_HUMAN HIT: AA884874.1, EVALUE 8.50e-01; SWISSPROT HIT: P05007, EVALUE 3.50e+00
GSESSWDKDKMQSPFAAPGPQHGIAHAALAGQPGIGGAPTLNPLQQNHLLTN

SEQ ID NO: 36275 - protein, 71 aa, Homo sapiens
  MAP TO AL022344.1; EXPRESSED IN LUNG, SIGNAL = 1.4; EXPRESSED IN BRAIN, SIGNAL = 1.3; EXPRESSED IN HBL100, SIGNAL = 1.4; EXPRESSED IN HEART, SIGNAL = 1.5; EXPRESSED IN ADULT LIVER, SIGNAL = 1.5; EXPRESSED IN FETAL LIVER, SIGNAL = 1.6; EXPRESSED IN PLACENTA, SIGNAL = 1.5; EXPRESSED IN HELA, SIGNAL = 1.5; EXPRESSED IN BT474, SIGNAL = 1.8; EXPRESSED IN BONE MARROW, SIGNAL = 1.5; EST_HUMAN HIT: AW205363.1, EVALUE 1.00e-27; SWISSPROT HIT: O27281, EVALUE 3.30e+00
VGDFAVSDISFLPDPCALPEQQKKRCLNEKEKLVYAPLSGVGGVLYDKDAVYVDLGGSHVFQVSVRRESFL

SEQ ID NO: 36276 - protein, 33 aa, Homo sapiens
  MAP TO AC007110.3; EXPRESSED IN LUNG, SIGNAL = 1.4; EXPRESSED IN BONE MARROW, SIGNAL = 1.5; EXPRESSED IN HELA, SIGNAL = 1.3; EXPRESSED IN HEART, SIGNAL = 1.2; EXPRESSED IN PLACENTA, SIGNAL = 1.3; EXPRESSED IN BT474, SIGNAL = 1.3; EXPRESSED IN ADULT LIVER, SIGNAL = 1.5; EXPRESSED IN BRAIN, SIGNAL = 1.4; EXPRESSED IN HBL100, SIGNAL = 1.4; EXPRESSED IN FETAL LIVER, SIGNAL = 1.3
NIFPRERYVRIGCNEIISIQLAESVPLTKTVLG

SEQ ID NO: 36277 - protein, 49 aa, Homo sapiens
  MAP TO AL031005.1; EXPRESSED IN HBL100, SIGNAL = 1.1; EXPRESSED IN HELA, SIGNAL = 1.2; EXPRESSED IN HEART, SIGNAL = 1.1; EXPRESSED IN BT474, SIGNAL = 1.2; EXPRESSED IN BONE MARROW, SIGNAL = 0.98; EXPRESSED IN PLACENTA, SIGNAL = 1.2; EXPRESSED IN ADULT LIVER, SIGNAL = 1.2; EXPRESSED IN FETAL LIVER, SIGNAL = 1.2; EXPRESSED IN LUNG, SIGNAL = 2.1; EST_HUMAN HIT: BE563354.1, EVALUE 4.00e-23; SWISSPROT HIT: P42893, EVALUE 3.00e-24
LGGWNITGPWAKDNFQDTLQVVTAHYRTSPFFSVYVSADSKNSNSNVIQ

SEQ ID NO: 36278 - protein, 48 aa, Homo sapiens
  MAP TO AL031005.1; EXPRESSED IN HBL100, SIGNAL = 1.1; EXPRESSED IN HELA, SIGNAL = 1.2; EXPRESSED IN HEART, SIGNAL = 1.1; EXPRESSED IN BT474, SIGNAL = 1.2; EXPRESSED IN BONE MARROW, SIGNAL = 0.98; EXPRESSED IN PLACENTA, SIGNAL = 1.2; EXPRESSED IN ADULT LIVER, SIGNAL = 1.2; EXPRESSED IN FETAL LIVER, SIGNAL = 1.2; EXPRESSED IN LUNG, SIGNAL = 2.1; SWISSPROT HIT: Q03112, EVALUE 2.70e+00; EST_HUMAN HIT: BE563471.1, EVALUE 7.00e-04
GHRASQRQNQNSHLGLPATSSPPCLLSLPTARGLEHHRSLGQGQLPGH

SEQ ID NO: 36279 - protein, 45 aa, Homo sapiens
  MAP TO AC007114.7; EXPRESSED IN LUNG, SIGNAL = 1.1; EXPRESSED IN BONE MARROW, SIGNAL =   1; EXPRESSED IN HBL100, SIGNAL =   1; EXPRESSED IN HEART, SIGNAL = 0.94; SWISSPROT HIT: P21529, EVALUE 4.70e-02; EST_HUMAN HIT: AV705451.1, EVALUE 3.00e-18
QATNVFVNMEEDFMKPVISIVDELLEAGINVTVYNGQLDLIVDTM

SEQ ID NO: 36280 - protein, 49 aa, Homo sapiens
  MAP TO AC007320.2; EXPRESSED IN BONE MARROW, SIGNAL = 0.78; EXPRESSED IN HBL100, SIGNAL = 1.3; EXPRESSED IN LUNG, SIGNAL = 0.97; EXPRESSED IN ADULT LIVER, SIGNAL = 0.94; EXPRESSED IN BRAIN, SIGNAL = 1.3; EXPRESSED IN PLACENTA, SIGNAL =   1; EXPRESSED IN BT474, SIGNAL = 0.92; EXPRESSED IN HELA, SIGNAL = 1.8; EXPRESSED IN HEART, SIGNAL = 1.2; EXPRESSED IN FETAL LIVER, SIGNAL = 1.3; EST_HUMAN HIT: AW181908.1, EVALUE 5.00e-09
DPICTPNVFGVLEYSHLNIGPLYGLLVQLKECANGVGSTFCVICLSQCC

SEQ ID NO: 36281 - protein, 28 aa, Homo sapiens
  MAP TO AC007320.2; EXPRESSED IN BONE MARROW, SIGNAL = 0.78; EXPRESSED IN HBL100, SIGNAL = 1.3; EXPRESSED IN LUNG, SIGNAL = 0.97; EXPRESSED IN ADULT LIVER, SIGNAL = 0.94; EXPRESSED IN BRAIN, SIGNAL = 1.3; EXPRESSED IN PLACENTA, SIGNAL =   1; EXPRESSED IN BT474, SIGNAL = 0.92; EXPRESSED IN HELA, SIGNAL = 1.8; EXPRESSED IN HEART, SIGNAL = 1.2; EXPRESSED IN FETAL LIVER, SIGNAL = 1.3; EST_HUMAN HIT: AW181908.1, EVALUE 1.10e-02
TQFAHQMFLACWSTPTSTSGHCMDCLCN

SEQ ID NO: 36282 - protein, 140 aa, Homo sapiens
  MAP TO AL031055.1; EXPRESSED IN BONE MARROW, SIGNAL = 1.5; EXPRESSED IN LUNG, SIGNAL = 1.2; EXPRESSED IN BRAIN, SIGNAL = 1.3; EXPRESSED IN HELA, SIGNAL = 1.4; EXPRESSED IN HBL100, SIGNAL = 1.1; EXPRESSED IN HEART, SIGNAL = 1.3; EXPRESSED IN ADULT LIVER, SIGNAL = 1.6; EXPRESSED IN PLACENTA, SIGNAL = 1.1; EXPRESSED IN BT474, SIGNAL = 1.4; EXPRESSED IN FETAL LIVER, SIGNAL = 1.6; EST_HUMAN HIT: AA628918.1, EVALUE 7.80e-01
HTALNLWNGISHAEHTMTQERAALKGCLQEASLVQMRNWAKRGKLSASRRREKKMIFPFHPPFYFPVKIIKSFDFHYTSDRLSLEKAQPATAPGSAPATTAPSCFLCTLHLLFPLPETFFPQTFSLSPLLPIFARASFSQ

SEQ ID NO: 36283 - protein, 27 aa, Homo sapiens
  MAP TO AC007158.5; EXPRESSED IN BONE MARROW, SIGNAL = 0.92; EXPRESSED IN HEART, SIGNAL =   1; EXPRESSED IN HELA, SIGNAL = 1.2
ITATMVCLVLFPASSTHCFPLASFTQV

SEQ ID NO: 36284 - protein, 22 aa, Homo sapiens
  MAP TO AC007158.5; EXPRESSED IN BONE MARROW, SIGNAL = 0.92; EXPRESSED IN HEART, SIGNAL =   1; EXPRESSED IN HELA, SIGNAL = 1.2
KKNKKKEEEEEEEEKETIFLLT

SEQ ID NO: 36285 - protein, 85 aa, Homo sapiens
  MAP TO AL022313.1; EXPRESSED IN PLACENTA, SIGNAL = 8.1; EXPRESSED IN HBL100, SIGNAL =  54; EXPRESSED IN HEART, SIGNAL = 6.1; EXPRESSED IN ADULT LIVER, SIGNAL =  11; EXPRESSED IN LUNG, SIGNAL = 8.2; EXPRESSED IN BRAIN, SIGNAL = 7.5; EXPRESSED IN HELA, SIGNAL =  11; EXPRESSED IN BT474, SIGNAL = 7.2; EXPRESSED IN FETAL LIVER, SIGNAL = 9.1; EXPRESSED IN BONE MARROW, SIGNAL = 7.6; SWISSPROT HIT: Q12018, EVALUE 3.40e+00; EST_HUMAN HIT: AA160426.1, EVALUE 9.00e-15
SCFLFALTRQKLPPFCQQGYLRMQGLVSTESLWQHRVESRLLRDYAPTGRRLEDSSQQLGDQEPLGSPLAPGPLAQSVDSNKEEL

SEQ ID NO: 36286 - protein, 46 aa, Homo sapiens
  MAP TO AL022313.1; EXPRESSED IN PLACENTA, SIGNAL = 8.1; EXPRESSED IN HBL100, SIGNAL =  54; EXPRESSED IN HEART, SIGNAL = 6.1; EXPRESSED IN ADULT LIVER, SIGNAL =  11; EXPRESSED IN LUNG, SIGNAL = 8.2; EXPRESSED IN BRAIN, SIGNAL = 7.5; EXPRESSED IN HELA, SIGNAL =  11; EXPRESSED IN BT474, SIGNAL = 7.2; EXPRESSED IN FETAL LIVER, SIGNAL = 9.1; EXPRESSED IN BONE MARROW, SIGNAL = 7.6
QLPVSRDGRYQARPAVKPPHLALAAPLSAPLPTCPSLAHSPHFAFV

SEQ ID NO: 36287 - protein, 38 aa, Homo sapiens
  MAP TO AJ229043.1; EXPRESSED IN BT474, SIGNAL =  11; EXPRESSED IN HBL100, SIGNAL =  13; EXPRESSED IN HELA, SIGNAL =  11; EXPRESSED IN HEART, SIGNAL =  11; EXPRESSED IN FETAL LIVER, SIGNAL =  13; EXPRESSED IN BRAIN, SIGNAL =  11; EXPRESSED IN LUNG, SIGNAL =  14; EXPRESSED IN BONE MARROW, SIGNAL =  13; EXPRESSED IN PLACENTA, SIGNAL =  13; EXPRESSED IN ADULT LIVER, SIGNAL =  16; EST_HUMAN HIT: BE777836.1, EVALUE 3.20e+00
VPSFKTCRGCTHFCLLSLSLPCERDCASILEDERPHGG

SEQ ID NO: 36288 - protein, 105 aa, Homo sapiens
  MAP TO AL022324.1; EXPRESSED IN PLACENTA, SIGNAL = 3.2; EXPRESSED IN HBL100, SIGNAL = 3.2; EXPRESSED IN LUNG, SIGNAL = 7.6; EXPRESSED IN BRAIN, SIGNAL = 2.8; EXPRESSED IN BONE MARROW, SIGNAL =  13; EXPRESSED IN HELA, SIGNAL = 3.5; EXPRESSED IN HEART, SIGNAL = 2.8; EXPRESSED IN BT474, SIGNAL = 3.2; EXPRESSED IN ADULT LIVER, SIGNAL = 4.5; EXPRESSED IN FETAL LIVER, SIGNAL = 3.4; SWISSPROT HIT: P15814, EVALUE 9.00e-54; EST_HUMAN HIT: W73790.1, EVALUE 1.00e-51
QPKATPSVTLFLPSSEELQANKATLVCLMNDFYLGILTVTWKADGTPITQGVEMTTPSKQSNSKYMASSYLSLTPEQWRSRRSYSCQVMHEGSTAEKTVAPAECS

SEQ ID NO: 36289 - protein, 49 aa, Homo sapiens
  MAP TO AL021395.14; EXPRESSED IN BONE MARROW, SIGNAL = 1.4; EXPRESSED IN BRAIN, SIGNAL = 1.2; EXPRESSED IN HEART, SIGNAL = 2.7; EXPRESSED IN FETAL LIVER, SIGNAL = 1.2; EXPRESSED IN ADULT LIVER, SIGNAL = 1.2; EXPRESSED IN LUNG, SIGNAL = 1.4; EXPRESSED IN PLACENTA, SIGNAL = 1.3; EXPRESSED IN HBL100, SIGNAL = 1.2; EXPRESSED IN BT474, SIGNAL = 1.1; SWISSPROT HIT: Q01331, EVALUE 7.80e+00
AADVQRSRQIVHDAKESLLEELHQAGPENRWFLASIRHPAVSQLRLQSG

SEQ ID NO: 36290 - protein, 26 aa, Homo sapiens
  MAP TO AL008632.1; EXPRESSED IN BT474, SIGNAL = 3.4; EXPRESSED IN BRAIN, SIGNAL = 4.3; EXPRESSED IN HELA, SIGNAL = 3.9; EXPRESSED IN HEART, SIGNAL =   4; EXPRESSED IN FETAL LIVER, SIGNAL = 3.4; EXPRESSED IN LUNG, SIGNAL = 3.7; EXPRESSED IN BONE MARROW, SIGNAL = 4.2; EXPRESSED IN PLACENTA, SIGNAL = 6.4; EXPRESSED IN HBL100, SIGNAL = 3.6; EXPRESSED IN ADULT LIVER, SIGNAL =   4; EST_HUMAN HIT: BF304683.1, EVALUE 4.00e-03
ICEALNLKEDLEYLAEEISKQKSFQE

SEQ ID NO: 36291 - protein, 69 aa, Homo sapiens
  MAP TO AC007101.1; EXPRESSED IN BT474, SIGNAL = 5.9; EXPRESSED IN LUNG, SIGNAL =   4; EXPRESSED IN HEART, SIGNAL = 3.1; EXPRESSED IN FETAL LIVER, SIGNAL = 3.6; EXPRESSED IN ADULT LIVER, SIGNAL = 3.6; EXPRESSED IN BRAIN, SIGNAL = 3.5; EXPRESSED IN BONE MARROW, SIGNAL = 3.4; EXPRESSED IN PLACENTA, SIGNAL = 5.8; EXPRESSED IN HELA, SIGNAL = 4.5; EXPRESSED IN HBL100, SIGNAL =   4; SWISSPROT HIT: P15241, EVALUE 1.00e-28; EST_HUMAN HIT: BF182773.1, EVALUE 2.00e-31
NSKLEAAVAQSEQQGEAALSDARCKLAELEGALQKAKQDMACLIREYQEVMNSKLGLDIEIATYRRLLE

SEQ ID NO: 36292 - protein, 46 aa, Homo sapiens
  MAP TO AC007101.1; EXPRESSED IN BT474, SIGNAL = 5.9; EXPRESSED IN LUNG, SIGNAL =   4; EXPRESSED IN HEART, SIGNAL = 3.1; EXPRESSED IN FETAL LIVER, SIGNAL = 3.6; EXPRESSED IN ADULT LIVER, SIGNAL = 3.6; EXPRESSED IN BRAIN, SIGNAL = 3.5; EXPRESSED IN BONE MARROW, SIGNAL = 3.4; EXPRESSED IN PLACENTA, SIGNAL = 5.8; EXPRESSED IN HELA, SIGNAL = 4.5; EXPRESSED IN HBL100, SIGNAL =   4; EST_HUMAN HIT: BF182773.1, EVALUE 7.00e-10; SWISSPROT HIT: P52951, EVALUE 2.10e+00
LPPRTPSWKLRWPSLSSRVRRPSVMPAASWPSWRAPCRRPSKTWPA

SEQ ID NO: 36293 - protein, 85 aa, Homo sapiens
  MAP TO AL032818.2; EXPRESSED IN HBL100, SIGNAL = 4.5; EXPRESSED IN PLACENTA, SIGNAL = 3.5; EXPRESSED IN HELA, SIGNAL = 3.9; EXPRESSED IN HEART, SIGNAL = 4.5; EXPRESSED IN ADULT LIVER, SIGNAL = 2.5; EXPRESSED IN BT474, SIGNAL = 4.4; EXPRESSED IN FETAL LIVER, SIGNAL = 3.3; EXPRESSED IN LUNG, SIGNAL = 4.4; EXPRESSED IN BONE MARROW, SIGNAL = 4.1; EXPRESSED IN BRAIN, SIGNAL = 3.3; EST_HUMAN HIT: BE974839.1, EVALUE 8.10e-02; SWISSPROT HIT: O30409, EVALUE 1.60e-01
DTARVTLPGCSSHEPTLLPSLSGCSHPDVCSTCSHLLPALPQMLGPGHHLREAKLDQLPGALTPSGTLDPLTCPGLAPPTVPEGG

SEQ ID NO: 36294 - protein, 60 aa, Homo sapiens
  MAP TO AP000188.1; EXPRESSED IN PLACENTA, SIGNAL = 0.93; EXPRESSED IN LUNG, SIGNAL =   1; EXPRESSED IN HELA, SIGNAL = 1.2; EXPRESSED IN HEART, SIGNAL = 0.89; EXPRESSED IN BT474, SIGNAL = 0.94; EXPRESSED IN HBL100, SIGNAL = 1.3; EXPRESSED IN FETAL LIVER, SIGNAL = 0.9; EXPRESSED IN BRAIN, SIGNAL = 1.4; EXPRESSED IN BONE MARROW, SIGNAL = 1.6; EXPRESSED IN ADULT LIVER, SIGNAL = 1.5; SWISSPROT HIT: P17181, EVALUE 5.00e-29; EST_HUMAN HIT: AV735185.1, EVALUE 6.00e-28
QIEKCFIIENISTIATVEETNQTDEDHKKYSSQTSQDSGNYSNEDESESKTSEELQQDFV

SEQ ID NO: 36295 - protein, 227 aa, Homo sapiens
  MAP TO AL023279.1; EXPRESSED IN BRAIN, SIGNAL = 1.7; EXPRESSED IN BONE MARROW, SIGNAL = 1.7; EXPRESSED IN LUNG, SIGNAL = 1.5; EXPRESSED IN PLACENTA, SIGNAL = 1.8; EXPRESSED IN HELA, SIGNAL = 1.9; EXPRESSED IN HBL100, SIGNAL = 1.4; EXPRESSED IN HEART, SIGNAL = 1.9; EXPRESSED IN ADULT LIVER, SIGNAL = 1.5; EXPRESSED IN BT474, SIGNAL = 1.4; EXPRESSED IN FETAL LIVER, SIGNAL = 1.7; SWISSPROT HIT: Q92794, EVALUE 1.80e+00; EST_HUMAN HIT: AL121291.1, EVALUE 2.00e-13
IFILELVDAEDPPDEEEEEASSIFSSSFHFLFPSSSSCFSFSSSSSSLLLRSPGDKDMPTAGMPSLLQSSSESPQSYPEGEDSQSPLQIPQSSPESDDTLYPLQSPQSRSEGEDSSDPLQRPPEGKDSQSPLQIPQSSPEGDDTQSPLQNSQSSPEGKDSLSPLEISQSPPEGEDVQSPLQNPASSFFSSALLSIFQSSPESIQSPFEGFPQSVLQIPVSAASSSTL

SEQ ID NO: 36296 - protein, 18 aa, Homo sapiens
  MAP TO AL033377.2; EXPRESSED IN BT474, SIGNAL = 2.3; EXPRESSED IN BONE MARROW, SIGNAL = 2.9; EXPRESSED IN HBL100, SIGNAL = 2.6; EXPRESSED IN PLACENTA, SIGNAL = 2.3; EXPRESSED IN HELA, SIGNAL =   3; EXPRESSED IN FETAL LIVER, SIGNAL = 2.8; EXPRESSED IN ADULT LIVER, SIGNAL = 2.7; EXPRESSED IN BRAIN, SIGNAL = 2.2; EXPRESSED IN LUNG, SIGNAL = 2.7; EXPRESSED IN HEART, SIGNAL = 2.6; EST_HUMAN HIT: AA515882.1, EVALUE 1.50e+00
KVHSFGMWEDTGGPGETP

SEQ ID NO: 36297 - protein, 57 aa, Homo sapiens
  MAP TO AL035462.17; EXPRESSED IN BT474, SIGNAL = 2.1; EXPRESSED IN LUNG, SIGNAL = 2.4; EXPRESSED IN BRAIN, SIGNAL = 2.1; EXPRESSED IN BONE MARROW, SIGNAL = 2.2; EXPRESSED IN HBL100, SIGNAL = 2.6; EXPRESSED IN HEART, SIGNAL = 1.9; EXPRESSED IN ADULT LIVER, SIGNAL = 2.4; EXPRESSED IN FETAL LIVER, SIGNAL =   2; EXPRESSED IN PLACENTA, SIGNAL = 2.1; EXPRESSED IN HELA, SIGNAL = 2.2; EST_HUMAN HIT: BE253433.1, EVALUE 3.00e-27; SWISSPROT HIT: Q00808, EVALUE 1.20e+00
HVVALMPEVGSLQHARVLQYRELLDALPMDAYTHGCILHPELTTDSMIPKYATAEIR

SEQ ID NO: 36298 - protein, 58 aa, Homo sapiens
  MAP TO AL035462.17; EXPRESSED IN BT474, SIGNAL = 2.1; EXPRESSED IN LUNG, SIGNAL = 2.4; EXPRESSED IN BRAIN, SIGNAL = 2.1; EXPRESSED IN BONE MARROW, SIGNAL = 2.2; EXPRESSED IN HBL100, SIGNAL = 2.6; EXPRESSED IN HEART, SIGNAL = 1.9; EXPRESSED IN ADULT LIVER, SIGNAL = 2.4; EXPRESSED IN FETAL LIVER, SIGNAL =   2; EXPRESSED IN PLACENTA, SIGNAL = 2.1; EXPRESSED IN HELA, SIGNAL = 2.2; EST_HUMAN HIT: BF345731.1, EVALUE 1.00e-04
LWLPCPAPGGAHRARGGPDARGGQPAARTGAAVPGAAGRTAHGCLHAWLHPASRAHHR

SEQ ID NO: 36299 - protein, 41 aa, Homo sapiens
  MAP TO AL031076.1; EXPRESSED IN LUNG, SIGNAL = 3.3; EXPRESSED IN HBL100, SIGNAL = 2.9; EXPRESSED IN HEART, SIGNAL = 2.4; EXPRESSED IN BT474, SIGNAL = 2.5; EXPRESSED IN BRAIN, SIGNAL = 2.7; EXPRESSED IN BONE MARROW, SIGNAL = 2.7; EXPRESSED IN PLACENTA, SIGNAL = 2.9; EXPRESSED IN HELA, SIGNAL =   3; EXPRESSED IN ADULT LIVER, SIGNAL = 3.2; EXPRESSED IN FETAL LIVER, SIGNAL = 3.7
ASSLCPSLLRAQGHRPGPSCRLLCCGLLLLPLQGSPQLPES

SEQ ID NO: 36300 - protein, 46 aa, Homo sapiens; identical to SEQ ID NO: 35677
  MAP TO AL035553.13; EXPRESSED IN PLACENTA, SIGNAL = 6.2; EXPRESSED IN LUNG, SIGNAL = 5.6; EXPRESSED IN BRAIN, SIGNAL = 5.2; EXPRESSED IN HELA, SIGNAL = 4.6; EXPRESSED IN HBL100, SIGNAL =   5; EXPRESSED IN ADULT LIVER, SIGNAL = 4.7; EXPRESSED IN HEART, SIGNAL = 4.4; EXPRESSED IN BT474, SIGNAL = 6.6; EXPRESSED IN FETAL LIVER, SIGNAL = 4.6; EXPRESSED IN BONE MARROW, SIGNAL = 5.5; SWISSPROT HIT: P47789, EVALUE 4.00e-21; EST_HUMAN HIT: H10581.1, EVALUE 5.00e-20

SEQ ID NO: 36301 - protein, 44 aa, Homo sapiens
  MAP TO AC007100.2; EXPRESSED IN HEART, SIGNAL = 1.7; EXPRESSED IN LUNG, SIGNAL = 2.2; EXPRESSED IN BRAIN, SIGNAL = 1.3; EXPRESSED IN BONE MARROW, SIGNAL = 1.5; EXPRESSED IN PLACENTA, SIGNAL = 1.7; EXPRESSED IN HELA, SIGNAL =   2; EXPRESSED IN HBL100, SIGNAL = 1.7; EXPRESSED IN BT474, SIGNAL =   2; EXPRESSED IN ADULT LIVER, SIGNAL =   2; EXPRESSED IN FETAL LIVER, SIGNAL = 1.9; SWISSPROT HIT: P24712, EVALUE 6.10e+00
NLMLEEADSRLEHPLLQREQFFPGSRQKTESQVVTLYINATNHK

SEQ ID NO: 36302 - protein, 36 aa, Homo sapiens
  MAP TO AL031906.1; EXPRESSED IN BONE MARROW, SIGNAL = 3.1; EXPRESSED IN PLACENTA, SIGNAL = 3.5; EXPRESSED IN HBL100, SIGNAL =   3; EXPRESSED IN ADULT LIVER, SIGNAL = 4.3; EXPRESSED IN BRAIN, SIGNAL =   3; EXPRESSED IN LUNG, SIGNAL = 3.2; EXPRESSED IN HEART, SIGNAL = 2.6; EXPRESSED IN HELA, SIGNAL = 3.2; EXPRESSED IN BT474, SIGNAL = 3.2; EXPRESSED IN FETAL LIVER, SIGNAL = 3.3
VNMTDSIDPNKGKCCRMTWKTMIIEAWCLKKIAKEV

SEQ ID NO: 36303 - protein, 76 aa, Homo sapiens
  MAP TO AC007124.1; EXPRESSED IN HELA, SIGNAL = 5.7; EXPRESSED IN ADULT LIVER, SIGNAL = 4.9; EXPRESSED IN BT474, SIGNAL = 4.5; EXPRESSED IN LUNG, SIGNAL = 5.9; EXPRESSED IN BRAIN, SIGNAL = 3.5; EXPRESSED IN BONE MARROW, SIGNAL = 4.3; EXPRESSED IN PLACENTA, SIGNAL = 6.1; EXPRESSED IN HEART, SIGNAL = 3.7; EXPRESSED IN HBL100, SIGNAL = 4.6; EXPRESSED IN FETAL LIVER, SIGNAL = 5.2; EST_HUMAN HIT: AA758465.1, EVALUE 7.00e-03; SWISSPROT HIT: Q07968, EVALUE 8.70e-01
SGILCSNTKWTKTPGLYPQDLSSALPPNVKNKNISRHYQIITAGEAGGNQVTSILGGQDDMGSNKKLLVDAGMEYL

SEQ ID NO: 36304 - protein, 64 aa, Homo sapiens
  MAP TO AL032818.2; EXPRESSED IN BT474, SIGNAL =   4; EXPRESSED IN BRAIN, SIGNAL = 4.7; EXPRESSED IN BONE MARROW, SIGNAL = 4.6; EXPRESSED IN HEART, SIGNAL = 3.6; EXPRESSED IN PLACENTA, SIGNAL = 4.2; EXPRESSED IN ADULT LIVER, SIGNAL = 6.2; EXPRESSED IN FETAL LIVER, SIGNAL = 3.9; EXPRESSED IN LUNG, SIGNAL = 4.2; EXPRESSED IN HELA, SIGNAL = 4.8; EXPRESSED IN HBL100, SIGNAL = 4.2; SWISSPROT HIT: P51532, EVALUE 4.40e+00
EEEQGLTILWVNDGLKQRARKSLISDHLLLLGKMGTKMGPVLQLLNICLIKKMGQHMENKFLWL

SEQ ID NO: 36305 - protein, 35 aa, Homo sapiens
  MAP TO AL078624.22; EXPRESSED IN BONE MARROW, SIGNAL = 6.1; EXPRESSED IN HBL100, SIGNAL = 6.1; EXPRESSED IN PLACENTA, SIGNAL = 5.1; EXPRESSED IN LUNG, SIGNAL = 6.2; EXPRESSED IN HELA, SIGNAL = 6.4; EXPRESSED IN ADULT LIVER, SIGNAL = 7.3; EXPRESSED IN HEART, SIGNAL = 5.1; EXPRESSED IN BT474, SIGNAL = 5.8; EXPRESSED IN FETAL LIVER, SIGNAL = 5.8; EXPRESSED IN BRAIN, SIGNAL = 5.8; EST_HUMAN HIT: AA169851.1, EVALUE 2.00e-15; SWISSPROT HIT: Q17308, EVALUE 2.80e+00
LFGSDRTVPALQGFRDHTKEGHCEHHKWHAEWHSL

SEQ ID NO: 36306 - protein, 74 aa, Homo sapiens
  MAP TO AL031119.1; EXPRESSED IN PLACENTA, SIGNAL = 1.7; EXPRESSED IN BT474, SIGNAL = 1.8; EXPRESSED IN FETAL LIVER, SIGNAL = 1.9; EXPRESSED IN BONE MARROW, SIGNAL = 1.8; EXPRESSED IN LUNG, SIGNAL = 1.9; EXPRESSED IN HELA, SIGNAL = 2.3; EXPRESSED IN HEART, SIGNAL = 1.4; EXPRESSED IN HBL100, SIGNAL = 2.5; EXPRESSED IN ADULT LIVER, SIGNAL = 1.9; EXPRESSED IN BRAIN, SIGNAL = 1.5; EST_HUMAN HIT: F08171.1, EVALUE 8.00e-35; SWISSPROT HIT: P52739, EVALUE 8.00e-37
ERMKSHSTESFKCEICNERYLWESTWKQHLNCYHLEEGGVTKKQRTGKKVYVCQYCEKQFDCSGHFKEHLRKHT

SEQ ID NO: 36307 - protein, 92 aa, Homo sapiens
  MAP TO AL031133.1; EXPRESSED IN PLACENTA, SIGNAL = 2.9; EXPRESSED IN HEART, SIGNAL = 2.6; EXPRESSED IN BT474, SIGNAL = 3.5; EXPRESSED IN BRAIN, SIGNAL = 2.6; EXPRESSED IN BONE MARROW, SIGNAL = 3.2; EXPRESSED IN LUNG, SIGNAL = 4.7; EXPRESSED IN HELA, SIGNAL = 3.9; EXPRESSED IN HBL100, SIGNAL = 7.5; EXPRESSED IN ADULT LIVER, SIGNAL = 2.4; EXPRESSED IN FETAL LIVER, SIGNAL =   3; SWISSPROT HIT: P55855, EVALUE 9.00e-40; EST_HUMAN HIT: BF103822.1, EVALUE 8.00e-39
MANEKPTEEVKTENNNHINLKVAGQDGSVVQFKIKRQTPLSKLMKAYCEPRGLSVKQIRFRFGGQPISGTDKPAQLEMEDEDTIDVFQQPTG

SEQ ID NO: 36308 - protein, 128 aa, Homo sapiens
  MAP TO AL035669.28; EXPRESSED IN HBL100, SIGNAL =   1; EXPRESSED IN HEART, SIGNAL = 1.2; EXPRESSED IN BT474, SIGNAL = 1.1; EXPRESSED IN BRAIN, SIGNAL = 1.2; EXPRESSED IN BONE MARROW, SIGNAL =   1; EST_HUMAN HIT: BF055116.1, EVALUE 2.00e-03; SWISSPROT HIT: P40602, EVALUE 9.50e-01
DSRPSPWCAPSAWALQPPTHVRPARTLAPPCAARLDPRSFGPSLSLLCRPGMPSLPQLHCPWVAIQQPRWSTRCTVVPRGPLSRQDSPTRCPRGSLPQPSVACLSRHCTGRRKCSRPSSQPPRSQATK

SEQ ID NO: 36309 - protein, 18 aa, Homo sapiens
  MAP TO AL035669.28; EXPRESSED IN HBL100, SIGNAL =   1; EXPRESSED IN HEART, SIGNAL = 1.2; EXPRESSED IN BT474, SIGNAL = 1.1; EXPRESSED IN BRAIN, SIGNAL = 1.2; EXPRESSED IN BONE MARROW, SIGNAL =   1
HSHQGHRLPRSWPPTPGS

SEQ ID NO: 36310 - protein, 20 aa, Homo sapiens
  MAP TO AL035669.28; EXPRESSED IN HBL100, SIGNAL =   1; EXPRESSED IN HEART, SIGNAL = 1.2; EXPRESSED IN BT474, SIGNAL = 1.1; EXPRESSED IN BRAIN, SIGNAL = 1.2; EXPRESSED IN BONE MARROW, SIGNAL =   1
GLCSLRPMCGLPGPSLLRVR

SEQ ID NO: 36311 - protein, 126 aa, Homo sapiens
  MAP TO AC007198.6; EXPRESSED IN HEART, SIGNAL = 1.8; EXPRESSED IN PLACENTA, SIGNAL =   1; EXPRESSED IN HBL100, SIGNAL = 0.92; EXPRESSED IN ADULT LIVER, SIGNAL = 1.1; EXPRESSED IN BT474, SIGNAL = 0.94; EXPRESSED IN FETAL LIVER, SIGNAL =   1; EXPRESSED IN BONE MARROW, SIGNAL = 0.98; EXPRESSED IN BRAIN, SIGNAL = 1.6; EST_HUMAN HIT: AA418099.1, EVALUE 6.00e-20; SWISSPROT HIT: P12021, EVALUE 1.80e-02
PPRSSSSDPDFVVVDGVPVMLPSYDEAVSGGLSALGPGYMASVGQGCPLPVDDQSPPAYPGSGDTDTGPGESETCDSVSGSSELLQSLYSPPRCQESTHPASDNPDIIASTAEEVASTSPGIDIAD

SEQ ID NO: 36312 - protein, 36 aa, Homo sapiens
  MAP TO AL031228.1; EXPRESSED IN BT474, SIGNAL = 6.3; EXPRESSED IN HEART, SIGNAL = 6.8; EXPRESSED IN FETAL LIVER, SIGNAL =  10; EXPRESSED IN ADULT LIVER, SIGNAL =  11; EXPRESSED IN LUNG, SIGNAL =   9; EXPRESSED IN BONE MARROW, SIGNAL = 7.1; EXPRESSED IN BRAIN, SIGNAL = 7.4; EXPRESSED IN HELA, SIGNAL =  12; EXPRESSED IN PLACENTA, SIGNAL =  10; EXPRESSED IN HBL100, SIGNAL = 7.8
GSPGERGAAGSGGPIGPPGRPGPQGPPGAAGEKGVP

SEQ ID NO: 36313 - protein, 30 aa, Homo sapiens
  MAP TO AC007156.2; EXPRESSED IN BT474, SIGNAL = 1.6; EXPRESSED IN FETAL LIVER, SIGNAL = 1.9; EXPRESSED IN BONE MARROW, SIGNAL = 1.7; EXPRESSED IN BRAIN, SIGNAL = 1.2; EXPRESSED IN LUNG, SIGNAL = 2.8; EXPRESSED IN PLACENTA, SIGNAL = 1.7; EXPRESSED IN HEART, SIGNAL = 1.9; EXPRESSED IN HELA, SIGNAL = 1.8; EXPRESSED IN HBL100, SIGNAL = 1.4; EXPRESSED IN ADULT LIVER, SIGNAL = 2.2; EST_HUMAN HIT: BF675971.1, EVALUE 4.50e+00
HCPGFGILSHGEQWPPSPGFLIVGFPLLLD

SEQ ID NO: 36314 - protein, 577 aa, Homo sapiens
  MAP TO AL034380.22; EXPRESSED IN BRAIN, SIGNAL = 3.2; EXPRESSED IN LUNG, SIGNAL = 3.3; EXPRESSED IN HELA, SIGNAL = 4.8; EXPRESSED IN PLACENTA, SIGNAL = 4.7; EXPRESSED IN HEART, SIGNAL = 2.8; EXPRESSED IN ADULT LIVER, SIGNAL = 1.6; EXPRESSED IN BT474, SIGNAL = 4.3; EXPRESSED IN BONE MARROW, SIGNAL = 4.2; EXPRESSED IN HBL100, SIGNAL = 3.5; EXPRESSED IN FETAL LIVER, SIGNAL = 3.6; SWISSPROT HIT: O33280, EVALUE 9.20e+00; EST_HUMAN HIT: BE251304.1, EVALUE 1.00e-103
LPGLLELLVEYFRRCLIEIFGILKEYEVGDPGQRTLLDPGRFSKVSSPAPMEGGEEEEELLGPKLEEEEEEEVVENDEEIAFSGKDKPASENSEEKLISKFDKLPVKIVQKNDPFVVDCSDKLGRVQEFDSGLLHWRIGGGDTTEHIQTHFESKTELLPSRPHAPCPPAPRKHVTTAEGTPGTTDQEGPPPDGPPEKRITATMDDMLSTRSSTLTEDGAKSSEAIKESSKFPFGISPAQSHRNIKILEDEPHSKDETPLCTLLDWQDSLAKRCVCVSNTIRSLSFVPGNDFEMSKHPGLLLILGKLILLHHKHPERKQAPLTYEKEEEQDQGVSCNKVEWWWDCLEMLRENTLVTLANISGQLDLSPYPESICLPVLDGLLHWAVCPSAEAQDPFSTLGPNAVLSPQRLVLETLSKLSIQDNNVDLILATPPFSRLEKLYSTMVRFLSDRKNPVCREMAVVLLANLAQGDSLAARAIAVQKGSIGNLLGFLEDSLAATQFQQSQASLLHMQNPPFEPTSVDMMRRAARALLALAKVDENHSEFTLYESRLLDISVSPLMNSLVSQVICDVLFLIGQS

SEQ ID NO: 36315 - protein, 228 aa, Homo sapiens
  MAP TO AC010183.6; EXPRESSED IN BRAIN, SIGNAL = 7.8; EXPRESSED IN LUNG, SIGNAL = 5.4; EXPRESSED IN HELA, SIGNAL =  10; EXPRESSED IN PLACENTA, SIGNAL =  10; EXPRESSED IN ADULT LIVER, SIGNAL = 4.5; EXPRESSED IN FETAL LIVER, SIGNAL = 5.3; EXPRESSED IN BT474, SIGNAL =   5; EXPRESSED IN BONE MARROW, SIGNAL = 4.7; EXPRESSED IN HEART, SIGNAL =   4; EXPRESSED IN HBL100, SIGNAL = 5.9; EST_HUMAN HIT: BE150340.1, EVALUE 1.00e-51; SWISSPROT HIT: P10272, EVALUE 3.00e-36
SLSCTHSLLNFPVTIVPGPDFNLASHIIPDTTPDPHDCYLSDTPGIHSISHISFFAIPHPDHTWFIDGSSTTPNRHTPAKAGYAIVPSTSIIEAAALPPSATSRQAKLIALTRTLTLAKELCVNIYTDSKYAFHILHHHAVIWAERGFLTKQGWSNINASLIKTLLKATLLPKEAGVIHCKGHQKASDPIAQGNTYADKIAKEAASGPTSVPHGQFFSSSCHSHLLSH

SEQ ID NO: 36316 - protein, 109 aa, Homo sapiens [sequence omitted]

SEQ ID NO: 36317 - protein, 69 aa, Homo sapiens
  MAP TO AC007321.1; EXPRESSED IN PLACENTA, SIGNAL = 1.1; EXPRESSED IN BT474, SIGNAL = 0.95; EXPRESSED IN LUNG, SIGNAL = 1.1; EXPRESSED IN BRAIN, SIGNAL = 1.2; EXPRESSED IN HELA, SIGNAL = 1.1; EXPRESSED IN HEART, SIGNAL = 0.95; EXPRESSED IN ADULT LIVER, SIGNAL = 1.7; EXPRESSED IN FETAL LIVER, SIGNAL = 1.2; EXPRESSED IN BONE MARROW, SIGNAL = 0.99; SWISSPROT HIT: P15924, EVALUE 3.30e+00
PPSTEYSLISTRFTPTPATIKKLLSTTNNISRSSLKLITAQMDNSVKPISHQISDIEHVDRSLSTNLSL

SEQ ID NO: 36318 - protein, 17 aa, Homo sapiens
  MAP TO AL109956.13; EXPRESSED IN BT474, SIGNAL = 4.5; EXPRESSED IN HELA, SIGNAL = 5.1; EXPRESSED IN HBL100, SIGNAL =   5; EXPRESSED IN ADULT LIVER, SIGNAL = 6.4; EXPRESSED IN FETAL LIVER, SIGNAL = 4.3; EXPRESSED IN BRAIN, SIGNAL =   4; EXPRESSED IN LUNG, SIGNAL = 5.8; EXPRESSED IN BONE MARROW, SIGNAL = 5.4; EXPRESSED IN PLACENTA, SIGNAL = 7.5; EXPRESSED IN HEART, SIGNAL = 3.7
ACCGHCFIDSQATVLLC

SEQ ID NO: 36319 - protein, 134 aa, Homo sapiens
  MAP TO AL031447.4; EXPRESSED IN HEART, SIGNAL = 4.2; EXPRESSED IN PLACENTA, SIGNAL = 3.9; EXPRESSED IN BT474, SIGNAL = 3.2; EXPRESSED IN ADULT LIVER, SIGNAL = 4.9; EXPRESSED IN BRAIN, SIGNAL = 3.4; EXPRESSED IN LUNG, SIGNAL = 4.2; EXPRESSED IN BONE MARROW, SIGNAL = 2.8; EXPRESSED IN HELA, SIGNAL = 4.3; EXPRESSED IN HBL100, SIGNAL = 3.2; EXPRESSED IN FETAL LIVER, SIGNAL = 4.4; EST_HUMAN HIT: AW474598.1, EVALUE 1.00e-11; SWISSPROT HIT: Q04652, EVALUE 4.00e-09
GSDGSRLYDCVWRYNSSVNEWAEVAPMLKAREYHSSSVLDGLLYVVAADSTERYDHTTDSWEALQPMTYPMDNCSTTACRGRLYAIGSLAGKETMVMQCYDPDTDLWSLVDCGQLPPWSFAPKTATLNGLMYFV

SEQ ID NO: 36320 - protein, 37 aa, Homo sapiens
  MAP TO AL031983.1; EXPRESSED IN BRAIN, SIGNAL = 1.2; EXPRESSED IN HELA, SIGNAL = 1.5; EXPRESSED IN HEART, SIGNAL = 1.6; EXPRESSED IN LUNG, SIGNAL = 1.4; EXPRESSED IN BONE MARROW, SIGNAL = 1.6; EXPRESSED IN PLACENTA, SIGNAL = 1.3; EXPRESSED IN HBL100, SIGNAL = 1.4; EXPRESSED IN BT474, SIGNAL = 1.3; EXPRESSED IN ADULT LIVER, SIGNAL = 1.4; EXPRESSED IN FETAL LIVER, SIGNAL = 1.5; EST_HUMAN HIT: AW967376.1, EVALUE 6.50e+00
LLTPVDSSSCCLCWTPGSTLQCTFSSPTSPSWTSVSP

SEQ ID NO: 36321 - protein, 32 aa, Homo sapiens
  MAP TO AL033523.12; EXPRESSED IN BT474, SIGNAL = 2.3; EXPRESSED IN ADULT LIVER, SIGNAL = 2.5; EXPRESSED IN FETAL LIVER, SIGNAL = 2.4; EXPRESSED IN LUNG, SIGNAL = 2.5; EXPRESSED IN BONE MARROW, SIGNAL =   2; EXPRESSED IN BRAIN, SIGNAL = 2.3; EXPRESSED IN HEART, SIGNAL = 2.3; EXPRESSED IN PLACENTA, SIGNAL = 2.4; EXPRESSED IN HBL100, SIGNAL = 2.2; EXPRESSED IN HELA, SIGNAL = 2.3; EST_HUMAN HIT: BE837608.1, EVALUE 5.80e+00
VGKARSVMSRPNWQFGTLSGGEGPCPQPVHTS

SEQ ID NO: 36322 - protein, 17 aa, Homo sapiens
  MAP TO AL033523.12; EXPRESSED IN BT474, SIGNAL = 2.3; EXPRESSED IN ADULT LIVER, SIGNAL = 2.5; EXPRESSED IN FETAL LIVER, SIGNAL = 2.4; EXPRESSED IN LUNG, SIGNAL = 2.5; EXPRESSED IN BONE MARROW, SIGNAL =   2; EXPRESSED IN BRAIN, SIGNAL = 2.3; EXPRESSED IN HEART, SIGNAL = 2.3; EXPRESSED IN PLACENTA, SIGNAL = 2.4; EXPRESSED IN HBL100, SIGNAL = 2.2; EXPRESSED IN HELA, SIGNAL = 2.3
WERRAVSCPGPTGSLGH

SEQ ID NO: 36323 - protein, 96 aa, Homo sapiens
  MAP TO AC007324.38; EXPRESSED IN BONE MARROW, SIGNAL = 2.7; EXPRESSED IN LUNG, SIGNAL = 2.3; EXPRESSED IN BRAIN, SIGNAL = 6.2; EXPRESSED IN HELA, SIGNAL = 5.5; EXPRESSED IN HEART, SIGNAL = 2.1; EXPRESSED IN PLACENTA, SIGNAL = 2.9; EXPRESSED IN HBL100, SIGNAL = 7.6; EXPRESSED IN BT474, SIGNAL = 3.7; EXPRESSED IN FETAL LIVER, SIGNAL = 2.8; EST_HUMAN HIT: R59124.1, EVALUE 5.00e-38; SWISSPROT HIT: P06605, EVALUE 3.00e-29
RECISVHVGQAGVQIGNACWELFCLEHGIQADGTFDAQASKINDDDSFTTFFSETGNGKHVPRAVMIDLEPTVVGEWGRSSPPQRTSRNCRGIGPQ

SEQ ID NO: 36324 - protein, 65 aa, Homo sapiens
  MAP TO AC007324.38; EXPRESSED IN BONE MARROW, SIGNAL = 2.7; EXPRESSED IN LUNG, SIGNAL = 2.3; EXPRESSED IN BRAIN, SIGNAL = 6.2; EXPRESSED IN HELA, SIGNAL = 5.5; EXPRESSED IN HEART, SIGNAL = 2.1; EXPRESSED IN PLACENTA, SIGNAL = 2.9; EXPRESSED IN HBL100, SIGNAL = 7.6; EXPRESSED IN BT474, SIGNAL = 3.7; EXPRESSED IN FETAL LIVER, SIGNAL = 2.8; EST_HUMAN HIT: AA352021.1, EVALUE 2.00e-31; SWISSPROT HIT: Q16186, EVALUE 2.90e-01
GNAYQSTWAKREFRLAMPAGSSSAWNTASRQTALLMLKLARSTMMTPSPPFSARLAMGSMCPGPS

SEQ ID NO: 36325 - protein, 57 aa, Homo sapiens
  MAP TO AC007981.31; EXPRESSED IN BT474, SIGNAL = 6.5; EXPRESSED IN FETAL LIVER, SIGNAL = 6.9; EXPRESSED IN BRAIN, SIGNAL = 6.3; EXPRESSED IN HELA, SIGNAL = 7.1; EXPRESSED IN PLACENTA, SIGNAL = 7.3; EXPRESSED IN ADULT LIVER, SIGNAL = 6.3; EXPRESSED IN LUNG, SIGNAL = 7.7; EXPRESSED IN BONE MARROW, SIGNAL = 6.8; EXPRESSED IN HEART, SIGNAL = 5.5; EXPRESSED IN HBL100, SIGNAL = 7.5
KPTMHKELPALAACGLVADFDPVGEEETADFGPLVLDSDSDDSVDRDIEEAIQEYLK

SEQ ID NO: 36326 - protein, 25 aa, Homo sapiens
  MAP TO AL032822.1; EXPRESSED IN BT474, SIGNAL = 1.4; EXPRESSED IN FETAL LIVER, SIGNAL = 1.7; EXPRESSED IN BONE MARROW, SIGNAL = 1.6; EXPRESSED IN HBL100, SIGNAL = 1.7; EXPRESSED IN HELA, SIGNAL = 1.9; EXPRESSED IN HEART, SIGNAL = 1.9; EXPRESSED IN ADULT LIVER, SIGNAL = 1.5; EXPRESSED IN BRAIN, SIGNAL = 1.2; EXPRESSED IN LUNG, SIGNAL = 1.8; EXPRESSED IN PLACENTA, SIGNAL = 2.1
DVLGNTKNSSQEKTAKVIIHILLAK

SEQ ID NO: 36327 - protein, 106 aa, Homo sapiens
  MAP TO AL033538.1; EXPRESSED IN HELA, SIGNAL = 2.2; EXPRESSED IN HEART, SIGNAL = 4.5; EXPRESSED IN PLACENTA, SIGNAL = 2.1; EXPRESSED IN HBL100, SIGNAL = 2.4; EXPRESSED IN BT474, SIGNAL = 1.9; EXPRESSED IN ADULT LIVER, SIGNAL = 1.1; EXPRESSED IN FETAL LIVER, SIGNAL = 2.4; EXPRESSED IN BONE MARROW, SIGNAL =  11; EXPRESSED IN LUNG, SIGNAL = 3.6; EXPRESSED IN BRAIN, SIGNAL = 1.6; SWISSPROT HIT: P54619, EVALUE 2.50e+00; EST_HUMAN HIT: BE300461.1, EVALUE 3.30e-02
TANGGDGGQHPRPVGHAELWQVSLSDPVISGGFGTRHLRCPGGGEGLDHSPASGCKHPRTAPEATRGRYNTASRLQSCRCQLPSQTLLHIFSENAHQSQKSKTVNH

SEQ ID NO: 36328 - protein, 75 aa, Homo sapiens
  MAP TO AL033538.1; EXPRESSED IN HELA, SIGNAL = 2.2; EXPRESSED IN HEART, SIGNAL = 4.5; EXPRESSED IN PLACENTA, SIGNAL = 2.1; EXPRESSED IN HBL100, SIGNAL = 2.4; EXPRESSED IN BT474, SIGNAL = 1.9; EXPRESSED IN ADULT LIVER, SIGNAL = 1.1; EXPRESSED IN FETAL LIVER, SIGNAL = 2.4; EXPRESSED IN BONE MARROW, SIGNAL =  11; EXPRESSED IN LUNG, SIGNAL = 3.6; EXPRESSED IN BRAIN, SIGNAL = 1.6; EST_HUMAN HIT: BE735129.1, EVALUE 6.00e-01
LLMVVMEASTRGRWAMPNCGRSASVTPSSREGLAPVTCAAQVEGKAWIILLLLAASTHALLQRPQEGDITPLAGS

SEQ ID NO: 36329 - protein, 21 aa, Homo sapiens
  MAP TO AC008015.5; EXPRESSED IN PLACENTA, SIGNAL = 3.9; EXPRESSED IN HBL100, SIGNAL = 5.1; EXPRESSED IN BT474, SIGNAL = 4.4; EXPRESSED IN LUNG, SIGNAL =   5; EXPRESSED IN BRAIN, SIGNAL = 4.4; EXPRESSED IN HEART, SIGNAL = 3.7; EXPRESSED IN HELA, SIGNAL =   5; EXPRESSED IN ADULT LIVER, SIGNAL = 9.9; EXPRESSED IN FETAL LIVER, SIGNAL = 4.5; EXPRESSED IN BONE MARROW, SIGNAL = 4.2; EST_HUMAN HIT: AW874553.1, EVALUE 2.00e-04
DGEIDLKLLTKVLAPEHEVRE

SEQ ID NO: 36330 - protein, 37 aa, Homo sapiens
  MAP TO AC008015.5; EXPRESSED IN PLACENTA, SIGNAL = 3.9; EXPRESSED IN HBL100, SIGNAL = 5.1; EXPRESSED IN BT474, SIGNAL = 4.4; EXPRESSED IN LUNG, SIGNAL =   5; EXPRESSED IN BRAIN, SIGNAL = 4.4; EXPRESSED IN HEART, SIGNAL = 3.7; EXPRESSED IN HELA, SIGNAL =   5; EXPRESSED IN ADULT LIVER, SIGNAL = 9.9; EXPRESSED IN FETAL LIVER, SIGNAL = 4.5; EXPRESSED IN BONE MARROW, SIGNAL = 4.2; SWISSPROT HIT: P46540, EVALUE 3.60e+00; EST_HUMAN HIT: AW439372.1, EVALUE 8.00e-14
RPETPHQSARAGARSPGGTVVAAIPRSLSSGIPITSR

SEQ ID NO: 36331 - protein, 29 aa, Homo sapiens
  MAP TO AL035467.21; EXPRESSED IN PLACENTA, SIGNAL = 1.6; EXPRESSED IN HEART, SIGNAL = 1.3; EXPRESSED IN ADULT LIVER, SIGNAL = 1.1; EXPRESSED IN LUNG, SIGNAL =   1; EXPRESSED IN BRAIN, SIGNAL = 1.8; EXPRESSED IN BONE MARROW, SIGNAL = 1.3; EXPRESSED IN HELA, SIGNAL = 1.9; EXPRESSED IN HBL100, SIGNAL = 2.5; EXPRESSED IN BT474, SIGNAL = 2.1; EXPRESSED IN FETAL LIVER, SIGNAL = 1.3
FIKVRKGILLRWHVVEVKPLEKEMFVSQH

SEQ ID NO: 36332 - protein, 36 aa, Homo sapiens
  MAP TO AL031662.24; EXPRESSED IN BT474, SIGNAL = 1.9; EXPRESSED IN ADULT LIVER, SIGNAL = 1.9; EXPRESSED IN FETAL LIVER, SIGNAL = 1.9; EXPRESSED IN LUNG, SIGNAL = 1.6; EXPRESSED IN BONE MARROW, SIGNAL = 1.8; EXPRESSED IN BRAIN, SIGNAL = 1.5; EXPRESSED IN HEART, SIGNAL = 1.6; EXPRESSED IN PLACENTA, SIGNAL = 1.7; EXPRESSED IN HBL100, SIGNAL = 1.5; EXPRESSED IN HELA, SIGNAL = 1.7; EST_HUMAN HIT: AU138025.1, EVALUE 1.00e-15; SWISSPROT HIT: Q9UGV2, EVALUE 1.00e-16
KSCFNAFFNFEDMQEITQHFAVCHVDAPGQQEGAPS

SEQ ID NO: 36333 - protein, 63 aa, Homo sapiens
  MAP TO AL031662.24; EXPRESSED IN BT474, SIGNAL = 1.9; EXPRESSED IN ADULT LIVER, SIGNAL = 1.9; EXPRESSED IN FETAL LIVER, SIGNAL = 1.9; EXPRESSED IN LUNG, SIGNAL = 1.6; EXPRESSED IN BONE MARROW, SIGNAL = 1.8; EXPRESSED IN BRAIN, SIGNAL = 1.5; EXPRESSED IN HEART, SIGNAL = 1.6; EXPRESSED IN PLACENTA, SIGNAL = 1.7; EXPRESSED IN HBL100, SIGNAL = 1.5; EXPRESSED IN HELA, SIGNAL = 1.7; EST_HUMAN HIT: AU138025.1, EVALUE 3.00e-15; SWISSPROT HIT: P75405, EVALUE 5.90e+00
RGCTFLLAWGIHMTDSKVLGDLLHILKVKECIETGFIYKNKNTHKSQALHIAPIFLYSVNAYY

SEQ ID NO: 36334 - protein, 27 aa, Homo sapiens
  MAP TO AL034372.15; EXPRESSED IN PLACENTA, SIGNAL = 5.3; EXPRESSED IN HBL100, SIGNAL = 4.1; EXPRESSED IN BT474, SIGNAL = 4.4; EXPRESSED IN FETAL LIVER, SIGNAL = 4.3; EXPRESSED IN LUNG, SIGNAL = 5.2; EXPRESSED IN HEART, SIGNAL = 3.6; EXPRESSED IN HELA, SIGNAL = 4.7; EXPRESSED IN ADULT LIVER, SIGNAL = 5.1; EXPRESSED IN BRAIN, SIGNAL = 4.3; EXPRESSED IN BONE MARROW, SIGNAL = 4.4; EST_HUMAN HIT: BF306907.1, EVALUE 3.00e-08; SWISSPROT HIT: P40123, EVALUE 2.00e-09
AVSRLESLSAESHRPPGNCGEVNGVIA

SEQ ID NO: 36335 - protein, 83 aa, Homo sapiens
  MAP TO AC007353.1; EXPRESSED IN FETAL LIVER, SIGNAL = 7.8; EXPRESSED IN BRAIN, SIGNAL =   7; EXPRESSED IN HBL100, SIGNAL = 6.9; EXPRESSED IN HELA, SIGNAL = 7.8; EXPRESSED IN PLACENTA, SIGNAL = 7.7; EXPRESSED IN ADULT LIVER, SIGNAL = 8.4; EXPRESSED IN BT474, SIGNAL = 6.5; EXPRESSED IN LUNG, SIGNAL = 8.9; EXPRESSED IN BONE MARROW, SIGNAL =   7; EXPRESSED IN HEART, SIGNAL = 6.2; EST_HUMAN HIT: AI807484.1, EVALUE 1.00e-30; SWISSPROT HIT: Q09867, EVALUE 1.90e+00
SQVQEAQLDELLDQIRHQRHEEILKFHLRKARDFLKNMKSRLADETLKDRRGWPEIYNYGHRQPTQEPSRLVSKLRTKVLPLT

SEQ ID NO: 36336 - protein, 375 aa, Homo sapiens
  MAP TO AC011451.2; EXPRESSED IN PLACENTA, SIGNAL = 1.4; EXPRESSED IN HEART, SIGNAL = 1.4; EXPRESSED IN BT474, SIGNAL = 1.8; EXPRESSED IN LUNG, SIGNAL = 1.3; EXPRESSED IN BRAIN, SIGNAL = 1.2; EXPRESSED IN HELA, SIGNAL = 1.5; EXPRESSED IN HBL100, SIGNAL = 1.7; EXPRESSED IN ADULT LIVER, SIGNAL = 0.96; EXPRESSED IN FETAL LIVER, SIGNAL = 1.4; EXPRESSED IN BONE MARROW, SIGNAL = 1.3; EST_HUMAN HIT: AF150239.1, EVALUE 1.00e-102; SWISSPROT HIT: Q14585, EVALUE 1.00e-124
NHMVENIYECYEENQDGQTFSQVPNLDSLKRNTEVKSCECHECGKAFVDHSSLKSHIRSHTGSKPYQCKECGKAFHFLACFKKHMKTPTEEKPYECKECTKAFSCSSFFRAHMKIHIGKTNYECKECGKGFSCSSSLTEHKRIHSGDKPYECKECGKAFSCSSSLSKHKRIHSGDKPYECKECGKAFSSSSHLIIHIRIHTGEKPYECKECGKAFSESSKLTVHGRTHTGEKPYKCKECGKAYNCPSSLSIHMRKHTGEKPYECLECGKAFYLPTSLNTHVKNQSREKPYECKECGKAFSCPSSFRAHVRDHTGKIQYECKECGKTFSRSSSLTEHLRTHSGEKPYECKECGKAFISSSHLTVHIRTHTGEKPYE

SEQ ID NO: 36337 - protein, 18 aa, Homo sapiens
  MAP TO AC011451.2; EXPRESSED IN PLACENTA, SIGNAL = 1.4; EXPRESSED IN HEART, SIGNAL = 1.4; EXPRESSED IN BT474, SIGNAL = 1.8; EXPRESSED IN LUNG, SIGNAL = 1.3; EXPRESSED IN BRAIN, SIGNAL = 1.2; EXPRESSED IN HELA, SIGNAL = 1.5; EXPRESSED IN HBL100, SIGNAL = 1.7; EXPRESSED IN ADULT LIVER, SIGNAL = 0.96; EXPRESSED IN FETAL LIVER, SIGNAL = 1.4; EXPRESSED IN BONE MARROW, SIGNAL = 1.3
DRLSAKFQILIHSREILK

SEQ ID NO: 36338 - protein, 43 aa, Homo sapiens
  MAP TO AC011451.2; EXPRESSED IN PLACENTA, SIGNAL = 1.4; EXPRESSED IN HEART, SIGNAL = 1.4; EXPRESSED IN BT474, SIGNAL = 1.8; EXPRESSED IN LUNG, SIGNAL = 1.3; EXPRESSED IN BRAIN, SIGNAL = 1.2; EXPRESSED IN HELA, SIGNAL = 1.5; EXPRESSED IN HBL100, SIGNAL = 1.7; EXPRESSED IN ADULT LIVER, SIGNAL = 0.96; EXPRESSED IN FETAL LIVER, SIGNAL = 1.4; EXPRESSED IN BONE MARROW, SIGNAL = 1.3; SWISSPROT HIT: P14934, EVALUE 4.70e+00; EST_HUMAN HIT: BF131926.1, EVALUE 3.00e-06
NVRNVGRPSVVPPHSPNTKEFTVEISHMNVRNVGRPLALPLTL

SEQ ID NO: 36339 - protein, 54 aa, Homo sapiens
  MAP TO AC007114.7; EXPRESSED IN LUNG, SIGNAL =   4; EXPRESSED IN PLACENTA, SIGNAL = 4.3; EXPRESSED IN HELA, SIGNAL =   4; EXPRESSED IN ADULT LIVER, SIGNAL = 4.6; EXPRESSED IN BT474, SIGNAL = 3.8; EXPRESSED IN BRAIN, SIGNAL = 3.8; EXPRESSED IN BONE MARROW, SIGNAL = 2.9; EXPRESSED IN HEART, SIGNAL = 3.7; EXPRESSED IN HBL100, SIGNAL = 3.7; EXPRESSED IN FETAL LIVER, SIGNAL = 4.7; EST_HUMAN HIT: AW384698.1, EVALUE 2.00e-19; SWISSPROT HIT: Q92667, EVALUE 3.00e-20
SDRNSMDSVDSCCSLKKTESFQNAQAGSNPKKVDLIIWEIEVPKVGAESPRLVL

SEQ ID NO: 36340 - protein, 38 aa, Homo sapiens
  MAP TO AC007114.7; EXPRESSED IN LUNG, SIGNAL =   4; EXPRESSED IN PLACENTA, SIGNAL = 4.3; EXPRESSED IN HELA, SIGNAL =   4; EXPRESSED IN ADULT LIVER, SIGNAL = 4.6; EXPRESSED IN BT474, SIGNAL = 3.8; EXPRESSED IN BRAIN, SIGNAL = 3.8; EXPRESSED IN BONE MARROW, SIGNAL = 2.9; EXPRESSED IN HEART, SIGNAL = 3.7; EXPRESSED IN HBL100, SIGNAL = 3.7; EXPRESSED IN FETAL LIVER, SIGNAL = 4.7; EST_HUMAN HIT: AW384698.1, EVALUE 2.00e-14
VLTGTAWIPWIAVAVSRRLRASKMPRQAPTLRRSTSSS

SEQ ID NO: 36341 - protein, 88 aa, Homo sapiens
  MAP TO AL121965.5; EXPRESSED IN FETAL LIVER, SIGNAL = 2.1; EXPRESSED IN ADULT LIVER, SIGNAL =   1; EXPRESSED IN LUNG, SIGNAL = 2.6; EXPRESSED IN BT474, SIGNAL = 3.2; EXPRESSED IN BRAIN, SIGNAL = 1.9; EXPRESSED IN BONE MARROW, SIGNAL = 1.2; EXPRESSED IN PLACENTA, SIGNAL = 2.1; EXPRESSED IN HEART, SIGNAL = 2.3; EXPRESSED IN HELA, SIGNAL = 1.7; EXPRESSED IN HBL100, SIGNAL = 2.2; EST_HUMAN HIT: AW501468.1, EVALUE 4.00e-38; SWISSPROT HIT: P53327, EVALUE 7.00e-11
NAARIVRALFEIALRKRWPTMTYRLLNLSKVIDKRLWGWASPLRQFSILPPHILTRLEEKKLTVDKLKDMRKDEIGKKEANMFECIVL

SEQ ID NO: 36342 - protein, 57 aa, Homo sapiens
  MAP TO AL035554.1; EXPRESSED IN BT474, SIGNAL = 2.8; EXPRESSED IN FETAL LIVER, SIGNAL = 2.4; EXPRESSED IN BRAIN, SIGNAL = 2.8; EXPRESSED IN BONE MARROW, SIGNAL = 2.9; EXPRESSED IN HBL100, SIGNAL = 2.5; EXPRESSED IN PLACENTA, SIGNAL = 2.6; EXPRESSED IN HEART, SIGNAL = 2.3; EXPRESSED IN LUNG, SIGNAL = 2.5; EXPRESSED IN HELA, SIGNAL = 2.3; EXPRESSED IN ADULT LIVER, SIGNAL = 2.4; EST_HUMAN HIT: AV651564.1, EVALUE 1.00e-26; SWISSPROT HIT: P04040, EVALUE 9.00e-28
KADVLTTGAGNPVGDKLNVITVGPRGPLLVQDVVFTDEMAHFDRERIPERVVHAKGA

SEQ ID NO: 36343 - protein, 76 aa, Homo sapiens
  MAP TO AL078634.20; EXPRESSED IN HELA, SIGNAL = 3.1; EXPRESSED IN HEART, SIGNAL = 5.6; EXPRESSED IN ADULT LIVER, SIGNAL = 4.3; EXPRESSED IN BT474, SIGNAL = 5.7; EXPRESSED IN BRAIN, SIGNAL = 4.8; EXPRESSED IN BONE MARROW, SIGNAL = 3.2; EXPRESSED IN HBL100, SIGNAL = 2.9; EXPRESSED IN PLACENTA, SIGNAL = 3.7; EXPRESSED IN FETAL LIVER, SIGNAL = 4.1; EXPRESSED IN LUNG, SIGNAL =   3; SWISSPROT HIT: Q07093, EVALUE 1.30e+00; EST_HUMAN HIT: AU141005.1, EVALUE 5.00e-38
TVGGGAVQERAPELDGGGPTEQDKSHSNSSTLSDRRLSNSSLCSIEEEHRMVYEMVQRILLSTRGYVNFVNEVFHQ

SEQ ID NO: 36344 - protein, 62 aa, Homo sapiens
  MAP TO AL078634.20; EXPRESSED IN HELA, SIGNAL = 3.1; EXPRESSED IN HEART, SIGNAL = 5.6; EXPRESSED IN ADULT LIVER, SIGNAL = 4.3; EXPRESSED IN BT474, SIGNAL = 5.7; EXPRESSED IN BRAIN, SIGNAL = 4.8; EXPRESSED IN BONE MARROW, SIGNAL = 3.2; EXPRESSED IN HBL100, SIGNAL = 2.9; EXPRESSED IN PLACENTA, SIGNAL = 3.7; EXPRESSED IN FETAL LIVER, SIGNAL = 4.1; EXPRESSED IN LUNG, SIGNAL =   3; EST_HUMAN HIT: AU141005.1, EVALUE 4.00e-28; SWISSPROT HIT: Q63961, EVALUE 5.80e+00
LLVVVLCRRERLSWMVVGPRSRTKAILTAAPCRTEDSATPASVALKKSTEWCMKWYSGFSCQ

SEQ ID NO: 36345 - protein, 48 aa, Homo sapiens
  MAP TO AL049553.15; EXPRESSED IN PLACENTA, SIGNAL =  13; EXPRESSED IN HEART, SIGNAL =  11; EXPRESSED IN FETAL LIVER, SIGNAL =  12; EXPRESSED IN BT474, SIGNAL = 9.4; EXPRESSED IN BONE MARROW, SIGNAL = 9.6; EXPRESSED IN BRAIN, SIGNAL =  10; EXPRESSED IN HBL100, SIGNAL =  13; EXPRESSED IN ADULT LIVER, SIGNAL =  17; EXPRESSED IN LUNG, SIGNAL =  14; EXPRESSED IN HELA, SIGNAL =  14; EST_HUMAN HIT: AI829609.1, EVALUE 8.90e-01; SWISSPROT HIT: Q09248, EVALUE 7.90e+00
GRRKLAQEGRPGSGLAGTELRPPNLQTPIHELATAHVRMRREEHLQVL

SEQ ID NO: 36346 - protein, 40 aa, Homo sapiens
  MAP TO AL035662.23; EXPRESSED IN HELA, SIGNAL = 3.2; EXPRESSED IN HEART, SIGNAL = 3.6; EXPRESSED IN ADULT LIVER, SIGNAL = 4.3; EXPRESSED IN BT474, SIGNAL = 3.7; EXPRESSED IN LUNG, SIGNAL = 2.9; EXPRESSED IN BRAIN, SIGNAL = 4.4; EXPRESSED IN BONE MARROW, SIGNAL = 3.3; EXPRESSED IN PLACENTA, SIGNAL = 5.7; EXPRESSED IN HBL100, SIGNAL = 3.9; EXPRESSED IN FETAL LIVER, SIGNAL = 3.3; EST_HUMAN HIT: BE301002.1, EVALUE 4.00e-11
SLALFARMPKSRALARAMQRLAKALTFFSSSVTIRAFSFL

SEQ ID NO: 36347 - protein, 41 aa, Homo sapiens
  MAP TO AL035662.23; EXPRESSED IN HELA, SIGNAL = 3.2; EXPRESSED IN HEART, SIGNAL = 3.6; EXPRESSED IN ADULT LIVER, SIGNAL = 4.3; EXPRESSED IN BT474, SIGNAL = 3.7; EXPRESSED IN LUNG, SIGNAL = 2.9; EXPRESSED IN BRAIN, SIGNAL = 4.4; EXPRESSED IN BONE MARROW, SIGNAL = 3.3; EXPRESSED IN PLACENTA, SIGNAL = 5.7; EXPRESSED IN HBL100, SIGNAL = 3.9; EXPRESSED IN FETAL LIVER, SIGNAL = 3.3; SWISSPROT HIT: Q9Z313, EVALUE 1.00e-14; EST_HUMAN HIT: BF663255.1, EVALUE 2.00e-13
YKKEKARIVTEEEKNVKAFASLCMARANARLFGIRAKRAKE

SEQ ID NO: 36348 - protein, 27 aa, Homo sapiens
  MAP TO AC007248.1; EXPRESSED IN BONE MARROW, SIGNAL =   4; EXPRESSED IN HEART, SIGNAL = 4.1; EXPRESSED IN BT474, SIGNAL = 3.7; EXPRESSED IN FETAL LIVER, SIGNAL = 4.5; EXPRESSED IN ADULT LIVER, SIGNAL =   5; EXPRESSED IN LUNG, SIGNAL = 4.2; EXPRESSED IN BRAIN, SIGNAL = 3.8; EXPRESSED IN PLACENTA, SIGNAL = 3.9; EXPRESSED IN HELA, SIGNAL = 4.5; EXPRESSED IN HBL100, SIGNAL = 3.9
IFIWCRKGKGNGAWEVRENFLENVIPT

SEQ ID NO: 36349 - protein, 34 aa, Homo sapiens
  MAP TO AL034561.4; EXPRESSED IN HELA, SIGNAL = 1.8; EXPRESSED IN HEART, SIGNAL = 1.5; EXPRESSED IN FETAL LIVER, SIGNAL = 1.6; EXPRESSED IN BT474, SIGNAL = 1.3; EXPRESSED IN BONE MARROW, SIGNAL = 1.1; EXPRESSED IN LUNG, SIGNAL = 1.6; EXPRESSED IN BRAIN, SIGNAL = 1.2; EXPRESSED IN PLACENTA, SIGNAL = 1.3; EXPRESSED IN HBL100, SIGNAL = 1.7; EXPRESSED IN ADULT LIVER, SIGNAL = 1.9; EST_HUMAN HIT: BE179491.1, EVALUE 2.00e-01
HSLKHFFQDLPSDDEFPLFLLILEGLYLSFVSEE

SEQ ID NO: 36350 - protein, 59 aa, Homo sapiens
  MAP TO AC008417.2; EXPRESSED IN BONE MARROW, SIGNAL = 2.8; EXPRESSED IN HELA, SIGNAL = 2.5; EXPRESSED IN PLACENTA, SIGNAL = 2.8; EXPRESSED IN BT474, SIGNAL = 3.5; EXPRESSED IN BRAIN, SIGNAL = 3.6; EXPRESSED IN HEART, SIGNAL =   6; EXPRESSED IN HBL100, SIGNAL = 3.2; EXPRESSED IN ADULT LIVER, SIGNAL = 2.6; EXPRESSED IN FETAL LIVER, SIGNAL = 2.7; EXPRESSED IN LUNG, SIGNAL = 2.9; SWISSPROT HIT: Q16706, EVALUE 3.00e-30; EST_HUMAN HIT: AU132708.1, EVALUE 4.00e-29
ARMLLDQYRKKSKLFRTKVLLAPLGDDFRYCEYTEWDLQFKNYQQLFDYMNSQSKFKVK

SEQ ID NO: 36351 - protein, 73 aa, Homo sapiens
  MAP TO AL049596.11; EXPRESSED IN BRAIN, SIGNAL = 1.4; EXPRESSED IN HELA, SIGNAL = 2.1; EXPRESSED IN HBL100, SIGNAL = 0.91; EXPRESSED IN HEART, SIGNAL = 2.6; EXPRESSED IN FETAL LIVER, SIGNAL = 1.2; EXPRESSED IN BT474, SIGNAL = 1.1; EST_HUMAN HIT: BE561226.1, EVALUE 2.00e-22
QHVRLPIIIPTPRFIFLLLMSLLKASVTPRMGSGGPISTWVHQELALAEAAAARPGWKAAVIPERSAAGPWWM

SEQ ID NO: 36352 - protein, 96 aa, Homo sapiens
  MAP TO AL035685.17; EXPRESSED IN BT474, SIGNAL = 3.3; EXPRESSED IN FETAL LIVER, SIGNAL = 3.5; EXPRESSED IN BONE MARROW, SIGNAL = 4.3; EXPRESSED IN HEART, SIGNAL = 3.4; EXPRESSED IN BRAIN, SIGNAL = 3.7; EXPRESSED IN LUNG, SIGNAL = 2.8; EXPRESSED IN PLACENTA, SIGNAL = 3.6; EXPRESSED IN HELA, SIGNAL =   3; EXPRESSED IN HBL100, SIGNAL = 3.4; EXPRESSED IN ADULT LIVER, SIGNAL = 3.4; EST_HUMAN HIT: AA625212.1, EVALUE 4.00e-12; SWISSPROT HIT: Q14721, EVALUE 9.00e-51
AAAVAGLECATLLDKAVLSPESSIYTTASAKTPPRSPEKHTAIAFNFEAGVHQYIDADTDDEGQLLYSVDSSPPKSLPGSTSPKFSTGTRSEKNHF

SEQ ID NO: 36353 - protein, 109 aa, Homo sapiens
  MAP TO AC008496.2; EXPRESSED IN ADULT LIVER, SIGNAL = 1.3; EXPRESSED IN FETAL LIVER, SIGNAL = 1.1; EXPRESSED IN LUNG, SIGNAL = 1.1; EXPRESSED IN BRAIN, SIGNAL = 1.3; EXPRESSED IN HBL100, SIGNAL = 1.4; EXPRESSED IN HELA, SIGNAL = 1.1; EXPRESSED IN PLACENTA, SIGNAL = 1.2; EXPRESSED IN BT474, SIGNAL = 1.4; EXPRESSED IN BONE MARROW, SIGNAL = 1.2; EXPRESSED IN HEART, SIGNAL = 0.99; EST_HUMAN HIT: AV651997.1, EVALUE 3.00e-16; SWISSPROT HIT: P08547, EVALUE 1.00e-15
VKSKKMEKNVPYWSGYVIIKADFRDKEGHFIIIKGSICQEDIILNAYSPNNNISKYMKQKLEELKGETDKSIIIVGDVNTLPLVINRKSRHKISKVIEDTNNTINQLYP

SEQ ID NO: 36354 - protein, 30 aa, Homo sapiens
  MAP TO AC007199.1; EXPRESSED IN PLACENTA, SIGNAL = 1.9; EXPRESSED IN BT474, SIGNAL = 1.2; EXPRESSED IN LUNG, SIGNAL = 1.1; EXPRESSED IN BRAIN, SIGNAL = 1.8; EXPRESSED IN HEART, SIGNAL = 1.1; EXPRESSED IN HELA, SIGNAL = 1.3; EXPRESSED IN HBL100, SIGNAL = 1.2; EXPRESSED IN FETAL LIVER, SIGNAL =   1; EST_HUMAN HIT: BF576247.1, EVALUE 2.00e-08; SWISSPROT HIT: P34991, EVALUE 1.00e-09
SIKLQSSDGEIFEVDVEIAKQSVTIKTMLE

SEQ ID NO: 36355 - protein, 64 aa, Homo sapiens
  MAP TO AC007025.2; EXPRESSED IN PLACENTA, SIGNAL = 3.7; EXPRESSED IN ADULT LIVER, SIGNAL =   5; EXPRESSED IN BT474, SIGNAL = 3.7; EXPRESSED IN FETAL LIVER, SIGNAL = 4.2; EXPRESSED IN BRAIN, SIGNAL = 3.6; EXPRESSED IN BONE MARROW, SIGNAL = 4.3; EXPRESSED IN LUNG, SIGNAL =   4; EXPRESSED IN HBL100, SIGNAL =   4; EXPRESSED IN HELA, SIGNAL = 3.7; EXPRESSED IN HEART, SIGNAL = 3.3; EST_HUMAN HIT: AA902103.1, EVALUE 5.70e-01; SWISSPROT HIT: O06431, EVALUE 1.70e+00
HTKTVCCCQPPCYGIRCRSITVVEAGGEVECDRIGFVERITVELGLEEGRLFLDRQVGESERQR

SEQ ID NO: 36356 - protein, 52 aa, Homo sapiens
  MAP TO AC007161.1; EXPRESSED IN BONE MARROW, SIGNAL = 6.3; EXPRESSED IN PLACENTA, SIGNAL =   7; EXPRESSED IN HELA, SIGNAL =  15; EXPRESSED IN FETAL LIVER, SIGNAL = 5.7; EXPRESSED IN ADULT LIVER, SIGNAL = 2.6; EXPRESSED IN BT474, SIGNAL = 7.6; EXPRESSED IN BRAIN, SIGNAL = 2.3; EXPRESSED IN LUNG, SIGNAL = 9.5; EXPRESSED IN HEART, SIGNAL = 3.8; EXPRESSED IN HBL100, SIGNAL =  18; EST_HUMAN HIT: AA824274.1, EVALUE 5.00e-17; SWISSPROT HIT: Q14209, EVALUE 1.20e+00
EHKRAVVFCLLHGRLSGQRKFDSVVVKLVSPGGALPRISGLPPESQCLGLLE

SEQ ID NO: 36357 - protein, 26 aa, Homo sapiens
  MAP TO AC007161.1; EXPRESSED IN BONE MARROW, SIGNAL = 6.3; EXPRESSED IN PLACENTA, SIGNAL =   7; EXPRESSED IN HELA, SIGNAL =  15; EXPRESSED IN FETAL LIVER, SIGNAL = 5.7; EXPRESSED IN ADULT LIVER, SIGNAL = 2.6; EXPRESSED IN BT474, SIGNAL = 7.6; EXPRESSED IN BRAIN, SIGNAL = 2.3; EXPRESSED IN LUNG, SIGNAL = 9.5; EXPRESSED IN HEART, SIGNAL = 3.8; EXPRESSED IN HBL100, SIGNAL =  18; EST_HUMAN HIT: AA824274.1, EVALUE 2.00e-05
LPAAQDTATPEAAQISSEERPQEKQA

SEQ ID NO: 36358 - protein, 52 aa, Homo sapiens
  MAP TO AC007228.1; EXPRESSED IN ADULT LIVER, SIGNAL =   4; EXPRESSED IN BT474, SIGNAL =   3; EXPRESSED IN BRAIN, SIGNAL = 3.2; EXPRESSED IN HEART, SIGNAL = 2.6; EXPRESSED IN HELA, SIGNAL =   3; EXPRESSED IN HBL100, SIGNAL =   3; EXPRESSED IN PLACENTA, SIGNAL =   3; EXPRESSED IN FETAL LIVER, SIGNAL = 3.2; EXPRESSED IN LUNG, SIGNAL = 3.2; EXPRESSED IN BONE MARROW, SIGNAL = 3.1; SWISSPROT HIT: P52738, EVALUE 4.00e-13; EST_HUMAN HIT: BF515666.1, EVALUE 2.00e-15
LSKNMVISFQGLVTFGDVAVDFSQEEWEWLNPIQRNLYRKVMLENYRNLASL

SEQ ID NO: 36359 - protein, 42 aa, Homo sapiens
  MAP TO AP000557.2; EXPRESSED IN PLACENTA, SIGNAL = 1.5; EXPRESSED IN HBL100, SIGNAL = 1.6; EXPRESSED IN BT474, SIGNAL = 1.8; EXPRESSED IN FETAL LIVER, SIGNAL = 1.4; EXPRESSED IN LUNG, SIGNAL = 1.5; EXPRESSED IN BONE MARROW, SIGNAL = 1.7; EXPRESSED IN BRAIN, SIGNAL = 1.5; EXPRESSED IN HEART, SIGNAL = 1.9; EST_HUMAN HIT: AU121694.1, EVALUE 3.10e+00
GGQLSLTCPLATLSQVTLALLDTVPSGLAAIPLQRGTPTAPW

SEQ ID NO: 36360 - protein, 37 aa, Homo sapiens
  MAP TO AL096776.12; EXPRESSED IN ADULT LIVER, SIGNAL =  21; EXPRESSED IN BRAIN, SIGNAL =  27; EXPRESSED IN BONE MARROW, SIGNAL =  22; EXPRESSED IN HBL100, SIGNAL =  28; EXPRESSED IN FETAL LIVER, SIGNAL =  48; EXPRESSED IN BT474, SIGNAL =  51; EXPRESSED IN LUNG, SIGNAL =  53; EXPRESSED IN PLACENTA, SIGNAL =  21; EXPRESSED IN HEART, SIGNAL =  20; EXPRESSED IN HELA, SIGNAL =  54; EST_HUMAN HIT: AA302172.1, EVALUE 3.00e-10
VCLSKRYSAEPDSGAPILHKLVTCSPNSLMAFTCLFR

SEQ ID NO: 36361 - protein, 82 aa, Homo sapiens
  MAP TO AL034419.13; EXPRESSED IN BONE MARROW, SIGNAL = 2.5; EXPRESSED IN LUNG, SIGNAL = 2.9; EXPRESSED IN BRAIN, SIGNAL = 2.5; EXPRESSED IN HELA, SIGNAL = 2.9; EXPRESSED IN HEART, SIGNAL = 2.6; EXPRESSED IN PLACENTA, SIGNAL = 2.5; EXPRESSED IN HBL100, SIGNAL = 3.1; EXPRESSED IN BT474, SIGNAL = 2.8; EXPRESSED IN ADULT LIVER, SIGNAL = 3.1; EXPRESSED IN FETAL LIVER, SIGNAL = 3.2; EST_HUMAN HIT: AA682427.1, EVALUE 8.70e-01; SWISSPROT HIT: P46474, EVALUE 2.10e+00
LCFSCRTVSSTSTSRGPSLLQGNLTNDNLIAASGLGAATSTHPLPSFLSHIPSPLARPLSDPVVAFYKIALSYFCIEVPLSL

SEQ ID NO: 36362 - protein, 37 aa, Homo sapiens; identical to SEQ ID NO: 35750
  MAP TO AL035705.16; EXPRESSED IN PLACENTA, SIGNAL = 4.8; EXPRESSED IN HELA, SIGNAL =   4; EXPRESSED IN HEART, SIGNAL = 4.6; EXPRESSED IN FETAL LIVER, SIGNAL = 4.5; EXPRESSED IN ADULT LIVER, SIGNAL = 4.2; EXPRESSED IN BT474, SIGNAL = 4.3; EXPRESSED IN BONE MARROW, SIGNAL = 5.4; EXPRESSED IN BRAIN, SIGNAL = 5.5; EXPRESSED IN HBL100, SIGNAL = 4.7; EXPRESSED IN LUNG, SIGNAL = 4.4

SEQ ID NO: 36363 - protein, 46 aa, Homo sapiens
  MAP TO AC007833.1; EXPRESSED IN HELA, SIGNAL =   1; EXPRESSED IN HEART, SIGNAL = 0.84; EXPRESSED IN ADULT LIVER, SIGNAL = 1.4; SWISSPROT HIT: Q93126, EVALUE 7.90e+00
TPSAGGLKAEGQLKLLLSQPRCNWNLLLETLLHHDGLLLRILLKSS

SEQ ID NO: 36364 - protein, 80 aa, Homo sapiens
  MAP TO AC007256.1; EXPRESSED IN HELA, SIGNAL = 1.3; EXPRESSED IN FETAL LIVER, SIGNAL = 2.1; EXPRESSED IN LUNG, SIGNAL = 1.7; EXPRESSED IN BRAIN, SIGNAL = 1.3; EXPRESSED IN PLACENTA, SIGNAL = 1.1; EXPRESSED IN HEART, SIGNAL = 1.8; EXPRESSED IN HBL100, SIGNAL = 1.1; EXPRESSED IN BT474, SIGNAL = 1.2; EXPRESSED IN ADULT LIVER, SIGNAL = 1.1; EXPRESSED IN BONE MARROW, SIGNAL = 1.3; SWISSPROT HIT: P22346, EVALUE 1.20e-01; EST_HUMAN HIT: R93255.1, EVALUE 4.00e-39
QLAQPNLGTILDPRPGVITKGFTQLPGDAIYHISDLEEDEEEGITFQVQQPLEVEEKLSTSKPVTGIFLPPITSAGGPVT

SEQ ID NO: 36365 - protein, 36 aa, Homo sapiens
  MAP TO AC007256.1; EXPRESSED IN HELA, SIGNAL = 1.3; EXPRESSED IN FETAL LIVER, SIGNAL = 2.1; EXPRESSED IN LUNG, SIGNAL = 1.7; EXPRESSED IN BRAIN, SIGNAL = 1.3; EXPRESSED IN PLACENTA, SIGNAL = 1.1; EXPRESSED IN HEART, SIGNAL = 1.8; EXPRESSED IN HBL100, SIGNAL = 1.1; EXPRESSED IN BT474, SIGNAL = 1.2; EXPRESSED IN ADULT LIVER, SIGNAL = 1.1; EXPRESSED IN BONE MARROW, SIGNAL = 1.3; EST_HUMAN HIT: R93255.1, EVALUE 1.00e-12
SSLLNQTWEPSLIHDQVSLLKALPSCPGMLFITSQI

SEQ ID NO: 36366 - protein, 26 aa, Homo sapiens
  MAP TO AC005682.2; EXPRESSED IN HEART, SIGNAL = 0.9; EXPRESSED IN FETAL LIVER, SIGNAL = 0.98
MNAEIMQTVVVLLASILCLSPVFKVD

SEQ ID NO: 36367 - protein, 58 aa, Homo sapiens; identical to SEQ ID NO: 34915
  MAP TO AL049539.19; EXPRESSED IN HEART, SIGNAL = 1.1; EXPRESSED IN FETAL LIVER, SIGNAL = 1.1; EXPRESSED IN ADULT LIVER, SIGNAL = 1.3; EXPRESSED IN BRAIN, SIGNAL = 1.4; EXPRESSED IN LUNG, SIGNAL =   1; EXPRESSED IN BONE MARROW, SIGNAL = 1.2; EXPRESSED IN HELA, SIGNAL = 1.1; EXPRESSED IN PLACENTA, SIGNAL = 1.1; EXPRESSED IN HBL100, SIGNAL = 1.1; EXPRESSED IN BT474, SIGNAL =   1; EST_HUMAN HIT: AW372226.1, EVALUE 1.00e-30; SWISSPROT HIT: P32802, EVALUE 2.00e-05

SEQ ID NO: 36368 - protein, 40 aa, Homo sapiens
  MAP TO AL049539.19; EXPRESSED IN HEART, SIGNAL = 1.1; EXPRESSED IN FETAL LIVER, SIGNAL = 1.1; EXPRESSED IN ADULT LIVER, SIGNAL = 1.3; EXPRESSED IN BRAIN, SIGNAL = 1.4; EXPRESSED IN LUNG, SIGNAL =   1; EXPRESSED IN BONE MARROW, SIGNAL = 1.2; EXPRESSED IN HELA, SIGNAL = 1.1; EXPRESSED IN PLACENTA, SIGNAL = 1.1; EXPRESSED IN HBL100, SIGNAL = 1.1; EXPRESSED IN BT474, SIGNAL =   1; EST_HUMAN HIT: AW372227.1, EVALUE 4.00e-06
SGSPCPSSTWATTSASESSHMTTLCAPTRFPGRSPSSGGT

SEQ ID NO: 36369 - protein, 41 aa, Homo sapiens
  MAP TO D87675.1; EXPRESSED IN FETAL LIVER, SIGNAL =   1; EXPRESSED IN HEART, SIGNAL = 1.7; EXPRESSED IN PLACENTA, SIGNAL = 1.9; EXPRESSED IN BT474, SIGNAL = 1.7; EXPRESSED IN BRAIN, SIGNAL = 3.4; EXPRESSED IN LUNG, SIGNAL = 3.7; EXPRESSED IN HELA, SIGNAL = 1.2; EXPRESSED IN HBL100, SIGNAL = 1.6; EST_HUMAN HIT: AU117224.1, EVALUE 3.00e-04; SWISSPROT HIT: Q95241, EVALUE 2.00e-05
SNKGAIIGLMVGGVVIATVIVITLVMLKKKQYTSIHHGVVE

SEQ ID NO: 36370 - protein, 93 aa, Homo sapiens
  MAP TO AC007272.2; EXPRESSED IN BONE MARROW, SIGNAL = 2.5; EXPRESSED IN LUNG, SIGNAL =   8; EXPRESSED IN BRAIN, SIGNAL =   2; EXPRESSED IN PLACENTA, SIGNAL = 2.1; EXPRESSED IN HBL100, SIGNAL = 1.9; EXPRESSED IN HELA, SIGNAL = 3.3; EXPRESSED IN HEART, SIGNAL = 3.5; EXPRESSED IN BT474, SIGNAL = 2.6; EXPRESSED IN FETAL LIVER, SIGNAL = 2.5; EXPRESSED IN ADULT LIVER, SIGNAL =   2; SWISSPROT HIT: Q66674, EVALUE 3.00e-04; EST_HUMAN HIT: W23795.1, EVALUE 2.00e-46
MSAEVIHQVEEALDTDEKEMLLFLCRDVAIDVVPPNVRDLLDILRERGKLSVGDLAELLYRVRRFDLLKRILKMDRKAVETHLLRNPHLVSDY

SEQ ID NO: 36371 - protein, 173 aa, Homo sapiens
  MAP TO AL049749.1; EXPRESSED IN BT474, SIGNAL = 5.8; EXPRESSED IN BONE MARROW, SIGNAL = 4.2; EXPRESSED IN HEART, SIGNAL = 5.8; EXPRESSED IN ADULT LIVER, SIGNAL = 3.2; EXPRESSED IN FETAL LIVER, SIGNAL = 4.7; EXPRESSED IN BRAIN, SIGNAL = 5.7; EXPRESSED IN LUNG, SIGNAL = 5.2; EXPRESSED IN HELA, SIGNAL = 5.3; EXPRESSED IN PLACENTA, SIGNAL = 3.9; EXPRESSED IN HBL100, SIGNAL = 4.4
MMVVLVVVMVVVIIAMMQVVVIMKVVLMVVVVIVTMMQVAVIMKVVMIDGGNNDCDKDGGDESGDGDGGDGGGGDDGDDGGSDGGSDGGGNGDDGDDGGSDDGDGGGNYSHDAGGSDHEGGGDGGDGGGVDDGDGGGDDGGGSGGDSDGGGSDGGGNGGDGDGGGSDGGDGGG

SEQ ID NO: 36372 - protein, 113 aa, Homo sapiens
  MAP TO AL033532.15; EXPRESSED IN BONE MARROW, SIGNAL = 1.7; EXPRESSED IN BRAIN, SIGNAL = 1.5; EXPRESSED IN HBL100, SIGNAL = 1.6; EXPRESSED IN BT474, SIGNAL = 1.7; EXPRESSED IN FETAL LIVER, SIGNAL =   2; EXPRESSED IN LUNG, SIGNAL = 1.5; EXPRESSED IN PLACENTA, SIGNAL = 1.8; EXPRESSED IN HEART, SIGNAL = 1.8; EXPRESSED IN HELA, SIGNAL = 1.8; EXPRESSED IN ADULT LIVER, SIGNAL = 2.3; SWISSPROT HIT: O87404, EVALUE 5.40e-01; EST_HUMAN HIT: BF247811.1, EVALUE 4.00e-03
AALFDFQSASCLYTALFDFQSASCVYTALFDFQSASCLYTALFVFQSASCVYTALFDFQSASCLYTALFDFQSASCVYTALFDFQSASCLYTALFDFQSASCVYTALFDFQSA

SEQ ID NO: 36373 - protein, 19 aa, Homo sapiens
  MAP TO AC007030.2; EXPRESSED IN BONE MARROW, SIGNAL =  21; EXPRESSED IN PLACENTA, SIGNAL =  26; EXPRESSED IN ADULT LIVER, SIGNAL = 3.7; EXPRESSED IN BT474, SIGNAL =  22; EXPRESSED IN LUNG, SIGNAL =  22; EXPRESSED IN BRAIN, SIGNAL = 8.6; EXPRESSED IN HEART, SIGNAL = 9.4; EXPRESSED IN HELA, SIGNAL =  37; EXPRESSED IN HBL100, SIGNAL =  33; EXPRESSED IN FETAL LIVER, SIGNAL =  18; EST_HUMAN HIT: AI813595.1, EVALUE 3.40e-02
AGPPWSASRCLTASHRPMT

SEQ ID NO: 36374 - protein, 57 aa, Homo sapiens
  MAP TO AC007044.1; EXPRESSED IN BT474, SIGNAL = 6.9; EXPRESSED IN FETAL LIVER, SIGNAL = 6.8; EXPRESSED IN BONE MARROW, SIGNAL = 6.6; EXPRESSED IN LUNG, SIGNAL =   7; EXPRESSED IN BRAIN, SIGNAL = 6.2; EXPRESSED IN HELA, SIGNAL = 6.5; EXPRESSED IN HBL100, SIGNAL = 7.4; EXPRESSED IN HEART, SIGNAL = 5.4; EXPRESSED IN PLACENTA, SIGNAL = 6.1; EXPRESSED IN ADULT LIVER, SIGNAL = 7.7; SWISSPROT HIT: P30205, EVALUE 2.60e+00; EST_HUMAN HIT: BE797488.1, EVALUE 6.20e+00
AFPAVTCSAVVCSEDAGAVEENNSQRRAVGIFQARVLETTLVTFFSIPWSEDSAAPK

SEQ ID NO: 36375 - protein, 65 aa, Homo sapiens
  MAP TO AC007057.3; EXPRESSED IN ADULT LIVER, SIGNAL = 1.6; EXPRESSED IN BT474, SIGNAL = 1.4; EXPRESSED IN BRAIN, SIGNAL = 1.5; EXPRESSED IN HEART, SIGNAL = 2.1; EXPRESSED IN HELA, SIGNAL = 1.4; EXPRESSED IN HBL100, SIGNAL = 1.4; EXPRESSED IN PLACENTA, SIGNAL = 1.7; EXPRESSED IN FETAL LIVER, SIGNAL = 1.5; EXPRESSED IN LUNG, SIGNAL = 3.1; EXPRESSED IN BONE MARROW, SIGNAL = 1.5; SWISSPROT HIT: Q9WVH9, EVALUE 8.00e-33; EST_HUMAN HIT: BF104873.1, EVALUE 4.00e-34
RCMCPAENPGCRDQPFTILYRDMDVVSGRSVPADIFQMQATTRYPGAYYIFQIKSGNEGREFYMR

SEQ ID NO: 36376 - protein, 49 aa, Homo sapiens
  MAP TO AC007335.2; EXPRESSED IN ADULT LIVER, SIGNAL = 1.7; EXPRESSED IN HBL100, SIGNAL = 2.5; EXPRESSED IN HELA, SIGNAL = 1.9; EXPRESSED IN HEART, SIGNAL = 2.2; EXPRESSED IN FETAL LIVER, SIGNAL = 1.5; EXPRESSED IN BT474, SIGNAL = 3.1; EXPRESSED IN BRAIN, SIGNAL = 3.3; EXPRESSED IN LUNG, SIGNAL = 1.5; EXPRESSED IN BONE MARROW, SIGNAL = 3.4; EXPRESSED IN PLACENTA, SIGNAL = 1.7; EST_HUMAN HIT: AV650422.1, EVALUE 2.00e-09; SWISSPROT HIT: Q04791, EVALUE 2.00e-11
AGAPVYFYEFRHRPQCFEDTKPAFVKADHADEVRFVFGGAFLKGDIVMF

SEQ ID NO: 36377 - protein, 38 aa, Homo sapiens
  MAP TO AC007335.2; EXPRESSED IN ADULT LIVER, SIGNAL = 1.7; EXPRESSED IN HBL100, SIGNAL = 2.5; EXPRESSED IN HELA, SIGNAL = 1.9; EXPRESSED IN HEART, SIGNAL = 2.2; EXPRESSED IN FETAL LIVER, SIGNAL = 1.5; EXPRESSED IN BT474, SIGNAL = 3.1; EXPRESSED IN BRAIN, SIGNAL = 3.3; EXPRESSED IN LUNG, SIGNAL = 1.5; EXPRESSED IN BONE MARROW, SIGNAL = 3.4; EXPRESSED IN PLACENTA, SIGNAL = 1.7; EST_HUMAN HIT: AV650422.1, EVALUE 2.00e-08
MLVHLSTSMSFGTGLSALKTRSQLLSKPTTLMKSALCS

SEQ ID NO: 36378 - protein, 57 aa, Homo sapiens
  MAP TO AL132642.1; EXPRESSED IN PLACENTA, SIGNAL = 2.8; EXPRESSED IN HBL100, SIGNAL = 3.3; EXPRESSED IN HELA, SIGNAL = 1.4; EXPRESSED IN FETAL LIVER, SIGNAL = 2.6; EXPRESSED IN LUNG, SIGNAL = 2.5; EXPRESSED IN HEART, SIGNAL = 1.9; EXPRESSED IN BT474, SIGNAL = 3.1; EXPRESSED IN BRAIN, SIGNAL = 0.95; EXPRESSED IN BONE MARROW, SIGNAL = 1.8
PRPTLLYDLLQQCSLTILQKERLRLRELLRYSRTHSCYVAELVQSRGVLASKDDVST

SEQ ID NO: 36379 - protein, 41 aa, Homo sapiens
  MAP TO AL096862.15; EXPRESSED IN BT474, SIGNAL = 5.6; EXPRESSED IN BRAIN, SIGNAL =   6; EXPRESSED IN BONE MARROW, SIGNAL = 6.1; EXPRESSED IN LUNG, SIGNAL =   5; EXPRESSED IN HELA, SIGNAL = 6.7; EXPRESSED IN HEART, SIGNAL = 5.4; EXPRESSED IN PLACENTA, SIGNAL =   7; EXPRESSED IN HBL100, SIGNAL = 6.1; EXPRESSED IN FETAL LIVER, SIGNAL = 7.2; EXPRESSED IN ADULT LIVER, SIGNAL = 8.3
KKEEEEEEREKGEEEEAKEEEEEEEEEEKGGGGEGRGRGKN

SEQ ID NO: 36380 - protein, 37 aa, Homo sapiens
  MAP TO AL096862.15; EXPRESSED IN BT474, SIGNAL = 5.6; EXPRESSED IN BRAIN, SIGNAL =   6; EXPRESSED IN BONE MARROW, SIGNAL = 6.1; EXPRESSED IN LUNG, SIGNAL =   5; EXPRESSED IN HELA, SIGNAL = 6.7; EXPRESSED IN HEART, SIGNAL = 5.4; EXPRESSED IN PLACENTA, SIGNAL =   7; EXPRESSED IN HBL100, SIGNAL = 6.1; EXPRESSED IN FETAL LIVER, SIGNAL = 7.2; EXPRESSED IN ADULT LIVER, SIGNAL = 8.3
FVFLFIVQRRKRRRRRRERRGRRKKRKRRRKRRKKKR

SEQ ID NO: 36381 - protein, 44 aa, Homo sapiens
  MAP TO AL109755.14; EXPRESSED IN PLACENTA, SIGNAL = 1.2; EXPRESSED IN ADULT LIVER, SIGNAL = 1.4; EXPRESSED IN BT474, SIGNAL = 1.1; EXPRESSED IN BONE MARROW, SIGNAL = 1.2; EXPRESSED IN HBL100, SIGNAL = 1.4; EXPRESSED IN HEART, SIGNAL =   1; EXPRESSED IN FETAL LIVER, SIGNAL = 1.1; EXPRESSED IN BRAIN, SIGNAL = 1.3; EXPRESSED IN LUNG, SIGNAL = 1.1; EXPRESSED IN HELA, SIGNAL = 1.1; EST_HUMAN HIT: BE742022.1, EVALUE 5.30e+00; SWISSPROT HIT: P48019, EVALUE 2.10e+00
PISRPSYPRGAGGILRQKAASVFGALRIPCPHKAASIRATVQSR

SEQ ID NO: 36382 - protein, 66 aa, Homo sapiens
  MAP TO AC008015.5; EXPRESSED IN PLACENTA, SIGNAL = 3.1; EXPRESSED IN HEART, SIGNAL = 4.7; EXPRESSED IN FETAL LIVER, SIGNAL = 3.9; EXPRESSED IN ADULT LIVER, SIGNAL = 5.6; EXPRESSED IN HBL100, SIGNAL = 5.6; EXPRESSED IN HELA, SIGNAL = 5.6; EXPRESSED IN BT474, SIGNAL = 5.6; EXPRESSED IN BRAIN, SIGNAL = 5.4; EXPRESSED IN LUNG, SIGNAL = 3.7; EXPRESSED IN BONE MARROW, SIGNAL = 6.2; EST_HUMAN HIT: BF335227.1, EVALUE 7.50e+00
LAILDVQWMNLSSPDPALLPNTGGPELVLNYMICTAGFPIGVRRLAKYVLQLSNMRRQKDKVGSVF

SEQ ID NO: 36383 - protein, 58 aa, Homo sapiens
  MAP TO AC008015.5; EXPRESSED IN PLACENTA, SIGNAL = 3.1; EXPRESSED IN HEART, SIGNAL = 4.7; EXPRESSED IN FETAL LIVER, SIGNAL = 3.9; EXPRESSED IN ADULT LIVER, SIGNAL = 5.6; EXPRESSED IN HBL100, SIGNAL = 5.6; EXPRESSED IN HELA, SIGNAL = 5.6; EXPRESSED IN BT474, SIGNAL = 5.6; EXPRESSED IN BRAIN, SIGNAL = 5.4; EXPRESSED IN LUNG, SIGNAL = 3.7; EXPRESSED IN BONE MARROW, SIGNAL = 6.2; EST_HUMAN HIT: BF335227.1, EVALUE 3.20e-01; SWISSPROT HIT: P06494, EVALUE 2.00e+00
PGNTGRAVDEPELPRPRIAPKHWGSRTSPELHDLHCWFSNRSEEAGKVCLAAIKYEEA

SEQ ID NO: 36384 - protein, 42 aa, Homo sapiens
  MAP TO L11910.1; EXPRESSED IN BONE MARROW, SIGNAL = 1.2; EXPRESSED IN BRAIN, SIGNAL = 1.2; EXPRESSED IN PLACENTA, SIGNAL = 1.4; EXPRESSED IN HBL100, SIGNAL = 1.5; EXPRESSED IN BT474, SIGNAL = 1.3; EXPRESSED IN LUNG, SIGNAL = 1.6; EXPRESSED IN HEART, SIGNAL = 1.2; EXPRESSED IN HELA, SIGNAL = 1.2; EXPRESSED IN ADULT LIVER, SIGNAL = 0.97; EST_HUMAN HIT: AV722384.1, EVALUE 1.00e-17; SWISSPROT HIT: P06400, EVALUE 8.00e-19
QKINQMVCNSDRVLKRSAEGSNPPKPLKKLRFDIEGSDEADG

SEQ ID NO: 36385 - protein, 43 aa, Homo sapiens
  MAP TO AC007220.1; EXPRESSED IN HBL100, SIGNAL = 6.7; EXPRESSED IN HEART, SIGNAL = 2.7; EXPRESSED IN PLACENTA, SIGNAL = 2.5; EXPRESSED IN HELA, SIGNAL = 6.5; EXPRESSED IN FETAL LIVER, SIGNAL = 3.8; EXPRESSED IN BT474, SIGNAL = 5.9; EXPRESSED IN ADULT LIVER, SIGNAL =   1; EXPRESSED IN BRAIN, SIGNAL = 2.4; EXPRESSED IN BONE MARROW, SIGNAL = 2.2; EXPRESSED IN LUNG, SIGNAL = 6.2; EST_HUMAN HIT: BF184766.1, EVALUE 4.00e-11
RSCETFLIFSYIFSFVRNLIIKHNGQQCYQQERSSLHERVFVG

SEQ ID NO: 36386 - protein, 45 aa, Homo sapiens
  MAP TO AC007016.5; EXPRESSED IN BONE MARROW, SIGNAL = 4.5; EXPRESSED IN HELA, SIGNAL = 4.2; EXPRESSED IN FETAL LIVER, SIGNAL = 4.8; EXPRESSED IN LUNG, SIGNAL = 4.5; EXPRESSED IN BRAIN, SIGNAL = 3.6; EXPRESSED IN PLACENTA, SIGNAL = 3.9; EXPRESSED IN HEART, SIGNAL = 3.8; EXPRESSED IN HBL100, SIGNAL = 3.7; EXPRESSED IN BT474, SIGNAL = 3.4; EXPRESSED IN ADULT LIVER, SIGNAL = 4.5; EST_HUMAN HIT: T06680.1, EVALUE 8.00e-13; SWISSPROT HIT: O43101, EVALUE 4.60e+00
RAKKKKRKQAAEEHPGDEIAEPYPEEDLVKPSPPEPTDRAVIEQE

SEQ ID NO: 36387 - protein, 73 aa, Homo sapiens
  MAP TO AC006230.11; EXPRESSED IN HELA, SIGNAL = 1.3; EXPRESSED IN HEART, SIGNAL = 1.2; EXPRESSED IN PLACENTA, SIGNAL =   1; EXPRESSED IN BT474, SIGNAL =   1; EXPRESSED IN FETAL LIVER, SIGNAL =   1; EXPRESSED IN LUNG, SIGNAL = 0.95; EXPRESSED IN BRAIN, SIGNAL =   1; EXPRESSED IN BONE MARROW, SIGNAL = 1.3; EXPRESSED IN HBL100, SIGNAL = 1.9; EXPRESSED IN ADULT LIVER, SIGNAL = 0.92; SWISSPROT HIT: P38945, EVALUE 3.50e+00; EST_HUMAN HIT: BE378361.1, EVALUE 3.00e-38
PGGWPRPGGQHDGGSDLLAINLSSIHVLQRLLSFIWILKLYARIAFGQMGMHPFHGHVNHFNFPIGGKYLHDV

SEQ ID NO: 36388 - protein, 34 aa, Homo sapiens [sequence omitted]

SEQ ID NO: 36389 - protein, 44 aa, Homo sapiens [sequence omitted]

SEQ ID NO: 36390 - protein, 155 aa, Homo sapiens
  MAP TO AL035411.27; EXPRESSED IN HELA, SIGNAL = 1.2; EXPRESSED IN HEART, SIGNAL = 1.1; EXPRESSED IN FETAL LIVER, SIGNAL = 1.2; EXPRESSED IN BT474, SIGNAL = 1.2; EXPRESSED IN BRAIN, SIGNAL = 0.98; EXPRESSED IN LUNG, SIGNAL = 1.1; EXPRESSED IN BONE MARROW, SIGNAL = 1.1; EXPRESSED IN PLACENTA, SIGNAL = 0.93; EXPRESSED IN HBL100, SIGNAL = 1.2; EXPRESSED IN ADULT LIVER, SIGNAL = 1.3; SWISSPROT HIT: P32591, EVALUE 2.70e-01; EST_HUMAN HIT: BF243336.1, EVALUE 4.00e-29
SDSQEALFSKSSRGCLQNEKQDETLSSSEITLWTEKQSNGDKKSIELNDQKFNELIKNCNKHDGRGIIVDARQLPSPEPCEIQKNLNDNEMLFHSCQMVEESHEEEELKPPEQEIEIDRNIIQEEEKQAIPEFFEGRQAKTPERYLKIRNYILDQ

SEQ ID NO: 36391 - protein, 88 aa, Homo sapiens
  MAP TO AL109627.12; EXPRESSED IN BONE MARROW, SIGNAL = 1.1; EXPRESSED IN HBL100, SIGNAL = 1.3; EXPRESSED IN HELA, SIGNAL =   1; EXPRESSED IN PLACENTA, SIGNAL = 1.2; EXPRESSED IN HEART, SIGNAL =   1; EXPRESSED IN BT474, SIGNAL = 1.1; EXPRESSED IN FETAL LIVER, SIGNAL = 1.3; EXPRESSED IN ADULT LIVER, SIGNAL = 1.4; EST_HUMAN HIT: AI968086.1, EVALUE 4.00e-46; SWISSPROT HIT: P13805, EVALUE 1.70e-01
VEWNVMASSSDSEDDSFMAVDQEETVLEGTMDQDEEPHPVLEAEETRHNRSMSELPEEVLEYILSFLSPYQEHKTAALVCKQWYRLIK

SEQ ID NO: 36392 - protein, 61 aa, Homo sapiens
  MAP TO AC007738.2; EXPRESSED IN HBL100, SIGNAL = 3.3; EXPRESSED IN HEART, SIGNAL = 2.9; EXPRESSED IN BT474, SIGNAL = 3.3; EXPRESSED IN BRAIN, SIGNAL = 2.8; EXPRESSED IN BONE MARROW, SIGNAL = 2.6; EXPRESSED IN PLACENTA, SIGNAL = 3.1; EXPRESSED IN HELA, SIGNAL = 3.4; EXPRESSED IN ADULT LIVER, SIGNAL =   3; EXPRESSED IN FETAL LIVER, SIGNAL = 3.1; EXPRESSED IN LUNG, SIGNAL =   3; EST_HUMAN HIT: BE070016.1, EVALUE 6.00e-13; SWISSPROT HIT: P32918, EVALUE 4.40e+00
VDCALSLIRLGMERNIPGLLVLCDNLVTLETLVYEARCDVTLTLKELQQMKDIEKLRLLMN

SEQ ID NO: 36393 - protein, 40 aa, Homo sapiens
  MAP TO AC007738.2; EXPRESSED IN HBL100, SIGNAL = 3.3; EXPRESSED IN HEART, SIGNAL = 2.9; EXPRESSED IN BT474, SIGNAL = 3.3; EXPRESSED IN BRAIN, SIGNAL = 2.8; EXPRESSED IN BONE MARROW, SIGNAL = 2.6; EXPRESSED IN PLACENTA, SIGNAL = 3.1; EXPRESSED IN HELA, SIGNAL = 3.4; EXPRESSED IN ADULT LIVER, SIGNAL =   3; EXPRESSED IN FETAL LIVER, SIGNAL = 3.1; EXPRESSED IN LUNG, SIGNAL =   3; SWISSPROT HIT: P52867, EVALUE 7.10e-01; EST_HUMAN HIT: BE070016.1, EVALUE 1.00e-03
RWTVHCHLFDLGWSGIFLVCWFSVTIWLLWKHWFMKPGVM

SEQ ID NO: 36394 - protein, 45 aa, Homo sapiens
  MAP TO AC007249.2; EXPRESSED IN BONE MARROW, SIGNAL = 3.7; EXPRESSED IN PLACENTA, SIGNAL = 3.7; EXPRESSED IN ADULT LIVER, SIGNAL = 4.7; EXPRESSED IN BT474, SIGNAL = 3.5; EXPRESSED IN BRAIN, SIGNAL = 3.3; EXPRESSED IN LUNG, SIGNAL = 4.4; EXPRESSED IN HEART, SIGNAL = 4.5; EXPRESSED IN HELA, SIGNAL =   4; EXPRESSED IN HBL100, SIGNAL = 3.9; EXPRESSED IN FETAL LIVER, SIGNAL = 3.9; SWISSPROT HIT: P09208, EVALUE 3.50e+00; EST_HUMAN HIT: BF128252.1, EVALUE 6.90e+00
TPFLNPGDTQETLLVERMQQRGFPGQEHPPRSFSTAKRWLVVELR

SEQ ID NO: 36395 - protein, 59 aa, Homo sapiens
  MAP TO AC007321.1; EXPRESSED IN HBL100, SIGNAL = 2.4; EXPRESSED IN HEART, SIGNAL = 2.4; EXPRESSED IN ADULT LIVER, SIGNAL = 2.6; EXPRESSED IN BT474, SIGNAL = 3.8; EXPRESSED IN BRAIN, SIGNAL = 2.2; EXPRESSED IN PLACENTA, SIGNAL = 2.5; EXPRESSED IN HELA, SIGNAL = 2.8; EXPRESSED IN FETAL LIVER, SIGNAL =   2; EXPRESSED IN LUNG, SIGNAL = 2.5; EXPRESSED IN BONE MARROW, SIGNAL = 1.7; SWISSPROT HIT: Q9S5A3, EVALUE 1.20e+00; EST_HUMAN HIT: AW510836.1, EVALUE 4.00e-30
KEDAYDGVTSENMRNGLVNSEVHNEDGRNGDVSQFPYVEFTGRDSVTCPTCQGTGRIPR

SEQ ID NO: 36396 - protein, 18 aa, Homo sapiens
  MAP TO AC007321.1; EXPRESSED IN HBL100, SIGNAL = 2.4; EXPRESSED IN HEART, SIGNAL = 2.4; EXPRESSED IN ADULT LIVER, SIGNAL = 2.6; EXPRESSED IN BT474, SIGNAL = 3.8; EXPRESSED IN BRAIN, SIGNAL = 2.2; EXPRESSED IN PLACENTA, SIGNAL = 2.5; EXPRESSED IN HELA, SIGNAL = 2.8; EXPRESSED IN FETAL LIVER, SIGNAL =   2; EXPRESSED IN LUNG, SIGNAL = 2.5; EXPRESSED IN BONE MARROW, SIGNAL = 1.7; EST_HUMAN HIT: AU138808.1, EVALUE 3.00e-03
CLCIQAKKMLMMESHLKT

SEQ ID NO: 36397 - protein, 46 aa, Homo sapiens
  MAP TO AC007256.1; EXPRESSED IN PLACENTA, SIGNAL =   2; EXPRESSED IN ADULT LIVER, SIGNAL = 2.6; EXPRESSED IN BT474, SIGNAL =   4; EXPRESSED IN FETAL LIVER, SIGNAL = 2.1; EXPRESSED IN BONE MARROW, SIGNAL = 3.9; EXPRESSED IN LUNG, SIGNAL = 1.8; EXPRESSED IN BRAIN, SIGNAL =   4; EXPRESSED IN HELA, SIGNAL = 3.5; EXPRESSED IN HBL100, SIGNAL =   4; EXPRESSED IN HEART, SIGNAL = 3.5; EST_HUMAN HIT: BF095670.1, EVALUE 9.00e-19; SWISSPROT HIT: Q14790, EVALUE 7.00e-20
NLLDIFIEMEKRVILGEGKLDILKRVCAQINKSLLKIINDYEEFSK

SEQ ID NO: 36398 - protein, 162 aa, Homo sapiens
  MAP TO AC007981.31; EXPRESSED IN BRAIN, SIGNAL = 4.4; EXPRESSED IN BONE MARROW, SIGNAL = 4.3; EXPRESSED IN PLACENTA, SIGNAL = 5.4; EXPRESSED IN ADULT LIVER, SIGNAL =   6; EXPRESSED IN FETAL LIVER, SIGNAL = 4.7; EXPRESSED IN BT474, SIGNAL = 4.3; EXPRESSED IN LUNG, SIGNAL = 7.8; EXPRESSED IN HEART, SIGNAL =   4; EXPRESSED IN HELA, SIGNAL = 4.7; EXPRESSED IN HBL100, SIGNAL = 4.1; SWISSPROT HIT: P36268, EVALUE 3.00e-39; EST_HUMAN HIT: AI806336.1, EVALUE 3.00e-39
MDDFSSPSITNEFGAPPSPANFIQPGMGWRSGGWGTGVERGGCPGQAADGHPCLLPSAAGKQPLLSMCPTIMVGQDGQVRMVVGAAGGTQITTDTALVCVTPFLPGPAHSAQPPSHADHTPMPQAIIYNLWFGYDVKRAVEEPRLHNKLLPNVTTVERNIDQ

SEQ ID NO: 36399 - protein, 37 aa, Homo sapiens
  MAP TO AC007981.31; EXPRESSED IN BRAIN, SIGNAL = 4.4; EXPRESSED IN BONE MARROW, SIGNAL = 4.3; EXPRESSED IN PLACENTA, SIGNAL = 5.4; EXPRESSED IN ADULT LIVER, SIGNAL =   6; EXPRESSED IN FETAL LIVER, SIGNAL = 4.7; EXPRESSED IN BT474, SIGNAL = 4.3; EXPRESSED IN LUNG, SIGNAL = 7.8; EXPRESSED IN HEART, SIGNAL =   4; EXPRESSED IN HELA, SIGNAL = 4.7; EXPRESSED IN HBL100, SIGNAL = 4.1; EST_HUMAN HIT: AI022684.1, EVALUE 9.00e-03
ALVHVPDDHGGPGRPGPDGGGSCWGHADHHRHCTGMC

SEQ ID NO: 36400 - protein, 52 aa, Homo sapiens
  MAP TO AC006992.2; EXPRESSED IN BONE MARROW, SIGNAL = 0.65; EXPRESSED IN FETAL LIVER, SIGNAL = 0.69; EXPRESSED IN ADULT LIVER, SIGNAL = 0.77; EXPRESSED IN BRAIN, SIGNAL = 1.2; EXPRESSED IN HEART, SIGNAL = 0.84; EXPRESSED IN PLACENTA, SIGNAL = 0.72; EXPRESSED IN BT474, SIGNAL = 0.93; SWISSPROT HIT: P46596, EVALUE 5.90e+00
MEALTLGGLAKPTRSTTTGEALGLESRNVPAASNATAQIPSTTVTATRTTSN

SEQ ID NO: 36401 - protein, 29 aa, Homo sapiens
  MAP TO AL118508.9; EXPRESSED IN HBL100, SIGNAL =   1; EXPRESSED IN PLACENTA, SIGNAL = 0.96; EXPRESSED IN ADULT LIVER, SIGNAL = 1.4; EXPRESSED IN HEART, SIGNAL =   1; EXPRESSED IN BT474, SIGNAL =   1; EXPRESSED IN LUNG, SIGNAL = 1.1
APELAAGEQSEDNQVQTGCQGPRGHVVDD

SEQ ID NO: 36402 - protein, 37 aa, Homo sapiens
  MAP TO AL050343.17; EXPRESSED IN HELA, SIGNAL = 3.1; EXPRESSED IN PLACENTA, SIGNAL = 1.8; EXPRESSED IN BT474, SIGNAL = 2.3; EXPRESSED IN BONE MARROW, SIGNAL = 1.2; EXPRESSED IN BRAIN, SIGNAL = 1.8; EXPRESSED IN HBL100, SIGNAL = 2.7; EXPRESSED IN HEART, SIGNAL = 3.3; EXPRESSED IN ADULT LIVER, SIGNAL = 1.4; EXPRESSED IN FETAL LIVER, SIGNAL = 1.9; EXPRESSED IN LUNG, SIGNAL =   2; EST_HUMAN HIT: AW390905.1, EVALUE 3.00e-04
TGRWPQPPLRKPGCLQNISRTVHAYARLPEGPACTYP

SEQ ID NO: 36403 - protein, 85 aa, Homo sapiens
  MAP TO AP000082.1; EXPRESSED IN FETAL LIVER, SIGNAL = 1.6; EXPRESSED IN BONE MARROW, SIGNAL = 3.1; EXPRESSED IN LUNG, SIGNAL = 3.1; EXPRESSED IN BRAIN, SIGNAL = 2.8; EXPRESSED IN HELA, SIGNAL = 3.3; EXPRESSED IN HEART, SIGNAL = 3.7; EXPRESSED IN PLACENTA, SIGNAL = 3.7; EXPRESSED IN HBL100, SIGNAL = 3.3; EXPRESSED IN BT474, SIGNAL = 2.7; EXPRESSED IN ADULT LIVER, SIGNAL = 2.4
  unsure 35
KKKKKKKKKKKKKKKKKKKKKKKKKKKKKKEEEEXVVVEEEEEEEEERRKKKKEKEKEKKEEERRRRKIMHRGVCLPYEPGSQRG

SEQ ID NO: 36404 - protein, 56 aa, Homo sapiens
  MAP TO AC007444.1; EXPRESSED IN LUNG, SIGNAL = 2.8; EXPRESSED IN BONE MARROW, SIGNAL = 4.5; EXPRESSED IN BRAIN, SIGNAL = 4.6; EXPRESSED IN HELA, SIGNAL = 2.5; EXPRESSED IN PLACENTA, SIGNAL = 2.4; EXPRESSED IN HBL100, SIGNAL = 3.4; EXPRESSED IN HEART, SIGNAL = 2.9; EXPRESSED IN BT474, SIGNAL = 3.6; EXPRESSED IN FETAL LIVER, SIGNAL = 2.4; EXPRESSED IN ADULT LIVER, SIGNAL =   3; SWISSPROT HIT: P43815, EVALUE 6.80e-01; EST_HUMAN HIT: AI971130.1, EVALUE 5.00e-13
AQNAQQLHERIQSSSMDAKLEALKDLASLSRDVTFAQEFINLDGISLLTQMVESGT

SEQ ID NO: 36405 - protein, 47 aa, Homo sapiens; identical to SEQ ID NO: 35097
  MAP TO AL049593.8; EXPRESSED IN ADULT LIVER, SIGNAL = 1.2; EXPRESSED IN HELA, SIGNAL =   1; EXPRESSED IN HEART, SIGNAL = 1.3; EXPRESSED IN FETAL LIVER, SIGNAL = 1.1; EXPRESSED IN BT474, SIGNAL = 1.2; EXPRESSED IN BRAIN, SIGNAL = 1.3; EXPRESSED IN LUNG, SIGNAL = 1.1; EXPRESSED IN BONE MARROW, SIGNAL = 1.1; EXPRESSED IN PLACENTA, SIGNAL = 1.1; EXPRESSED IN HBL100, SIGNAL =   1; EST_HUMAN HIT: BE697682.1, EVALUE 3.00e-05; SWISSPROT HIT: P10687, EVALUE 2.00e-06

SEQ ID NO: 36406 - protein, 40 aa, Homo sapiens
  MAP TO AL109855.8; EXPRESSED IN BT474, SIGNAL = 3.1; EXPRESSED IN BRAIN, SIGNAL = 2.3; EXPRESSED IN HEART, SIGNAL = 2.4; EXPRESSED IN ADULT LIVER, SIGNAL =   3; EXPRESSED IN FETAL LIVER, SIGNAL = 2.4; EXPRESSED IN LUNG, SIGNAL = 2.4; EXPRESSED IN BONE MARROW, SIGNAL = 2.5; EXPRESSED IN HELA, SIGNAL = 2.7; EXPRESSED IN PLACENTA, SIGNAL = 3.1; EXPRESSED IN HBL100, SIGNAL = 2.4; EST_HUMAN HIT: BE008019.1, EVALUE 1.00e-13; SWISSPROT HIT: P11269, EVALUE 7.10e-01
ANNPKARPYNTKRMGAWHCCRNPGHWSKECPKPLGYKLSP

SEQ ID NO: 36407 - protein, 64 aa, Homo sapiens
  MAP TO AP000556.2; EXPRESSED IN HBL100, SIGNAL = 2.2; EXPRESSED IN HELA, SIGNAL = 1.5; EXPRESSED IN FETAL LIVER, SIGNAL = 1.8; EXPRESSED IN HEART, SIGNAL = 2.3; EXPRESSED IN PLACENTA, SIGNAL = 2.8; EXPRESSED IN ADULT LIVER, SIGNAL =   1; EXPRESSED IN BT474, SIGNAL = 2.1; EXPRESSED IN BRAIN, SIGNAL = 2.2; EXPRESSED IN LUNG, SIGNAL = 3.4; EXPRESSED IN BONE MARROW, SIGNAL = 2.1; EST_HUMAN HIT: BE074274.1, EVALUE 8.00e-03; SWISSPROT HIT: P18915, EVALUE 1.00e-03
APVLVPAVPTHWKKLAPACGGPGQSLIDIDFHRVRRNSTLGPFIFRGYDSAPPGPWTLENDSHT

SEQ ID NO: 36408 - protein, 39 aa, Homo sapiens
  MAP TO AP000556.2; EXPRESSED IN HBL100, SIGNAL = 2.2; EXPRESSED IN HELA, SIGNAL = 1.5; EXPRESSED IN FETAL LIVER, SIGNAL = 1.8; EXPRESSED IN HEART, SIGNAL = 2.3; EXPRESSED IN PLACENTA, SIGNAL = 2.8; EXPRESSED IN ADULT LIVER, SIGNAL =   1; EXPRESSED IN BT474, SIGNAL = 2.1; EXPRESSED IN BRAIN, SIGNAL = 2.2; EXPRESSED IN LUNG, SIGNAL = 3.4; EXPRESSED IN BONE MARROW, SIGNAL = 2.1
PQSLFQQSPPTGRSWPLPVGAQASPSSTLTFTGSGGTLP

SEQ ID NO: 36409 - protein, 28 aa, Homo sapiens
  MAP TO AC007335.2; EXPRESSED IN PLACENTA, SIGNAL = 0.95; EXPRESSED IN HELA, SIGNAL = 1.1; EXPRESSED IN HBL100, SIGNAL = 1.1; EXPRESSED IN HEART, SIGNAL = 1.2; EXPRESSED IN ADULT LIVER, SIGNAL = 1.2; EXPRESSED IN BT474, SIGNAL = 0.95; EXPRESSED IN BONE MARROW, SIGNAL = 1.2; EST_HUMAN HIT: AW898817.1, EVALUE 3.10e+00
ISSDIAKCPLGDKSTLVGNDCFNLVKLR

SEQ ID NO: 36410 - protein, 23 aa, Homo sapiens
  MAP TO AC007335.2; EXPRESSED IN PLACENTA, SIGNAL = 0.95; EXPRESSED IN HELA, SIGNAL = 1.1; EXPRESSED IN HBL100, SIGNAL = 1.1; EXPRESSED IN HEART, SIGNAL = 1.2; EXPRESSED IN ADULT LIVER, SIGNAL = 1.2; EXPRESSED IN BT474, SIGNAL = 0.95; EXPRESSED IN BONE MARROW, SIGNAL = 1.2; EST_HUMAN HIT: W92548.1, EVALUE 1.60e+00
YLQTLPNVPWGTKAPWLGTTALT

SEQ ID NO: 36411 - protein, 62 aa, Homo sapiens
  MAP TO AC008045.4; EXPRESSED IN FETAL LIVER, SIGNAL = 1.6; EXPRESSED IN ADULT LIVER, SIGNAL = 1.5; EXPRESSED IN BT474, SIGNAL = 1.7; EXPRESSED IN BRAIN, SIGNAL = 1.3; EXPRESSED IN BONE MARROW, SIGNAL = 1.2; EXPRESSED IN LUNG, SIGNAL = 1.5; EXPRESSED IN PLACENTA, SIGNAL = 1.4; EXPRESSED IN HBL100, SIGNAL = 1.5; EXPRESSED IN HELA, SIGNAL = 1.6; EXPRESSED IN HEART, SIGNAL = 1.5; SWISSPROT HIT: Q21313, EVALUE 4.00e-07; EST_HUMAN HIT: BE348399.1, EVALUE 8.00e-10
RNGLILHTGKSADYVNLALKDGAVSLVINLGSGAFEAIVEPVNGKFNDNAWHDVKVTRNLRQ

SEQ ID NO: 36412 - protein, 44 aa, Homo sapiens
  MAP TO AC008045.4; EXPRESSED IN FETAL LIVER, SIGNAL = 1.6; EXPRESSED IN ADULT LIVER, SIGNAL = 1.5; EXPRESSED IN BT474, SIGNAL = 1.7; EXPRESSED IN BRAIN, SIGNAL = 1.3; EXPRESSED IN BONE MARROW, SIGNAL = 1.2; EXPRESSED IN LUNG, SIGNAL = 1.5; EXPRESSED IN PLACENTA, SIGNAL = 1.4; EXPRESSED IN HBL100, SIGNAL = 1.5; EXPRESSED IN HELA, SIGNAL = 1.6; EXPRESSED IN HEART, SIGNAL = 1.5; SWISSPROT HIT: P55200, EVALUE 3.10e-01; EST_HUMAN HIT: AW135326.1, EVALUE 9.00e-09
ICATTCLRTRSRAAVMKSPSPLRPGSVTASSCTRASRLTMSTWL

SEQ ID NO: 36413 - protein, 67 aa, Homo sapiens
  MAP TO AC010175.4; EXPRESSED IN HEART, SIGNAL = 1.9; EXPRESSED IN PLACENTA, SIGNAL = 2.7; EXPRESSED IN FETAL LIVER, SIGNAL = 6.4; EXPRESSED IN ADULT LIVER, SIGNAL = 1.9; EXPRESSED IN BRAIN, SIGNAL = 1.5; EXPRESSED IN LUNG, SIGNAL = 8.2; EXPRESSED IN BONE MARROW, SIGNAL = 1.5; EXPRESSED IN HELA, SIGNAL = 2.7; SWISSPROT HIT: P20742, EVALUE 1.00e-32; EST_HUMAN HIT: BE695968.1, EVALUE 8.00e-31
SSGVAEVGVTVPDTITEWKAGAFCLSEDAGLGISSTASLRAFQPFFVELTMPYSVIRGEVFTLKATV

SEQ ID NO: 36414 - protein, 24 aa, Homo sapiens
  MAP TO AC010175.4; EXPRESSED IN HEART, SIGNAL = 1.9; EXPRESSED IN PLACENTA, SIGNAL = 2.7; EXPRESSED IN FETAL LIVER, SIGNAL = 6.4; EXPRESSED IN ADULT LIVER, SIGNAL = 1.9; EXPRESSED IN BRAIN, SIGNAL = 1.5; EXPRESSED IN LUNG, SIGNAL = 8.2; EXPRESSED IN BONE MARROW, SIGNAL = 1.5; EXPRESSED IN HELA, SIGNAL = 2.7
LRKGGLHSLFLFFTCPPPQLIRCG

SEQ ID NO: 36415 - protein, 58 aa, Homo sapiens
  MAP TO AC010892.2; EXPRESSED IN BT474, SIGNAL = 4.9; EXPRESSED IN LUNG, SIGNAL = 5.9; EXPRESSED IN HEART, SIGNAL = 4.5; EXPRESSED IN ADULT LIVER, SIGNAL = 6.5; EXPRESSED IN FETAL LIVER, SIGNAL = 6.5; EXPRESSED IN BRAIN, SIGNAL = 4.7; EXPRESSED IN BONE MARROW, SIGNAL = 4.6; EXPRESSED IN PLACENTA, SIGNAL = 6.7; EXPRESSED IN HELA, SIGNAL = 5.4; EXPRESSED IN HBL100, SIGNAL = 4.9; EST_HUMAN HIT: AI347694.1, EVALUE 6.00e-26; SWISSPROT HIT: Q58576, EVALUE 2.00e-02
NQLDESQQERNDLMQLKLQLEGQVTELRSRVQELERALATARQEHTELMEQYKVGAGP

SEQ ID NO: 36416 - protein, 45 aa, Homo sapiens
  MAP TO AC010892.2; EXPRESSED IN BT474, SIGNAL = 4.9; EXPRESSED IN LUNG, SIGNAL = 5.9; EXPRESSED IN HEART, SIGNAL = 4.5; EXPRESSED IN ADULT LIVER, SIGNAL = 6.5; EXPRESSED IN FETAL LIVER, SIGNAL = 6.5; EXPRESSED IN BRAIN, SIGNAL = 4.7; EXPRESSED IN BONE MARROW, SIGNAL = 4.6; EXPRESSED IN PLACENTA, SIGNAL = 6.7; EXPRESSED IN HELA, SIGNAL = 5.4; EXPRESSED IN HBL100, SIGNAL = 4.9; EST_HUMAN HIT: AI347694.1, EVALUE 2.00e-20; SWISSPROT HIT: P02674, EVALUE 2.40e-01
AAEATAGGTGDRAEEPSAGAREGSGNCQAGAHGADGTVQGGSWAR

SEQ ID NO: 36417 - protein, 53 aa, Homo sapiens
  MAP TO AC007322.2; EXPRESSED IN BONE MARROW, SIGNAL = 8.7; EXPRESSED IN BRAIN, SIGNAL = 7.6; EXPRESSED IN PLACENTA, SIGNAL = 5.6; EXPRESSED IN HBL100, SIGNAL = 5.7; EXPRESSED IN HELA, SIGNAL =   4; EXPRESSED IN HEART, SIGNAL = 4.2; EXPRESSED IN FETAL LIVER, SIGNAL =   7; EXPRESSED IN BT474, SIGNAL = 6.5; EXPRESSED IN ADULT LIVER, SIGNAL = 8.7; EXPRESSED IN LUNG, SIGNAL = 7.6; EST_HUMAN HIT: AA196978.1, EVALUE 3.30e-01
WKGSSAVLIADHPEQVEKGILWPSWCAPFKSGPILSQSFTFMVPYSGNQGEYF

SEQ ID NO: 36418 - protein, 39 aa, Homo sapiens
  MAP TO D87675.1; EXPRESSED IN HBL100, SIGNAL = 1.7; EXPRESSED IN HELA, SIGNAL = 1.6; EXPRESSED IN HEART, SIGNAL = 1.9; EXPRESSED IN BT474, SIGNAL = 1.5; EXPRESSED IN LUNG, SIGNAL = 4.1; EXPRESSED IN BRAIN, SIGNAL = 3.3; EXPRESSED IN PLACENTA, SIGNAL = 1.8; SWISSPROT HIT: P05067, EVALUE 3.00e-19; EST_HUMAN HIT: AU137092.1, EVALUE 4.00e-18
LQITNVVEANQPVTIQNWCKRGRKQCKTHPHFVIPYRCL

SEQ ID NO: 36419 - protein, 38 aa, Homo sapiens
  MAP TO AP000169.1; EXPRESSED IN ADULT LIVER, SIGNAL = 1.2; EXPRESSED IN HELA, SIGNAL = 1.2; EXPRESSED IN HEART, SIGNAL = 1.2; EXPRESSED IN PLACENTA, SIGNAL = 1.2; EXPRESSED IN BT474, SIGNAL = 1.1; EXPRESSED IN BONE MARROW, SIGNAL = 1.1; EXPRESSED IN FETAL LIVER, SIGNAL = 0.91; EXPRESSED IN LUNG, SIGNAL = 1.2; EXPRESSED IN BRAIN, SIGNAL = 1.2; EXPRESSED IN HBL100, SIGNAL = 0.82; SWISSPROT HIT: Q9ZKE4, EVALUE 3.60e+00
CHLSYPVPSNGGYCSTDTLVGKVRALQLKQLYYTGVQP

SEQ ID NO: 36420 - protein, 79 aa, Homo sapiens
  MAP TO AC007271.2; EXPRESSED IN ADULT LIVER, SIGNAL =  11; EXPRESSED IN BONE MARROW, SIGNAL = 9.6; EXPRESSED IN PLACENTA, SIGNAL = 9.6; EXPRESSED IN BT474, SIGNAL = 8.2; EXPRESSED IN FETAL LIVER, SIGNAL =  11; EXPRESSED IN BRAIN, SIGNAL = 8.5; EXPRESSED IN LUNG, SIGNAL =  12; EXPRESSED IN HEART, SIGNAL = 7.7; EXPRESSED IN HELA, SIGNAL =  10; EXPRESSED IN HBL100, SIGNAL = 9.1; EST_HUMAN HIT: AW262008.1, EVALUE 2.00e-38; SWISSPROT HIT: P14778, EVALUE 7.00e-40
VKKSRRLIIILVRETSGFSWLGGSSEEQIAMYNALVQDGIKVVLLELEKIQDYEKMPESIKFIKQKHGAIRWSGDFTQG

SEQ ID NO: 36421 - protein, 195 aa, Homo sapiens
  MAP TO AC010680.3; EXPRESSED IN HEART, SIGNAL = 3.3; EXPRESSED IN ADULT LIVER, SIGNAL = 1.2; EXPRESSED IN FETAL LIVER, SIGNAL = 0.92; EST_HUMAN HIT: BE712539.1, EVALUE 1.00e-59; SWISSPROT HIT: Q00872, EVALUE 8.00e-25
APDLDLKGLPDLCYLAKENSNFRLKIPIKGKPAPSVSWKKGEDPLATDTRVSVESSAVNTTLIVYDCQKSDAGKYTITLKNVAGTKEGTISIKVVGKPGIPTGPIKFDEVTAEAMTLKWAPPKDDGGSEITNYILEKRDSVNNKWVTCASAVQKTTFRVTRLHEGMEYTFRVSAENKYGVGEGLKSEPIVARHPF

SEQ ID NO: 36422 - protein, 20 aa, Homo sapiens
  MAP TO AC010680.3; EXPRESSED IN HEART, SIGNAL = 3.3; EXPRESSED IN ADULT LIVER, SIGNAL = 1.2; EXPRESSED IN FETAL LIVER, SIGNAL = 0.92; EST_HUMAN HIT: BE712539.1, EVALUE 2.00e-04
VYLICATWLKKTATSGLRSP

SEQ ID NO: 36423 - protein, 56 aa, Homo sapiens
  MAP TO AL109942.4; EXPRESSED IN PLACENTA, SIGNAL = 1.6; EXPRESSED IN HBL100, SIGNAL = 1.7; EXPRESSED IN ADULT LIVER, SIGNAL = 1.6; EXPRESSED IN BT474, SIGNAL =  11; EXPRESSED IN BONE MARROW, SIGNAL = 1.4; EXPRESSED IN BRAIN, SIGNAL = 1.7; EXPRESSED IN HEART, SIGNAL = 1.3; EXPRESSED IN FETAL LIVER, SIGNAL = 1.3; EXPRESSED IN LUNG, SIGNAL = 1.4; EXPRESSED IN HELA, SIGNAL = 1.6; SWISSPROT HIT: O57713, EVALUE 7.70e+00; EST_HUMAN HIT: AW005517.1, EVALUE 3.00e-28
LVMLLEWWSGTECTIFTDPRAYLKYGKENAIVVLNHKFEIDFLCGWSLSERFGLLG

SEQ ID NO: 36424 - protein, 21 aa, Homo sapiens
  MAP TO AL109942.4; EXPRESSED IN PLACENTA, SIGNAL = 1.6; EXPRESSED IN HBL100, SIGNAL = 1.7; EXPRESSED IN ADULT LIVER, SIGNAL = 1.6; EXPRESSED IN BT474, SIGNAL =  11; EXPRESSED IN BONE MARROW, SIGNAL = 1.4; EXPRESSED IN BRAIN, SIGNAL = 1.7; EXPRESSED IN HEART, SIGNAL = 1.3; EXPRESSED IN FETAL LIVER, SIGNAL = 1.3; EXPRESSED IN LUNG, SIGNAL = 1.4; EXPRESSED IN HELA, SIGNAL = 1.6; EST_HUMAN HIT: AW005517.1, EVALUE 1.00e-04
LTAQSVRTGSSHTESQFQTCG

SEQ ID NO: 36425 - protein, 63 aa, Homo sapiens
  MAP TO AC008132.26; EXPRESSED IN HBL100, SIGNAL = 2.4; EXPRESSED IN HEART, SIGNAL = 2.5; EXPRESSED IN BT474, SIGNAL = 2.7; EXPRESSED IN BRAIN, SIGNAL =   2; EXPRESSED IN BONE MARROW, SIGNAL = 1.7; EXPRESSED IN PLACENTA, SIGNAL =   3; EXPRESSED IN HELA, SIGNAL = 2.9; EXPRESSED IN ADULT LIVER, SIGNAL = 3.3; EXPRESSED IN FETAL LIVER, SIGNAL = 2.9; EXPRESSED IN LUNG, SIGNAL = 3.1; EST_HUMAN HIT: AI906419.1, EVALUE 8.00e-24; SWISSPROT HIT: P19440, EVALUE 8.00e-31
GLSVAVPGEIRGYELAHQRHGRLPWARLFQPSIQLARQGFPVGKGLAAVLENKRTVIEQQPVL

SEQ ID NO: 36426 - protein, 35 aa, Homo sapiens
  MAP TO AP000264.1; EXPRESSED IN HBL100, SIGNAL = 0.83; EXPRESSED IN HELA, SIGNAL = 1.3; EXPRESSED IN ADULT LIVER, SIGNAL = 0.98; EXPRESSED IN BRAIN, SIGNAL = 1.1; EXPRESSED IN HEART, SIGNAL = 0.97; EXPRESSED IN PLACENTA, SIGNAL = 1.3; EXPRESSED IN FETAL LIVER, SIGNAL = 0.93; EXPRESSED IN LUNG, SIGNAL = 1.1; EXPRESSED IN BONE MARROW, SIGNAL = 1.1; EXPRESSED IN BT474, SIGNAL =   1; SWISSPROT HIT: P55200, EVALUE 6.20e+00; EST_HUMAN HIT: AW081289.1, EVALUE 2.60e-01
NRCPTCTSCWRCTNARSSPPTTGWAPSADTLVAVP

SEQ ID NO: 36427 - protein, 27 aa, Homo sapiens
  MAP TO AP000264.1; EXPRESSED IN HBL100, SIGNAL = 0.83; EXPRESSED IN HELA, SIGNAL = 1.3; EXPRESSED IN ADULT LIVER, SIGNAL = 0.98; EXPRESSED IN BRAIN, SIGNAL = 1.1; EXPRESSED IN HEART, SIGNAL = 0.97; EXPRESSED IN PLACENTA, SIGNAL = 1.3; EXPRESSED IN FETAL LIVER, SIGNAL = 0.93; EXPRESSED IN LUNG, SIGNAL = 1.1; EXPRESSED IN BONE MARROW, SIGNAL = 1.1; EXPRESSED IN BT474, SIGNAL =   1
QMSHLHFMLEMHKCALIPAHYRLGSLR

SEQ ID NO: 36428 - protein, 59 aa, Homo sapiens [sequence omitted]

SEQ ID NO: 36429 - protein, 77 aa, Homo sapiens
  MAP TO AC007993.8; EXPRESSED IN HBL100, SIGNAL = 6.2; EXPRESSED IN HELA, SIGNAL =   7; EXPRESSED IN PLACENTA, SIGNAL = 5.6; EXPRESSED IN HEART, SIGNAL =   6; EXPRESSED IN BT474, SIGNAL = 5.7; EXPRESSED IN FETAL LIVER, SIGNAL = 6.8; EXPRESSED IN ADULT LIVER, SIGNAL = 6.9; EXPRESSED IN LUNG, SIGNAL = 7.3; EXPRESSED IN BONE MARROW, SIGNAL = 8.2; EXPRESSED IN BRAIN, SIGNAL = 7.9; EST_HUMAN HIT: BE535310.1, EVALUE 3.00e-01; SWISSPROT HIT: P28629, EVALUE 3.10e+00
MPELELALQAEVHGVPQGLSQAGLPPAELLLLPGQLQQVTLLQVGPALCWGHRSAQSWEGHQDLPPGQAGDGERTET

SEQ ID NO: 36430 - protein, 70 aa, Homo sapiens
  MAP TO AC007993.8; EXPRESSED IN HBL100, SIGNAL = 6.2; EXPRESSED IN HELA, SIGNAL =   7; EXPRESSED IN PLACENTA, SIGNAL = 5.6; EXPRESSED IN HEART, SIGNAL =   6; EXPRESSED IN BT474, SIGNAL = 5.7; EXPRESSED IN FETAL LIVER, SIGNAL = 6.8; EXPRESSED IN ADULT LIVER, SIGNAL = 6.9; EXPRESSED IN LUNG, SIGNAL = 7.3; EXPRESSED IN BONE MARROW, SIGNAL = 8.2; EXPRESSED IN BRAIN, SIGNAL = 7.9; EST_HUMAN HIT: BE382983.1, EVALUE 1.40e+00; SWISSPROT HIT: O42280, EVALUE 2.00e-08
SSLTRWEVLMPFPGLGTAVAPAQGRAHLKQCDLLKLSRQQKQLCGREPSLAETLWDAMHLGLECQFQFRH

SEQ ID NO: 36431 - protein, 33 aa, Homo sapiens
  MAP TO AC007274.1; EXPRESSED IN PLACENTA, SIGNAL = 1.8; EXPRESSED IN HBL100, SIGNAL =   2; EXPRESSED IN HELA, SIGNAL = 2.5; EXPRESSED IN HEART, SIGNAL = 2.1; EXPRESSED IN BT474, SIGNAL = 1.8; EXPRESSED IN FETAL LIVER, SIGNAL = 2.3; EXPRESSED IN ADULT LIVER, SIGNAL = 1.7; EXPRESSED IN BONE MARROW, SIGNAL = 1.9; EXPRESSED IN BRAIN, SIGNAL = 2.1; EXPRESSED IN LUNG, SIGNAL = 2.5; SWISSPROT HIT: Q64707, EVALUE 2.50e-01
ESQQQLDIEWNHQQKKSQQLDLEKIPENEEHKD

SEQ ID NO: 36432 - protein, 30 aa, Homo sapiens
  MAP TO AL121590.7; EXPRESSED IN LUNG, SIGNAL = 2.4; EXPRESSED IN HELA, SIGNAL =   2; EXPRESSED IN PLACENTA, SIGNAL = 2.9; EXPRESSED IN ADULT LIVER, SIGNAL = 2.7; EXPRESSED IN BT474, SIGNAL = 2.4; EXPRESSED IN BONE MARROW, SIGNAL = 1.5; EXPRESSED IN HBL100, SIGNAL = 2.1; EXPRESSED IN HEART, SIGNAL =   2; EXPRESSED IN FETAL LIVER, SIGNAL = 2.2; EXPRESSED IN BRAIN, SIGNAL = 1.8; EST_HUMAN HIT: AI523766.1, EVALUE 7.00e-11; SWISSPROT HIT: P15863, EVALUE 7.00e-12
KMEDWAGVNRTAFPATPAVNGLEKPALEAD

SEQ ID NO: 36433 - protein, 33 aa, Homo sapiens
  MAP TO AL109798.13; EXPRESSED IN BRAIN, SIGNAL =   2; EXPRESSED IN LUNG, SIGNAL = 1.6; EXPRESSED IN HELA, SIGNAL = 1.8; EXPRESSED IN PLACENTA, SIGNAL = 1.8; EXPRESSED IN HEART, SIGNAL = 1.9; EXPRESSED IN FETAL LIVER, SIGNAL = 1.9; EXPRESSED IN ADULT LIVER, SIGNAL = 2.1; EXPRESSED IN BT474, SIGNAL = 2.4; EXPRESSED IN BONE MARROW, SIGNAL =   2; EXPRESSED IN HBL100, SIGNAL = 2.2
VLTLMELYILLVEKKYETIILYFVMKEGKRMID

SEQ ID NO: 36434 - protein, 77 aa, Homo sapiens
  MAP TO AC008018.18; EXPRESSED IN LUNG, SIGNAL = 2.1; EXPRESSED IN BONE MARROW, SIGNAL = 2.3; EXPRESSED IN BRAIN, SIGNAL = 2.2; EXPRESSED IN PLACENTA, SIGNAL = 2.4; EXPRESSED IN HBL100, SIGNAL = 1.9; EXPRESSED IN HELA, SIGNAL =   2; EXPRESSED IN HEART, SIGNAL =   2; EXPRESSED IN FETAL LIVER, SIGNAL = 1.9; EXPRESSED IN BT474, SIGNAL =   2; EXPRESSED IN ADULT LIVER, SIGNAL = 2.2; EST_HUMAN HIT: BE965190.2, EVALUE 1.20e-01; SWISSPROT HIT: P02919, EVALUE 2.60e+00
GALREATLQEAEYEVGKMDRPYPHHPPYESPLVWMVSPLWWEVCDFSISISLLFGLPRNSELGVKFPIPTDKQHPQQ

SEQ ID NO: 36435 - protein, 41 aa, Homo sapiens
  MAP TO AC008018.18; EXPRESSED IN LUNG, SIGNAL = 2.1; EXPRESSED IN BONE MARROW, SIGNAL = 2.3; EXPRESSED IN BRAIN, SIGNAL = 2.2; EXPRESSED IN PLACENTA, SIGNAL = 2.4; EXPRESSED IN HBL100, SIGNAL = 1.9; EXPRESSED IN HELA, SIGNAL =   2; EXPRESSED IN HEART, SIGNAL =   2; EXPRESSED IN FETAL LIVER, SIGNAL = 1.9; EXPRESSED IN BT474, SIGNAL =   2; EXPRESSED IN ADULT LIVER, SIGNAL = 2.2; SWISSPROT HIT: P37780, EVALUE 2.10e+00; EST_HUMAN HIT: R28491.1, EVALUE 2.10e+00
APSGRPHCRRQSMRWGRWIGLILTTPHTSLLWYGWCLLSGG

SEQ ID NO: 36436 - protein, 54 aa, Homo sapiens
  MAP TO AC010149.1; EXPRESSED IN BT474, SIGNAL = 0.95; EXPRESSED IN HBL100, SIGNAL = 1.3; EXPRESSED IN HEART, SIGNAL = 0.91; EST_HUMAN HIT: AV724371.1, EVALUE 5.00e-25; SWISSPROT HIT: P23497, EVALUE 4.00e-26
MFTEDQGVDDRLLYDIVFKHFKRNKVEISNAIKKTFPFLEGLRDRDLITNKMFE

SEQ ID NO: 36437 - protein, 38 aa, Homo sapiens
  MAP TO AC008854.2; EXPRESSED IN BT474, SIGNAL = 4.2; EXPRESSED IN ADULT LIVER, SIGNAL =   4; EXPRESSED IN PLACENTA, SIGNAL = 3.3; EXPRESSED IN HELA, SIGNAL =   4; EXPRESSED IN BRAIN, SIGNAL = 3.9; EXPRESSED IN LUNG, SIGNAL = 4.1; EXPRESSED IN BONE MARROW, SIGNAL = 3.4; EXPRESSED IN HEART, SIGNAL = 3.6; EXPRESSED IN HBL100, SIGNAL = 3.8; EXPRESSED IN FETAL LIVER, SIGNAL = 3.8; SWISSPROT HIT: Q63425, EVALUE 2.80e+00
TWPVALLPTRSLPHVTLPHQQLESMADDFLRLPRVPLS

SEQ ID NO: 36438 - protein, 136 aa, Homo sapiens
  MAP TO AC007349.1; EXPRESSED IN BT474, SIGNAL = 6.3; EXPRESSED IN FETAL LIVER, SIGNAL = 2.9; EXPRESSED IN ADULT LIVER, SIGNAL = 1.2; EXPRESSED IN LUNG, SIGNAL = 3.1; EXPRESSED IN BONE MARROW, SIGNAL = 3.9; EXPRESSED IN BRAIN, SIGNAL = 3.2; EXPRESSED IN HELA, SIGNAL =  11; EXPRESSED IN PLACENTA, SIGNAL = 4.5; EXPRESSED IN HBL100, SIGNAL =  13; EXPRESSED IN HEART, SIGNAL = 2.4; SWISSPROT HIT: P06748, EVALUE 5.00e-58; EST_HUMAN HIT: BF687934.1, EVALUE 4.00e-57
SMDMDMSPLRPQNNLFRCELKADNHFQVDNDENEHQLSSRTVSSGAGAKDELHIVEAEAMNYEGSPIKVTLATLKMSVQPTVSLGGFEITPPVVLRLKCGSGPVHISGQHLVTVEEDSEAEDEEQEDVKLLSIYGK

SEQ ID NO: 36439 - protein, 32 aa, Homo sapiens
  MAP TO AC008082.12; EXPRESSED IN PLACENTA, SIGNAL = 1.7; EXPRESSED IN HBL100, SIGNAL = 1.6; EXPRESSED IN HEART, SIGNAL = 1.6; EXPRESSED IN LUNG, SIGNAL = 1.7; EXPRESSED IN BRAIN, SIGNAL =   2; EXPRESSED IN HELA, SIGNAL = 1.7; EXPRESSED IN BT474, SIGNAL = 1.4; EXPRESSED IN ADULT LIVER, SIGNAL = 1.9; EXPRESSED IN FETAL LIVER, SIGNAL = 1.7; EXPRESSED IN BONE MARROW, SIGNAL = 1.8
NSRVRKVILNMLDDEKVFKIFEPVSGMIRAVP

SEQ ID NO: 36440 - protein, 87 aa, Homo sapiens
  MAP TO L78810.1; EXPRESSED IN LUNG, SIGNAL = 3.2; EXPRESSED IN HBL100, SIGNAL =  10; EXPRESSED IN FETAL LIVER, SIGNAL = 2.3; EXPRESSED IN BONE MARROW, SIGNAL = 1.5; EXPRESSED IN PLACENTA, SIGNAL = 1.9; EXPRESSED IN HEART, SIGNAL = 2.2; EXPRESSED IN HELA, SIGNAL = 7.3; EXPRESSED IN BT474, SIGNAL = 2.7; EXPRESSED IN ADULT LIVER, SIGNAL = 1.1; EXPRESSED IN BRAIN, SIGNAL =   2; SWISSPROT HIT: P05141, EVALUE 6.00e-38; EST_HUMAN HIT: AW935235.1, EVALUE 5.00e-37
FAGNLASGGAAGATSLCFVYPLDFARTRLAADVGKAGAEREFRGLGDCLVKIYKSDGIKGLYQGFNVSVQGIIIYRAAYFGIYDTAK

SEQ ID NO: 36441 - protein, 27 aa, Homo sapiens
  MAP TO AC008929.2; EXPRESSED IN HBL100, SIGNAL =   2; EXPRESSED IN HEART, SIGNAL = 2.5; EXPRESSED IN FETAL LIVER, SIGNAL = 2.6; EXPRESSED IN BONE MARROW, SIGNAL =   2; EXPRESSED IN PLACENTA, SIGNAL = 2.3; EXPRESSED IN HELA, SIGNAL = 2.9; EXPRESSED IN BT474, SIGNAL = 2.9; EXPRESSED IN ADULT LIVER, SIGNAL =   2; EXPRESSED IN BRAIN, SIGNAL = 1.9; EXPRESSED IN LUNG, SIGNAL = 2.3; EST_HUMAN HIT: AI141943.1, EVALUE 6.00e-05
VMKRGWKSLEGSEEDRKMRESLEFLKD

SEQ ID NO: 36442 - protein, 39 aa, Homo sapiens
  MAP TO AL118501.4; EXPRESSED IN HELA, SIGNAL = 1.3; EXPRESSED IN PLACENTA, SIGNAL = 1.2; EXPRESSED IN HBL100, SIGNAL = 1.4; EXPRESSED IN ADULT LIVER, SIGNAL = 1.4; EXPRESSED IN HEART, SIGNAL = 1.4; EXPRESSED IN BT474, SIGNAL = 1.7; EXPRESSED IN FETAL LIVER, SIGNAL = 1.3; EXPRESSED IN BONE MARROW, SIGNAL = 1.5; EXPRESSED IN BRAIN, SIGNAL = 1.6; EXPRESSED IN LUNG, SIGNAL = 1.5; EST_HUMAN HIT: N26446.1, EVALUE 7.00e-10; SWISSPROT HIT: O33952, EVALUE 8.10e+00
GLFIFQTRDGEAIYQKVHSAALAIAEQHERLLQSVKNSM

SEQ ID NO: 36443 - protein, 68 aa, Homo sapiens
  MAP TO AC011112.2; EXPRESSED IN BONE MARROW, SIGNAL = 1.4; EXPRESSED IN HEART, SIGNAL = 1.5; EXPRESSED IN BT474, SIGNAL = 1.9; EXPRESSED IN LUNG, SIGNAL = 1.5; EXPRESSED IN BRAIN, SIGNAL = 1.6; EXPRESSED IN PLACENTA, SIGNAL = 1.5; EXPRESSED IN HELA, SIGNAL = 1.5; EXPRESSED IN HBL100, SIGNAL = 1.4; EXPRESSED IN ADULT LIVER, SIGNAL = 1.7; EXPRESSED IN FETAL LIVER, SIGNAL = 1.6; EST_HUMAN HIT: AW014292.1, EVALUE 9.40e-01; SWISSPROT HIT: Q9WTJ2, EVALUE 5.10e-01
FDISYQRPCSILWCLMIPQVSIDAWTECPTATTASVLDSSRALSSAPCVLAYNQTGSATIMTVNKPEK

SEQ ID NO: 36444 - protein, 61 aa, Homo sapiens
  MAP TO AC010099.3; EXPRESSED IN BT474, SIGNAL = 2.2; EXPRESSED IN BRAIN, SIGNAL =   2; EXPRESSED IN HELA, SIGNAL = 1.4; EXPRESSED IN HEART, SIGNAL = 1.4; EXPRESSED IN PLACENTA, SIGNAL = 1.4; EXPRESSED IN ADULT LIVER, SIGNAL = 1.3; EXPRESSED IN FETAL LIVER, SIGNAL = 1.7; EXPRESSED IN LUNG, SIGNAL = 1.2; EXPRESSED IN BONE MARROW, SIGNAL = 1.6; EXPRESSED IN HBL100, SIGNAL =   2
HWQWQWWWWHTDDNGADDGGDGSYGTGADGGGGYGDGGSNGCDGDTDGVCGNGSARGRSSG

SEQ ID NO: 36445 - protein, 48 aa, Homo sapiens
  MAP TO AC010099.3; EXPRESSED IN BT474, SIGNAL = 2.2; EXPRESSED IN BRAIN, SIGNAL =   2; EXPRESSED IN HELA, SIGNAL = 1.4; EXPRESSED IN HEART, SIGNAL = 1.4; EXPRESSED IN PLACENTA, SIGNAL = 1.4; EXPRESSED IN ADULT LIVER, SIGNAL = 1.3; EXPRESSED IN FETAL LIVER, SIGNAL = 1.7; EXPRESSED IN LUNG, SIGNAL = 1.2; EXPRESSED IN BONE MARROW, SIGNAL = 1.6; EXPRESSED IN HBL100, SIGNAL =   2
GIGNGSGGGGILMIMVLMMVEMVVMVQVLMVVVVMVTVVVMVVMVILM

SEQ ID NO: 36446 - protein, 249 aa, Homo sapiens
  MAP TO AC006111.2; EXPRESSED IN BONE MARROW, SIGNAL = 0.98; EXPRESSED IN BRAIN, SIGNAL = 0.85; EXPRESSED IN PLACENTA, SIGNAL = 0.76; EXPRESSED IN BT474, SIGNAL = 0.79; EXPRESSED IN LUNG, SIGNAL = 0.8; EXPRESSED IN HELA, SIGNAL = 0.97; EXPRESSED IN ADULT LIVER, SIGNAL = 1.1; EXPRESSED IN HEART, SIGNAL = 0.82; EXPRESSED IN HBL100, SIGNAL = 0.8; EXPRESSED IN FETAL LIVER, SIGNAL = 0.96; EST_HUMAN HIT: AA700065.1, EVALUE 6.00e-26; SWISSPROT HIT: Q92793, EVALUE 1.00e-47
YREMLRRQLLQQQQQQQQQQQQQQQQQQGSAGMAGGMAGHGQFQQPQGPGGYPPAMQQQQRMQQHLPLQGSSMGQMAAQMGQLGQMGQPGLGADSTPNIQQALQQRILQQQQMKQQIGSPGQPNPMSPQQHMLSGQPQASHLPGQQIATSLSNQVRSPAPVQSPRPQSQPPHSSPSPRIQPQPSPHHVSPQTGSPHPGLAVTMASSIDQGHLGNPEQSAMLPQLNTPSRSALSSELSLVGDTTGDTLEK

SEQ ID NO: 36447 - protein, 43 aa, Homo sapiens
  MAP TO AC006111.2; EXPRESSED IN BONE MARROW, SIGNAL = 0.98; EXPRESSED IN BRAIN, SIGNAL = 0.85; EXPRESSED IN PLACENTA, SIGNAL = 0.76; EXPRESSED IN BT474, SIGNAL = 0.79; EXPRESSED IN LUNG, SIGNAL = 0.8; EXPRESSED IN HELA, SIGNAL = 0.97; EXPRESSED IN ADULT LIVER, SIGNAL = 1.1; EXPRESSED IN HEART, SIGNAL = 0.82; EXPRESSED IN HBL100, SIGNAL = 0.8; EXPRESSED IN FETAL LIVER, SIGNAL = 0.96
LSSNSAQPSTWPISPACSPSLASSPSPACNPSLACTSSPACRT

SEQ ID NO: 36448 - protein, 203 aa, Homo sapiens
  MAP TO AC004230.1; EXPRESSED IN BT474, SIGNAL =  35; EXPRESSED IN FETAL LIVER, SIGNAL = 4.6; EXPRESSED IN ADULT LIVER, SIGNAL = 6.9; EXPRESSED IN BRAIN, SIGNAL = 3.1; EXPRESSED IN BONE MARROW, SIGNAL = 3.3; EXPRESSED IN LUNG, SIGNAL =  93; EXPRESSED IN PLACENTA, SIGNAL =  29; EXPRESSED IN HELA, SIGNAL = 7.4; EXPRESSED IN HEART, SIGNAL =  26; EXPRESSED IN HBL100, SIGNAL = 2.9; EST_HUMAN HIT: BF094607.1, EVALUE 7.00e-85; SWISSPROT HIT: gi1351901, EVALUE 1.00e-100
EGDLKGPEVDIKGPKVDIDTPDINIEGSEGKFKGPKFKIPEMHLKAPKISMPDIDLNLKGPKVKGDVDVSLPKMEGDLKGPEVDIKGPKVDINAPDVDVQGPDWHLKMPKVKMPKFSMPGFKGEGPDVDVNLPKADLDVSGPKVDIDVPDVNIEGPEGKLKGPKFKMPEMNIKAPKISMPDIDLNLKGPKVKGDMDVSLPKVE

SEQ ID NO: 36449 - protein, 35 aa, Homo sapiens
  MAP TO AC010130.3; EXPRESSED IN HELA, SIGNAL = 1.5; EXPRESSED IN PLACENTA, SIGNAL = 2.1; EXPRESSED IN HBL100, SIGNAL = 1.6; EXPRESSED IN LUNG, SIGNAL = 1.8; EXPRESSED IN BRAIN, SIGNAL = 1.5; EXPRESSED IN HEART, SIGNAL = 1.2; EXPRESSED IN BT474, SIGNAL =   2; EXPRESSED IN ADULT LIVER, SIGNAL = 1.1; EXPRESSED IN FETAL LIVER, SIGNAL = 1.2; EXPRESSED IN BONE MARROW, SIGNAL = 1.5
DSQLGVGADPQKPLRAVVIDLSLKVVKRSAMGRLC

SEQ ID NO: 36450 - protein, 19 aa, Homo sapiens
  MAP TO AC010130.3; EXPRESSED IN HELA, SIGNAL = 1.5; EXPRESSED IN PLACENTA, SIGNAL = 2.1; EXPRESSED IN HBL100, SIGNAL = 1.6; EXPRESSED IN LUNG, SIGNAL = 1.8; EXPRESSED IN BRAIN, SIGNAL = 1.5; EXPRESSED IN HEART, SIGNAL = 1.2; EXPRESSED IN BT474, SIGNAL =   2; EXPRESSED IN ADULT LIVER, SIGNAL = 1.1; EXPRESSED IN FETAL LIVER, SIGNAL = 1.2; EXPRESSED IN BONE MARROW, SIGNAL = 1.5
GQSAGGGCRSTKALEGSGD

SEQ ID NO: 36451 - protein, 78 aa, Homo sapiens
  MAP TO AC011899.2; EXPRESSED IN PLACENTA, SIGNAL = 2.5; EXPRESSED IN ADULT LIVER, SIGNAL =   3; EXPRESSED IN BT474, SIGNAL = 1.8; EXPRESSED IN FETAL LIVER, SIGNAL = 2.1; EXPRESSED IN BRAIN, SIGNAL = 1.6; EXPRESSED IN HBL100, SIGNAL = 1.6; EXPRESSED IN HELA, SIGNAL = 2.2; EXPRESSED IN HEART, SIGNAL =   2; EXPRESSED IN LUNG, SIGNAL = 2.3; EXPRESSED IN BONE MARROW, SIGNAL = 1.3; SWISSPROT HIT: P39060, EVALUE 4.90e+00; EST_HUMAN HIT: T49595.1, EVALUE 5.80e-01
QSLQGCLTSSRSSQSAAISWVLHPSCGPGSPTAVISHQSEEVRSILYSAGLTWQILSGWAGTKAGFFHPYAETCFCWR

SEQ ID NO: 36452 - protein, 39 aa, Homo sapiens
  MAP TO AC010882.2; EXPRESSED IN BONE MARROW, SIGNAL = 4.9; EXPRESSED IN LUNG, SIGNAL = 5.5; EXPRESSED IN BRAIN, SIGNAL = 5.9; EXPRESSED IN HELA, SIGNAL = 4.9; EXPRESSED IN HEART, SIGNAL = 4.3; EXPRESSED IN PLACENTA, SIGNAL = 5.2; EXPRESSED IN HBL100, SIGNAL = 5.3; EXPRESSED IN ADULT LIVER, SIGNAL = 6.6; EXPRESSED IN BT474, SIGNAL = 5.3; EXPRESSED IN FETAL LIVER, SIGNAL = 4.9; EST_HUMAN HIT: BE745836.1, EVALUE 2.00e-11; SWISSPROT HIT: Q62048, EVALUE 1.00e-12
MAGYGTLLQDLTNNITLKDLKQHKSTCKKDIPSEKSEEI

SEQ ID NO: 36453 - protein, 34 aa, Homo sapiens
  MAP TO AC010149.2; EXPRESSED IN BT474, SIGNAL =   5; EXPRESSED IN FETAL LIVER, SIGNAL = 2.6; EXPRESSED IN BRAIN, SIGNAL =   3; EXPRESSED IN HELA, SIGNAL = 5.8; EXPRESSED IN PLACENTA, SIGNAL = 3.7; EXPRESSED IN ADULT LIVER, SIGNAL = 2.1; EXPRESSED IN LUNG, SIGNAL = 3.5; EXPRESSED IN BONE MARROW, SIGNAL = 3.9; EXPRESSED IN HEART, SIGNAL = 2.4; EXPRESSED IN HBL100, SIGNAL = 4.6; SWISSPROT HIT: P49437, EVALUE 8.20e+00
IQLVEEELDHAQEYLATALQKLEEAEKAADESER

SEQ ID NO: 36454 - protein, 26 aa, Homo sapiens
  MAP TO AC007449.1; EXPRESSED IN PLACENTA, SIGNAL = 2.9; EXPRESSED IN HELA, SIGNAL = 3.2; EXPRESSED IN HBL100, SIGNAL = 3.6; EXPRESSED IN HEART, SIGNAL = 3.1; EXPRESSED IN BT474, SIGNAL = 3.9; EXPRESSED IN FETAL LIVER, SIGNAL = 2.7; EXPRESSED IN ADULT LIVER, SIGNAL = 2.7; EXPRESSED IN BONE MARROW, SIGNAL = 4.7; EXPRESSED IN LUNG, SIGNAL =   3; EXPRESSED IN BRAIN, SIGNAL = 4.2
  unsure 2
RXKIYSRPKGDSASCRQCKPYYFLLS

SEQ ID NO: 36455 - protein, 48 aa, Homo sapiens
  MAP TO AL121831.8; EXPRESSED IN ADULT LIVER, SIGNAL = 2.9; EXPRESSED IN BT474, SIGNAL =   3; EXPRESSED IN FETAL LIVER, SIGNAL = 3.1; EXPRESSED IN BRAIN, SIGNAL = 2.7; EXPRESSED IN BONE MARROW, SIGNAL = 2.6; EXPRESSED IN HBL100, SIGNAL = 2.7; EXPRESSED IN PLACENTA, SIGNAL = 2.4; EXPRESSED IN LUNG, SIGNAL = 3.4; EXPRESSED IN HEART, SIGNAL = 2.4; EXPRESSED IN HELA, SIGNAL = 2.5; EST_HUMAN HIT: AI026655.1, EVALUE 2.00e-19; SWISSPROT HIT: P19440, EVALUE 3.00e-20
EVTAALETRHHHTQITSTFIAVVQAIVRMAGGWAAASDSRKGGEPAGY

SEQ ID NO: 36456 - protein, 208 aa, Homo sapiens
  MAP TO AC004827.1; EXPRESSED IN BT474, SIGNAL = 5.7; EXPRESSED IN FETAL LIVER, SIGNAL = 4.1; EXPRESSED IN BRAIN, SIGNAL = 5.4; EXPRESSED IN BONE MARROW, SIGNAL = 3.6; EXPRESSED IN LUNG, SIGNAL = 7.7; EXPRESSED IN HBL100, SIGNAL = 5.5; EXPRESSED IN HELA, SIGNAL = 5.8; EXPRESSED IN PLACENTA, SIGNAL = 8.4; EXPRESSED IN ADULT LIVER, SIGNAL = 1.9; EXPRESSED IN HEART, SIGNAL = 4.5; EST_HUMAN HIT: AI796861.1, EVALUE 2.00e-07
CPGGIRSLLISLLCALLPQCLRREINPHLPFMFYRPAQDISLPLSARNSQPHSPTSSLTSGGSLPLLQSPPSTRLSPARHPLVPNQGDHSAHLPRPQQHFLPNQAHQGDHYRLSQPGLSQQQQQQQQQHHHHHHHQQQQQQQPQQQPGEAYSAMPRAQPSSASYQPVPADPFAIVSRAQQMVEILSDENRNLRQELEGCYEKVARLQK

SEQ ID NO: 36457 - protein, 21 aa, Homo sapiens
  MAP TO AC004827.1; EXPRESSED IN BT474, SIGNAL = 5.7; EXPRESSED IN FETAL LIVER, SIGNAL = 4.1; EXPRESSED IN BRAIN, SIGNAL = 5.4; EXPRESSED IN BONE MARROW, SIGNAL = 3.6; EXPRESSED IN LUNG, SIGNAL = 7.7; EXPRESSED IN HBL100, SIGNAL = 5.5; EXPRESSED IN HELA, SIGNAL = 5.8; EXPRESSED IN PLACENTA, SIGNAL = 8.4; EXPRESSED IN ADULT LIVER, SIGNAL = 1.9; EXPRESSED IN HEART, SIGNAL = 4.5
LLPLFPEPSRWLRSSQTRTGT

SEQ ID NO: 36458 - protein, 38 aa, Homo sapiens
  MAP TO AC011995.2; EXPRESSED IN BONE MARROW, SIGNAL = 3.1; EXPRESSED IN ADULT LIVER, SIGNAL = 5.2; EXPRESSED IN BT474, SIGNAL = 3.1; EXPRESSED IN BRAIN, SIGNAL = 2.9; EXPRESSED IN LUNG, SIGNAL = 4.3; EXPRESSED IN PLACENTA, SIGNAL = 3.9; EXPRESSED IN HEART, SIGNAL =   3; EXPRESSED IN HELA, SIGNAL = 3.6; EXPRESSED IN HBL100, SIGNAL = 3.2; EXPRESSED IN FETAL LIVER, SIGNAL =   4; SWISSPROT HIT: O68906, EVALUE 2.10e+00
MSPLVGPCLTPQRLSMTVKVEQGSPQSEALLCTSEQDE

SEQ ID NO: 36459 - protein, 25 aa, Homo sapiens
  MAP TO AC010183.6; EXPRESSED IN PLACENTA, SIGNAL = 3.8; EXPRESSED IN HBL100, SIGNAL = 3.7; EXPRESSED IN BT474, SIGNAL = 3.1; EXPRESSED IN LUNG, SIGNAL = 3.4; EXPRESSED IN BRAIN, SIGNAL = 2.7; EXPRESSED IN HEART, SIGNAL = 2.9; EXPRESSED IN HELA, SIGNAL = 3.4; EXPRESSED IN ADULT LIVER, SIGNAL =   4; EXPRESSED IN FETAL LIVER, SIGNAL = 3.1; EXPRESSED IN BONE MARROW, SIGNAL = 3.2
GRQHQGLPLRGFEKVRDQVESCIWS

SEQ ID NO: 36460 - protein, 29 aa, Homo sapiens
  MAP TO AC011998.2; EXPRESSED IN ADULT LIVER, SIGNAL = 4.8; EXPRESSED IN BT474, SIGNAL =   4; EXPRESSED IN FETAL LIVER, SIGNAL = 3.7; EXPRESSED IN BONE MARROW, SIGNAL = 2.6; EXPRESSED IN LUNG, SIGNAL = 3.3; EXPRESSED IN BRAIN, SIGNAL = 3.3; EXPRESSED IN HELA, SIGNAL = 3.4; EXPRESSED IN PLACENTA, SIGNAL = 3.9; EXPRESSED IN HBL100, SIGNAL =   3; EXPRESSED IN HEART, SIGNAL = 2.7; SWISSPROT HIT: P19535, EVALUE 8.30e+00; EST_HUMAN HIT: W94837.1, EVALUE 2.40e+00
KCSFNLTQSGPQPQSHPVTACRQSPGPLS

SEQ ID NO: 36461 - protein, 35 aa, Homo sapiens
  MAP TO AC008283.2; EXPRESSED IN HBL100, SIGNAL = 2.5; EXPRESSED IN FETAL LIVER, SIGNAL = 0.67; EXPRESSED IN BRAIN, SIGNAL = 3.7; EXPRESSED IN BONE MARROW, SIGNAL = 0.8; EXPRESSED IN HELA, SIGNAL = 0.6; EXPRESSED IN HEART, SIGNAL = 1.2; EXPRESSED IN PLACENTA, SIGNAL = 1.3; EST_HUMAN HIT: AW051755.1, EVALUE 3.00e-04; SWISSPROT HIT: P54290, EVALUE 6.00e-15
GSQRIKPVFIEDANFGRQISYQHAAVHIPTDIYEG

SEQ ID NO: 36462 - protein, 39 aa, Homo sapiens
  MAP TO AC011257.2; EXPRESSED IN HBL100, SIGNAL = 0.95; EXPRESSED IN HELA, SIGNAL = 1.1; EXPRESSED IN PLACENTA, SIGNAL =   1; EXPRESSED IN HEART, SIGNAL =   1; EXPRESSED IN ADULT LIVER, SIGNAL = 1.3; EXPRESSED IN BT474, SIGNAL = 1.1; EXPRESSED IN FETAL LIVER, SIGNAL = 1.1; EXPRESSED IN BRAIN, SIGNAL = 1.1; EXPRESSED IN LUNG, SIGNAL = 0.97; EST_HUMAN HIT: BF219182.1, EVALUE 3.20e+00; SWISSPROT HIT: P79083, EVALUE 8.10e+00
  unsure 24
DGRRSSTVSLWRVRRGKQIVKHGXAHWSHPTTSTGPWEY

SEQ ID NO: 36463 - protein, 103 aa, Homo sapiens
  MAP TO AC009834.2; EXPRESSED IN HBL100, SIGNAL = 1.6; EXPRESSED IN HEART, SIGNAL = 1.6; EXPRESSED IN FETAL LIVER, SIGNAL = 1.4; EXPRESSED IN ADULT LIVER, SIGNAL = 1.6; EXPRESSED IN LUNG, SIGNAL = 1.5; EXPRESSED IN BRAIN, SIGNAL = 1.4; EXPRESSED IN PLACENTA, SIGNAL =   3; EXPRESSED IN BT474, SIGNAL = 1.2; EXPRESSED IN BONE MARROW, SIGNAL = 1.2; EXPRESSED IN HELA, SIGNAL = 1.4; SWISSPROT HIT: P35555, EVALUE 8.00e-55; EST_HUMAN HIT: AI750610.1, EVALUE 8.00e-54
WDVEKTAIFAFNISHVSNKVRILELLPALTTLTNHNRYLIESGNEDGFFKINQKAGISYLHFTKKKPVAGTYSLQISSTPLYKKKELNQLEDKYDKDYLSGEL

SEQ ID NO: 36464 - protein, 37 aa, Homo sapiens
  MAP TO AL121752.2; EXPRESSED IN BT474, SIGNAL = 1.7; EXPRESSED IN FETAL LIVER, SIGNAL =  22; EXPRESSED IN BONE MARROW, SIGNAL = 1.3; EXPRESSED IN LUNG, SIGNAL = 3.4; EXPRESSED IN BRAIN, SIGNAL = 4.5; EXPRESSED IN PLACENTA, SIGNAL = 2.1; EXPRESSED IN HBL100, SIGNAL = 8.5; EXPRESSED IN HELA, SIGNAL = 4.7; EXPRESSED IN HEART, SIGNAL = 2.8; EXPRESSED IN ADULT LIVER, SIGNAL = 7.2; EST_HUMAN HIT: AA631912.1, EVALUE 5.00e-12
HLHSLHLQEPAHVQEPPVVQEQLGSISSRGKAGDLKR

SEQ ID NO: 36465 - protein, 36 aa, Homo sapiens
  MAP TO Z99758.7; EXPRESSED IN HBL100, SIGNAL = 1.2; EXPRESSED IN HEART, SIGNAL = 0.92; EXPRESSED IN LUNG, SIGNAL = 1.3; EXPRESSED IN FETAL LIVER, SIGNAL = 1.1; EXPRESSED IN ADULT LIVER, SIGNAL = 1.2; EXPRESSED IN BRAIN, SIGNAL = 0.9; EXPRESSED IN BONE MARROW, SIGNAL = 1.1; EXPRESSED IN BT474, SIGNAL = 1.3; EST_HUMAN HIT: BF217053.1, EVALUE 2.00e-13
LEDLFIGNKVNVFSRQLVLIDYGDQYTARQLGSRKE

SEQ ID NO: 36466 - protein, 20 aa, Homo sapiens
  MAP TO Z99758.7; EXPRESSED IN HBL100, SIGNAL = 1.2; EXPRESSED IN HEART, SIGNAL = 0.92; EXPRESSED IN LUNG, SIGNAL = 1.3; EXPRESSED IN FETAL LIVER, SIGNAL = 1.1; EXPRESSED IN ADULT LIVER, SIGNAL = 1.2; EXPRESSED IN BRAIN, SIGNAL = 0.9; EXPRESSED IN BONE MARROW, SIGNAL = 1.1; EXPRESSED IN BT474, SIGNAL = 1.3; EST_HUMAN HIT: AW401983.1, EVALUE 2.00e-04
LGRFIYRQQSECLFSTTGIN

SEQ ID NO: 36467 - protein, 43 aa, Homo sapiens
  MAP TO AC007403.2; EXPRESSED IN HBL100, SIGNAL = 2.8; EXPRESSED IN FETAL LIVER, SIGNAL = 2.1; EXPRESSED IN LUNG, SIGNAL = 2.8; EXPRESSED IN BRAIN, SIGNAL = 2.7; EXPRESSED IN BT474, SIGNAL = 3.6; EXPRESSED IN BONE MARROW, SIGNAL = 1.9; EXPRESSED IN HELA, SIGNAL = 1.8; EXPRESSED IN ADULT LIVER, SIGNAL = 1.2; EXPRESSED IN PLACENTA, SIGNAL = 2.9; EXPRESSED IN HEART, SIGNAL = 2.3; EST_HUMAN HIT: AA533100.1, EVALUE 9.20e+00; SWISSPROT HIT: P35201, EVALUE 4.70e+00
VPGALQLQFKICRKQSIALPTTLNGTMDDILWKTMYLYDSESK

SEQ ID NO: 36468 - protein, 43 aa, Homo sapiens
  MAP TO AC007403.2; EXPRESSED IN HBL100, SIGNAL = 2.8; EXPRESSED IN FETAL LIVER, SIGNAL = 2.1; EXPRESSED IN LUNG, SIGNAL = 2.8; EXPRESSED IN BRAIN, SIGNAL = 2.7; EXPRESSED IN BT474, SIGNAL = 3.6; EXPRESSED IN BONE MARROW, SIGNAL = 1.9; EXPRESSED IN HELA, SIGNAL = 1.8; EXPRESSED IN ADULT LIVER, SIGNAL = 1.2; EXPRESSED IN PLACENTA, SIGNAL = 2.9; EXPRESSED IN HEART, SIGNAL = 2.3; EST_HUMAN HIT: BF237801.1, EVALUE 8.10e-01
FLELCNFSSKSAGSRALHCPLLLMALWMIFCGKPCTCMILNRK

SEQ ID NO: 36469 - protein, 65 aa, Homo sapiens
  MAP TO AC012458.2; EXPRESSED IN PLACENTA, SIGNAL = 6.4; EXPRESSED IN HBL100, SIGNAL =  19; EXPRESSED IN HELA, SIGNAL =  20; EXPRESSED IN HEART, SIGNAL = 6.9; EXPRESSED IN FETAL LIVER, SIGNAL =  10; EXPRESSED IN BT474, SIGNAL =  12; EXPRESSED IN ADULT LIVER, SIGNAL = 3.5; EXPRESSED IN BONE MARROW, SIGNAL = 7.2; EXPRESSED IN LUNG, SIGNAL =  15; EXPRESSED IN BRAIN, SIGNAL =  26; SWISSPROT HIT: Q10255, EVALUE 1.90e+00; EST_HUMAN HIT: AW162620.1, EVALUE 6.00e-19
NTCTCCLMYQMFPNMSMLALSPSGPTTASTLWIGVPLASRLASIISLPMWYPVETWPRYRELCVC

SEQ ID NO: 36470 - protein, 99 aa, Homo sapiens
  MAP TO AC010680.3; EXPRESSED IN HBL100, SIGNAL = 0.98; EXPRESSED IN BT474, SIGNAL = 0.92; EXPRESSED IN BRAIN, SIGNAL =   1; EXPRESSED IN HELA, SIGNAL = 0.96; EXPRESSED IN HEART, SIGNAL = 3.3; EXPRESSED IN PLACENTA, SIGNAL =   1; EXPRESSED IN ADULT LIVER, SIGNAL = 1.3; EXPRESSED IN FETAL LIVER, SIGNAL = 1.1; EXPRESSED IN LUNG, SIGNAL = 0.98; EXPRESSED IN BONE MARROW, SIGNAL =   1; EST_HUMAN HIT: AA180780.1, EVALUE 4.00e-14; SWISSPROT HIT: Q62234, EVALUE 7.00e-10
LPGPCKDIKASDITKSSCKLTWEPPEFDGGTPILHYVLERREAGRRTYIPVMSGENKLSWTVKDLIPNGEYFFRVKAVNKVGGGEYIELKNPVIAQDPK

SEQ ID NO: 36471 - protein, 35 aa, Homo sapiens
  MAP TO AL080239.11; EXPRESSED IN HELA, SIGNAL = 0.7; EXPRESSED IN ADULT LIVER, SIGNAL = 0.83; EXPRESSED IN BRAIN, SIGNAL = 0.89; EXPRESSED IN HEART, SIGNAL = 0.95; EXPRESSED IN BT474, SIGNAL = 0.71; EXPRESSED IN BONE MARROW, SIGNAL = 0.72; EXPRESSED IN PLACENTA, SIGNAL = 0.82; EXPRESSED IN FETAL LIVER, SIGNAL = 0.76; EXPRESSED IN LUNG, SIGNAL = 0.87; EST_HUMAN HIT: BE794381.1, EVALUE 4.00e-12
HWYWTWQRRRMVSMCCWVAAWTGEFSLREIKRDMK

SEQ ID NO: 36472 - protein, 45 aa, Homo sapiens
  MAP TO AC007687.16; EXPRESSED IN BRAIN, SIGNAL = 1.6; EXPRESSED IN LUNG, SIGNAL =   2; EXPRESSED IN HEART, SIGNAL = 1.9; EXPRESSED IN FETAL LIVER, SIGNAL = 2.4; EXPRESSED IN BONE MARROW, SIGNAL = 2.1; EXPRESSED IN PLACENTA, SIGNAL = 1.8; EXPRESSED IN HELA, SIGNAL = 2.4; EXPRESSED IN HBL100, SIGNAL = 1.9; EXPRESSED IN BT474, SIGNAL = 1.9; EXPRESSED IN ADULT LIVER, SIGNAL =   2; SWISSPROT HIT: Q92995, EVALUE 1.00e-07
LDTDDDLNSDDYEYEDEAKLVIFPDHYEIALPNIEELPALVSECA

SEQ ID NO: 36473 - protein, 19 aa, Homo sapiens
  MAP TO AC007687.16; EXPRESSED IN BRAIN, SIGNAL = 1.6; EXPRESSED IN LUNG, SIGNAL =   2; EXPRESSED IN HEART, SIGNAL = 1.9; EXPRESSED IN FETAL LIVER, SIGNAL = 2.4; EXPRESSED IN BONE MARROW, SIGNAL = 2.1; EXPRESSED IN PLACENTA, SIGNAL = 1.8; EXPRESSED IN HELA, SIGNAL = 2.4; EXPRESSED IN HBL100, SIGNAL = 1.9; EXPRESSED IN BT474, SIGNAL = 1.9; EXPRESSED IN ADULT LIVER, SIGNAL =   2
VWDIIFLTSCSLFLFSPQI

SEQ ID NO: 36474 - protein, 24 aa, Homo sapiens
  MAP TO AC010681.3; EXPRESSED IN BONE MARROW, SIGNAL =   2; EXPRESSED IN HELA, SIGNAL =   2; EXPRESSED IN PLACENTA, SIGNAL = 2.2; EXPRESSED IN HBL100, SIGNAL = 2.3; EXPRESSED IN BT474, SIGNAL = 1.8; EXPRESSED IN BRAIN, SIGNAL = 1.8; EXPRESSED IN LUNG, SIGNAL = 1.9; EXPRESSED IN HEART, SIGNAL =   2; EXPRESSED IN ADULT LIVER, SIGNAL = 1.9; EXPRESSED IN FETAL LIVER, SIGNAL =   2
AWLIYSFVLRACHTQNHGRPMESP

SEQ ID NO: 36475 - protein, 55 aa, Homo sapiens; identical to SEQ ID NO: 34694
  MAP TO AC010686.2; EXPRESSED IN FETAL LIVER, SIGNAL = 1.3; EXPRESSED IN BRAIN, SIGNAL = 1.3; EXPRESSED IN HBL100, SIGNAL = 2.1; EXPRESSED IN HELA, SIGNAL = 1.6; EXPRESSED IN PLACENTA, SIGNAL = 1.4; EXPRESSED IN ADULT LIVER, SIGNAL = 1.3; EXPRESSED IN BT474, SIGNAL = 1.5; EXPRESSED IN LUNG, SIGNAL = 1.1; EXPRESSED IN BONE MARROW, SIGNAL = 1.2; EXPRESSED IN HEART, SIGNAL = 1.1; EST_HUMAN HIT: AA306870.1, EVALUE 6.00e-26; SWISSPROT HIT: P13010, EVALUE 5.00e-27

SEQ ID NO: 36476 - protein, 59 aa, Homo sapiens
  MAP TO AP000215.1; EXPRESSED IN FETAL LIVER, SIGNAL = 1.5; EXPRESSED IN HELA, SIGNAL = 1.3; EXPRESSED IN PLACENTA, SIGNAL = 0.96; EXPRESSED IN BT474, SIGNAL = 0.99; EXPRESSED IN BONE MARROW, SIGNAL =   1; EXPRESSED IN HEART, SIGNAL = 1.1; EXPRESSED IN BRAIN, SIGNAL = 1.3; EXPRESSED IN ADULT LIVER, SIGNAL = 1.2; EXPRESSED IN LUNG, SIGNAL = 0.94; EXPRESSED IN HBL100, SIGNAL = 1.1; EST_HUMAN HIT: BF088983.1, EVALUE 3.00e-03; SWISSPROT HIT: O95613, EVALUE 6.00e-19
LIYQKKYLLLLIGGFQDSEQETLSMIAHLGVFPSKAERKITSRPFTRFRTAVRVVIAIL

SEQ ID NO: 36477 - protein, 107 aa, Homo sapiens
  MAP TO AF019413.1; EXPRESSED IN HEART, SIGNAL = 1.2; EXPRESSED IN FETAL LIVER, SIGNAL = 1.7; EXPRESSED IN BRAIN, SIGNAL = 1.3; EXPRESSED IN PLACENTA, SIGNAL = 0.95; EXPRESSED IN HELA, SIGNAL = 1.8; EXPRESSED IN HBL100, SIGNAL = 1.7; EXPRESSED IN BT474, SIGNAL = 1.1; EXPRESSED IN LUNG, SIGNAL = 1.6; EXPRESSED IN BONE MARROW, SIGNAL =   1; EST_HUMAN HIT: BE694909.1, EVALUE 4.00e-06; SWISSPROT HIT: P18615, EVALUE 4.00e-07
DRLRELGPDGEEAEGPGAGDGPPRSFDWGYEERSGAHSSASPPRSRSRDRSHERNRDRDRDRERDRDRDRDRDRERDRDRDRDRDRDRERDRDRERDRDRDREGPFR

SEQ ID NO: 36478 - protein, 74 aa, Homo sapiens
  MAP TO AL050331.11; EXPRESSED IN ADULT LIVER, SIGNAL = 0.99; EXPRESSED IN BRAIN, SIGNAL = 1.5; EXPRESSED IN PLACENTA, SIGNAL = 1.2; EXPRESSED IN BT474, SIGNAL = 1.2; EXPRESSED IN HEART, SIGNAL = 1.2; EXPRESSED IN HELA, SIGNAL = 1.3; EXPRESSED IN LUNG, SIGNAL = 1.3; EXPRESSED IN HBL100, SIGNAL = 0.98; EXPRESSED IN BONE MARROW, SIGNAL = 1.3; EXPRESSED IN FETAL LIVER, SIGNAL = 1.4; EST_HUMAN HIT: T27298.1, EVALUE 1.10e+00; SWISSPROT HIT: P38109, EVALUE 6.10e-01
VTTNESHVEAPHRTHPNETENLSLAPSWITEIQQTCHLPPQQNDSFQTFYIPHDSHSSVVKNPETTTFLAALQV

SEQ ID NO: 36479 - protein, 126 aa, Homo sapiens
  MAP TO AC012545.1; EXPRESSED IN LUNG, SIGNAL =   5; EXPRESSED IN HEART, SIGNAL = 4.2; EXPRESSED IN FETAL LIVER, SIGNAL = 4.5; EXPRESSED IN ADULT LIVER, SIGNAL = 5.1; EXPRESSED IN BRAIN, SIGNAL =   4; EXPRESSED IN BONE MARROW, SIGNAL = 4.4; EXPRESSED IN PLACENTA, SIGNAL = 4.1; EXPRESSED IN HELA, SIGNAL = 4.9; EXPRESSED IN HBL100, SIGNAL = 3.6; EXPRESSED IN BT474, SIGNAL =   4; SWISSPROT HIT: Q58296, EVALUE 1.80e+00; EST_HUMAN HIT: BF362169.1, EVALUE 5.00e-24
GFFTIADGESEASFDVHLLPDEVPEIEEDYVIQLVSVEGGAELDLEKSITWFSVYANDDPHGVFALYSDRQSILIGQNLIRSIQINITRLAGTFGDVAVGLRISSDHKEQPIVTENAERQLVVKDG

SEQ ID NO: 36480 - protein, 67 aa, Homo sapiens
  MAP TO AC011174.2; EXPRESSED IN BT474, SIGNAL = 1.2; EXPRESSED IN FETAL LIVER, SIGNAL =   2; EXPRESSED IN BONE MARROW, SIGNAL = 1.5; EXPRESSED IN HELA, SIGNAL = 1.4; EXPRESSED IN ADULT LIVER, SIGNAL = 1.2; EXPRESSED IN BRAIN, SIGNAL = 1.3; EXPRESSED IN LUNG, SIGNAL = 1.1; EXPRESSED IN PLACENTA, SIGNAL = 1.3; EXPRESSED IN HEART, SIGNAL = 1.2; EXPRESSED IN HBL100, SIGNAL = 1.4
HQEGSFTRPPPPPPPLPPLLLLLLLFLLVLLPSPPFSPSSFLKLLYLPFILMHIFNLLIRQSEFVYV

SEQ ID NO: 36481 - protein, 70 aa, Homo sapiens
  MAP TO AC009155.2; EXPRESSED IN BT474, SIGNAL = 1.7; EXPRESSED IN ADULT LIVER, SIGNAL = 1.5; EXPRESSED IN BRAIN, SIGNAL = 1.6; EXPRESSED IN LUNG, SIGNAL =   2; EXPRESSED IN HEART, SIGNAL = 1.8; EXPRESSED IN FETAL LIVER, SIGNAL = 1.5; EXPRESSED IN BONE MARROW, SIGNAL = 1.5; EXPRESSED IN PLACENTA, SIGNAL = 1.9; EXPRESSED IN HELA, SIGNAL = 2.3; EXPRESSED IN HBL100, SIGNAL = 1.9; EST_HUMAN HIT: AA978114.1, EVALUE 2.00e-35; SWISSPROT HIT: P98193, EVALUE 9.80e-02
LKLHFLAPSEEDEMNDKKEAETTDITEEGTSHSPPEPENNQMAISNNSQQSNEQTDPEPEENETKKGKLL

SEQ ID NO: 36482 - protein, 41 aa, Homo sapiens
  MAP TO AC011208.2; EXPRESSED IN BONE MARROW, SIGNAL = 4.9; EXPRESSED IN LUNG, SIGNAL = 5.4; EXPRESSED IN HBL100, SIGNAL = 9.2; EXPRESSED IN HELA, SIGNAL = 5.4; EXPRESSED IN PLACENTA, SIGNAL = 5.2; EXPRESSED IN HEART, SIGNAL = 4.9; EXPRESSED IN ADULT LIVER, SIGNAL = 6.1; EXPRESSED IN BT474, SIGNAL =   5; EXPRESSED IN FETAL LIVER, SIGNAL = 5.1; EXPRESSED IN BRAIN, SIGNAL = 2.3
YVNCGNASNACGLSQIVVFSGEDDETGRGKGVESVWVEVII

SEQ ID NO: 36483 - protein, 21 aa, Homo sapiens
  MAP TO AC011208.2; EXPRESSED IN BONE MARROW, SIGNAL = 4.9; EXPRESSED IN LUNG, SIGNAL = 5.4; EXPRESSED IN HBL100, SIGNAL = 9.2; EXPRESSED IN HELA, SIGNAL = 5.4; EXPRESSED IN PLACENTA, SIGNAL = 5.2; EXPRESSED IN HEART, SIGNAL = 4.9; EXPRESSED IN ADULT LIVER, SIGNAL = 6.1; EXPRESSED IN BT474, SIGNAL =   5; EXPRESSED IN FETAL LIVER, SIGNAL = 5.1; EXPRESSED IN BRAIN, SIGNAL = 2.3
LCELWKCKQRLWIISDCGILR

SEQ ID NO: 36484 - protein, 36 aa, Homo sapiens
  MAP TO AL050309.4; EXPRESSED IN ADULT LIVER, SIGNAL = 0.8; EXPRESSED IN HEART, SIGNAL = 6.5; EXPRESSED IN BONE MARROW, SIGNAL = 0.65; EXPRESSED IN HBL100, SIGNAL = 0.74; EXPRESSED IN FETAL LIVER, SIGNAL =   1; EXPRESSED IN HELA, SIGNAL = 0.78; EXPRESSED IN BRAIN, SIGNAL = 1.1; EXPRESSED IN PLACENTA, SIGNAL = 0.81; EXPRESSED IN BT474, SIGNAL = 0.78; EXPRESSED IN LUNG, SIGNAL = 1.1; EST_HUMAN HIT: BE541391.1, EVALUE 7.00e-05
KVDPTSMSPLEIPSDSEESTIESGSSALQSLQGLQQ

SEQ ID NO: 36485 - protein, 64 aa, Homo sapiens
  MAP TO AC012069.2; EXPRESSED IN HEART, SIGNAL = 5.1; EXPRESSED IN ADULT LIVER, SIGNAL = 2.4; EXPRESSED IN FETAL LIVER, SIGNAL = 6.1; EXPRESSED IN LUNG, SIGNAL = 8.5; EXPRESSED IN BRAIN, SIGNAL = 2.6; EXPRESSED IN HBL100, SIGNAL = 9.7; EXPRESSED IN HELA, SIGNAL =  13; EXPRESSED IN PLACENTA, SIGNAL = 7.6; EXPRESSED IN BT474, SIGNAL = 8.4; EXPRESSED IN BONE MARROW, SIGNAL = 6.1; EST_HUMAN HIT: AA307230.1, EVALUE 7.00e-20
SGAANTQNYCLCIAKDRGDFIASWAFHIPEVGTGALHQVFLLVFPFLLFWRGMKEIFCKKHVLV

SEQ ID NO: 36486 - protein, 41 aa, Homo sapiens
  MAP TO AC010819.2; EXPRESSED IN BRAIN, SIGNAL = 2.4; EXPRESSED IN HELA, SIGNAL =   1; EXPRESSED IN HBL100, SIGNAL = 1.5; EXPRESSED IN HEART, SIGNAL =   4; EXPRESSED IN FETAL LIVER, SIGNAL = 1.1; EXPRESSED IN LUNG, SIGNAL = 1.1; EXPRESSED IN BONE MARROW, SIGNAL = 1.7; EXPRESSED IN PLACENTA, SIGNAL =   1; EXPRESSED IN ADULT LIVER, SIGNAL =   1; EXPRESSED IN BT474, SIGNAL = 1.6
RRRRRRSRRRRRRRRKRRKRRRRRSGRGRGEGREGRGGGET

SEQ ID NO: 36487 - protein, 571 aa, Homo sapiens
  MAP TO AC007114.7; EXPRESSED IN BRAIN, SIGNAL = 2.1; EXPRESSED IN BONE MARROW, SIGNAL = 2.4; EXPRESSED IN LUNG, SIGNAL =   2; EXPRESSED IN PLACENTA, SIGNAL = 1.3; EXPRESSED IN FETAL LIVER, SIGNAL = 2.3; EXPRESSED IN ADULT LIVER, SIGNAL = 1.8; EXPRESSED IN BT474, SIGNAL = 2.5; EXPRESSED IN HEART, SIGNAL = 3.5; EXPRESSED IN HELA, SIGNAL = 3.5; EXPRESSED IN HBL100, SIGNAL = 2.9; EST_HUMAN HIT: AU133388.1, EVALUE 1.00e-109; SWISSPROT HIT: Q92667, EVALUE 0.00e+00
MAIQFRSLFPLALPGMLALLGWWWFFSRKKGHVSSHDEQQVEAGAVQLRADPAIKEPLPVEDVCPKVVSTPPSVTEPPEKELSTVSKLPAEPPALLQTHPPCRRSESSGILPNTTDMRLRPGTRRDDSTKLELALTGGEAKSIPLECPLSSPKGVLFSSKSAEVCKQDSPFSRVPRKVQPGYPVVPAEKRSSGERARETGGAEGTGDAVLGEKVLEEALLSREHVLELENSKGPSLASLEGEEDKGKSSSSQVVGPVQEEEYVAEKLPSRFIESAHTELAKDDAAPAPPVADAKAQDRGVEGELGNEESLDRNEEGLDRNEEGLDRNEESLDRNEEGLDRNEEIKRAAFQIISQVISEATEQVLATTVGKVAGRVCQASQLQGQKEESCVPVHQKTVLGPDTAEPATAEAAVAPPDAGLPLPGLPAEGSPPPKTYVSCLKSLLSSPTKDSKPNISAHHISLASCLALTTPSEELPDRAGILVEDATCVTCMSDSSQSVPLVASPGHCSDSFSTSGLEDSCTETSSSPRDKAITPPLPESTVPFSNGVLKGELSDLGAEDGWTMDAEADHSG

SEQ ID NO: 36488 - protein, 53 aa, Homo sapiens
  MAP TO AC007114.7; EXPRESSED IN BRAIN, SIGNAL = 2.1; EXPRESSED IN BONE MARROW, SIGNAL = 2.4; EXPRESSED IN LUNG, SIGNAL =   2; EXPRESSED IN PLACENTA, SIGNAL = 1.3; EXPRESSED IN FETAL LIVER, SIGNAL = 2.3; EXPRESSED IN ADULT LIVER, SIGNAL = 1.8; EXPRESSED IN BT474, SIGNAL = 2.5; EXPRESSED IN HEART, SIGNAL = 3.5; EXPRESSED IN HELA, SIGNAL = 3.5; EXPRESSED IN HBL100, SIGNAL = 2.9; SWISSPROT HIT: P22778, EVALUE 2.60e+00; EST_HUMAN HIT: BE615468.1, EVALUE 7.00e-27
YFKPPGWQSSSVRSSPWHCLGCWRSSAGGGFSLVKKAMSAAMMSSRWRLVLCS

SEQ ID NO: 36489 - protein, 25 aa, Homo sapiens
  MAP TO AL035409.15; EXPRESSED IN FETAL LIVER, SIGNAL = 0.78; EXPRESSED IN LUNG, SIGNAL = 0.79; EXPRESSED IN HELA, SIGNAL = 0.6; EXPRESSED IN PLACENTA, SIGNAL = 0.71; EXPRESSED IN BT474, SIGNAL = 0.89; EXPRESSED IN BONE MARROW, SIGNAL = 0.72; EXPRESSED IN HBL100, SIGNAL = 0.74; EXPRESSED IN ADULT LIVER, SIGNAL = 0.7; EXPRESSED IN BRAIN, SIGNAL = 1.4; EXPRESSED IN HEART, SIGNAL = 0.88
ADLDFSRIMLLNSLHLLILAVLSTQ

SEQ ID NO: 36490 - protein, 42 aa, Homo sapiens
  MAP TO AC005046.2; EXPRESSED IN HBL100, SIGNAL = 0.83; EXPRESSED IN FETAL LIVER, SIGNAL = 0.96; EXPRESSED IN LUNG, SIGNAL = 1.2; EXPRESSED IN HELA, SIGNAL = 1.5; EXPRESSED IN ADULT LIVER, SIGNAL = 1.1; EXPRESSED IN BRAIN, SIGNAL = 0.75; EXPRESSED IN BONE MARROW, SIGNAL = 0.68; EXPRESSED IN PLACENTA, SIGNAL = 1.2; EXPRESSED IN BT474, SIGNAL = 0.8; EXPRESSED IN HEART, SIGNAL = 1.4; EST_HUMAN HIT: AW370042.1, EVALUE 2.00e-12; SWISSPROT HIT: P07942, EVALUE 5.00e-21
MEIREKYYYAVYDMVVRGNCFCYGHASECAPVDGFNEEVEGM

SEQ ID NO: 36491 - protein, 46 aa, Homo sapiens
  MAP TO AC012443.1; EXPRESSED IN BONE MARROW, SIGNAL = 2.4; EXPRESSED IN LUNG, SIGNAL = 3.2; EXPRESSED IN PLACENTA, SIGNAL = 2.7; EXPRESSED IN HBL100, SIGNAL = 2.5; EXPRESSED IN HELA, SIGNAL = 3.5; EXPRESSED IN HEART, SIGNAL = 2.6; EXPRESSED IN FETAL LIVER, SIGNAL = 2.8; EXPRESSED IN BT474, SIGNAL = 2.7; EXPRESSED IN ADULT LIVER, SIGNAL = 2.7; EXPRESSED IN BRAIN, SIGNAL = 2.2; EST_HUMAN HIT: AU139074.1, EVALUE 2.00e-05
LLEKAEAREREREKEEARKMKRKESAFKSMLKQAAPPIELDAVWED

SEQ ID NO: 36492 - protein, 36 aa, Homo sapiens
  MAP TO AJ239325.2; EXPRESSED IN FETAL LIVER, SIGNAL =   1; EXPRESSED IN BT474, SIGNAL = 1.1; EXPRESSED IN HBL100, SIGNAL = 1.2; EXPRESSED IN HELA, SIGNAL = 0.94; EXPRESSED IN HEART, SIGNAL = 1.4; EST_HUMAN HIT: BF684602.1, EVALUE 4.00e-13
DWAFINTNIFARTKIDPSALVQKLELDVRSVTSVRR

SEQ ID NO: 36493 - protein, 22 aa, Homo sapiens
  MAP TO AC011235.2; EXPRESSED IN FETAL LIVER, SIGNAL = 1.2; EXPRESSED IN BONE MARROW, SIGNAL = 1.1; EXPRESSED IN PLACENTA, SIGNAL = 1.4; EXPRESSED IN ADULT LIVER, SIGNAL = 1.1; EXPRESSED IN BT474, SIGNAL = 0.97; EXPRESSED IN BRAIN, SIGNAL =   1; EXPRESSED IN LUNG, SIGNAL =   1; EXPRESSED IN HEART, SIGNAL =   1; EXPRESSED IN HELA, SIGNAL = 1.3; EXPRESSED IN HBL100, SIGNAL =   1
MVMIIDDDDDDDDGGGGGSGSS

SEQ ID NO: 36494 - protein, 106 aa, Homo sapiens
  MAP TO AC012073.1; EXPRESSED IN BONE MARROW, SIGNAL = 1.1; EXPRESSED IN HEART, SIGNAL = 1.1; EXPRESSED IN ADULT LIVER, SIGNAL =   1; EXPRESSED IN BRAIN, SIGNAL = 1.1; EXPRESSED IN HELA, SIGNAL =   1; EXPRESSED IN HBL100, SIGNAL = 1.3; EXPRESSED IN BT474, SIGNAL = 1.1; EXPRESSED IN FETAL LIVER, SIGNAL = 1.2; EXPRESSED IN LUNG, SIGNAL = 0.95; SWISSPROT HIT: P29537, EVALUE 5.00e-03; EST_HUMAN HIT: AA551335.1, EVALUE 5.00e-10
ENYLKELSMQVEYPNVLGLEVFQISELGVFALHLLAEHPISENPKLEISISFDHHVSAQKASDFGVFQILDLQCSTCTHFLHFLACDSYLNPLETHFCSHYFTKPL

SEQ ID NO: 36495 - protein, 47 aa, Homo sapiens
  MAP TO AC011242.2; EXPRESSED IN HBL100, SIGNAL = 1.6; EXPRESSED IN HEART, SIGNAL = 1.4; EXPRESSED IN ADULT LIVER, SIGNAL = 1.5; EXPRESSED IN BT474, SIGNAL = 1.4; EXPRESSED IN FETAL LIVER, SIGNAL = 1.5; EXPRESSED IN BONE MARROW, SIGNAL = 1.7; EXPRESSED IN PLACENTA, SIGNAL = 1.3; EXPRESSED IN HELA, SIGNAL = 1.4; EXPRESSED IN BRAIN, SIGNAL = 1.4; EXPRESSED IN LUNG, SIGNAL = 1.3; EST_HUMAN HIT: AW889219.1, EVALUE 2.00e-19; SWISSPROT HIT: Q29425, EVALUE 2.00e+00
LYFSVQARGETDREKLLLMYQTNDQIINGLFPLNKDLALEMAALLSQ

SEQ ID NO: 36496 - protein, 65 aa, Homo sapiens
  MAP TO AP000115.1; EXPRESSED IN HBL100, SIGNAL = 2.1; EXPRESSED IN LUNG, SIGNAL = 0.82; EXPRESSED IN HELA, SIGNAL = 1.3; EXPRESSED IN ADULT LIVER, SIGNAL =   1; EXPRESSED IN BRAIN, SIGNAL = 0.77; EXPRESSED IN HEART, SIGNAL = 0.84; EXPRESSED IN PLACENTA, SIGNAL = 0.72; EXPRESSED IN BT474, SIGNAL = 0.9; EXPRESSED IN BONE MARROW, SIGNAL = 0.99; EXPRESSED IN FETAL LIVER, SIGNAL = 1.1; EST_HUMAN HIT: R91790.1, EVALUE 5.00e-32; SWISSPROT HIT: Q60383, EVALUE 3.30e+00
VSFSEPDIPSSKSTELPVDWSIKTRLLFTSSQPFTWADHLKAQEEAQGLVQHCRATEVTLPKSIQ

SEQ ID NO: 36497 - protein, 113 aa, Homo sapiens
  MAP TO AL078622.6; EXPRESSED IN HBL100, SIGNAL = 0.96; EXPRESSED IN FETAL LIVER, SIGNAL = 1.1; EXPRESSED IN LUNG, SIGNAL = 0.98; EXPRESSED IN HELA, SIGNAL = 0.95; EXPRESSED IN ADULT LIVER, SIGNAL = 1.4; EXPRESSED IN BRAIN, SIGNAL = 1.1; EXPRESSED IN BT474, SIGNAL = 0.97; EXPRESSED IN PLACENTA, SIGNAL = 1.2; EXPRESSED IN HEART, SIGNAL =   1; EXPRESSED IN BONE MARROW, SIGNAL = 1.1; SWISSPROT HIT: Q63003, EVALUE 4.00e-04; EST_HUMAN HIT: BF038819.1, EVALUE 2.00e-03
GGAPDSRPQGQEVRAETRAWAQGREHPKSGLQGGAPDSRPQGQEVREETGEWARGREHPKSGLQGGAADSWPQGQEFREETGEWARGREHPKSGLQGGAPDSRPQGQEVQDET

SEQ ID NO: 36498 - protein, 47 aa, Homo sapiens
  MAP TO AC012005.2; EXPRESSED IN BONE MARROW, SIGNAL = 2.8; EXPRESSED IN BRAIN, SIGNAL =   2; EXPRESSED IN LUNG, SIGNAL = 2.4; EXPRESSED IN PLACENTA, SIGNAL = 2.4; EXPRESSED IN HBL100, SIGNAL = 2.2; EXPRESSED IN HELA, SIGNAL = 2.5; EXPRESSED IN HEART, SIGNAL = 1.8; EXPRESSED IN ADULT LIVER, SIGNAL = 2.3; EXPRESSED IN BT474, SIGNAL = 2.3; EXPRESSED IN FETAL LIVER, SIGNAL = 1.7; EST_HUMAN HIT: AA995490.1, EVALUE 1.40e-01; SWISSPROT HIT: Q61555, EVALUE 1.60e+00
FVCRTSCPCCPSSFSWHLPQSSLWDPCSSSQRPCSHHQHLFHLQLKI

SEQ ID NO: 36499 - protein, 36 aa, Homo sapiens
  MAP TO AC011274.2; EXPRESSED IN LUNG, SIGNAL = 2.2; EXPRESSED IN FETAL LIVER, SIGNAL =   2; EXPRESSED IN ADULT LIVER, SIGNAL = 2.4; EXPRESSED IN BT474, SIGNAL = 1.8; EXPRESSED IN BRAIN, SIGNAL = 2.1; EXPRESSED IN BONE MARROW, SIGNAL = 2.6; EXPRESSED IN PLACENTA, SIGNAL =   2; EXPRESSED IN HEART, SIGNAL = 1.9; EXPRESSED IN HELA, SIGNAL = 2.1; EXPRESSED IN HBL100, SIGNAL =   2; EST_HUMAN HIT: AA725542.1, EVALUE 1.90e+00; SWISSPROT HIT: Q94497, EVALUE 3.60e+00
LRLGLTPSFPLVLRPYFPGHPACRRKIVELFSPLNH

SEQ ID NO: 36500 - protein, 67 aa, Homo sapiens
  MAP TO AC011451.2; EXPRESSED IN ADULT LIVER, SIGNAL = 1.7; EXPRESSED IN FETAL LIVER, SIGNAL = 1.6; EXPRESSED IN LUNG, SIGNAL = 5.8; EXPRESSED IN BRAIN, SIGNAL = 2.5; EXPRESSED IN HEART, SIGNAL = 1.9; EXPRESSED IN HELA, SIGNAL = 1.7; EXPRESSED IN HBL100, SIGNAL = 1.5; EXPRESSED IN PLACENTA, SIGNAL = 1.9; EXPRESSED IN BT474, SIGNAL = 1.7; EXPRESSED IN BONE MARROW, SIGNAL = 1.6
GFLIHLRLEPALALLCIPLLPAPPPSPQVPLPRPRPIRHLQRRKRNQKCASAHARVDSLVTLRLRPR

SEQ ID NO: 36501 - protein, 177 aa, Homo sapiens
  MAP TO AL034380.22; EXPRESSED IN BRAIN, SIGNAL = 2.3; EXPRESSED IN BONE MARROW, SIGNAL =   3; EXPRESSED IN LUNG, SIGNAL = 2.9; EXPRESSED IN PLACENTA, SIGNAL = 3.6; EXPRESSED IN FETAL LIVER, SIGNAL = 2.6; EXPRESSED IN ADULT LIVER, SIGNAL = 1.8; EXPRESSED IN BT474, SIGNAL = 3.1; EXPRESSED IN HEART, SIGNAL =   2; EXPRESSED IN HELA, SIGNAL = 3.5; EXPRESSED IN HBL100, SIGNAL = 2.9; EST_HUMAN HIT: AI268382.1, EVALUE 2.00e-44; SWISSPROT HIT: O15534, EVALUE 8.00e-03
QSTGSAPQGPAYHGVNRTDEMLHTDQRANHEGSWPSHGTRQPPYGPSAPVPPMTRPPPSNYQPPPSMQNHIPQVSSPAPLPRPMENRTSPSKSPFLHSGMKMQKAGPPVPASHIAPAPVQPPMIRRDITFPPGSVEATQPVLKQRRRLTMKDIGKEIFLIRLPNLPLSILSIVPSTL

SEQ ID NO: 36502 - protein, 93 aa, Homo sapiens; identical to SEQ ID NO: 34340
  MAP TO AC008101.6; EXPRESSED IN FETAL LIVER, SIGNAL = 1.7; EXPRESSED IN HELA, SIGNAL = 1.1; EXPRESSED IN BT474, SIGNAL = 1.8; EXPRESSED IN BONE MARROW, SIGNAL = 0.86; EXPRESSED IN HBL100, SIGNAL =   2; EXPRESSED IN LUNG, SIGNAL = 0.87; EXPRESSED IN ADULT LIVER, SIGNAL = 1.4; EXPRESSED IN BRAIN, SIGNAL = 1.2; EXPRESSED IN PLACENTA, SIGNAL = 0.95; EXPRESSED IN HEART, SIGNAL = 0.89; EST_HUMAN HIT: AW797166.1, EVALUE 1.00e-08; SWISSPROT HIT: P24709, EVALUE 3.80e+00

SEQ ID NO: 36503 - protein, 48 aa, Homo sapiens
  MAP TO AC012064.1; EXPRESSED IN PLACENTA, SIGNAL = 3.8; EXPRESSED IN ADULT LIVER, SIGNAL = 4.1; EXPRESSED IN FETAL LIVER, SIGNAL = 3.2; EXPRESSED IN BT474, SIGNAL = 2.6; EXPRESSED IN BRAIN, SIGNAL =   3; EXPRESSED IN LUNG, SIGNAL = 3.4; EXPRESSED IN BONE MARROW, SIGNAL =  29; EXPRESSED IN HEART, SIGNAL = 2.6; EXPRESSED IN HELA, SIGNAL = 3.4; EXPRESSED IN HBL100, SIGNAL = 3.5; EST_HUMAN HIT: BE777798.1, EVALUE 3.00e-22; SWISSPROT HIT: O60658, EVALUE 2.00e-23
INTMLRTPENRTLIKRMLIKCADVSNPCRPLQYCIEWAARISEEYFSQ

SEQ ID NO: 36504 - protein, 45 aa, Homo sapiens
  MAP TO AC012460.2; EXPRESSED IN BT474, SIGNAL = 1.1; EXPRESSED IN LUNG, SIGNAL = 1.3; EXPRESSED IN HEART, SIGNAL = 1.2; EXPRESSED IN FETAL LIVER, SIGNAL = 1.4; EXPRESSED IN ADULT LIVER, SIGNAL = 1.3; EXPRESSED IN BRAIN, SIGNAL =   1; EXPRESSED IN BONE MARROW, SIGNAL = 1.3; EXPRESSED IN PLACENTA, SIGNAL = 1.2; EXPRESSED IN HELA, SIGNAL = 1.4; EXPRESSED IN HBL100, SIGNAL = 1.1; SWISSPROT HIT: P32378, EVALUE 7.90e+00
VSQRKVIEDKDPFCQWDMLGIPTILVTECAWLVLASLPDASKRRQ

SEQ ID NO: 36505 - protein, 60 aa, Homo sapiens
  MAP TO AC010737.2; EXPRESSED IN FETAL LIVER, SIGNAL = 1.2; EXPRESSED IN BT474, SIGNAL = 1.3; EXPRESSED IN ADULT LIVER, SIGNAL = 2.2; EXPRESSED IN BONE MARROW, SIGNAL = 2.2; EXPRESSED IN LUNG, SIGNAL = 1.2; EXPRESSED IN BRAIN, SIGNAL = 1.3; EXPRESSED IN HELA, SIGNAL = 1.1; EXPRESSED IN PLACENTA, SIGNAL = 1.7; EXPRESSED IN HBL100, SIGNAL = 1.2; EXPRESSED IN HEART, SIGNAL = 1.3; EST_HUMAN HIT: AA055018.1, EVALUE 8.00e-18; SWISSPROT HIT: P70213, EVALUE 2.00e-07
MMKENDELRVSNSWLQKQILSLKSAKITLSESLNSCRERAEIVKKQTQALIMRVADLQQK

SEQ ID NO: 36506 - protein, 20 aa, Homo sapiens
  MAP TO AC010737.2; EXPRESSED IN FETAL LIVER, SIGNAL = 1.2; EXPRESSED IN BT474, SIGNAL = 1.3; EXPRESSED IN ADULT LIVER, SIGNAL = 2.2; EXPRESSED IN BONE MARROW, SIGNAL = 2.2; EXPRESSED IN LUNG, SIGNAL = 1.2; EXPRESSED IN BRAIN, SIGNAL = 1.3; EXPRESSED IN HELA, SIGNAL = 1.1; EXPRESSED IN PLACENTA, SIGNAL = 1.7; EXPRESSED IN HBL100, SIGNAL = 1.2; EXPRESSED IN HEART, SIGNAL = 1.3; EST_HUMAN HIT: BE163587.1, EVALUE 5.00e-01
EFLTPGFRSRYLASNLLRLP

SEQ ID NO: 36507 - protein, 48 aa, Homo sapiens
  MAP TO AC012135.1; EXPRESSED IN HBL100, SIGNAL = 1.9; EXPRESSED IN HEART, SIGNAL =   2; EXPRESSED IN BT474, SIGNAL =   2; EXPRESSED IN PLACENTA, SIGNAL = 2.2; EXPRESSED IN ADULT LIVER, SIGNAL = 2.2; EXPRESSED IN FETAL LIVER, SIGNAL = 2.3; EXPRESSED IN BRAIN, SIGNAL = 2.1; EXPRESSED IN LUNG, SIGNAL = 2.4; EXPRESSED IN BONE MARROW, SIGNAL = 1.9; EXPRESSED IN HELA, SIGNAL = 1.8; EST_HUMAN HIT: AA417352.1, EVALUE 2.00e-19
VNVNVANAPAILQEIAGCMARLVSVMIAAVKTSMVWSVEVVTFLIAVC

SEQ ID NO: 36508 - protein, 51 aa, Homo sapiens
  MAP TO AC012135.1; EXPRESSED IN HBL100, SIGNAL = 1.9; EXPRESSED IN HEART, SIGNAL =   2; EXPRESSED IN BT474, SIGNAL =   2; EXPRESSED IN PLACENTA, SIGNAL = 2.2; EXPRESSED IN ADULT LIVER, SIGNAL = 2.2; EXPRESSED IN FETAL LIVER, SIGNAL = 2.3; EXPRESSED IN BRAIN, SIGNAL = 2.1; EXPRESSED IN LUNG, SIGNAL = 2.4; EXPRESSED IN BONE MARROW, SIGNAL = 1.9; EXPRESSED IN HELA, SIGNAL = 1.8; EST_HUMAN HIT: AA445992.1, EVALUE 2.00e-20; SWISSPROT HIT: P16535, EVALUE 7.80e+00
HTAMRKVTTSTDHTIEVFTAAIITLTSLAIHPAISWRIAGAFATFTFTWKV

SEQ ID NO: 36509 - protein, 38 aa, Homo sapiens
  MAP TO AL035699.4; EXPRESSED IN ADULT LIVER, SIGNAL =   1; EXPRESSED IN BONE MARROW, SIGNAL = 0.88; EXPRESSED IN HBL100, SIGNAL = 0.89; EXPRESSED IN LUNG, SIGNAL = 1.3; EXPRESSED IN HELA, SIGNAL = 1.3; EXPRESSED IN BRAIN, SIGNAL = 1.2; EXPRESSED IN HEART, SIGNAL = 1.1; EXPRESSED IN PLACENTA, SIGNAL = 0.92; EXPRESSED IN BT474, SIGNAL = 0.63; EXPRESSED IN FETAL LIVER, SIGNAL = 0.78; EST_HUMAN HIT: AA746142.1, EVALUE 1.00e-03
FMSHHQEELVPKQPQKRKPQEQLLECNKLCGRGQSRQL

SEQ ID NO: 36510 - protein, 47 aa, Homo sapiens
  MAP TO AC009961.3; EXPRESSED IN BONE MARROW, SIGNAL = 8.2; EXPRESSED IN BRAIN, SIGNAL = 7.5; EXPRESSED IN HELA, SIGNAL = 8.2; EXPRESSED IN HBL100, SIGNAL = 7.1; EXPRESSED IN HEART, SIGNAL = 7.1; EXPRESSED IN BT474, SIGNAL = 6.3; EXPRESSED IN FETAL LIVER, SIGNAL = 5.8; EXPRESSED IN ADULT LIVER, SIGNAL =  11; EXPRESSED IN LUNG, SIGNAL = 8.2; EXPRESSED IN PLACENTA, SIGNAL = 9.1; SWISSPROT HIT: Q57598, EVALUE 9.10e-01; EST_HUMAN HIT: AW502536.1, EVALUE 1.00e-08
AGRPTIKNEKFLAGLSTDGFWDIQTFKVIEEAVYFHQHSILACKIEM

SEQ ID NO: 36511 - protein, 45 aa, Homo sapiens
  MAP TO AF130351.1; EXPRESSED IN HBL100, SIGNAL = 1.6; EXPRESSED IN FETAL LIVER, SIGNAL = 1.3; EXPRESSED IN HELA, SIGNAL = 1.4; EXPRESSED IN BRAIN, SIGNAL = 1.2; EXPRESSED IN BT474, SIGNAL = 0.89; EXPRESSED IN BONE MARROW, SIGNAL =   1; EXPRESSED IN ADULT LIVER, SIGNAL = 0.91; EXPRESSED IN HEART, SIGNAL = 1.1; EXPRESSED IN PLACENTA, SIGNAL = 0.7; EXPRESSED IN LUNG, SIGNAL = 0.74; SWISSPROT HIT: Q9Y897, EVALUE 2.10e+00; EST_HUMAN HIT: BE069027.1, EVALUE 7.00e-10
RTSSTMWNNTGEPGYIPDLRGKAFIFSPVSMILAVGLLYKAFIML

SEQ ID NO: 36512 - protein, 43 aa, Homo sapiens
  MAP TO AC008151.1; EXPRESSED IN FETAL LIVER, SIGNAL = 0.79; EXPRESSED IN ADULT LIVER, SIGNAL = 0.88; EXPRESSED IN BONE MARROW, SIGNAL = 1.2; EXPRESSED IN HBL100, SIGNAL = 0.75; EXPRESSED IN LUNG, SIGNAL = 0.65; EXPRESSED IN HELA, SIGNAL = 0.84; EXPRESSED IN PLACENTA, SIGNAL = 0.75; EXPRESSED IN BT474, SIGNAL = 0.8; EXPRESSED IN HEART, SIGNAL = 1.2; EST_HUMAN HIT: AV732714.1, EVALUE 8.00e-05; SWISSPROT HIT: P11369, EVALUE 1.00e-03
RLIATPVTIPTEFFMNTGKLILKYKWKNKRQGMAKTFLKRKNK

SEQ ID NO: 36513 - protein, 57 aa, Homo sapiens
  MAP TO AC007463.3; EXPRESSED IN FETAL LIVER, SIGNAL = 0.66; EXPRESSED IN HELA, SIGNAL = 0.6; EXPRESSED IN ADULT LIVER, SIGNAL = 1.1; EXPRESSED IN BONE MARROW, SIGNAL = 0.69; EXPRESSED IN HBL100, SIGNAL = 0.7; EXPRESSED IN PLACENTA, SIGNAL = 0.66; EXPRESSED IN HEART, SIGNAL = 1.1; EXPRESSED IN BRAIN, SIGNAL = 2.5; EST_HUMAN HIT: BF355342.1, EVALUE 2.10e+00; SWISSPROT HIT: P23144, EVALUE 5.10e-01
VFCDTSGTSVTLLKEDPLNHPRGQALALHRLPCLESRLCIQLPTLPRHQTMRFCLRL

SEQ ID NO: 36514 - protein, 52 aa, Homo sapiens
  MAP TO AC007561.2; EXPRESSED IN BT474, SIGNAL = 0.82; EXPRESSED IN HBL100, SIGNAL = 0.82; EXPRESSED IN FETAL LIVER, SIGNAL = 0.86; EXPRESSED IN LUNG, SIGNAL = 0.72; EXPRESSED IN HELA, SIGNAL = 0.68; EXPRESSED IN ADULT LIVER, SIGNAL = 1.1; EXPRESSED IN BRAIN, SIGNAL = 0.85; EXPRESSED IN HEART, SIGNAL = 1.2; EXPRESSED IN PLACENTA, SIGNAL =   1; EXPRESSED IN BONE MARROW, SIGNAL = 0.99; EST_HUMAN HIT: BF308761.1, EVALUE 3.80e+00
MEVGDRPYDVQLNWSQIFLCLGAGERKVQASEKESTEASWRKASSGPKRRPE

SEQ ID NO: 36515 - protein, 103 aa, Homo sapiens
  MAP TO AC012513.2; EXPRESSED IN BRAIN, SIGNAL = 9.4; EXPRESSED IN BONE MARROW, SIGNAL = 8.1; EXPRESSED IN LUNG, SIGNAL =  13; EXPRESSED IN PLACENTA, SIGNAL = 8.2; EXPRESSED IN HBL100, SIGNAL =  14; EXPRESSED IN HELA, SIGNAL =  12; EXPRESSED IN HEART, SIGNAL = 8.2; EXPRESSED IN BT474, SIGNAL = 8.6; EXPRESSED IN FETAL LIVER, SIGNAL =  12; EXPRESSED IN ADULT LIVER, SIGNAL =   8; EST_HUMAN HIT: AU130689.1, EVALUE 2.00e-13; SWISSPROT HIT: P04929, EVALUE 4.50e+00
IVTTAKISSFIVTIISFTTIPIPAIVVFISWFTISIAPTTAVGRPTTIVAHRHLHIHYIHHYTLHNHLCCHHLYFYHQSLLFHQSFHHSQNYLHHFQSFLHNP

SEQ ID NO: 36516 - protein, 48 aa, Homo sapiens
  MAP TO AC012130.1; EXPRESSED IN BT474, SIGNAL = 3.6; EXPRESSED IN FETAL LIVER, SIGNAL = 4.9; EXPRESSED IN LUNG, SIGNAL = 3.9; EXPRESSED IN BONE MARROW, SIGNAL = 3.2; EXPRESSED IN HEART, SIGNAL = 3.4; EXPRESSED IN PLACENTA, SIGNAL = 4.3; EXPRESSED IN ADULT LIVER, SIGNAL = 5.6; EXPRESSED IN BRAIN, SIGNAL = 3.4; EXPRESSED IN HELA, SIGNAL = 3.6; EXPRESSED IN HBL100, SIGNAL = 4.1; EST_HUMAN HIT: BE840998.1, EVALUE 5.00e-03; SWISSPROT HIT: P25147, EVALUE 6.00e-04
SNNQIEMITGLEDLKALQNLDLSHNQISSLQGLENHDLLEVINLEDNK

SEQ ID NO: 36517 - protein, 32 aa, Homo sapiens
  MAP TO AC011291.3; EXPRESSED IN FETAL LIVER, SIGNAL = 1.6; EXPRESSED IN LUNG, SIGNAL = 1.4; EXPRESSED IN BONE MARROW, SIGNAL = 1.6; EXPRESSED IN HELA, SIGNAL = 1.6; EXPRESSED IN HEART, SIGNAL = 1.4; EXPRESSED IN PLACENTA, SIGNAL = 1.5; EXPRESSED IN BT474, SIGNAL = 1.6; EXPRESSED IN ADULT LIVER, SIGNAL = 2.1; EXPRESSED IN BRAIN, SIGNAL = 1.9; EXPRESSED IN HBL100, SIGNAL = 1.5; SWISSPROT HIT: P54750, EVALUE 5.00e-12; EST_HUMAN HIT: N53248.1, EVALUE 7.00e-11
YSLAAVDLKSFKNNLVDIIQQNKERWKELAAQ

SEQ ID NO: 36518 - protein, 29 aa, Homo sapiens
  MAP TO AF027390.1; EXPRESSED IN HELA, SIGNAL = 1.1; EXPRESSED IN HEART, SIGNAL = 0.97; EXPRESSED IN FETAL LIVER, SIGNAL = 0.99; EXPRESSED IN BONE MARROW, SIGNAL = 1.1
RLSAFVTVARAGVTLGPHFIGTLSGLRVS

SEQ ID NO: 36519 - protein, 115 aa, Homo sapiens; identical to SEQ ID NO: 35489
  MAP TO AC006548.19; EXPRESSED IN BT474, SIGNAL = 0.62; EXPRESSED IN FETAL LIVER, SIGNAL = 0.79; EXPRESSED IN BRAIN, SIGNAL = 1.1; EXPRESSED IN ADULT LIVER, SIGNAL = 0.79; EXPRESSED IN PLACENTA, SIGNAL = 1.1; EXPRESSED IN BONE MARROW, SIGNAL = 0.93; EXPRESSED IN LUNG, SIGNAL = 7.8; EXPRESSED IN HELA, SIGNAL =   1; EXPRESSED IN HEART, SIGNAL = 0.97; SWISSPROT HIT: P54644, EVALUE 2.00e-08; EST_HUMAN HIT: BF316383.1, EVALUE 8.00e-39

SEQ ID NO: 36520 - protein, 37 aa, Homo sapiens
  MAP TO AC006548.19; EXPRESSED IN BT474, SIGNAL = 0.62; EXPRESSED IN FETAL LIVER, SIGNAL = 0.79; EXPRESSED IN BRAIN, SIGNAL = 1.1; EXPRESSED IN ADULT LIVER, SIGNAL = 0.79; EXPRESSED IN PLACENTA, SIGNAL = 1.1; EXPRESSED IN BONE MARROW, SIGNAL = 0.93; EXPRESSED IN LUNG, SIGNAL = 7.8; EXPRESSED IN HELA, SIGNAL =   1; EXPRESSED IN HEART, SIGNAL = 0.97; EST_HUMAN HIT: BF316383.1, EVALUE 5.00e-08
PGGNAGLSCGGARLAVTQMFWNTTRMMAPRSPCAPST

SEQ ID NO: 36521 - protein, 36 aa, Homo sapiens
  MAP TO AP000221.1; EXPRESSED IN PLACENTA, SIGNAL = 1.3; EXPRESSED IN BT474, SIGNAL = 1.1; EXPRESSED IN LUNG, SIGNAL = 1.3; EXPRESSED IN HELA, SIGNAL = 1.7; EXPRESSED IN HBL100, SIGNAL = 1.2; EXPRESSED IN FETAL LIVER, SIGNAL = 1.1; EXPRESSED IN ADULT LIVER, SIGNAL = 0.9; EXPRESSED IN BRAIN, SIGNAL = 1.3; EXPRESSED IN BONE MARROW, SIGNAL = 1.3; EXPRESSED IN HEART, SIGNAL = 1.1
FSSQSPILYFSSRCRHPRKSETVFGWIEEQMCGRHQ

SEQ ID NO: 36522 - protein, 68 aa, Homo sapiens
  MAP TO AF001549.1; EXPRESSED IN PLACENTA, SIGNAL = 1.5; EXPRESSED IN HBL100, SIGNAL = 1.2; EXPRESSED IN HEART, SIGNAL = 0.99; EXPRESSED IN BRAIN, SIGNAL = 1.3; EXPRESSED IN LUNG, SIGNAL = 1.5; EXPRESSED IN HELA, SIGNAL = 1.4; EXPRESSED IN ADULT LIVER, SIGNAL = 1.6; EXPRESSED IN FETAL LIVER, SIGNAL = 1.3; EXPRESSED IN BT474, SIGNAL = 1.3; EXPRESSED IN BONE MARROW, SIGNAL = 1.4; SWISSPROT HIT: Q9Z3Q7, EVALUE 1.10e+00
LKAELLDIAMENQTLNETLGSLSDAVVGLTYSQLESLSPEAVHGAISTLNQVSGWAKSQVIILSAKYL

SEQ ID NO: 36523 - protein, 19 aa, Homo sapiens
  MAP TO AF001549.1; EXPRESSED IN PLACENTA, SIGNAL = 1.5; EXPRESSED IN HBL100, SIGNAL = 1.2; EXPRESSED IN HEART, SIGNAL = 0.99; EXPRESSED IN BRAIN, SIGNAL = 1.3; EXPRESSED IN LUNG, SIGNAL = 1.5; EXPRESSED IN HELA, SIGNAL = 1.4; EXPRESSED IN ADULT LIVER, SIGNAL = 1.6; EXPRESSED IN FETAL LIVER, SIGNAL = 1.3; EXPRESSED IN BT474, SIGNAL = 1.3; EXPRESSED IN BONE MARROW, SIGNAL = 1.4
LLPAQSRTPGHCHGEPDPQ

SEQ ID NO: 36524 - protein, 97 aa, Homo sapiens
  MAP TO AC007221.1; EXPRESSED IN BT474, SIGNAL =   4; EXPRESSED IN FETAL LIVER, SIGNAL = 5.2; EXPRESSED IN BRAIN, SIGNAL = 4.6; EXPRESSED IN BONE MARROW, SIGNAL = 3.9; EXPRESSED IN HBL100, SIGNAL = 4.3; EXPRESSED IN PLACENTA, SIGNAL = 4.5; EXPRESSED IN HEART, SIGNAL =   4; EXPRESSED IN LUNG, SIGNAL = 5.6; EXPRESSED IN HELA, SIGNAL = 4.1; EXPRESSED IN ADULT LIVER, SIGNAL = 6.7; SWISSPROT HIT: Q05793, EVALUE 4.30e-01; EST_HUMAN HIT: BF381623.1, EVALUE 6.40e-01
AVNHSTAAVRVRSDWELRRDGGCAPILRSHMGSFQGLATYAENQGAWFFSSQINRTQSNICSYSGANGKCWEPGILGEILQQSCSAGSWKGGHFDEE

SEQ ID NO: 36525 - protein, 71 aa, Homo sapiens
  MAP TO AP000023.1; EXPRESSED IN BONE MARROW, SIGNAL = 0.64; EXPRESSED IN FETAL LIVER, SIGNAL = 1.7; EXPRESSED IN ADULT LIVER, SIGNAL = 0.95; EXPRESSED IN BT474, SIGNAL = 0.92; EXPRESSED IN HBL100, SIGNAL = 0.86; EXPRESSED IN LUNG, SIGNAL = 1.1; EXPRESSED IN HELA, SIGNAL = 0.88; EXPRESSED IN PLACENTA, SIGNAL = 0.71; EXPRESSED IN HEART, SIGNAL = 0.96
FHPAWRNQEKPENLGQIQSRVMQSGSCLVSVGGPIGTLRKKKLRKKKTLVTRILRIRKDKDKVISPTMSKF

SEQ ID NO: 36526 - protein, 44 aa, Homo sapiens
  MAP TO AC007027.2; EXPRESSED IN HELA, SIGNAL =   2; EXPRESSED IN ADULT LIVER, SIGNAL = 2.9; EXPRESSED IN BT474, SIGNAL =   2; EXPRESSED IN BRAIN, SIGNAL = 2.9; EXPRESSED IN BONE MARROW, SIGNAL = 1.9; EXPRESSED IN HBL100, SIGNAL = 1.8; EXPRESSED IN HEART, SIGNAL = 1.9; EXPRESSED IN PLACENTA, SIGNAL = 2.1; EXPRESSED IN FETAL LIVER, SIGNAL = 2.3; EXPRESSED IN LUNG, SIGNAL = 2.4; SWISSPROT HIT: P48754, EVALUE 4.60e+00
SLILDECNSHRKQQKAPTNPFSDRTGAEAQCVVLAGRRLSVIVW

SEQ ID NO: 36527 - protein, 42 aa, Homo sapiens
  MAP TO AC007228.1; EXPRESSED IN PLACENTA, SIGNAL = 3.1; EXPRESSED IN HELA, SIGNAL = 3.4; EXPRESSED IN ADULT LIVER, SIGNAL = 4.6; EXPRESSED IN BT474, SIGNAL =   3; EXPRESSED IN LUNG, SIGNAL =   4; EXPRESSED IN BRAIN, SIGNAL =   4; EXPRESSED IN BONE MARROW, SIGNAL = 2.8; EXPRESSED IN HEART, SIGNAL = 2.7; EXPRESSED IN HBL100, SIGNAL = 3.2; EXPRESSED IN FETAL LIVER, SIGNAL = 3.7; EST_HUMAN HIT: BE154730.1, EVALUE 2.00e-13; SWISSPROT HIT: Q06730, EVALUE 2.00e-13
ESVTFRDVTVDFTQEEWQQLEPAQKDLYRDVMLENYRNLVSL

SEQ ID NO: 36528 - protein, 36 aa, Homo sapiens
  MAP TO AC007228.1; EXPRESSED IN PLACENTA, SIGNAL = 3.1; EXPRESSED IN HELA, SIGNAL = 3.4; EXPRESSED IN ADULT LIVER, SIGNAL = 4.6; EXPRESSED IN BT474, SIGNAL =   3; EXPRESSED IN LUNG, SIGNAL =   4; EXPRESSED IN BRAIN, SIGNAL =   4; EXPRESSED IN BONE MARROW, SIGNAL = 2.8; EXPRESSED IN HEART, SIGNAL = 2.7; EXPRESSED IN HBL100, SIGNAL = 3.2; EXPRESSED IN FETAL LIVER, SIGNAL = 3.7
VPVVLQHDIPVQVLLGRLQLLPLLLGEVHSHIPERH

SEQ ID NO: 36529 - protein, 93 aa, Homo sapiens
  MAP TO AP000161.1; EXPRESSED IN HEART, SIGNAL = 0.98; EXPRESSED IN PLACENTA, SIGNAL = 0.88; EXPRESSED IN BT474, SIGNAL = 0.75; EXPRESSED IN BONE MARROW, SIGNAL = 0.7; EXPRESSED IN LUNG, SIGNAL = 0.88; EXPRESSED IN HELA, SIGNAL = 0.98; EXPRESSED IN ADULT LIVER, SIGNAL = 0.85; EXPRESSED IN BRAIN, SIGNAL = 0.84; EXPRESSED IN HBL100, SIGNAL = 0.7; EXPRESSED IN FETAL LIVER, SIGNAL = 0.81; EST_HUMAN HIT: AA594152.1, EVALUE 4.50e+00; SWISSPROT HIT: P14234, EVALUE 2.90e+00
RKKSWKPLNAQIKQVMKDTMSQLKSMAENLLDTMQLGDFSRDHSDEDSKVQLKRKAENEDCLPQPLPPNYQSEGHLKSVLGDGDLNVFCESQE

SEQ ID NO: 36530 - protein, 45 aa, Homo sapiens
  MAP TO AC007246.2; EXPRESSED IN BT474, SIGNAL = 3.8; EXPRESSED IN FETAL LIVER, SIGNAL = 4.2; EXPRESSED IN BONE MARROW, SIGNAL = 3.8; EXPRESSED IN PLACENTA, SIGNAL = 4.1; EXPRESSED IN BRAIN, SIGNAL = 4.3; EXPRESSED IN LUNG, SIGNAL = 5.3; EXPRESSED IN HEART, SIGNAL = 3.6; EXPRESSED IN HELA, SIGNAL = 4.5; EXPRESSED IN HBL100, SIGNAL = 9.2; EXPRESSED IN ADULT LIVER, SIGNAL = 5.3; SWISSPROT HIT: P36730, EVALUE 4.60e+00; EST_HUMAN HIT: AA325374.1, EVALUE 7.00e-19
LRRITAGFLGMAVAVLLCGCIVATVSFFWEESLTQHVAGLLFLMT

SEQ ID NO: 36531 - protein, 41 aa, Homo sapiens
  MAP TO AF067844.1; EXPRESSED IN BONE MARROW, SIGNAL = 2.9; EXPRESSED IN HBL100, SIGNAL =   6; EXPRESSED IN BT474, SIGNAL = 4.5; EXPRESSED IN ADULT LIVER, SIGNAL = 1.1; EXPRESSED IN FETAL LIVER, SIGNAL = 5.6; EXPRESSED IN BRAIN, SIGNAL =   2; EXPRESSED IN LUNG, SIGNAL =  10; EXPRESSED IN PLACENTA, SIGNAL = 3.1; EXPRESSED IN HEART, SIGNAL = 4.9; EXPRESSED IN HELA, SIGNAL = 8.2; EST_HUMAN HIT: AI589294.1, EVALUE 5.00e-17
RTRCFPKLDILLAPLATEEMKRLLSAAQFEGPRQTKSWRMI

SEQ ID NO: 36532 - protein, 40 aa, Homo sapiens
  MAP TO AF001905.1; EXPRESSED IN BONE MARROW, SIGNAL = 1.1; EXPRESSED IN LUNG, SIGNAL = 1.6; EXPRESSED IN HELA, SIGNAL = 1.1; EXPRESSED IN HEART, SIGNAL = 1.1; EXPRESSED IN BT474, SIGNAL =   1; EXPRESSED IN BRAIN, SIGNAL =   1; EXPRESSED IN PLACENTA, SIGNAL = 1.4; EXPRESSED IN ADULT LIVER, SIGNAL = 1.8; EXPRESSED IN FETAL LIVER, SIGNAL = 1.6
MTSNSIHVVENDKILEMGMFGEDRLLEAARVCLSHGEERE

SEQ ID NO: 36533 - protein, 31 aa, Homo sapiens
  MAP TO AP000183.1; EXPRESSED IN FETAL LIVER, SIGNAL = 0.76; EXPRESSED IN HELA, SIGNAL = 1.6; EXPRESSED IN ADULT LIVER, SIGNAL = 0.9; EXPRESSED IN BT474, SIGNAL = 0.77; EXPRESSED IN LUNG, SIGNAL =   1; EXPRESSED IN BRAIN, SIGNAL = 1.1; EXPRESSED IN HEART, SIGNAL = 0.87; EXPRESSED IN PLACENTA, SIGNAL = 0.92; EXPRESSED IN BONE MARROW, SIGNAL =   1; EXPRESSED IN HBL100, SIGNAL = 0.74; EST_HUMAN HIT: F00327.1, EVALUE 2.70e-01
MSSRGNFSAVLTMLSSALCTCILTATHHTRS

SEQ ID NO: 36534 - protein, 69 aa, Homo sapiens
  MAP TO AL035552.9; EXPRESSED IN BONE MARROW, SIGNAL = 0.65; EXPRESSED IN FETAL LIVER, SIGNAL = 0.62; EXPRESSED IN ADULT LIVER, SIGNAL = 0.99; EXPRESSED IN HEART, SIGNAL = 0.95; EXPRESSED IN BT474, SIGNAL = 0.99; EXPRESSED IN LUNG, SIGNAL = 0.6; EXPRESSED IN PLACENTA, SIGNAL = 0.72; EST_HUMAN HIT: BF245240.1, EVALUE 3.00e-22; SWISSPROT HIT: O19105, EVALUE 1.90e+00
TWIGNRRRKYRLMGIEVPPPRGGPADFSEQPESGSLSALTPGEEAGPEVGEDNDRNDEVSICLSEGSSQ

SEQ ID NO: 36535 - protein, 127 aa, Homo sapiens
  MAP TO AC007251.1; EXPRESSED IN PLACENTA, SIGNAL = 1.8; EXPRESSED IN ADULT LIVER, SIGNAL = 2.2; EXPRESSED IN BRAIN, SIGNAL = 1.1; EXPRESSED IN LUNG, SIGNAL = 1.4; EXPRESSED IN BONE MARROW, SIGNAL =   2; EXPRESSED IN HEART, SIGNAL = 0.99; EXPRESSED IN HELA, SIGNAL = 1.7; EXPRESSED IN HBL100, SIGNAL = 1.2; EXPRESSED IN BT474, SIGNAL = 1.2; EXPRESSED IN FETAL LIVER, SIGNAL = 1.2; SWISSPROT HIT: Q02817, EVALUE 4.20e+00; EST_HUMAN HIT: BF508546.1, EVALUE 9.00e-35
GVDMEVASLTITPSDPLAKFLLPVPATLRSAGLEVLVSEGGTLPPADTTTIPLHWKLRLPPGHFGLLLPLSQQAKKGVTMLAGVTCPVIKVNGKLQQPNSGRTTNGPDPSGMKVWVTPPGKIKTMTC

SEQ ID NO: 36536 - protein, 90 aa, Homo sapiens; identical to SEQ ID NO: 35610
  MAP TO AP000193.1; EXPRESSED IN PLACENTA, SIGNAL = 0.9; EXPRESSED IN BT474, SIGNAL = 0.94; EXPRESSED IN BONE MARROW, SIGNAL = 1.1; EXPRESSED IN FETAL LIVER, SIGNAL =   1; EXPRESSED IN LUNG, SIGNAL =   1; EXPRESSED IN HELA, SIGNAL = 3.3; EXPRESSED IN ADULT LIVER, SIGNAL =   1; EXPRESSED IN BRAIN, SIGNAL = 1.1; EXPRESSED IN HEART, SIGNAL = 1.1; EXPRESSED IN HBL100, SIGNAL = 1.3; EST_HUMAN HIT: BE222239.1, EVALUE 1.00e-05; SWISSPROT HIT: P37246, EVALUE 2.70e+00

SEQ ID NO: 36537 - protein, 71 aa, Homo sapiens
  MAP TO AC012678.1; EXPRESSED IN BONE MARROW, SIGNAL = 7.3; EXPRESSED IN LUNG, SIGNAL = 9.3; EXPRESSED IN PLACENTA, SIGNAL = 8.9; EXPRESSED IN HELA, SIGNAL = 8.2; EXPRESSED IN HBL100, SIGNAL = 7.2; EXPRESSED IN HEART, SIGNAL = 6.6; EXPRESSED IN FETAL LIVER, SIGNAL = 9.3; EXPRESSED IN ADULT LIVER, SIGNAL =  11; EXPRESSED IN BT474, SIGNAL = 6.8; EXPRESSED IN BRAIN, SIGNAL = 6.5; EST_HUMAN HIT: AV693158.1, EVALUE 7.20e-02; SWISSPROT HIT: P47031, EVALUE 1.50e+00
MASREKVSSCLAHPNHPLSHFIPTYNSSSNQKIIYTDKPLEKFENLSHSFSSITQINSSLWLGLGWSSCPQ

SEQ ID NO: 36538 - protein, 17 aa, Homo sapiens
  MAP TO AC012678.1; EXPRESSED IN BONE MARROW, SIGNAL = 7.3; EXPRESSED IN LUNG, SIGNAL = 9.3; EXPRESSED IN PLACENTA, SIGNAL = 8.9; EXPRESSED IN HELA, SIGNAL = 8.2; EXPRESSED IN HBL100, SIGNAL = 7.2; EXPRESSED IN HEART, SIGNAL = 6.6; EXPRESSED IN FETAL LIVER, SIGNAL = 9.3; EXPRESSED IN ADULT LIVER, SIGNAL =  11; EXPRESSED IN BT474, SIGNAL = 6.8; EXPRESSED IN BRAIN, SIGNAL = 6.5
WPAGRRCPAVWLTQITP

SEQ ID NO: 36539 - protein, 359 aa, Homo sapiens
  MAP TO AH007699.1; EXPRESSED IN BT474, SIGNAL = 2.8; EXPRESSED IN BONE MARROW, SIGNAL = 2.4; EXPRESSED IN HBL100, SIGNAL = 2.1; EXPRESSED IN HELA, SIGNAL =   3; EXPRESSED IN ADULT LIVER, SIGNAL = 2.6; EXPRESSED IN FETAL LIVER, SIGNAL = 2.3; EXPRESSED IN BRAIN, SIGNAL = 2.3; EXPRESSED IN LUNG, SIGNAL = 2.6; EXPRESSED IN PLACENTA, SIGNAL = 2.4; EXPRESSED IN HEART, SIGNAL =   3; EST_HUMAN HIT: BE514070.1, EVALUE 8.00e-47; SWISSPROT HIT: Q05049, EVALUE 8.50e-01
MQTPHIQLTKGLATSPQTCTIRTRHIQPTKGLATSPWTCTIRTRGHRTSSSPRAWRTHPGPAATGHRTTSSPQGLVTSPQTCTIRIQHIQLTAGPGDLTPDCTIRIQHIQLTAGPGNLTPDLHHPDSIPPAHRGPGDHTPDLHHPDAAHPAHSRAWRPHPGPASSGLHTSSSPRAWRPHPRPAPSRRRTSSSQQGLATSPRTCIIRTPYLQLTEGLETSPLTCTIRTPHIQLTAGSGDLTPDLYHPDTAHPAHSRVWRPHPGPAPSGLHTSSSPRAWRPHSRPAPSRHRTSSSPQGLATSPRTCTIWTLHIQLTEGLATSLQTCTIQTPHIQLTSRGLATFTPDLHHPDTTHPAHSRAW

SEQ ID NO: 36540 - protein, 22 aa, Homo sapiens
  MAP TO AH007699.1; EXPRESSED IN BT474, SIGNAL = 2.8; EXPRESSED IN BONE MARROW, SIGNAL = 2.4; EXPRESSED IN HBL100, SIGNAL = 2.1; EXPRESSED IN HELA, SIGNAL =   3; EXPRESSED IN ADULT LIVER, SIGNAL = 2.6; EXPRESSED IN FETAL LIVER, SIGNAL = 2.3; EXPRESSED IN BRAIN, SIGNAL = 2.3; EXPRESSED IN LUNG, SIGNAL = 2.6; EXPRESSED IN PLACENTA, SIGNAL = 2.4; EXPRESSED IN HEART, SIGNAL =   3; EST_HUMAN HIT: BE268183.1, EVALUE 7.50e-02
LGCGRQALGELEVWSPDDAGPG

SEQ ID NO: 36541 - protein, 74 aa, Homo sapiens; identical to SEQ ID NO: 34152
  MAP TO AP000036.1; EXPRESSED IN HBL100, SIGNAL = 0.78; EXPRESSED IN LUNG, SIGNAL = 0.98; EXPRESSED IN HELA, SIGNAL = 0.98; EXPRESSED IN BT474, SIGNAL = 1.1; EXPRESSED IN BONE MARROW, SIGNAL = 0.85; EXPRESSED IN PLACENTA, SIGNAL =   1; EXPRESSED IN HEART, SIGNAL =   1; EXPRESSED IN BRAIN, SIGNAL = 1.2; EXPRESSED IN ADULT LIVER, SIGNAL = 1.1; EXPRESSED IN FETAL LIVER, SIGNAL = 0.91; EST_HUMAN HIT: BF529471.1, EVALUE 1.00e-27; SWISSPROT HIT: P57058, EVALUE 2.00e-28

SEQ ID NO: 36542 - protein, 130 aa, Homo sapiens
  MAP TO AP000036.1; EXPRESSED IN HBL100, SIGNAL = 0.78; EXPRESSED IN LUNG, SIGNAL = 0.98; EXPRESSED IN HELA, SIGNAL = 0.98; EXPRESSED IN BT474, SIGNAL = 1.1; EXPRESSED IN BONE MARROW, SIGNAL = 0.85; EXPRESSED IN PLACENTA, SIGNAL =   1; EXPRESSED IN HEART, SIGNAL =   1; EXPRESSED IN BRAIN, SIGNAL = 1.2; EXPRESSED IN ADULT LIVER, SIGNAL = 1.1; EXPRESSED IN FETAL LIVER, SIGNAL = 0.91; SWISSPROT HIT: P08042, EVALUE 7.00e-03; EST_HUMAN HIT: BF529471.1, EVALUE 2.00e-73
FLWLPQYFPQNLRFQLCGFFFHGVHPRATAQDPEDCEETGAPSARARKHWHPPQGRPPDAGHGALLRVCGSRRPRRSAVSLSSLQDSELPGQLGSQKFQREDAVPGSAIRKHVASPYSFASNSGLFCSRR

SEQ ID NO: 36543 - protein, 110 aa, Homo sapiens
  MAP TO AC007256.1; EXPRESSED IN HELA, SIGNAL = 1.6; EXPRESSED IN HEART, SIGNAL =   1; EXPRESSED IN ADULT LIVER, SIGNAL = 1.8; EXPRESSED IN BT474, SIGNAL = 2.1; EXPRESSED IN FETAL LIVER, SIGNAL = 1.2; EXPRESSED IN BRAIN, SIGNAL = 1.3; EXPRESSED IN BONE MARROW, SIGNAL = 1.1; EXPRESSED IN HBL100, SIGNAL = 1.2; EXPRESSED IN PLACENTA, SIGNAL = 1.3; EXPRESSED IN LUNG, SIGNAL = 1.6; EST_HUMAN HIT: AA312258.1, EVALUE 5.00e-55; SWISSPROT HIT: Q14790, EVALUE 1.00e-51
DYILLPFKKMDFSRNLYDIGEQLDSEDLASLKFLSLDYIPQRKQEPIKDALMLFQRLQEKRMLEESNLSFLKELLFRINRLDLLITYLNTRKEEMERELQTPGRAQISAY

SEQ ID NO: 36544 - protein, 32 aa, Homo sapiens
  MAP TO AC007256.1; EXPRESSED IN HELA, SIGNAL = 1.6; EXPRESSED IN HEART, SIGNAL =   1; EXPRESSED IN ADULT LIVER, SIGNAL = 1.8; EXPRESSED IN BT474, SIGNAL = 2.1; EXPRESSED IN FETAL LIVER, SIGNAL = 1.2; EXPRESSED IN BRAIN, SIGNAL = 1.3; EXPRESSED IN BONE MARROW, SIGNAL = 1.1; EXPRESSED IN HBL100, SIGNAL = 1.2; EXPRESSED IN PLACENTA, SIGNAL = 1.3; EXPRESSED IN LUNG, SIGNAL = 1.6; EST_HUMAN HIT: AA312258.1, EVALUE 5.00e-13
IFSCLLKRWTSAEIFMILGNNWTVKIWPPSSS

SEQ ID NO: 36545 - protein, 60 aa, Homo sapiens
  MAP TO AF181450.1; EXPRESSED IN FETAL LIVER, SIGNAL =   2; EXPRESSED IN HEART, SIGNAL = 1.1; EXPRESSED IN BRAIN, SIGNAL = 0.93; EXPRESSED IN LUNG, SIGNAL = 2.7; EXPRESSED IN ADULT LIVER, SIGNAL = 1.1; SWISSPROT HIT: Q61909, EVALUE 6.00e-29; EST_HUMAN HIT: BE741639.1, EVALUE 6.00e-19
ANLPLLQRELLHCARLAKQNPAQYLAQHEQLLLDASTTSPVDSSELLLDVNENGKRRTPD

SEQ ID NO: 36546 - protein, 48 aa, Homo sapiens
  MAP TO AC005769.9; EXPRESSED IN BONE MARROW, SIGNAL = 1.1; EXPRESSED IN HBL100, SIGNAL = 0.76; EXPRESSED IN FETAL LIVER, SIGNAL = 0.83; EXPRESSED IN LUNG, SIGNAL =   1; EXPRESSED IN ADULT LIVER, SIGNAL = 0.73; EXPRESSED IN PLACENTA, SIGNAL = 1.1; EXPRESSED IN HEART, SIGNAL = 0.92; EXPRESSED IN BRAIN, SIGNAL = 0.84; EXPRESSED IN HELA, SIGNAL = 0.75; EXPRESSED IN BT474, SIGNAL = 1.4
YHLLSTNGLPKLRSLLLLSFSYILKLLFMNIGMKWMILNLSGVSMRPF

SEQ ID NO: 36547 - protein, 183 aa, Homo sapiens
  MAP TO AJ003147.1; EXPRESSED IN HBL100, SIGNAL =  11; EXPRESSED IN PLACENTA, SIGNAL =  12; EXPRESSED IN HELA, SIGNAL =  13; EXPRESSED IN HEART, SIGNAL =  11; EXPRESSED IN ADULT LIVER, SIGNAL =  14; EXPRESSED IN BT474, SIGNAL =  11; EXPRESSED IN FETAL LIVER, SIGNAL =  13; EXPRESSED IN BONE MARROW, SIGNAL =  11; EXPRESSED IN LUNG, SIGNAL =  13; EXPRESSED IN BRAIN, SIGNAL = 9.8; EST_HUMAN HIT: BE870317.1, EVALUE 2.00e-44; SWISSPROT HIT: O15553, EVALUE 1.00e-107
NVILDAETAYPNLIFSDDLKSVRLGNKWERLPDGPQRFDSCIIVLGSPSFLSGRRYWEVEVGDKTAWILGACKTSISRKGNMTLSPENGYWVVIMMKENEYQASSVPPTRLLIKEPPKRVGIFVDYRVGSISFYNVTARSHIYTFASCSFSGPLQPIFSPGTRDGGKNTAPLTICPVGGQGPD

SEQ ID NO: 36548 - protein, 56 aa, Homo sapiens
  MAP TO AF064863.1; EXPRESSED IN BRAIN, SIGNAL = 1.6; EXPRESSED IN BONE MARROW, SIGNAL = 1.8; EXPRESSED IN LUNG, SIGNAL = 1.2; EXPRESSED IN HBL100, SIGNAL = 1.6; EXPRESSED IN PLACENTA, SIGNAL = 1.3; EXPRESSED IN HELA, SIGNAL = 1.4; EXPRESSED IN HEART, SIGNAL = 1.8; EXPRESSED IN ADULT LIVER, SIGNAL = 1.1; EXPRESSED IN BT474, SIGNAL = 1.5; EXPRESSED IN FETAL LIVER, SIGNAL = 1.4; SWISSPROT HIT: P53246, EVALUE 1.20e+00
KSCVRGKYTVTTGNKVVRELYKTDHCRGKNNDFESMNFPVRNKNENNGTFVPSKFF

SEQ ID NO: 36549 - protein, 113 aa, Homo sapiens
  MAP TO AC004985.2; EXPRESSED IN HEART, SIGNAL = 0.96; EXPRESSED IN BONE MARROW, SIGNAL = 1.1; EXPRESSED IN ADULT LIVER, SIGNAL = 1.2; EXPRESSED IN PLACENTA, SIGNAL =   1; EXPRESSED IN BT474, SIGNAL = 1.8; EXPRESSED IN HBL100, SIGNAL = 1.3; EXPRESSED IN FETAL LIVER, SIGNAL = 0.89; EXPRESSED IN LUNG, SIGNAL = 0.94; EXPRESSED IN HELA, SIGNAL = 0.93; EXPRESSED IN BRAIN, SIGNAL = 1.3; EST_HUMAN HIT: BE883388.1, EVALUE 3.00e-55; SWISSPROT HIT: P34545, EVALUE 1.10e+00
ERSRLQEMLSLLGLETYQVQKLSLQDSLQISFDSMKNWAPQVPKDLPWNFLRKLQALNADARNTTMVLDVLPDARPVEKESQMEEEIIYWDPADDLAADIYSFSELPTPDTPV

SEQ ID NO: 36550 - protein, 66 aa, Homo sapiens
  MAP TO AL049736.10; EXPRESSED IN BONE MARROW, SIGNAL = 0.76; EXPRESSED IN FETAL LIVER, SIGNAL = 0.59; EXPRESSED IN ADULT LIVER, SIGNAL = 0.93; EXPRESSED IN HEART, SIGNAL = 0.87; EXPRESSED IN PLACENTA, SIGNAL = 0.65; EXPRESSED IN BT474, SIGNAL = 0.63; EXPRESSED IN LUNG, SIGNAL =   1; EXPRESSED IN HELA, SIGNAL = 0.68; EXPRESSED IN BRAIN, SIGNAL = 0.88; EST_HUMAN HIT: BE080748.1, EVALUE 4.30e-01
CLATSLASTHWMPPVPHPHLSQRSSDIARYPLRTTPPLLKTTALETQFRERTTHLLSEGLSNAYYV

SEQ ID NO: 36551 - protein, 57 aa, Homo sapiens
  MAP TO AP000247.1; EXPRESSED IN HBL100, SIGNAL = 0.67; EXPRESSED IN HELA, SIGNAL = 0.74; EXPRESSED IN ADULT LIVER, SIGNAL = 0.72; EXPRESSED IN PLACENTA, SIGNAL = 0.7; EXPRESSED IN BONE MARROW, SIGNAL = 0.97; EXPRESSED IN BRAIN, SIGNAL = 1.1; EXPRESSED IN BT474, SIGNAL = 0.75; EXPRESSED IN HEART, SIGNAL = 0.92; EXPRESSED IN LUNG, SIGNAL = 0.85; EXPRESSED IN FETAL LIVER, SIGNAL = 0.65; EST_HUMAN HIT: BE968985.1, EVALUE 7.20e-01; SWISSPROT HIT: Q13009, EVALUE 1.00e-31
REKEVVLPNVHQHNPDCDIWVHEYFTPSWFCLPNNQPALTVVRPGDTARDTLELICK

SEQ ID NO: 36552 - protein, 50 aa, Homo sapiens
  MAP TO AP000247.1; EXPRESSED IN HBL100, SIGNAL = 0.67; EXPRESSED IN HELA, SIGNAL = 0.74; EXPRESSED IN ADULT LIVER, SIGNAL = 0.72; EXPRESSED IN PLACENTA, SIGNAL = 0.7; EXPRESSED IN BONE MARROW, SIGNAL = 0.97; EXPRESSED IN BRAIN, SIGNAL = 1.1; EXPRESSED IN BT474, SIGNAL = 0.75; EXPRESSED IN HEART, SIGNAL = 0.92; EXPRESSED IN LUNG, SIGNAL = 0.85; EXPRESSED IN FETAL LIVER, SIGNAL = 0.65
LANQLQGVPCSVAWPDDRQGRLIIGQTEPGWSEILVDPNVAVRVVLVNVR

SEQ ID NO: 36553 - protein, 27 aa, Homo sapiens
  MAP TO AC008038.1; EXPRESSED IN HBL100, SIGNAL = 1.8; EXPRESSED IN FETAL LIVER, SIGNAL = 1.4; EXPRESSED IN BRAIN, SIGNAL = 0.95; EXPRESSED IN PLACENTA, SIGNAL = 0.69; EXPRESSED IN BT474, SIGNAL =   1; EXPRESSED IN BONE MARROW, SIGNAL =   1; EXPRESSED IN LUNG, SIGNAL = 0.97; EXPRESSED IN HELA, SIGNAL = 1.6; EXPRESSED IN ADULT LIVER, SIGNAL = 1.1; EXPRESSED IN HEART, SIGNAL = 1.4; EST_HUMAN HIT: AA206131.1, EVALUE 1.00e-03
QALSQDHYFSLTSKLFKNKCLTIICEH

SEQ ID NO: 36554 - protein, 110 aa, Homo sapiens
  MAP TO AL022397.1; EXPRESSED IN PLACENTA, SIGNAL = 0.79; EXPRESSED IN BONE MARROW, SIGNAL = 0.85; EXPRESSED IN LUNG, SIGNAL = 0.78; EXPRESSED IN ADULT LIVER, SIGNAL = 0.89; EXPRESSED IN BRAIN, SIGNAL = 0.84; EXPRESSED IN BT474, SIGNAL = 0.62; EXPRESSED IN HELA, SIGNAL = 0.79; EXPRESSED IN HEART, SIGNAL = 0.99; EST_HUMAN HIT: BE779039.1, EVALUE 5.00e-25; SWISSPROT HIT: P53743, EVALUE 6.90e-01
HSDHLKKAEKCVKSKASKGNECSGNECSLKDILTSNRHMTQKSIIKEDIHPAPSTNSKDKLSGKIEEQINSTKYCKVNEDIKPKKTEAISAKKGTAKSKDEKYSKIIPEK

SEQ ID NO: 36555 - protein, 19 aa, Homo sapiens
  MAP TO AC007750.2; EXPRESSED IN HEART, SIGNAL = 0.94; EXPRESSED IN PLACENTA, SIGNAL =   1; EXPRESSED IN BT474, SIGNAL = 0.66; EXPRESSED IN BONE MARROW, SIGNAL = 0.88; EXPRESSED IN FETAL LIVER, SIGNAL = 0.63; EXPRESSED IN LUNG, SIGNAL = 0.97; EXPRESSED IN HELA, SIGNAL = 0.96; EXPRESSED IN ADULT LIVER, SIGNAL = 0.92; EXPRESSED IN BRAIN, SIGNAL = 0.93; EXPRESSED IN HBL100, SIGNAL = 0.85
IYHILLLDMRHGKGGIPIA

SEQ ID NO: 36556 - protein, 76 aa, Homo sapiens
  MAP TO AC007740.1; EXPRESSED IN HEART, SIGNAL = 0.94; EXPRESSED IN PLACENTA, SIGNAL = 0.64; EXPRESSED IN LUNG, SIGNAL = 0.76; EXPRESSED IN BRAIN, SIGNAL = 0.71; EXPRESSED IN BT474, SIGNAL = 0.63; EXPRESSED IN BONE MARROW, SIGNAL = 0.79; EXPRESSED IN FETAL LIVER, SIGNAL = 0.73; EXPRESSED IN HELA, SIGNAL = 0.71; EXPRESSED IN ADULT LIVER, SIGNAL = 0.75; SWISSPROT HIT: Q12809, EVALUE 9.00e-34; EST_HUMAN HIT: BF347563.1, EVALUE 8.00e-33
LQADICLHLNQTLLQNCKAFRGASKGCLRALAMKFKTTHAPPGDTLVHCGDVLTALYFLSRGSIEILKDDIVVAIL

SEQ ID NO: 36557 - protein, 32 aa, Homo sapiens
  MAP TO AC007740.1; EXPRESSED IN HEART, SIGNAL = 0.94; EXPRESSED IN PLACENTA, SIGNAL = 0.64; EXPRESSED IN LUNG, SIGNAL = 0.76; EXPRESSED IN BRAIN, SIGNAL = 0.71; EXPRESSED IN BT474, SIGNAL = 0.63; EXPRESSED IN BONE MARROW, SIGNAL = 0.79; EXPRESSED IN FETAL LIVER, SIGNAL = 0.73; EXPRESSED IN HELA, SIGNAL = 0.71; EXPRESSED IN ADULT LIVER, SIGNAL = 0.75; EST_HUMAN HIT: BF312618.1, EVALUE 5.10e-01
YKQTFVYISTRHCCKTAKPFGGQVKVALELWQ

SEQ ID NO: 36558 - protein, 47 aa, Homo sapiens
  MAP TO AL049797.8; EXPRESSED IN HBL100, SIGNAL = 0.75; EXPRESSED IN LUNG, SIGNAL = 0.98; EXPRESSED IN HELA, SIGNAL = 1.1; EXPRESSED IN ADULT LIVER, SIGNAL = 0.84; EXPRESSED IN BONE MARROW, SIGNAL = 0.95; EXPRESSED IN BRAIN, SIGNAL = 0.75; EXPRESSED IN PLACENTA, SIGNAL = 0.93; EXPRESSED IN BT474, SIGNAL = 0.65; EXPRESSED IN HEART, SIGNAL =   1; EXPRESSED IN FETAL LIVER, SIGNAL = 0.83; SWISSPROT HIT: P47712, EVALUE 4.00e-22; EST_HUMAN HIT: AU120946.1, EVALUE 5.00e-21
SHNPLLLLTPQKVKRYVESLWKKKSSGQPVTFTDIFGMLIGETLIHN

SEQ ID NO: 36559 - protein, 39 aa, Homo sapiens
  MAP TO AL049797.8; EXPRESSED IN HBL100, SIGNAL = 0.75; EXPRESSED IN LUNG, SIGNAL = 0.98; EXPRESSED IN HELA, SIGNAL = 1.1; EXPRESSED IN ADULT LIVER, SIGNAL = 0.84; EXPRESSED IN BONE MARROW, SIGNAL = 0.95; EXPRESSED IN BRAIN, SIGNAL = 0.75; EXPRESSED IN PLACENTA, SIGNAL = 0.93; EXPRESSED IN BT474, SIGNAL = 0.65; EXPRESSED IN HEART, SIGNAL =   1; EXPRESSED IN FETAL LIVER, SIGNAL = 0.83; EST_HUMAN HIT: AU120946.1, EVALUE 6.00e-16
LATIPFYFSHHRKLKDMLSLYGRRKALDNLSPLLISLGC

SEQ ID NO: 36560 - protein, 64 aa, Homo sapiens
  MAP TO AC008277.1; EXPRESSED IN BT474, SIGNAL = 0.87; EXPRESSED IN FETAL LIVER, SIGNAL = 0.72; EXPRESSED IN HELA, SIGNAL =   1; EXPRESSED IN PLACENTA, SIGNAL = 0.86; EXPRESSED IN BONE MARROW, SIGNAL = 1.1; EXPRESSED IN LUNG, SIGNAL = 0.85; EXPRESSED IN ADULT LIVER, SIGNAL = 0.8; EXPRESSED IN BRAIN, SIGNAL = 0.88; EXPRESSED IN HEART, SIGNAL = 0.93; EST_HUMAN HIT: BF670714.1, EVALUE 4.00e-20
VNGSINGSNTSSVIGINTSVLSTTASSSMGQTKSTSSGGGNRKCNQEQSKNQPLDARVDKIKDK

SEQ ID NO: 36561 - protein, 28 aa, Homo sapiens
  MAP TO AC008277.1; EXPRESSED IN BT474, SIGNAL = 0.87; EXPRESSED IN FETAL LIVER, SIGNAL = 0.72; EXPRESSED IN HELA, SIGNAL =   1; EXPRESSED IN PLACENTA, SIGNAL = 0.86; EXPRESSED IN BONE MARROW, SIGNAL = 1.1; EXPRESSED IN LUNG, SIGNAL = 0.85; EXPRESSED IN ADULT LIVER, SIGNAL = 0.8; EXPRESSED IN BRAIN, SIGNAL = 0.88; EXPRESSED IN HEART, SIGNAL = 0.93; EST_HUMAN HIT: BF670714.1, EVALUE 4.00e-08
QVEEIENVIRNKAKTSLWMLELTKSKIR

SEQ ID NO: 36562 - protein, 34 aa, Homo sapiens
  MAP TO AC007247.2; EXPRESSED IN HBL100, SIGNAL = 4.6; EXPRESSED IN PLACENTA, SIGNAL = 5.8; EXPRESSED IN HELA, SIGNAL = 4.9; EXPRESSED IN HEART, SIGNAL = 4.2; EXPRESSED IN ADULT LIVER, SIGNAL =   6; EXPRESSED IN BT474, SIGNAL = 4.2; EXPRESSED IN FETAL LIVER, SIGNAL = 6.9; EXPRESSED IN BONE MARROW, SIGNAL = 5.5; EXPRESSED IN BRAIN, SIGNAL = 5.1; EXPRESSED IN LUNG, SIGNAL = 4.9
AGCIGGMWDPVHVRRDAAVSRSEDSESTVPLSKD

SEQ ID NO: 36563 - protein, 58 aa, Homo sapiens
  MAP TO AL035687.13; EXPRESSED IN PLACENTA, SIGNAL = 0.75; EXPRESSED IN BONE MARROW, SIGNAL = 0.84; EXPRESSED IN FETAL LIVER, SIGNAL = 0.59; EXPRESSED IN LUNG, SIGNAL = 0.71; EXPRESSED IN HELA, SIGNAL = 0.68; EXPRESSED IN ADULT LIVER, SIGNAL = 0.73; EXPRESSED IN BRAIN, SIGNAL = 0.81; EXPRESSED IN HEART, SIGNAL = 0.91; SWISSPROT HIT: P09107, EVALUE 1.20e+00; EST_HUMAN HIT: BF035327.1, EVALUE 4.00e-10
AEQSEEATEEKSETNRSWFMRFKERSCLYNIKTKDEAASADIKSVASYPEALPKIFNE

SEQ ID NO: 36564 - protein, 27 aa, Homo sapiens
  MAP TO AC007160.3; EXPRESSED IN FETAL LIVER, SIGNAL = 0.83; EXPRESSED IN ADULT LIVER, SIGNAL = 0.67; EXPRESSED IN PLACENTA, SIGNAL = 1.1; EXPRESSED IN BONE MARROW, SIGNAL = 0.65; EXPRESSED IN HBL100, SIGNAL = 0.98; EXPRESSED IN LUNG, SIGNAL = 0.73; EXPRESSED IN HELA, SIGNAL = 0.79; EXPRESSED IN BRAIN, SIGNAL = 0.82; EXPRESSED IN BT474, SIGNAL = 1.9; EXPRESSED IN HEART, SIGNAL = 3.2; EST_HUMAN HIT: BE389299.1, EVALUE 1.00e-07; SWISSPROT HIT: Q9XC07, EVALUE 4.90e+00
IARMGFNASSMLRKSQLGFLNVTNYCQ

SEQ ID NO: 36565 - protein, 25 aa, Homo sapiens
  MAP TO AC007160.3; EXPRESSED IN FETAL LIVER, SIGNAL = 0.83; EXPRESSED IN ADULT LIVER, SIGNAL = 0.67; EXPRESSED IN PLACENTA, SIGNAL = 1.1; EXPRESSED IN BONE MARROW, SIGNAL = 0.65; EXPRESSED IN HBL100, SIGNAL = 0.98; EXPRESSED IN LUNG, SIGNAL = 0.73; EXPRESSED IN HELA, SIGNAL = 0.79; EXPRESSED IN BRAIN, SIGNAL = 0.82; EXPRESSED IN BT474, SIGNAL = 1.9; EXPRESSED IN HEART, SIGNAL = 3.2; EST_HUMAN HIT: BF688332.1, EVALUE 3.00e-09
LPGWDLMHLPCYEKASWVFSTSPIT

SEQ ID NO: 36566 - protein, 49 aa, Homo sapiens
  MAP TO AC007716.1; EXPRESSED IN PLACENTA, SIGNAL = 0.61; EXPRESSED IN BONE MARROW, SIGNAL = 0.78; EXPRESSED IN HBL100, SIGNAL = 0.73; EXPRESSED IN FETAL LIVER, SIGNAL = 0.57; EXPRESSED IN LUNG, SIGNAL = 0.7; EXPRESSED IN ADULT LIVER, SIGNAL = 0.67; EXPRESSED IN BT474, SIGNAL = 0.65; EXPRESSED IN HELA, SIGNAL = 0.66; EXPRESSED IN BRAIN, SIGNAL = 1.1; EXPRESSED IN HEART, SIGNAL = 0.78; EST_HUMAN HIT: AA883661.1, EVALUE 2.60e+00
QGPRLYSLTAWGSESGSLMAGNLVLCHCLQDQSVTCGVAAFPEFGAYSK

SEQ ID NO: 36567 - protein, 81 aa, Homo sapiens
  MAP TO AC007777.1; EXPRESSED IN HBL100, SIGNAL = 0.68; EXPRESSED IN BRAIN, SIGNAL = 1.1; EXPRESSED IN LUNG, SIGNAL = 1.2; EXPRESSED IN HELA, SIGNAL = 0.88; EXPRESSED IN ADULT LIVER, SIGNAL =   1; EXPRESSED IN HEART, SIGNAL = 0.89; EXPRESSED IN PLACENTA, SIGNAL =   1; EXPRESSED IN BT474, SIGNAL = 0.8; EXPRESSED IN BONE MARROW, SIGNAL = 0.93; EXPRESSED IN FETAL LIVER, SIGNAL = 0.89
FPPTIIALEHSYRGLRLDPPDLLQPIQLAPTYMYHLQACKLPTQPITATTNISVDCLRTDYPTTAIAIAHTTHAVQGPKAY

SEQ ID NO: 36568 - protein, 30 aa, Homo sapiens
  MAP TO AC009419.1; EXPRESSED IN BRAIN, SIGNAL = 0.95; EXPRESSED IN BT474, SIGNAL = 0.96; EXPRESSED IN ADULT LIVER, SIGNAL = 1.2; EXPRESSED IN HEART, SIGNAL = 0.88
  unsure 18
RQLVLLGPGRSVLFQQTXHALHQTLTLVLQ

SEQ ID NO: 36569 - protein, 39 aa, Homo sapiens
  MAP TO AC007280.2; EXPRESSED IN PLACENTA, SIGNAL = 0.6; EXPRESSED IN FETAL LIVER, SIGNAL = 0.58; EXPRESSED IN LUNG, SIGNAL = 0.7; EXPRESSED IN HELA, SIGNAL = 0.61; EXPRESSED IN ADULT LIVER, SIGNAL = 0.92; EXPRESSED IN HEART, SIGNAL = 0.84
MTRTVVKITPLKLVWVRGRGKRRREGDDMRGRCEQAEGE

SEQ ID NO: 36570 - protein, 34 aa, Homo sapiens
  MAP TO AC007736.3; EXPRESSED IN HELA, SIGNAL = 0.77; EXPRESSED IN ADULT LIVER, SIGNAL = 0.66; EXPRESSED IN HEART, SIGNAL = 0.83; EXPRESSED IN PLACENTA, SIGNAL = 0.82; EXPRESSED IN HBL100, SIGNAL = 0.82; EXPRESSED IN LUNG, SIGNAL = 0.99; EXPRESSED IN FETAL LIVER, SIGNAL = 0.76; EXPRESSED IN BONE MARROW, SIGNAL = 0.72; EXPRESSED IN BT474, SIGNAL = 0.7; EST_HUMAN HIT: BF434006.1, EVALUE 2.00e-14; SWISSPROT HIT: Q62786, EVALUE 6.30e+00
GPGYWVKIHHLEYTDGGILDPDDVLADVVEDKDK

SEQ ID NO: 36571 - protein, 26 aa, Homo sapiens
  MAP TO AC007720.1; EXPRESSED IN LUNG, SIGNAL = 1.2; EXPRESSED IN HEART, SIGNAL = 1.2; EXPRESSED IN PLACENTA, SIGNAL = 1.1; EXPRESSED IN BONE MARROW, SIGNAL = 1.5; EXPRESSED IN HBL100, SIGNAL = 1.1; EXPRESSED IN FETAL LIVER, SIGNAL =   1; EXPRESSED IN ADULT LIVER, SIGNAL = 1.1; EXPRESSED IN BRAIN, SIGNAL = 1.3; EXPRESSED IN BT474, SIGNAL = 1.3; EXPRESSED IN HELA, SIGNAL = 1.2
TVAPSDKGAKKCSSPMCTQVENIMNG

SEQ ID NO: 36572 - protein, 23 aa, Homo sapiens
  MAP TO AC007720.1; EXPRESSED IN LUNG, SIGNAL = 1.2; EXPRESSED IN HEART, SIGNAL = 1.2; EXPRESSED IN PLACENTA, SIGNAL = 1.1; EXPRESSED IN BONE MARROW, SIGNAL = 1.5; EXPRESSED IN HBL100, SIGNAL = 1.1; EXPRESSED IN FETAL LIVER, SIGNAL =   1; EXPRESSED IN ADULT LIVER, SIGNAL = 1.1; EXPRESSED IN BRAIN, SIGNAL = 1.3; EXPRESSED IN BT474, SIGNAL = 1.3; EXPRESSED IN HELA, SIGNAL = 1.2
QLHPVTKGPRNAVLPCALRWKTS

SEQ ID NO: 36573 - protein, 75 aa, Homo sapiens
  MAP TO AP000095.1; EXPRESSED IN HELA, SIGNAL = 0.6; EXPRESSED IN BRAIN, SIGNAL = 0.85; EXPRESSED IN HEART, SIGNAL = 0.85; EXPRESSED IN ADULT LIVER, SIGNAL = 0.65; EST_HUMAN HIT: AV725979.1, EVALUE 1.00e-22; SWISSPROT HIT: Q60934, EVALUE 1.00e-38
RADLAVAPLTITYVREKVIDFSKPFMTLGISILYRKPNGTNPGVFSFLNPLSPDIWMYVLLACLGVSCVLFVIAR

SEQ ID NO: 36574 - protein, 38 aa, Homo sapiens
  MAP TO AL033380.10; EXPRESSED IN ADULT LIVER, SIGNAL = 1.8; EXPRESSED IN BT474, SIGNAL = 1.1; EXPRESSED IN FETAL LIVER, SIGNAL = 1.6; EXPRESSED IN BRAIN, SIGNAL = 1.3; EXPRESSED IN BONE MARROW, SIGNAL = 1.3; EXPRESSED IN PLACENTA, SIGNAL = 1.2; EXPRESSED IN HBL100, SIGNAL = 1.1; EXPRESSED IN HELA, SIGNAL = 1.2; EXPRESSED IN HEART, SIGNAL = 1.3; SWISSPROT HIT: P27650, EVALUE 2.80e+00
MQTPVMVVEEAGGILGLEDMITLMVEMGIVVMVWAMLG

SEQ ID NO: 36575 - protein, 43 aa, Homo sapiens
  MAP TO AL033380.10; EXPRESSED IN ADULT LIVER, SIGNAL = 1.8; EXPRESSED IN BT474, SIGNAL = 1.1; EXPRESSED IN FETAL LIVER, SIGNAL = 1.6; EXPRESSED IN BRAIN, SIGNAL = 1.3; EXPRESSED IN BONE MARROW, SIGNAL = 1.3; EXPRESSED IN PLACENTA, SIGNAL = 1.2; EXPRESSED IN HBL100, SIGNAL = 1.1; EXPRESSED IN HELA, SIGNAL = 1.2; EXPRESSED IN HEART, SIGNAL = 1.3
SVIISSNPKIPPASSTTITGVCIKQPLHLCNGVRLLCTKALTI

SEQ ID NO: 36576 - protein, 37 aa, Homo sapiens
  MAP TO AC009296.1; EXPRESSED IN HEART, SIGNAL = 0.87; EXPRESSED IN FETAL LIVER, SIGNAL = 0.65; EXPRESSED IN LUNG, SIGNAL = 0.71; EXPRESSED IN PLACENTA, SIGNAL = 0.73; EXPRESSED IN BONE MARROW, SIGNAL = 0.74; EXPRESSED IN ADULT LIVER, SIGNAL = 0.79; EXPRESSED IN BRAIN, SIGNAL = 0.82; EXPRESSED IN BT474, SIGNAL = 0.61; EXPRESSED IN HELA, SIGNAL = 0.77; EST_HUMAN HIT: BF700103.1, EVALUE 9.60e+00
MDQLSGGTSVPGAQKGRNYISPGEFQKLPQTVTWALK

SEQ ID NO: 36577 - protein, 29 aa, Homo sapiens
  MAP TO AC009296.1; EXPRESSED IN HEART, SIGNAL = 0.87; EXPRESSED IN FETAL LIVER, SIGNAL = 0.65; EXPRESSED IN LUNG, SIGNAL = 0.71; EXPRESSED IN PLACENTA, SIGNAL = 0.73; EXPRESSED IN BONE MARROW, SIGNAL = 0.74; EXPRESSED IN ADULT LIVER, SIGNAL = 0.79; EXPRESSED IN BRAIN, SIGNAL = 0.82; EXPRESSED IN BT474, SIGNAL = 0.61; EXPRESSED IN HELA, SIGNAL = 0.77
WTNLVEVQVSLEHRKGGTTSPQGSSRSCH

SEQ ID NO: 36578 - protein, 44 aa, Homo sapiens
  MAP TO AC007106.6; EXPRESSED IN BT474, SIGNAL = 0.94; EXPRESSED IN BONE MARROW, SIGNAL = 1.4; EXPRESSED IN FETAL LIVER, SIGNAL =   1; EXPRESSED IN HELA, SIGNAL = 0.93; EXPRESSED IN ADULT LIVER, SIGNAL = 0.85; EXPRESSED IN BRAIN, SIGNAL = 1.2; EXPRESSED IN HEART, SIGNAL = 1.1; EXPRESSED IN PLACENTA, SIGNAL = 1.1; EXPRESSED IN HBL100, SIGNAL = 1.1; EXPRESSED IN LUNG, SIGNAL = 1.1; EST_HUMAN HIT: AW867820.1, EVALUE 2.10e+00
IAFQGHPGLVQSYSNCPSLHGAYILCRTIWKPSLSFSSSTNCST

SEQ ID NO: 36579 - protein, 34 aa, Homo sapiens
  MAP TO AP000045.1; EXPRESSED IN PLACENTA, SIGNAL = 1.3; EXPRESSED IN BT474, SIGNAL = 0.8; EXPRESSED IN LUNG, SIGNAL = 0.94; EXPRESSED IN HELA, SIGNAL = 1.2; EXPRESSED IN BRAIN, SIGNAL = 1.1; EXPRESSED IN HEART, SIGNAL = 1.1; EXPRESSED IN BONE MARROW, SIGNAL = 1.3; EXPRESSED IN HBL100, SIGNAL = 1.2; EXPRESSED IN FETAL LIVER, SIGNAL = 0.78; EXPRESSED IN ADULT LIVER, SIGNAL = 1.4
SIPTDTNDDTKWQQTVEDGSQRRQQSSQEMESRS

SEQ ID NO: 36580 - protein, 49 aa, Homo sapiens
  MAP TO AC007385.2; EXPRESSED IN BONE MARROW, SIGNAL = 0.8; EXPRESSED IN HBL100, SIGNAL = 0.79; EXPRESSED IN ADULT LIVER, SIGNAL = 0.77; EXPRESSED IN BRAIN, SIGNAL = 0.81; EXPRESSED IN BT474, SIGNAL = 1.2; EXPRESSED IN LUNG, SIGNAL = 1.3; EXPRESSED IN HELA, SIGNAL = 0.86; EXPRESSED IN PLACENTA, SIGNAL = 0.8; EXPRESSED IN FETAL LIVER, SIGNAL = 0.94; EXPRESSED IN HEART, SIGNAL = 0.89; EST_HUMAN HIT: AI650569.1, EVALUE 1.00e-21; SWISSPROT HIT: P21647, EVALUE 1.60e+00
LMNRLGITKAQETPEKVMVQTTGFVLGSSSKQPYRWNRRTLSEGAQSGD

SEQ ID NO: 36581 - protein, 59 aa, Homo sapiens
  MAP TO AB008681.1; EXPRESSED IN PLACENTA, SIGNAL =   1; EXPRESSED IN LUNG, SIGNAL = 0.6; EXPRESSED IN BRAIN, SIGNAL = 0.81; EXPRESSED IN BT474, SIGNAL = 0.77; EXPRESSED IN FETAL LIVER, SIGNAL = 0.72; EXPRESSED IN HELA, SIGNAL = 0.65; EXPRESSED IN ADULT LIVER, SIGNAL = 0.74; EXPRESSED IN HEART, SIGNAL = 0.8; EST_HUMAN HIT: AI247855.1, EVALUE 1.00e-27; SWISSPROT HIT: Q95126, EVALUE 1.00e-28
CVTIEDCWDHDAEARLSAGCVEERVSLIRRSVNGTTSDCLVSLVTSVTNVDLPPKESSI

SEQ ID NO: 36582 - protein, 61 aa, Homo sapiens
  MAP TO AC007786.1; EXPRESSED IN BT474, SIGNAL = 0.6; EXPRESSED IN BONE MARROW, SIGNAL = 0.92; EXPRESSED IN LUNG, SIGNAL = 0.9; EXPRESSED IN FETAL LIVER, SIGNAL = 0.7; EXPRESSED IN HELA, SIGNAL = 0.82; EXPRESSED IN ADULT LIVER, SIGNAL = 0.75; EXPRESSED IN HEART, SIGNAL = 0.82; EXPRESSED IN PLACENTA, SIGNAL = 0.77; EXPRESSED IN BRAIN, SIGNAL = 0.72
FDVCMLRVLTLSRLENEKEQDKRKEGRGKLRKGSKEKREGRKEERKEKKGEKEREIKKENK

SEQ ID NO: 36583 - protein, 47 aa, Homo sapiens
  MAP TO AC006286.12; EXPRESSED IN PLACENTA, SIGNAL = 0.85; EXPRESSED IN LUNG, SIGNAL = 0.92; EXPRESSED IN BT474, SIGNAL = 0.88; EXPRESSED IN BONE MARROW, SIGNAL = 0.87; EXPRESSED IN HBL100, SIGNAL = 0.73; EXPRESSED IN FETAL LIVER, SIGNAL = 0.88; EXPRESSED IN HELA, SIGNAL = 0.79; EXPRESSED IN BRAIN, SIGNAL = 0.86; EXPRESSED IN HEART, SIGNAL = 0.88; SWISSPROT HIT: Q09564, EVALUE 9.00e-05; EST_HUMAN HIT: BF349671.1, EVALUE 2.00e-07
DLSYNQLTRLDESAFVGLSLLERLNLGDNRVTHIADGVFRFLSNLQT

SEQ ID NO: 36584 - protein, 50 aa, Homo sapiens
  MAP TO AL033377.2; EXPRESSED IN BT474, SIGNAL =   1; EXPRESSED IN BRAIN, SIGNAL = 1.1; EXPRESSED IN HELA, SIGNAL = 1.2; EXPRESSED IN HBL100, SIGNAL = 1.4; EXPRESSED IN ADULT LIVER, SIGNAL = 1.7; EXPRESSED IN FETAL LIVER, SIGNAL = 1.1; EXPRESSED IN LUNG, SIGNAL = 1.1; EXPRESSED IN BONE MARROW, SIGNAL = 1.6; EXPRESSED IN PLACENTA, SIGNAL = 1.5; EXPRESSED IN HEART, SIGNAL = 1.1
WSKTATNIIKKSSDNLGKSLSSSSIGSNSTYLTSKSKSSSTTYFKRNSHT

SEQ ID NO: 36585 - protein, 49 aa, Homo sapiens
  MAP TO AC006546.9; EXPRESSED IN PLACENTA, SIGNAL = 1.1; EXPRESSED IN FETAL LIVER, SIGNAL = 1.3; EXPRESSED IN LUNG, SIGNAL = 1.1; EXPRESSED IN ADULT LIVER, SIGNAL = 0.98; EXPRESSED IN BT474, SIGNAL = 0.88; EXPRESSED IN HEART, SIGNAL = 1.1; EXPRESSED IN BRAIN, SIGNAL = 1.1; EXPRESSED IN HELA, SIGNAL = 1.1; EXPRESSED IN HBL100, SIGNAL = 0.85; EXPRESSED IN BONE MARROW, SIGNAL = 1.2
NCLPIRDVENALKLKDKIKPISSGARDKSQPLDTKGLIHQIKKLELQGS

SEQ ID NO: 36586 - protein, 62 aa, Homo sapiens
  MAP TO AC007881.2; EXPRESSED IN BONE MARROW, SIGNAL = 4.4; EXPRESSED IN HEART, SIGNAL = 3.4; EXPRESSED IN PLACENTA, SIGNAL = 5.3; EXPRESSED IN ADULT LIVER, SIGNAL = 3.9; EXPRESSED IN BRAIN, SIGNAL = 4.1; EXPRESSED IN HELA, SIGNAL = 3.2; EXPRESSED IN HBL100, SIGNAL =   4; EXPRESSED IN BT474, SIGNAL = 3.6; EXPRESSED IN FETAL LIVER, SIGNAL = 3.7; EXPRESSED IN LUNG, SIGNAL = 4.7; EST_HUMAN HIT: BF446119.1, EVALUE 6.00e-29; SWISSPROT HIT: P37718, EVALUE 3.40e+00
FLLALTQGREIQAQNFFSSFTLMKLRHSSALGGASLGARHIGHLLPMDYSANAIAFYSYTFS

SEQ ID NO: 36587 - protein, 62 aa, Homo sapiens
  MAP TO AC007327.1; EXPRESSED IN ADULT LIVER, SIGNAL = 1.9; EXPRESSED IN FETAL LIVER, SIGNAL = 1.9; EXPRESSED IN LUNG, SIGNAL =   2; EXPRESSED IN BRAIN, SIGNAL = 1.9; EXPRESSED IN HBL100, SIGNAL =   2; EXPRESSED IN HELA, SIGNAL = 1.7; EXPRESSED IN HEART, SIGNAL = 1.7; EXPRESSED IN PLACENTA, SIGNAL = 1.8; EXPRESSED IN BT474, SIGNAL = 1.9; EXPRESSED IN BONE MARROW, SIGNAL = 1.7; EST_HUMAN HIT: AA335987.1, EVALUE 4.00e-31; SWISSPROT HIT: Q21973, EVALUE 5.10e-01
DVIILGDFGQGPDSNDYDILRKEKFHHLIPAHTFTNISTKNPQGSKSLDNIWISKSLKKVFT

SEQ ID NO: 36588 - protein, 36 aa, Homo sapiens
  MAP TO AC010899.1; EXPRESSED IN HEART, SIGNAL =   1; EXPRESSED IN LUNG, SIGNAL = 6.3; EXPRESSED IN BRAIN, SIGNAL = 0.98; EXPRESSED IN FETAL LIVER, SIGNAL =   1; EXPRESSED IN ADULT LIVER, SIGNAL = 1.1; EXPRESSED IN HBL100, SIGNAL = 1.4; SWISSPROT HIT: P54764, EVALUE 2.10e+00
PSRIIGDGANSTVLLVSVSGSVVLVVILIAAFVISR

SEQ ID NO: 36589 - protein, 18 aa, Homo sapiens
  MAP TO AC010899.1; EXPRESSED IN HEART, SIGNAL =   1; EXPRESSED IN LUNG, SIGNAL = 6.3; EXPRESSED IN BRAIN, SIGNAL = 0.98; EXPRESSED IN FETAL LIVER, SIGNAL =   1; EXPRESSED IN ADULT LIVER, SIGNAL = 1.1; EXPRESSED IN HBL100, SIGNAL = 1.4
GLTPQSFWSLSRAVWCWW

SEQ ID NO: 36590 - protein, 44 aa, Homo sapiens
  MAP TO AC006367.3; EXPRESSED IN HBL100, SIGNAL = 1.3; EXPRESSED IN FETAL LIVER, SIGNAL = 1.1; EXPRESSED IN LUNG, SIGNAL = 1.1; EXPRESSED IN BRAIN, SIGNAL = 1.2; EXPRESSED IN PLACENTA, SIGNAL = 1.3; EXPRESSED IN BT474, SIGNAL = 1.2; EXPRESSED IN BONE MARROW, SIGNAL = 1.3; EXPRESSED IN HELA, SIGNAL = 1.3; EXPRESSED IN ADULT LIVER, SIGNAL = 0.97; EXPRESSED IN HEART, SIGNAL = 1.2; SWISSPROT HIT: P77672, EVALUE 2.10e+00; EST_HUMAN HIT: BE960561.1, EVALUE 1.80e+00
LPPPMVPRGLAVSSLYSCSVEGNGMSIGRILGGWYPSQFTLVLV

SEQ ID NO: 36591 - protein, 21 aa, Homo sapiens
  MAP TO AC006367.3; EXPRESSED IN HBL100, SIGNAL = 1.3; EXPRESSED IN FETAL LIVER, SIGNAL = 1.1; EXPRESSED IN LUNG, SIGNAL = 1.1; EXPRESSED IN BRAIN, SIGNAL = 1.2; EXPRESSED IN PLACENTA, SIGNAL = 1.3; EXPRESSED IN BT474, SIGNAL = 1.2; EXPRESSED IN BONE MARROW, SIGNAL = 1.3; EXPRESSED IN HELA, SIGNAL = 1.3; EXPRESSED IN ADULT LIVER, SIGNAL = 0.97; EXPRESSED IN HEART, SIGNAL = 1.2
GLHPLWPVRRVETGALTPEPR

SEQ ID NO: 36592 - protein, 58 aa, Homo sapiens; identical to SEQ ID NO: 35371
  MAP TO AL049593.8; EXPRESSED IN HELA, SIGNAL = 2.5; EXPRESSED IN PLACENTA, SIGNAL =   3; EXPRESSED IN HBL100, SIGNAL = 2.5; EXPRESSED IN HEART, SIGNAL = 2.2; EXPRESSED IN FETAL LIVER, SIGNAL = 2.3; EXPRESSED IN ADULT LIVER, SIGNAL = 3.3; EXPRESSED IN BT474, SIGNAL = 2.6; EXPRESSED IN BRAIN, SIGNAL = 2.5; EXPRESSED IN BONE MARROW, SIGNAL = 2.6; EXPRESSED IN LUNG, SIGNAL =   3; EST_HUMAN HIT: AI638208.1, EVALUE 2.00e-07; SWISSPROT HIT: P40035, EVALUE 2.60e+00

SEQ ID NO: 36593 - protein, 17 aa, Homo sapiens
  MAP TO AL049593.8; EXPRESSED IN HELA, SIGNAL = 2.5; EXPRESSED IN PLACENTA, SIGNAL =   3; EXPRESSED IN HBL100, SIGNAL = 2.5; EXPRESSED IN HEART, SIGNAL = 2.2; EXPRESSED IN FETAL LIVER, SIGNAL = 2.3; EXPRESSED IN ADULT LIVER, SIGNAL = 3.3; EXPRESSED IN BT474, SIGNAL = 2.6; EXPRESSED IN BRAIN, SIGNAL = 2.5; EXPRESSED IN BONE MARROW, SIGNAL = 2.6; EXPRESSED IN LUNG, SIGNAL =   3; EST_HUMAN HIT: AW082110.1, EVALUE 7.60e-02
SGGWEFQDHGTRRFGVW

SEQ ID NO: 36594 - protein, 72 aa, Homo sapiens
  MAP TO AC007336.2; EXPRESSED IN BONE MARROW, SIGNAL = 3.9; EXPRESSED IN HEART, SIGNAL = 3.8; EXPRESSED IN PLACENTA, SIGNAL = 5.1; EXPRESSED IN ADULT LIVER, SIGNAL = 4.5; EXPRESSED IN BRAIN, SIGNAL = 3.8; EXPRESSED IN HELA, SIGNAL = 4.4; EXPRESSED IN HBL100, SIGNAL = 4.2; EXPRESSED IN BT474, SIGNAL = 3.9; EXPRESSED IN FETAL LIVER, SIGNAL = 3.9; EXPRESSED IN LUNG, SIGNAL = 4.4; EST_HUMAN HIT: BE261817.1, EVALUE 7.00e+00
PASFHSASRAHPMTAAPLRAARMATAGAAPLRTTTATRSMASALRPVGATPSPSLRAQHLLSDKKKTHKTPS

SEQ ID NO: 36595 - protein, 32 aa, Homo sapiens
  MAP TO AL034350.2; EXPRESSED IN PLACENTA, SIGNAL = 3.1; EXPRESSED IN HEART, SIGNAL = 2.6; EXPRESSED IN HBL100, SIGNAL = 2.6; EXPRESSED IN HELA, SIGNAL =   2; EXPRESSED IN BT474, SIGNAL = 1.8; EXPRESSED IN FETAL LIVER, SIGNAL = 3.1; EXPRESSED IN ADULT LIVER, SIGNAL = 3.2; EXPRESSED IN BONE MARROW, SIGNAL = 2.4; EXPRESSED IN LUNG, SIGNAL = 2.3; EXPRESSED IN BRAIN, SIGNAL =   2; SWISSPROT HIT: P87061, EVALUE 3.70e+00
MKCVLKKATRAEKELLILSGEIEKSLMEEMAL

SEQ ID NO: 36596 - protein, 66 aa, Homo sapiens
  MAP TO AC007349.1; EXPRESSED IN ADULT LIVER, SIGNAL = 1.3; EXPRESSED IN FETAL LIVER, SIGNAL = 1.3; EXPRESSED IN LUNG, SIGNAL = 1.5; EXPRESSED IN HELA, SIGNAL = 1.3; EXPRESSED IN HEART, SIGNAL = 1.4; EXPRESSED IN PLACENTA, SIGNAL = 2.1; EXPRESSED IN BT474, SIGNAL =   1; EXPRESSED IN BRAIN, SIGNAL = 3.1; EXPRESSED IN BONE MARROW, SIGNAL = 1.3; EXPRESSED IN HBL100, SIGNAL = 1.4; SWISSPROT HIT: Q92556, EVALUE 1.00e-23; EST_HUMAN HIT: BF307241.1, EVALUE 8.00e-23
YCIWTDGLNALLGKDMMSDLTRNDLDTLLSMEIKLRLLDLENIQIPDAPPPIPKEPSNYDFVYDCN

SEQ ID NO: 36597 - protein, 22 aa, Homo sapiens
  MAP TO AC007349.1; EXPRESSED IN ADULT LIVER, SIGNAL = 1.3; EXPRESSED IN FETAL LIVER, SIGNAL = 1.3; EXPRESSED IN LUNG, SIGNAL = 1.5; EXPRESSED IN HELA, SIGNAL = 1.3; EXPRESSED IN HEART, SIGNAL = 1.4; EXPRESSED IN PLACENTA, SIGNAL = 2.1; EXPRESSED IN BT474, SIGNAL =   1; EXPRESSED IN BRAIN, SIGNAL = 3.1; EXPRESSED IN BONE MARROW, SIGNAL = 1.3; EXPRESSED IN HBL100, SIGNAL = 1.4; SWISSPROT HIT: P40399, EVALUE 1.70e+00; EST_HUMAN HIT: AW893192.1, EVALUE 4.00e-07
LYLDGWTECATREGHDERPDAE

SEQ ID NO: 36598 - protein, 37 aa, Homo sapiens
  MAP TO AC008082.12; EXPRESSED IN ADULT LIVER, SIGNAL = 1.4; EXPRESSED IN FETAL LIVER, SIGNAL = 1.2; EXPRESSED IN LUNG, SIGNAL = 1.1; EXPRESSED IN BRAIN, SIGNAL = 1.6; EXPRESSED IN HEART, SIGNAL = 1.2; EXPRESSED IN HBL100, SIGNAL = 1.2; EXPRESSED IN PLACENTA, SIGNAL = 1.3; EXPRESSED IN BT474, SIGNAL = 1.1; EXPRESSED IN BONE MARROW, SIGNAL = 1.2; SWISSPROT HIT: P21691, EVALUE 4.70e+00; EST_HUMAN HIT: AV752138.1, EVALUE 3.00e-04
LHPLLNVTYDNHYSVLQFYNFVISRKLYKWNHKVNKT

SEQ ID NO: 36599 - protein, 76 aa, Homo sapiens
  MAP TO AL034418.2; EXPRESSED IN HELA, SIGNAL = 1.2; EXPRESSED IN HBL100, SIGNAL = 1.3; EXPRESSED IN BT474, SIGNAL = 1.1; EXPRESSED IN BRAIN, SIGNAL = 1.1; EXPRESSED IN LUNG, SIGNAL = 1.3; EXPRESSED IN BONE MARROW, SIGNAL = 1.2; EXPRESSED IN PLACENTA, SIGNAL = 1.2; EXPRESSED IN HEART, SIGNAL = 1.1; EXPRESSED IN ADULT LIVER, SIGNAL = 1.1; EXPRESSED IN FETAL LIVER, SIGNAL = 1.1; SWISSPROT HIT: Q02926, EVALUE 3.70e+00; EST_HUMAN HIT: BE074312.1, EVALUE 4.00e-40
YKASYVRSRSIRSVAIEVDGRVYHVGLGDAAQPRNLTKRHWPGAPEDQDDKDGGDFSGTGGLPDYSAANPIKVTHR

SEQ ID NO: 36600 - protein, 34 aa, Homo sapiens
  MAP TO AC007012.1; EXPRESSED IN BONE MARROW, SIGNAL =   4; EXPRESSED IN ADULT LIVER, SIGNAL = 8.5; EXPRESSED IN BT474, SIGNAL = 3.6; EXPRESSED IN BRAIN, SIGNAL = 4.3; EXPRESSED IN LUNG, SIGNAL = 4.2; EXPRESSED IN PLACENTA, SIGNAL = 4.1; EXPRESSED IN HEART, SIGNAL = 3.4; EXPRESSED IN HELA, SIGNAL = 4.5; EXPRESSED IN HBL100, SIGNAL = 4.3; EXPRESSED IN FETAL LIVER, SIGNAL = 4.2; SWISSPROT HIT: P50448, EVALUE 6.30e+00
NSSCPQQSLCIHLLIQAFQGRNITSFPKVKDIPE

SEQ ID NO: 36601 - protein, 130 aa, Homo sapiens
  MAP TO AC007204.1; EXPRESSED IN BT474, SIGNAL = 6.6; EXPRESSED IN FETAL LIVER, SIGNAL = 3.2; EXPRESSED IN BONE MARROW, SIGNAL = 4.2; EXPRESSED IN HELA, SIGNAL =   3; EXPRESSED IN ADULT LIVER, SIGNAL = 2.3; EXPRESSED IN BRAIN, SIGNAL = 4.4; EXPRESSED IN LUNG, SIGNAL = 4.3; EXPRESSED IN PLACENTA, SIGNAL =  10; EXPRESSED IN HEART, SIGNAL =   3; EXPRESSED IN HBL100, SIGNAL = 3.1; SWISSPROT HIT: P40339, EVALUE 1.90e+00; EST_HUMAN HIT: AU123664.1, EVALUE 3.00e-65
LDIREFILERSPTNVKNVAKPLSTPLPLVHIREVILERNPTNVKNVAKPLLHPQPLVNMRSFILERNPTSVKNVAKLLTSPHPLLNIRKFILERNPTNVKNVAKLLTSPLPLLNIRKFILERNPTNVKNV

SEQ ID NO: 36602 - protein, 34 aa, Homo sapiens
  MAP TO AL022725.8; EXPRESSED IN BT474, SIGNAL = 0.67; EXPRESSED IN FETAL LIVER, SIGNAL = 0.96; EXPRESSED IN LUNG, SIGNAL = 0.85; EXPRESSED IN PLACENTA, SIGNAL = 1.2; EXPRESSED IN BONE MARROW, SIGNAL = 0.98; EXPRESSED IN HBL100, SIGNAL = 0.73; EXPRESSED IN ADULT LIVER, SIGNAL = 0.79; EXPRESSED IN BRAIN, SIGNAL = 1.1; EXPRESSED IN HELA, SIGNAL = 0.96; EXPRESSED IN HEART, SIGNAL = 0.99; SWISSPROT HIT: P46448, EVALUE 2.10e+00
RAKWINMLGMFTQWNTAHHPTTTQTNPNVTMLSK

SEQ ID NO: 36603 - protein, 50 aa, Homo sapiens
  MAP TO AL035091.2; EXPRESSED IN BT474, SIGNAL = 1.3; EXPRESSED IN ADULT LIVER, SIGNAL = 1.2; EXPRESSED IN LUNG, SIGNAL = 1.3; EXPRESSED IN HBL100, SIGNAL = 1.5; EXPRESSED IN HELA, SIGNAL = 1.3; EXPRESSED IN HEART, SIGNAL = 1.3; EXPRESSED IN FETAL LIVER, SIGNAL = 1.4; EXPRESSED IN BRAIN, SIGNAL = 1.2; EXPRESSED IN BONE MARROW, SIGNAL = 1.2; EXPRESSED IN PLACENTA, SIGNAL = 1.2; EST_HUMAN HIT: AA047207.1, EVALUE 4.00e-10; SWISSPROT HIT: P49880, EVALUE 3.10e-01
ILQEFSKCDTEAKSEHMLLNNGANELAGCRVATNLQIVKNSVSIWRDTIK

SEQ ID NO: 36604 - protein, 147 aa, Homo sapiens
  MAP TO AL049739.1; EXPRESSED IN HEART, SIGNAL = 1.7; EXPRESSED IN BT474, SIGNAL = 0.98; EXPRESSED IN FETAL LIVER, SIGNAL = 0.94; EXPRESSED IN ADULT LIVER, SIGNAL = 1.1; EXPRESSED IN BONE MARROW, SIGNAL = 1.1; EXPRESSED IN BRAIN, SIGNAL = 0.95; EXPRESSED IN HELA, SIGNAL = 0.94; EXPRESSED IN HBL100, SIGNAL = 0.95; SWISSPROT HIT: P13666, EVALUE 1.00e-02; EST_HUMAN HIT: BF477726.1, EVALUE 2.00e-05
AVDDGVEDGGDHSIEEGHQRVSGRIVAGLRANIDKECGAIEEGDHDQVGGAGGEGLAAARNRWDPEDGNEDTPVGAQDEAKGAEDEEGCCQDNLQFIKRGVSTYQLQDRLDLTEELRDGIGAAEGQREDERGVAQPHQHPTGPRRPS

SEQ ID NO: 36605 - protein, 34 aa, Homo sapiens
  MAP TO AL049739.1; EXPRESSED IN HEART, SIGNAL = 1.7; EXPRESSED IN BT474, SIGNAL = 0.98; EXPRESSED IN FETAL LIVER, SIGNAL = 0.94; EXPRESSED IN ADULT LIVER, SIGNAL = 1.1; EXPRESSED IN BONE MARROW, SIGNAL = 1.1; EXPRESSED IN BRAIN, SIGNAL = 0.95; EXPRESSED IN HELA, SIGNAL = 0.94; EXPRESSED IN HBL100, SIGNAL = 0.95
WVGVGLWGAGGAGPHPFHLLFALLRPQYHPAVLL

SEQ ID NO: 36606 - protein, 35 aa, Homo sapiens
  MAP TO AC009886.2; EXPRESSED IN PLACENTA, SIGNAL = 7.5; EXPRESSED IN HBL100, SIGNAL = 6.2; EXPRESSED IN ADULT LIVER, SIGNAL =   7; EXPRESSED IN FETAL LIVER, SIGNAL = 5.7; EXPRESSED IN BONE MARROW, SIGNAL = 6.1; EXPRESSED IN LUNG, SIGNAL = 7.3; EXPRESSED IN HEART, SIGNAL = 5.3; EXPRESSED IN HELA, SIGNAL = 7.6; EXPRESSED IN BT474, SIGNAL = 5.2; EXPRESSED IN BRAIN, SIGNAL = 5.8; EST_HUMAN HIT: BF680294.1, EVALUE 2.00e-11; SWISSPROT HIT: P36368, EVALUE 8.20e+00
CVAICLVSVSPVRPQAPRGVQCVCILLHPGTQNDA

SEQ ID NO: 36607 - protein, 90 aa, Homo sapiens
  MAP TO AC008274.1; EXPRESSED IN HELA, SIGNAL = 1.4; EXPRESSED IN HEART, SIGNAL = 1.4; EXPRESSED IN BT474, SIGNAL =   2; EXPRESSED IN HBL100, SIGNAL = 1.9; EXPRESSED IN FETAL LIVER, SIGNAL = 1.9; EXPRESSED IN LUNG, SIGNAL = 1.1; EXPRESSED IN BRAIN, SIGNAL = 1.4; EXPRESSED IN PLACENTA, SIGNAL = 1.2; EXPRESSED IN BONE MARROW, SIGNAL = 6.3; EXPRESSED IN ADULT LIVER, SIGNAL = 1.3; EST_HUMAN HIT: AA699984.1, EVALUE 4.00e-47; SWISSPROT HIT: P39669, EVALUE 2.40e+00
CTEGSEGLVSPPHGQKERPGFGFMAGLPQVSAQLLCIPAPLLEASQEVVNNTWIEGSGDTLHQQLGIQEQGKKFLVTIGIIHLQEIRQAQ

SEQ ID NO: 36608 - protein, 105 aa, Homo sapiens
  MAP TO AL022319.2; EXPRESSED IN PLACENTA, SIGNAL = 1.3; EXPRESSED IN LUNG, SIGNAL = 1.2; EXPRESSED IN HELA, SIGNAL = 1.2; EXPRESSED IN HEART, SIGNAL = 0.99; EXPRESSED IN BT474, SIGNAL = 1.1; EXPRESSED IN HBL100, SIGNAL =   1; EXPRESSED IN FETAL LIVER, SIGNAL =   1; EXPRESSED IN BRAIN, SIGNAL = 1.4; EXPRESSED IN BONE MARROW, SIGNAL = 1.5; EXPRESSED IN ADULT LIVER, SIGNAL = 1.1; EST_HUMAN HIT: AA493341.1, EVALUE 1.30e+00; SWISSPROT HIT: Q9Z0Y8, EVALUE 2.00e-60
QGDVALPPYYQPEEDDEMPFICSLSGDNGIMGCHEIPPLKEQGRECCLSKDDVYDFGAGRQDLNASGLCVNWNRYYNVCRTGSANPHKGAINFDNIGYAWIVIFQ

SEQ ID NO: 36609 - protein, 43 aa, Homo sapiens
  MAP TO AC008268.1; EXPRESSED IN PLACENTA, SIGNAL = 0.98; EXPRESSED IN LUNG, SIGNAL = 1.1; EXPRESSED IN HELA, SIGNAL = 1.1; EXPRESSED IN HEART, SIGNAL = 0.94; EXPRESSED IN BT474, SIGNAL = 0.89; EXPRESSED IN BONE MARROW, SIGNAL =   1; EXPRESSED IN HBL100, SIGNAL = 0.82; EXPRESSED IN FETAL LIVER, SIGNAL = 0.67; EXPRESSED IN ADULT LIVER, SIGNAL = 1.2; EXPRESSED IN BRAIN, SIGNAL = 1.1; EST_HUMAN HIT: BF337238.1, EVALUE 7.00e+00; SWISSPROT HIT: Q03169, EVALUE 1.20e+00
LVCGHSKLCATRPMRSVRLWRTALRKTKPGHLGSRRQNTIQQL

SEQ ID NO: 36610 - protein, 128 aa, Homo sapiens
  MAP TO AL035553.13; EXPRESSED IN BONE MARROW, SIGNAL = 0.96; EXPRESSED IN LUNG, SIGNAL = 1.2; EXPRESSED IN PLACENTA, SIGNAL = 1.2; EXPRESSED IN HEART, SIGNAL = 1.2; EXPRESSED IN BT474, SIGNAL = 0.97; EXPRESSED IN ADULT LIVER, SIGNAL = 1.3; EST_HUMAN HIT: BE891667.1, EVALUE 4.00e-37; SWISSPROT HIT: P49777, EVALUE 7.00e-04
EASRGWFMRFKERSYLHNIKVQGEVASADVKVAKSYLENLAKIIDESGYTKQQIFNADKTALYWNKTPSRTFTDREKSMPGFNDLKDRLTFLLEANAAGDFNSKPILIDHSENPWALKNYAKSMLPVL

SEQ ID NO: 36611 - protein, 55 aa, Homo sapiens
  MAP TO AC010778.2; EXPRESSED IN HELA, SIGNAL = 1.4; EXPRESSED IN HEART, SIGNAL =   1; EXPRESSED IN PLACENTA, SIGNAL =   3; EXPRESSED IN HBL100, SIGNAL = 1.2; EXPRESSED IN ADULT LIVER, SIGNAL = 1.5; EXPRESSED IN BT474, SIGNAL = 1.2; EXPRESSED IN FETAL LIVER, SIGNAL = 1.4; EXPRESSED IN BONE MARROW, SIGNAL = 1.3; EXPRESSED IN LUNG, SIGNAL = 1.5; EXPRESSED IN BRAIN, SIGNAL = 1.1; EST_HUMAN HIT: AU121943.1, EVALUE 2.00e-17
YATGCKLVPRTCIRTPRAIPFSSVTYKEKSCPVGKLNTGAWVRAFFRVWKAASAS

SEQ ID NO: 36612 - protein, 69 aa, Homo sapiens
  MAP TO AL078624.22; EXPRESSED IN FETAL LIVER, SIGNAL = 1.5; EXPRESSED IN ADULT LIVER, SIGNAL = 1.6; EXPRESSED IN HELA, SIGNAL = 1.6; EXPRESSED IN HBL100, SIGNAL = 1.7; EXPRESSED IN BT474, SIGNAL = 1.4; EXPRESSED IN BRAIN, SIGNAL = 1.4; EXPRESSED IN LUNG, SIGNAL = 1.4; EXPRESSED IN BONE MARROW, SIGNAL = 1.5; EXPRESSED IN PLACENTA, SIGNAL = 1.5; EXPRESSED IN HEART, SIGNAL = 1.7; EST_HUMAN HIT: H52187.1, EVALUE 1.00e-04
IKTIGLDYSWPWNNTVFNFEDSLILESSFTFAIPETARTIPSLLPPFILLIMKTMRMKTFMVIHFHLMN

SEQ ID NO: 36613 - protein, 66 aa, Homo sapiens
  MAP TO AC007955.3; EXPRESSED IN PLACENTA, SIGNAL = 1.6; EXPRESSED IN HELA, SIGNAL = 1.6; EXPRESSED IN HEART, SIGNAL = 1.4; EXPRESSED IN BT474, SIGNAL = 1.3; EXPRESSED IN BRAIN, SIGNAL = 1.3; EXPRESSED IN BONE MARROW, SIGNAL = 1.3; EXPRESSED IN LUNG, SIGNAL = 1.3; EXPRESSED IN HBL100, SIGNAL = 1.2; EXPRESSED IN ADULT LIVER, SIGNAL = 1.7; EXPRESSED IN FETAL LIVER, SIGNAL = 1.5; EST_HUMAN HIT: AI345418.1, EVALUE 1.60e+00; SWISSPROT HIT: O60241, EVALUE 4.70e+00
ALCCPHLPQVHTNHRSPAGLHHRAQNTLFLLCAWYCIALGHLIYSHCSPQLSMISILQMRKLSLKI

SEQ ID NO: 36614 - protein, 42 aa, Homo sapiens
  MAP TO AL109829.10; EXPRESSED IN LUNG, SIGNAL = 2.5; EXPRESSED IN HBL100, SIGNAL = 3.1; EXPRESSED IN HELA, SIGNAL = 2.7; EXPRESSED IN PLACENTA, SIGNAL = 4.3; EXPRESSED IN ADULT LIVER, SIGNAL = 2.4; EXPRESSED IN BONE MARROW, SIGNAL = 3.2; EXPRESSED IN HEART, SIGNAL = 2.9; EXPRESSED IN BT474, SIGNAL = 3.1; EXPRESSED IN FETAL LIVER, SIGNAL = 2.2; EXPRESSED IN BRAIN, SIGNAL = 3.8; EST_HUMAN HIT: BF681102.1, EVALUE 3.00e-11; SWISSPROT HIT: O62732, EVALUE 1.40e-01
GTPPSGAVRQGPPCCPPDPRIVDPPTACTMYLERPQTFNASP

SEQ ID NO: 36615 - protein, 53 aa, Homo sapiens
  MAP TO AL035662.23; EXPRESSED IN PLACENTA, SIGNAL = 1.5; EXPRESSED IN HEART, SIGNAL = 1.4; EXPRESSED IN FETAL LIVER, SIGNAL = 1.4; EXPRESSED IN BONE MARROW, SIGNAL = 1.5; EXPRESSED IN HELA, SIGNAL = 1.5; EXPRESSED IN HBL100, SIGNAL = 1.2; EXPRESSED IN BT474, SIGNAL = 1.4; EXPRESSED IN ADULT LIVER, SIGNAL = 1.5; EXPRESSED IN BRAIN, SIGNAL = 1.3; EXPRESSED IN LUNG, SIGNAL = 1.6; EST_HUMAN HIT: BF359080.1, EVALUE 7.00e-23; SWISSPROT HIT: P38996, EVALUE 1.50e+00
DYAESVGRKVRDLGMVVDLIFLNTEVSLSQALEDVSRGGSPFAIVITQQHQIH

SEQ ID NO: 36616 - protein, 59 aa, Homo sapiens; identical to SEQ ID NO: 35030
  MAP TO AL050349.9; EXPRESSED IN BT474, SIGNAL = 3.4; EXPRESSED IN HBL100, SIGNAL = 5.6; EXPRESSED IN HELA, SIGNAL = 4.7; EXPRESSED IN PLACENTA, SIGNAL = 4.9; EXPRESSED IN ADULT LIVER, SIGNAL = 4.7; EXPRESSED IN FETAL LIVER, SIGNAL = 4.9; EXPRESSED IN BRAIN, SIGNAL = 4.3; EXPRESSED IN LUNG, SIGNAL = 5.1; EXPRESSED IN BONE MARROW, SIGNAL = 4.8; EXPRESSED IN HEART, SIGNAL =   4; SWISSPROT HIT: Q91661, EVALUE 3.40e+00; EST_HUMAN HIT: AI806897.1, EVALUE 1.40e+00

SEQ ID NO: 36617 - protein, 31 aa, Homo sapiens
  MAP TO AL096712.17; EXPRESSED IN PLACENTA, SIGNAL = 2.2; EXPRESSED IN HEART, SIGNAL = 1.9; EXPRESSED IN BT474, SIGNAL = 1.6; EXPRESSED IN LUNG, SIGNAL = 2.1; EXPRESSED IN HBL100, SIGNAL = 2.1; EXPRESSED IN HELA, SIGNAL = 3.4; EXPRESSED IN ADULT LIVER, SIGNAL = 2.3; EXPRESSED IN FETAL LIVER, SIGNAL = 2.1; EXPRESSED IN BRAIN, SIGNAL = 1.7; EXPRESSED IN BONE MARROW, SIGNAL = 1.6
MNLKSSPWHLWQLLKLSPTRKLVLDILREVE

SEQ ID NO: 36618 - protein, 64 aa, Homo sapiens
  MAP TO AC010809.2; EXPRESSED IN PLACENTA, SIGNAL = 2.5; EXPRESSED IN HBL100, SIGNAL = 2.5; EXPRESSED IN LUNG, SIGNAL = 2.8; EXPRESSED IN BRAIN, SIGNAL = 2.9; EXPRESSED IN HEART, SIGNAL = 2.2; EXPRESSED IN BT474, SIGNAL = 2.7; EXPRESSED IN ADULT LIVER, SIGNAL = 2.4; EXPRESSED IN FETAL LIVER, SIGNAL = 2.5; EXPRESSED IN BONE MARROW, SIGNAL =   3; EXPRESSED IN HELA, SIGNAL = 2.4; EST_HUMAN HIT: AA683248.1, EVALUE 3.00e-11; SWISSPROT HIT: P21817, EVALUE 4.00e-12
EVWEPHLSNVILNPIFQLIQTGKGEAIRIRSILRSLVPTEDLVGIISIPLKLPSLNKGKGSDCR

SEQ ID NO: 36619 - protein, 17 aa, Homo sapiens
  MAP TO AC009974.3; EXPRESSED IN HELA, SIGNAL =   4; EXPRESSED IN HEART, SIGNAL = 4.1; EXPRESSED IN PLACENTA, SIGNAL =   4; EXPRESSED IN HBL100, SIGNAL = 3.9; EXPRESSED IN ADULT LIVER, SIGNAL = 5.8; EXPRESSED IN BT474, SIGNAL = 3.8; EXPRESSED IN FETAL LIVER, SIGNAL = 5.3; EXPRESSED IN BONE MARROW, SIGNAL = 4.8; EXPRESSED IN LUNG, SIGNAL = 4.2; EXPRESSED IN BRAIN, SIGNAL = 4.4
SRRPSLLWWPTVCGQPL

SEQ ID NO: 36620 - protein, 132 aa, Homo sapiens
  MAP TO AL096774.8; EXPRESSED IN BONE MARROW, SIGNAL = 2.2; EXPRESSED IN LUNG, SIGNAL = 2.7; EXPRESSED IN BRAIN, SIGNAL = 2.1; EXPRESSED IN HELA, SIGNAL = 2.3; EXPRESSED IN HBL100, SIGNAL = 2.8; EXPRESSED IN PLACENTA, SIGNAL = 2.1; EXPRESSED IN HEART, SIGNAL =   3; EXPRESSED IN ADULT LIVER, SIGNAL =   3; EXPRESSED IN BT474, SIGNAL = 2.3; EXPRESSED IN FETAL LIVER, SIGNAL = 2.3; EST_HUMAN HIT: AI354615.1, EVALUE 1.60e-01; SWISSPROT HIT: O15945, EVALUE 6.50e+00
HPDGWSKEKELPLPQRHLPLVQGNHSGQTSPDVTDVASPAAGGLAAPSPCVSCLDAPWNHAGLWEGKMRLRGLRIPGPTGHPHHSTITAAPMVSLHQAGFGFECEAAEGQVAGNMGRGGGRSWRRGFISGWM

SEQ ID NO: 36621 - protein, 54 aa, Homo sapiens
  MAP TO AL031684.11; EXPRESSED IN PLACENTA, SIGNAL = 0.96; EXPRESSED IN BT474, SIGNAL = 0.98; EXPRESSED IN LUNG, SIGNAL = 0.91; EXPRESSED IN HELA, SIGNAL = 0.79; EXPRESSED IN HEART, SIGNAL =   1; EXPRESSED IN BONE MARROW, SIGNAL = 0.8; EXPRESSED IN BRAIN, SIGNAL = 1.1; EXPRESSED IN ADULT LIVER, SIGNAL = 0.84; EXPRESSED IN FETAL LIVER, SIGNAL = 0.76; EXPRESSED IN HBL100, SIGNAL = 0.86; EST_HUMAN HIT: BF131948.1, EVALUE 2.90e-02; SWISSPROT HIT: P09618, EVALUE 4.50e+00
CLRACLCQWKGGPSPNSLSCCFSFSPSRRGAPDITLFCQVFCCISSLLLAFSTC

SEQ ID NO: 36622 - protein, 123 aa, Homo sapiens; identical to SEQ ID NO: 35486
  MAP TO AL080274.13; EXPRESSED IN PLACENTA, SIGNAL =   2; EXPRESSED IN HEART, SIGNAL = 1.3; EXPRESSED IN BT474, SIGNAL = 1.4; EXPRESSED IN FETAL LIVER, SIGNAL = 1.3; EXPRESSED IN BONE MARROW, SIGNAL = 1.1; EXPRESSED IN HELA, SIGNAL = 3.2; EXPRESSED IN HBL100, SIGNAL = 1.4; EXPRESSED IN ADULT LIVER, SIGNAL = 1.4; EXPRESSED IN BRAIN, SIGNAL = 1.7; EXPRESSED IN LUNG, SIGNAL = 1.7; EST_HUMAN HIT: AW959703.1, EVALUE 4.00e-57; SWISSPROT HIT: Q9JWD6, EVALUE 8.50e-01

SEQ ID NO: 36623 - protein, 22 aa, Homo sapiens
  MAP TO AL080274.13; EXPRESSED IN PLACENTA, SIGNAL =   2; EXPRESSED IN HEART, SIGNAL = 1.3; EXPRESSED IN BT474, SIGNAL = 1.4; EXPRESSED IN FETAL LIVER, SIGNAL = 1.3; EXPRESSED IN BONE MARROW, SIGNAL = 1.1; EXPRESSED IN HELA, SIGNAL = 3.2; EXPRESSED IN HBL100, SIGNAL = 1.4; EXPRESSED IN ADULT LIVER, SIGNAL = 1.4; EXPRESSED IN BRAIN, SIGNAL = 1.7; EXPRESSED IN LUNG, SIGNAL = 1.7; EST_HUMAN HIT: T98859.1, EVALUE 2.00e-04
LSMRPTTSSSGILQPKSLSFSL

SEQ ID NO: 36624 - protein, 172 aa, Homo sapiens
  MAP TO AC010083.2; EXPRESSED IN BT474, SIGNAL = 1.2; EXPRESSED IN BRAIN, SIGNAL = 1.3; EXPRESSED IN HELA, SIGNAL = 0.96; EXPRESSED IN HEART, SIGNAL = 0.96; EXPRESSED IN PLACENTA, SIGNAL = 0.92; EXPRESSED IN ADULT LIVER, SIGNAL = 1.3; EXPRESSED IN FETAL LIVER, SIGNAL = 1.1; EXPRESSED IN LUNG, SIGNAL = 0.94; EXPRESSED IN BONE MARROW, SIGNAL =   1; EXPRESSED IN HBL100, SIGNAL = 1.1; SWISSPROT HIT: Q12934, EVALUE 1.00e-82; EST_HUMAN HIT: BE925247.1, EVALUE 3.00e-12
LTRALQDITAAKPRQKALPKNVPRRKEIITKDKTNGALEDAPLKGLEDTKLVQVVLKEESESKFESESKEVSPLTQEGAPEDVPDGGQISKGFGKLYRKVKEKVRSPKEPETPTELYTKERHVLVTGDANYVDPRFYVSSITAKGGVAVSVAEDSVLYDGQVEPSPESPKPP

SEQ ID NO: 36625 - protein, 78 aa, Homo sapiens
  MAP TO AL035452.6; EXPRESSED IN FETAL LIVER, SIGNAL = 0.99; EXPRESSED IN ADULT LIVER, SIGNAL =   1; EXPRESSED IN BONE MARROW, SIGNAL = 0.97; EXPRESSED IN HEART, SIGNAL = 0.96; EST_HUMAN HIT: AW854913.1, EVALUE 5.00e-03; SWISSPROT HIT: Q10369, EVALUE 7.50e+00
FQFLQYYHGYMGQREYQGMHHYAIPLVPRSLSTSAFFSPTFRLLSFCFEYSVYGFYLYLLEGVRKSMSTPSCLKQKSK

SEQ ID NO: 36626 - protein, 81 aa, Homo sapiens
  MAP TO AC009892.2; EXPRESSED IN BT474, SIGNAL =   2; EXPRESSED IN FETAL LIVER, SIGNAL = 1.7; EXPRESSED IN BRAIN, SIGNAL = 5.4; EXPRESSED IN HELA, SIGNAL = 2.1; EXPRESSED IN PLACENTA, SIGNAL = 2.3; EXPRESSED IN ADULT LIVER, SIGNAL = 1.6; EXPRESSED IN LUNG, SIGNAL = 2.1; EXPRESSED IN BONE MARROW, SIGNAL = 2.8; EXPRESSED IN HEART, SIGNAL = 1.7; EXPRESSED IN HBL100, SIGNAL = 2.1; EST_HUMAN HIT: AW503927.1, EVALUE 2.00e-08; SWISSPROT HIT: Q64281, EVALUE 9.00e-11
SVIIQGSPVTLRCQGSLQAEEYHLYRENKSASWVRRIQEPGKNGQFPIPSITWEHAGRYHCQYYSHNHSSEYSDPLELVVT

SEQ ID NO: 36627 - protein, 26 aa, Homo sapiens
  MAP TO AL132780.1; EXPRESSED IN BONE MARROW, SIGNAL =   5; EXPRESSED IN HELA, SIGNAL = 5.2; EXPRESSED IN FETAL LIVER, SIGNAL = 5.2; EXPRESSED IN ADULT LIVER, SIGNAL =   7; EXPRESSED IN BT474, SIGNAL = 5.9; EXPRESSED IN BRAIN, SIGNAL =   5; EXPRESSED IN LUNG, SIGNAL = 5.2; EXPRESSED IN PLACENTA, SIGNAL = 5.8; EXPRESSED IN HEART, SIGNAL = 4.2; EXPRESSED IN HBL100, SIGNAL = 6.2; EST_HUMAN HIT: BF375689.1, EVALUE 1.00e-07
RLLQEHRLKTQSELDRINAQYLEVKC

SEQ ID NO: 36628 - protein, 43 aa, Homo sapiens
  MAP TO AL132780.1; EXPRESSED IN BONE MARROW, SIGNAL =   5; EXPRESSED IN HELA, SIGNAL = 5.2; EXPRESSED IN FETAL LIVER, SIGNAL = 5.2; EXPRESSED IN ADULT LIVER, SIGNAL =   7; EXPRESSED IN BT474, SIGNAL = 5.9; EXPRESSED IN BRAIN, SIGNAL =   5; EXPRESSED IN LUNG, SIGNAL = 5.2; EXPRESSED IN PLACENTA, SIGNAL = 5.8; EXPRESSED IN HEART, SIGNAL = 4.2; EXPRESSED IN HBL100, SIGNAL = 6.2; EST_HUMAN HIT: BE908379.1, EVALUE 1.00e-08
FMPSSSSILGSGASPLPHFAAEASSRTPAEDSIRARPHQCPVP

SEQ ID NO: 36629 - protein, 39 aa, Homo sapiens
  MAP TO AC010737.2; EXPRESSED IN BT474, SIGNAL = 8.4; EXPRESSED IN BRAIN, SIGNAL = 7.8; EXPRESSED IN HELA, SIGNAL = 8.7; EXPRESSED IN HEART, SIGNAL =   7; EXPRESSED IN PLACENTA, SIGNAL = 9.2; EXPRESSED IN ADULT LIVER, SIGNAL =  11; EXPRESSED IN FETAL LIVER, SIGNAL = 8.1; EXPRESSED IN LUNG, SIGNAL = 9.3; EXPRESSED IN BONE MARROW, SIGNAL = 8.9; EXPRESSED IN HBL100, SIGNAL = 8.4; EST_HUMAN HIT: AI985689.1, EVALUE 3.00e-04; SWISSPROT HIT: P76125, EVALUE 8.10e+00
SLFCKLYRMHGMNMCFWLELQKASTYDEREKEIDVCRSH

SEQ ID NO: 36630 - protein, 39 aa, Homo sapiens
  MAP TO AL121757.7; EXPRESSED IN BT474, SIGNAL = 1.2; EXPRESSED IN BONE MARROW, SIGNAL = 1.2; EXPRESSED IN HELA, SIGNAL = 1.1; EXPRESSED IN FETAL LIVER, SIGNAL = 1.1; EXPRESSED IN ADULT LIVER, SIGNAL = 1.8; EXPRESSED IN BRAIN, SIGNAL = 1.4; EXPRESSED IN LUNG, SIGNAL = 1.3; EXPRESSED IN PLACENTA, SIGNAL = 1.5; EXPRESSED IN HEART, SIGNAL = 1.2; EXPRESSED IN HBL100, SIGNAL = 1.4
IAKQLHMQLVWESEMLRGDPAGAAAATTRRLSLWTGKPA

SEQ ID NO: 36631 - protein, 69 aa, Homo sapiens
  MAP TO AL078600.14; EXPRESSED IN BONE MARROW, SIGNAL = 1.9; EXPRESSED IN LUNG, SIGNAL =   3; EXPRESSED IN BRAIN, SIGNAL = 1.7; EXPRESSED IN HBL100, SIGNAL = 1.8; EXPRESSED IN HELA, SIGNAL = 2.1; EXPRESSED IN PLACENTA, SIGNAL =   2; EXPRESSED IN HEART, SIGNAL =   2; EXPRESSED IN BT474, SIGNAL = 1.7; EXPRESSED IN ADULT LIVER, SIGNAL = 1.7; EXPRESSED IN FETAL LIVER, SIGNAL = 4.2; SWISSPROT HIT: Q10213, EVALUE 5.60e+00
KHPDSFQKEKDPSADLQRGQYLPQVSEAKSQLSLKNEDALVKLARSQLKDVGCPKCLVRAPINKGYFIL

SEQ ID NO: 36632 - protein, 69 aa, Homo sapiens
  MAP TO AL109615.9; EXPRESSED IN HEART, SIGNAL = 5.1; EXPRESSED IN BT474, SIGNAL =   4; EXPRESSED IN LUNG, SIGNAL = 5.5; EXPRESSED IN PLACENTA, SIGNAL = 5.5; EXPRESSED IN HELA, SIGNAL = 5.2; EXPRESSED IN HBL100, SIGNAL = 4.8; EXPRESSED IN ADULT LIVER, SIGNAL = 5.8; EXPRESSED IN FETAL LIVER, SIGNAL =   5; EXPRESSED IN BRAIN, SIGNAL = 4.3; EXPRESSED IN BONE MARROW, SIGNAL = 4.6; EST_HUMAN HIT: AV689176.1, EVALUE 6.40e-01; SWISSPROT HIT: P09615, EVALUE 1.90e+00
DATPLLCPLHPQDPSLSPGAWAPTGRVGQRRARKHLQYVFQSTVGERSKRVNGAYLLCPLRDTSEMRRD

SEQ ID NO: 36633 - protein, 84 aa, Homo sapiens
  MAP TO AL035045.2; EXPRESSED IN HELA, SIGNAL =   2; EXPRESSED IN BRAIN, SIGNAL =   2; EXPRESSED IN HBL100, SIGNAL = 2.7; EXPRESSED IN PLACENTA, SIGNAL = 2.6; EXPRESSED IN ADULT LIVER, SIGNAL = 3.5; EXPRESSED IN HEART, SIGNAL = 2.5; EXPRESSED IN BT474, SIGNAL = 2.5; EXPRESSED IN FETAL LIVER, SIGNAL = 2.5; EXPRESSED IN BONE MARROW, SIGNAL = 2.4; EXPRESSED IN LUNG, SIGNAL = 2.6; SWISSPROT HIT: O43426, EVALUE 9.00e-01; EST_HUMAN HIT: BF133000.1, EVALUE 4.30e-01
VKAPRAGVPAVEVEAARHRHLRPGPETSMAALPPFSTGQVPTEPLQIQQEGTQTPHPNKKSSKECVAIFNLPQHPGSINYCHFS

SEQ ID NO: 36634 - protein, 42 aa, Homo sapiens
  MAP TO AC009966.3; EXPRESSED IN HBL100, SIGNAL = 1.4; EXPRESSED IN BT474, SIGNAL = 1.2; EXPRESSED IN BRAIN, SIGNAL = 1.6; EXPRESSED IN HELA, SIGNAL = 1.3; EXPRESSED IN HEART, SIGNAL = 1.2; EXPRESSED IN PLACENTA, SIGNAL = 1.3; EXPRESSED IN ADULT LIVER, SIGNAL = 1.4; EXPRESSED IN FETAL LIVER, SIGNAL = 1.5; EXPRESSED IN LUNG, SIGNAL = 1.3; EXPRESSED IN BONE MARROW, SIGNAL = 1.3; EST_HUMAN HIT: AW161039.1, EVALUE 4.00e-17; SWISSPROT HIT: O14994, EVALUE 4.00e-18
SLSSAMKQAPQATSGLMEPPGPSTPIVQRPRILLVIDDAHTD

SEQ ID NO: 36635 - protein, 42 aa, Homo sapiens
  MAP TO AC009966.3; EXPRESSED IN HBL100, SIGNAL = 1.4; EXPRESSED IN BT474, SIGNAL = 1.2; EXPRESSED IN BRAIN, SIGNAL = 1.6; EXPRESSED IN HELA, SIGNAL = 1.3; EXPRESSED IN HEART, SIGNAL = 1.2; EXPRESSED IN PLACENTA, SIGNAL = 1.3; EXPRESSED IN ADULT LIVER, SIGNAL = 1.4; EXPRESSED IN FETAL LIVER, SIGNAL = 1.5; EXPRESSED IN LUNG, SIGNAL = 1.3; EXPRESSED IN BONE MARROW, SIGNAL = 1.3; EST_HUMAN HIT: AW161039.1, EVALUE 1.00e-22; SWISSPROT HIT: Q07933, EVALUE 6.10e+00
SLYGHHRSPTGSWVFEQWAWRDLEAPSVLRWPEGPASWHWRG

SEQ ID NO: 36636 - protein, 153 aa, Homo sapiens
  MAP TO AL035703.19; EXPRESSED IN PLACENTA, SIGNAL = 0.95; EXPRESSED IN HBL100, SIGNAL = 1.2; EXPRESSED IN HELA, SIGNAL = 1.3; EXPRESSED IN BT474, SIGNAL = 0.97; EXPRESSED IN ADULT LIVER, SIGNAL = 1.4; EXPRESSED IN FETAL LIVER, SIGNAL = 1.2; EXPRESSED IN LUNG, SIGNAL = 1.1; EXPRESSED IN BONE MARROW, SIGNAL = 1.3; EXPRESSED IN BRAIN, SIGNAL = 0.99; EXPRESSED IN HEART, SIGNAL = 1.1; EST_HUMAN HIT: AW845008.1, EVALUE 8.00e-42; SWISSPROT HIT: O09127, EVALUE 9.00e-56
GSPSTLVCPSQGGKIPIRWTAPEAIAFRTFSSASDVWSFGVVMWEVLAYGERPYWNMTNRDVSAKPWQVRGRWSLRVQGGTAEPSADPLQVISSVEEGYRLPAPMGCPHALHQLMLDCWHKDRAQRPRFSQIVSVLDALIRSPESLRATATVS

SEQ ID NO: 36637 - protein, 65 aa, Homo sapiens
  MAP TO AC009974.3; EXPRESSED IN FETAL LIVER, SIGNAL = 1.1; EXPRESSED IN BRAIN, SIGNAL = 1.2; EXPRESSED IN HBL100, SIGNAL = 0.99; EXPRESSED IN PLACENTA, SIGNAL = 1.1; EXPRESSED IN ADULT LIVER, SIGNAL = 0.96; EXPRESSED IN BT474, SIGNAL = 1.1; EXPRESSED IN BONE MARROW, SIGNAL =   1; EXPRESSED IN HEART, SIGNAL = 0.98; EST_HUMAN HIT: AU125582.1, EVALUE 1.00e-29; SWISSPROT HIT: P28683, EVALUE 8.60e-01
VCCYHLPLMQVELPISLLTRLALMDPTSLNQFVNTVSASPRTIVSFLSVALLSDQPLLTSDLLSL

SEQ ID NO: 36638 - protein, 26 aa, Homo sapiens
  MAP TO AC009974.3; EXPRESSED IN FETAL LIVER, SIGNAL = 1.1; EXPRESSED IN BRAIN, SIGNAL = 1.2; EXPRESSED IN HBL100, SIGNAL = 0.99; EXPRESSED IN PLACENTA, SIGNAL = 1.1; EXPRESSED IN ADULT LIVER, SIGNAL = 0.96; EXPRESSED IN BT474, SIGNAL = 1.1; EXPRESSED IN BONE MARROW, SIGNAL =   1; EXPRESSED IN HEART, SIGNAL = 0.98; EST_HUMAN HIT: AU125582.1, EVALUE 2.00e-10
HQPSHTPGPHGSHLSQPVCEHSVCLP

SEQ ID NO: 36639 - protein, 85 aa, Homo sapiens; identical to SEQ ID NO: 35199
  MAP TO AL096801.16; EXPRESSED IN PLACENTA, SIGNAL = 2.5; EXPRESSED IN BT474, SIGNAL = 1.9; EXPRESSED IN BONE MARROW, SIGNAL = 2.1; EXPRESSED IN BRAIN, SIGNAL = 2.4; EXPRESSED IN HBL100, SIGNAL = 2.2; EXPRESSED IN HEART, SIGNAL = 2.1; EXPRESSED IN ADULT LIVER, SIGNAL = 2.5; EXPRESSED IN FETAL LIVER, SIGNAL = 2.4; EXPRESSED IN LUNG, SIGNAL = 2.6; EXPRESSED IN HELA, SIGNAL = 2.8; SWISSPROT HIT: P46590, EVALUE 1.40e-01; EST_HUMAN HIT: AA155873.1, EVALUE 1.00e-40

SEQ ID NO: 36640 - protein, 119 aa, Homo sapiens
  MAP TO AC010826.2; EXPRESSED IN BRAIN, SIGNAL = 2.2; EXPRESSED IN HEART, SIGNAL = 1.5; EXPRESSED IN HELA, SIGNAL = 1.4; EXPRESSED IN HBL100, SIGNAL = 1.4; EXPRESSED IN PLACENTA, SIGNAL = 1.8; EXPRESSED IN ADULT LIVER, SIGNAL = 1.5; EXPRESSED IN FETAL LIVER, SIGNAL = 2.6; EXPRESSED IN BT474, SIGNAL = 1.3; EXPRESSED IN LUNG, SIGNAL = 1.2; EXPRESSED IN BONE MARROW, SIGNAL = 1.8; SWISSPROT HIT: P36724, EVALUE 4.20e-01; EST_HUMAN HIT: AV711714.1, EVALUE 8.00e-18
LNTTINVMKRMAWEEIAQCVNAVGEGEQRTGTEVKRRYLDWRALMKRKRMKANIKLVGSGFPLPSSDLDDSLTEEIDEKIGFRNDANFDWQNVADFRDAGGSLTEVKVEEEERDPQSPE

SEQ ID NO: 36641 - protein, 18 aa, Homo sapiens
  MAP TO AC010826.2; EXPRESSED IN BRAIN, SIGNAL = 2.2; EXPRESSED IN HEART, SIGNAL = 1.5; EXPRESSED IN HELA, SIGNAL = 1.4; EXPRESSED IN HBL100, SIGNAL = 1.4; EXPRESSED IN PLACENTA, SIGNAL = 1.8; EXPRESSED IN ADULT LIVER, SIGNAL = 1.5; EXPRESSED IN FETAL LIVER, SIGNAL = 2.6; EXPRESSED IN BT474, SIGNAL = 1.3; EXPRESSED IN LUNG, SIGNAL = 1.2; EXPRESSED IN BONE MARROW, SIGNAL = 1.8; EST_HUMAN HIT: AV752442.1, EVALUE 2.20e-02
NCIEIENEAVEKKKEKQF

SEQ ID NO: 36642 - protein, 72 aa, Homo sapiens
  MAP TO AC007614.2; EXPRESSED IN HELA, SIGNAL = 2.3; EXPRESSED IN HEART, SIGNAL = 1.9; EXPRESSED IN FETAL LIVER, SIGNAL = 2.5; EXPRESSED IN ADULT LIVER, SIGNAL = 2.3; EXPRESSED IN LUNG, SIGNAL = 2.2; EXPRESSED IN BRAIN, SIGNAL = 2.3; EXPRESSED IN PLACENTA, SIGNAL =   2; EXPRESSED IN HBL100, SIGNAL = 2.5; EXPRESSED IN BT474, SIGNAL = 2.2; EXPRESSED IN BONE MARROW, SIGNAL = 2.7
VDGLFTYSEGAEGEGMLAILIELWVRTHSSSSHGIWVSGAFSSSCSGLSMPPKWGLTWQVHQHVGLNNLLHQ

SEQ ID NO: 36643 - protein, 84 aa, Homo sapiens
  MAP TO AL096814.11; EXPRESSED IN BONE MARROW, SIGNAL =   1; EXPRESSED IN HBL100, SIGNAL = 0.96; EXPRESSED IN HEART, SIGNAL = 1.5; EXPRESSED IN BT474, SIGNAL = 1.2; EST_HUMAN HIT: BE062715.1, EVALUE 2.00e-47; SWISSPROT HIT: P10041, EVALUE 1.80e+00
MEPLTVLSASCCLRSPWSPQHRLSLPATSRCPSSLTLVSLVGCPNQLFRSGSTLPKGTCIMTTSSLWLRCQCREDSHCRPHRCC

SEQ ID NO: 36644 - protein, 17 aa, Homo sapiens
  MAP TO AL096814.11; EXPRESSED IN BONE MARROW, SIGNAL =   1; EXPRESSED IN HBL100, SIGNAL = 0.96; EXPRESSED IN HEART, SIGNAL = 1.5; EXPRESSED IN BT474, SIGNAL = 1.2
TWKPGQLKHDVGGTSPG

SEQ ID NO: 36645 - protein, 44 aa, Homo sapiens
  MAP TO AC009453.1; EXPRESSED IN PLACENTA, SIGNAL =  16; EXPRESSED IN HEART, SIGNAL = 0.85
CFITIIFNSIIIIIIIRMIKFLLHTDPETGGDRKKNKSHLLFLK

SEQ ID NO: 36646 - protein, 89 aa, Homo sapiens
  MAP TO AL049542.5; EXPRESSED IN FETAL LIVER, SIGNAL = 5.9; EXPRESSED IN HEART, SIGNAL = 5.5; EXPRESSED IN PLACENTA, SIGNAL = 5.5; EXPRESSED IN ADULT LIVER, SIGNAL = 5.9; EXPRESSED IN BT474, SIGNAL = 4.7; EXPRESSED IN BRAIN, SIGNAL = 5.5; EXPRESSED IN LUNG, SIGNAL =   6; EXPRESSED IN BONE MARROW, SIGNAL = 5.6; EXPRESSED IN HELA, SIGNAL = 6.1; EXPRESSED IN HBL100, SIGNAL = 4.8; SWISSPROT HIT: P17547, EVALUE 1.40e+00; EST_HUMAN HIT: BF110696.1, EVALUE 9.20e-01
SEQYRRAFELADQLGLKHPDCIEHVFPTYADEQCTHVLTEEDFFSTEEREGVDRCIGVICSSVSDELFPNVPEYGGIGYQFLYEGDELT

SEQ ID NO: 36647 - protein, 27 aa, Homo sapiens
  MAP TO AC010961.2; EXPRESSED IN FETAL LIVER, SIGNAL = 1.3; EXPRESSED IN LUNG, SIGNAL = 1.5; EXPRESSED IN HELA, SIGNAL = 1.5; EXPRESSED IN PLACENTA, SIGNAL = 1.5; EXPRESSED IN BT474, SIGNAL = 1.3; EXPRESSED IN BRAIN, SIGNAL = 1.7; EXPRESSED IN BONE MARROW, SIGNAL = 1.5; EXPRESSED IN HEART, SIGNAL =   2; EXPRESSED IN HBL100, SIGNAL = 1.6; EXPRESSED IN ADULT LIVER, SIGNAL = 2.1
YSIAHKKEASDHPMGVYFVITKDKNVS

SEQ ID NO: 36648 - protein, 99 aa, Homo sapiens; identical to SEQ ID NO: 36041
  MAP TO AL049812.4; EXPRESSED IN BT474, SIGNAL = 1.2; EXPRESSED IN BRAIN, SIGNAL = 1.5; EXPRESSED IN HBL100, SIGNAL = 1.1; EXPRESSED IN HELA, SIGNAL = 0.95; EXPRESSED IN PLACENTA, SIGNAL = 1.4; EXPRESSED IN FETAL LIVER, SIGNAL = 1.2; EXPRESSED IN LUNG, SIGNAL = 1.2; EXPRESSED IN BONE MARROW, SIGNAL = 1.3; EXPRESSED IN HEART, SIGNAL = 1.2; EXPRESSED IN ADULT LIVER, SIGNAL = 1.5; EST_HUMAN HIT: BE743126.1, EVALUE 1.60e-01; SWISSPROT HIT: Q9UKP4, EVALUE 7.60e+00

SEQ ID NO: 36649 - protein, 138 aa, Homo sapiens
  MAP TO AL035419.9; EXPRESSED IN BONE MARROW, SIGNAL = 1.3; EXPRESSED IN LUNG, SIGNAL = 1.2; EXPRESSED IN HELA, SIGNAL =   1; EXPRESSED IN BRAIN, SIGNAL = 1.4; EXPRESSED IN HBL100, SIGNAL = 1.1; EXPRESSED IN PLACENTA, SIGNAL = 1.5; EXPRESSED IN ADULT LIVER, SIGNAL = 1.6; EXPRESSED IN HEART, SIGNAL = 1.5; EXPRESSED IN BT474, SIGNAL = 1.5; EXPRESSED IN FETAL LIVER, SIGNAL = 1.2
TDADGDGDAADGGDGDAAADDDGGDNDGDAADGDGGDDDGDAADGVDGDAADGDDGGDYDGDAAAAAGGDPADGFDGYDDGDAADGDDGDDDDGNDDDGEGNNGNDGDGDDGDNNDDADGDDNDGDATAVATDDGDDA

SEQ ID NO: 36650 - protein, 82 aa, Homo sapiens
  MAP TO AL117374.5; EXPRESSED IN FETAL LIVER, SIGNAL = 0.99; EXPRESSED IN BONE MARROW, SIGNAL = 0.98; EXPRESSED IN BRAIN, SIGNAL = 0.98; EXPRESSED IN HELA, SIGNAL = 1.1; EXPRESSED IN HEART, SIGNAL = 0.95; EXPRESSED IN PLACENTA, SIGNAL = 1.1; EXPRESSED IN HBL100, SIGNAL =   1; EXPRESSED IN BT474, SIGNAL = 0.9; EXPRESSED IN ADULT LIVER, SIGNAL = 1.1; EST_HUMAN HIT: AA574332.1, EVALUE 4.40e+00; SWISSPROT HIT: P45442, EVALUE 1.00e+00
PTALKLPISGQEMSDKIPSGINLRASSAPFLSFQRMTCSPISISIPALPVTLRNTYFSVEAKDPSLIQARIFRSKVFVFNET

SEQ ID NO: 36651 - protein, 84 aa, Homo sapiens
  MAP TO AL109614.15; EXPRESSED IN LUNG, SIGNAL = 1.4; EXPRESSED IN HELA, SIGNAL = 1.6; EXPRESSED IN PLACENTA, SIGNAL = 1.5; EXPRESSED IN HEART, SIGNAL = 1.5; EXPRESSED IN FETAL LIVER, SIGNAL = 1.6; EXPRESSED IN BT474, SIGNAL = 1.4; EXPRESSED IN BONE MARROW, SIGNAL = 1.3; EXPRESSED IN BRAIN, SIGNAL = 1.2; EXPRESSED IN HBL100, SIGNAL = 1.5; EXPRESSED IN ADULT LIVER, SIGNAL = 1.4; EST_HUMAN HIT: AW502355.1, EVALUE 2.80e-01; SWISSPROT HIT: P48745, EVALUE 6.50e+00
QPMGDPVHLLETPSSLASQSTFSCSPGTPLRTFISLLGTFSCSPRTPLWAFINILSGLVFLHPVPMSGEVQDSAPGLFSLAFPQ

SEQ ID NO: 36652 - protein, 113 aa, Homo sapiens
  MAP TO AC009802.8; EXPRESSED IN BONE MARROW, SIGNAL = 2.4; EXPRESSED IN HELA, SIGNAL =   3; EXPRESSED IN FETAL LIVER, SIGNAL =   3; EXPRESSED IN LUNG, SIGNAL =   3; EXPRESSED IN BRAIN, SIGNAL = 2.6; EXPRESSED IN PLACENTA, SIGNAL = 2.4; EXPRESSED IN HEART, SIGNAL = 2.1; EXPRESSED IN HBL100, SIGNAL = 2.8; EXPRESSED IN BT474, SIGNAL = 2.2; EXPRESSED IN ADULT LIVER, SIGNAL = 2.4; EST_HUMAN HIT: BF698656.1, EVALUE 1.00e-01; SWISSPROT HIT: P25794, EVALUE 9.80e-01
RGYYSLCEGHPEVFFNGMGLVTVYQTCQICRSPSSTQLRTNDPPRNRKASVNNTLAHSKGALRGPLAPPRHPVAWLASVLRYPQTLADEPPAPLLCPEGLLGFLFFQKGIVLN

SEQ ID NO: 36653 - protein, 69 aa, Homo sapiens
  MAP TO AL121959.4; EXPRESSED IN BT474, SIGNAL = 1.1; EXPRESSED IN LUNG, SIGNAL = 1.1; EXPRESSED IN BRAIN, SIGNAL = 0.98; EXPRESSED IN HELA, SIGNAL = 1.1; EXPRESSED IN PLACENTA, SIGNAL =   2; EXPRESSED IN HBL100, SIGNAL =   1; EXPRESSED IN HEART, SIGNAL = 1.1; EST_HUMAN HIT: BE064410.1, EVALUE 9.00e-27; SWISSPROT HIT: P19654, EVALUE 2.90e+00
CFRMMGYMVRPVNSVSMSPLSHFFIHKVSASVRGNAVWNTKTVEKAFRESVDGSLGRSIACRIGRPIST

SEQ ID NO: 36654 - protein, 109 aa, Homo sapiens
  MAP TO AL049553.15; EXPRESSED IN PLACENTA, SIGNAL = 4.2; EXPRESSED IN HEART, SIGNAL = 3.7; EXPRESSED IN ADULT LIVER, SIGNAL =   4; EXPRESSED IN BT474, SIGNAL = 4.2; EXPRESSED IN LUNG, SIGNAL = 4.6; EXPRESSED IN BRAIN, SIGNAL = 3.5; EXPRESSED IN HELA, SIGNAL = 4.1; EXPRESSED IN HBL100, SIGNAL = 4.1; EXPRESSED IN FETAL LIVER, SIGNAL = 3.9; EXPRESSED IN BONE MARROW, SIGNAL = 5.1; EST_HUMAN HIT: AI924653.1, EVALUE 3.00e-58; SWISSPROT HIT: Q62718, EVALUE 2.00e-04
MKNATFQITPDVIKESENIQLGQDLKLSCHVDAVPQEKVTYQWFKNGKPARMSKRLLVTRNDPELPAVTSSLELIDLHFSDYGTYLCMASFPGAPVPDLSVEVNISSET

SEQ ID NO: 36655 - protein, 23 aa, Homo sapiens
  MAP TO AL049553.15; EXPRESSED IN PLACENTA, SIGNAL = 4.2; EXPRESSED IN HEART, SIGNAL = 3.7; EXPRESSED IN ADULT LIVER, SIGNAL =   4; EXPRESSED IN BT474, SIGNAL = 4.2; EXPRESSED IN LUNG, SIGNAL = 4.6; EXPRESSED IN BRAIN, SIGNAL = 3.5; EXPRESSED IN HELA, SIGNAL = 4.1; EXPRESSED IN HBL100, SIGNAL = 4.1; EXPRESSED IN FETAL LIVER, SIGNAL = 3.9; EXPRESSED IN BONE MARROW, SIGNAL = 5.1
PTPTTLPSPSTHSHEERYIPDHS

SEQ ID NO: 36656 - protein, 30 aa, Homo sapiens
  MAP TO AC010808.2; EXPRESSED IN PLACENTA, SIGNAL = 4.4; EXPRESSED IN HEART, SIGNAL = 2.5; EXPRESSED IN FETAL LIVER, SIGNAL = 3.8; EXPRESSED IN ADULT LIVER, SIGNAL = 1.4; EXPRESSED IN HELA, SIGNAL = 2.9; EXPRESSED IN HBL100, SIGNAL = 3.7; EXPRESSED IN BT474, SIGNAL = 3.3; EXPRESSED IN BRAIN, SIGNAL = 2.2; EXPRESSED IN LUNG, SIGNAL = 4.4; EXPRESSED IN BONE MARROW, SIGNAL = 3.3
ENGKINGRGVSTSGGDELDDVYCHKIGTGR

SEQ ID NO: 36657 - protein, 71 aa, Homo sapiens
  MAP TO AL109659.18; EXPRESSED IN HELA, SIGNAL =   5; EXPRESSED IN PLACENTA, SIGNAL = 5.3; EXPRESSED IN BT474, SIGNAL =   4; EXPRESSED IN BONE MARROW, SIGNAL = 3.9; EXPRESSED IN BRAIN, SIGNAL = 3.6; EXPRESSED IN HBL100, SIGNAL =   5; EXPRESSED IN HEART, SIGNAL = 3.8; EXPRESSED IN ADULT LIVER, SIGNAL = 5.7; EXPRESSED IN FETAL LIVER, SIGNAL = 6.7; EXPRESSED IN LUNG, SIGNAL = 4.4; EST_HUMAN HIT: AV726999.1, EVALUE 4.00e-15; SWISSPROT HIT: Q16653, EVALUE 4.00e-16
RPVYLYKDGKDLYGETISKYVERTELLKEAIGEGKVTLRILNVSADDDGQYHCFFKDRNVYEESITEVKVT

SEQ ID NO: 36658 - protein, 36 aa, Homo sapiens
  MAP TO AC009972.3; EXPRESSED IN BONE MARROW, SIGNAL = 3.7; EXPRESSED IN BRAIN, SIGNAL = 3.1; EXPRESSED IN HEART, SIGNAL = 2.8; EXPRESSED IN FETAL LIVER, SIGNAL =   3; EXPRESSED IN ADULT LIVER, SIGNAL = 3.4; EXPRESSED IN PLACENTA, SIGNAL = 2.8; EXPRESSED IN HELA, SIGNAL = 3.1; EXPRESSED IN HBL100, SIGNAL = 2.8; EXPRESSED IN BT474, SIGNAL = 2.5; EXPRESSED IN LUNG, SIGNAL = 3.4
AGQRERKTPNPFRQTSGNGGSKKGGSREVGTRGDGA

SEQ ID NO: 36659 - protein, 31 aa, Homo sapiens
  MAP TO AC009972.3; EXPRESSED IN BONE MARROW, SIGNAL = 3.7; EXPRESSED IN BRAIN, SIGNAL = 3.1; EXPRESSED IN HEART, SIGNAL = 2.8; EXPRESSED IN FETAL LIVER, SIGNAL =   3; EXPRESSED IN ADULT LIVER, SIGNAL = 3.4; EXPRESSED IN PLACENTA, SIGNAL = 2.8; EXPRESSED IN HELA, SIGNAL = 3.1; EXPRESSED IN HBL100, SIGNAL = 2.8; EXPRESSED IN BT474, SIGNAL = 2.5; EXPRESSED IN LUNG, SIGNAL = 3.4
CRTERTEDTQSISTDKWEWRQQKGWLKGSGH

SEQ ID NO: 36660 - protein, 211 aa, Homo sapiens
  MAP TO AC005828.1; EXPRESSED IN FETAL LIVER, SIGNAL = 2.1; EXPRESSED IN BONE MARROW, SIGNAL = 1.7; EXPRESSED IN LUNG, SIGNAL = 3.7; EXPRESSED IN BRAIN, SIGNAL = 2.5; EXPRESSED IN PLACENTA, SIGNAL = 1.9; EXPRESSED IN HELA, SIGNAL = 2.6; EXPRESSED IN HEART, SIGNAL = 2.7; EXPRESSED IN HBL100, SIGNAL = 1.6; EXPRESSED IN BT474, SIGNAL = 2.5; EXPRESSED IN ADULT LIVER, SIGNAL = 1.4; SWISSPROT HIT: P16356, EVALUE 1.00e-05; EST_HUMAN HIT: AA169742.1, EVALUE 4.00e-06
QFAAALEDLNEAIKLCPNNREIQRLLLRVEEECRQMQQPQQPPPPPQPQQQLPEEAEPEPQHEDIYSVQDIFEEEYLEQDVENVSIGLQTEARPSQGLPVIQSPPSSPPHRDSAYISSSPLGSHQVFDFRSSSSVGSPTRQTYQSTSPALSPTHQNSHYRPSPPHTSPAHQGGSYRFSPPPVGGQGKEYPSPPPSPLRRGPQYRASPPAES

SEQ ID NO: 36661 - protein, 68 aa, Homo sapiens
  MAP TO AC010812.2; EXPRESSED IN LUNG, SIGNAL =  13; EXPRESSED IN ADULT LIVER, SIGNAL =  12; EXPRESSED IN BONE MARROW, SIGNAL =  12; EXPRESSED IN BRAIN, SIGNAL = 9.6; EXPRESSED IN HELA, SIGNAL =  10; EXPRESSED IN PLACENTA, SIGNAL =  11; EXPRESSED IN HBL100, SIGNAL =  10; EXPRESSED IN HEART, SIGNAL = 9.5; EXPRESSED IN BT474, SIGNAL = 8.5; EXPRESSED IN FETAL LIVER, SIGNAL =  11; EST_HUMAN HIT: BE152015.1, EVALUE 6.20e+00; SWISSPROT HIT: O08775, EVALUE 1.10e+00
VGGNNPDEEKNSTANSGVSSTDILSFGYQGSLLSHTQDQDRNTEELDMAGVQSLVPRLRHQLSFLPLK

SEQ ID NO: 36662 - protein, 162 aa, Homo sapiens
  MAP TO AL109752.7; EXPRESSED IN ADULT LIVER, SIGNAL =   4; EXPRESSED IN HELA, SIGNAL = 4.1; EXPRESSED IN HEART, SIGNAL = 3.8; EXPRESSED IN FETAL LIVER, SIGNAL = 4.6; EXPRESSED IN BT474, SIGNAL = 3.3; EXPRESSED IN BRAIN, SIGNAL =   3; EXPRESSED IN LUNG, SIGNAL = 5.1; EXPRESSED IN BONE MARROW, SIGNAL = 3.4; EXPRESSED IN PLACENTA, SIGNAL = 4.3; EXPRESSED IN HBL100, SIGNAL = 4.9; EST_HUMAN HIT: BF685404.1, EVALUE 1.00e-42; SWISSPROT HIT: Q60698, EVALUE 1.00e-04
MAVSASPVISATSSGAGVPGGLFRAEPLYSTPREPPRLTPNMINSFVVNNHSNSAGGGGRGNTNTNECRMVDMHGMKVASFLMDGQELICLPQVFDLFLKHLVGGLHTVYTKLKRLDISPVVCTVEQVRILRGLGAIQPGVNRCKLITRKDFETLFTDCTNA

SEQ ID NO: 36663 - protein, 39 aa, Homo sapiens
  MAP TO AL109752.7; EXPRESSED IN ADULT LIVER, SIGNAL =   4; EXPRESSED IN HELA, SIGNAL = 4.1; EXPRESSED IN HEART, SIGNAL = 3.8; EXPRESSED IN FETAL LIVER, SIGNAL = 4.6; EXPRESSED IN BT474, SIGNAL = 3.3; EXPRESSED IN BRAIN, SIGNAL =   3; EXPRESSED IN LUNG, SIGNAL = 5.1; EXPRESSED IN BONE MARROW, SIGNAL = 3.4; EXPRESSED IN PLACENTA, SIGNAL = 4.3; EXPRESSED IN HBL100, SIGNAL = 4.9
GCLRISSDLCNFQRRRRPGGLIPGRTPVLDSQRAPSSYS

SEQ ID NO: 36664 - protein, 56 aa, Homo sapiens
  MAP TO AC009974.3; EXPRESSED IN LUNG, SIGNAL =   4; EXPRESSED IN BRAIN, SIGNAL = 3.4; EXPRESSED IN HELA, SIGNAL = 3.2; EXPRESSED IN HEART, SIGNAL =   3; EXPRESSED IN BT474, SIGNAL =   3; EXPRESSED IN ADULT LIVER, SIGNAL = 3.5; EXPRESSED IN FETAL LIVER, SIGNAL = 3.2; EXPRESSED IN BONE MARROW, SIGNAL = 3.8; EXPRESSED IN PLACENTA, SIGNAL = 4.8; EXPRESSED IN HBL100, SIGNAL = 3.6; EST_HUMAN HIT: AA128880.1, EVALUE 2.40e+00; SWISSPROT HIT: O88942, EVALUE 3.40e+00
ITEPAGPDLGTPFTSRLPPELQVLKDEQAHRLAPKGNQSRILTQAYKRMAEEAMQK

SEQ ID NO: 36665 - protein, 23 aa, Homo sapiens
  MAP TO AC009974.3; EXPRESSED IN LUNG, SIGNAL =   4; EXPRESSED IN BRAIN, SIGNAL = 3.4; EXPRESSED IN HELA, SIGNAL = 3.2; EXPRESSED IN HEART, SIGNAL =   3; EXPRESSED IN BT474, SIGNAL =   3; EXPRESSED IN ADULT LIVER, SIGNAL = 3.5; EXPRESSED IN FETAL LIVER, SIGNAL = 3.2; EXPRESSED IN BONE MARROW, SIGNAL = 3.8; EXPRESSED IN PLACENTA, SIGNAL = 4.8; EXPRESSED IN HBL100, SIGNAL = 3.6; SWISSPROT HIT: gi8039778, EVALUE 9.80e-01
HQPPTPRTSGPKGRTGPSVGPQG

SEQ ID NO: 36666 - protein, 30 aa, Homo sapiens
  MAP TO AL121748.2; EXPRESSED IN HBL100, SIGNAL = 0.91; EXPRESSED IN HEART, SIGNAL = 0.98; EXPRESSED IN ADULT LIVER, SIGNAL = 1.6; SWISSPROT HIT: P06861, EVALUE 3.80e+00; EST_HUMAN HIT: AA584727.1, EVALUE 2.70e-01
VGWGAAHFAQQSLNPLWEEEHAGERVKEPG

SEQ ID NO: 36667 - protein, 38 aa, Homo sapiens
  MAP TO AL035070.3; EXPRESSED IN BT474, SIGNAL =   9; EXPRESSED IN FETAL LIVER, SIGNAL = 9.7; EXPRESSED IN BONE MARROW, SIGNAL =  11; EXPRESSED IN LUNG, SIGNAL =  11; EXPRESSED IN BRAIN, SIGNAL =  11; EXPRESSED IN HBL100, SIGNAL = 9.7; EXPRESSED IN HELA, SIGNAL =  10; EXPRESSED IN PLACENTA, SIGNAL =  12; EXPRESSED IN ADULT LIVER, SIGNAL =  11; EXPRESSED IN HEART, SIGNAL = 8.6
EEKESKMSQAETFLKQESMYKGPVVDREGNHSLLRGRM

SEQ ID NO: 36668 - protein, 53 aa, Homo sapiens
  MAP TO AL049698.3; EXPRESSED IN BONE MARROW, SIGNAL = 1.6; EXPRESSED IN HELA, SIGNAL = 1.4; EXPRESSED IN HEART, SIGNAL = 2.2; EXPRESSED IN ADULT LIVER, SIGNAL = 1.6; EXPRESSED IN LUNG, SIGNAL = 2.3; EXPRESSED IN BRAIN, SIGNAL = 1.8; EXPRESSED IN PLACENTA, SIGNAL = 3.6; EXPRESSED IN HBL100, SIGNAL = 1.9; EXPRESSED IN BT474, SIGNAL = 1.8; EXPRESSED IN FETAL LIVER, SIGNAL = 1.8; SWISSPROT HIT: P55196, EVALUE 1.00e-24; EST_HUMAN HIT: BE710291.1, EVALUE 1.00e-23
KEELSSGDSLSPDPWKRDAKEKLEKQQQMHIVDMLSKEIQELQSKPDRSAEES

SEQ ID NO: 36669 - protein, 213 aa, Homo sapiens
  MAP TO AF111167.2; EXPRESSED IN BONE MARROW, SIGNAL = 6.2; EXPRESSED IN PLACENTA, SIGNAL = 5.4; EXPRESSED IN HEART, SIGNAL = 2.9; EXPRESSED IN HBL100, SIGNAL = 5.2; EXPRESSED IN HELA, SIGNAL = 2.8; EXPRESSED IN BT474, SIGNAL = 4.5; EXPRESSED IN FETAL LIVER, SIGNAL = 2.1; EXPRESSED IN LUNG, SIGNAL =  36; EXPRESSED IN BRAIN, SIGNAL = 1.8; EST_HUMAN HIT: BE220350.1, EVALUE 2.00e-87; SWISSPROT HIT: P01100, EVALUE 6.00e-98
ETDQLEDEKSALQTEIANLLKEKEKLEFILAAHRPACKIPDDLGFPEEMSVASLDLTGGLPEVATPESEEAFTLPLLNDPEPKPSVEPVKSISSMELKTEPFDDFLFPASSRPSGSETARSVPDMDLSGSFYAADWEPLHSGSLGMGPMATELEPLCTPVVTCTPSCTAYTSSFVFTYPEADSFPSCAAAHRKGSSSNEPSSDSLSSPTLLAL

SEQ ID NO: 36670 - protein, 24 aa, Homo sapiens
  MAP TO AF111167.2; EXPRESSED IN BONE MARROW, SIGNAL = 6.2; EXPRESSED IN PLACENTA, SIGNAL = 5.4; EXPRESSED IN HEART, SIGNAL = 2.9; EXPRESSED IN HBL100, SIGNAL = 5.2; EXPRESSED IN HELA, SIGNAL = 2.8; EXPRESSED IN BT474, SIGNAL = 4.5; EXPRESSED IN FETAL LIVER, SIGNAL = 2.1; EXPRESSED IN LUNG, SIGNAL =  36; EXPRESSED IN BRAIN, SIGNAL = 1.8; EST_HUMAN HIT: F07701.1, EVALUE 3.00e-08
CQPAEGEGKTRVHPGSSPTCLQDP

SEQ ID NO: 36671 - protein, 36 aa, Homo sapiens
  MAP TO AP000126.1; EXPRESSED IN PLACENTA, SIGNAL = 0.93; EXPRESSED IN HBL100, SIGNAL = 0.75; EXPRESSED IN BONE MARROW, SIGNAL = 0.85; EXPRESSED IN FETAL LIVER, SIGNAL = 0.67; EXPRESSED IN LUNG, SIGNAL = 1.1; EXPRESSED IN HELA, SIGNAL = 0.75; EXPRESSED IN ADULT LIVER, SIGNAL = 0.93; EXPRESSED IN HEART, SIGNAL =   1; EXPRESSED IN BT474, SIGNAL = 0.87
VLQLLQKLLWGLWIWLWLEFRLWIWLWLWLWIRLWL

SEQ ID NO: 36672 - protein, 58 aa, Homo sapiens
  MAP TO AC010896.2; EXPRESSED IN HBL100, SIGNAL = 3.7; EXPRESSED IN PLACENTA, SIGNAL = 3.8; EXPRESSED IN HELA, SIGNAL = 4.8; EXPRESSED IN HEART, SIGNAL = 3.9; EXPRESSED IN BT474, SIGNAL = 3.9; EXPRESSED IN FETAL LIVER, SIGNAL = 4.5; EXPRESSED IN ADULT LIVER, SIGNAL = 4.5; EXPRESSED IN BRAIN, SIGNAL = 3.8; EXPRESSED IN BONE MARROW, SIGNAL = 3.8; EXPRESSED IN LUNG, SIGNAL = 4.8; SWISSPROT HIT: P01133, EVALUE 8.90e-02; EST_HUMAN HIT: AA625755.1, EVALUE 1.00e-21
QTACPPPLLFSLSECNVNHKGNFYCACLSGYQWNTSICLHYPPCQSLHNHQPCGCLVF

SEQ ID NO: 36673 - protein, 61 aa, Homo sapiens
  MAP TO AC010361.2; EXPRESSED IN BONE MARROW, SIGNAL =   2; EXPRESSED IN LUNG, SIGNAL = 2.1; EXPRESSED IN HBL100, SIGNAL = 1.8; EXPRESSED IN HEART, SIGNAL = 1.9; EXPRESSED IN PLACENTA, SIGNAL =   2; EXPRESSED IN HELA, SIGNAL = 2.9; EXPRESSED IN FETAL LIVER, SIGNAL = 2.2; EXPRESSED IN BT474, SIGNAL = 2.1; EXPRESSED IN ADULT LIVER, SIGNAL = 1.9; EXPRESSED IN BRAIN, SIGNAL = 2.2; SWISSPROT HIT: P42282, EVALUE 7.60e+00
STHYPHALSFQKLSGKNAPFFSFTNAFALPEVSVFHISNDDTKELYLLAKVRLDIEVQNNM

SEQ ID NO: 36674 - protein, 26 aa, Homo sapiens
  MAP TO AC010361.2; EXPRESSED IN BONE MARROW, SIGNAL =   2; EXPRESSED IN LUNG, SIGNAL = 2.1; EXPRESSED IN HBL100, SIGNAL = 1.8; EXPRESSED IN HEART, SIGNAL = 1.9; EXPRESSED IN PLACENTA, SIGNAL =   2; EXPRESSED IN HELA, SIGNAL = 2.9; EXPRESSED IN FETAL LIVER, SIGNAL = 2.2; EXPRESSED IN BT474, SIGNAL = 2.1; EXPRESSED IN ADULT LIVER, SIGNAL = 1.9; EXPRESSED IN BRAIN, SIGNAL = 2.2
SISLMMILKSCTFWQRFVLILKCKTI

SEQ ID NO: 36675 - protein, 30 aa, Homo sapiens
  MAP TO D87675.1; EXPRESSED IN BT474, SIGNAL = 1.6; EXPRESSED IN BRAIN, SIGNAL = 1.1; EXPRESSED IN BONE MARROW, SIGNAL = 1.2; EXPRESSED IN LUNG, SIGNAL = 1.3; EXPRESSED IN HELA, SIGNAL = 1.1; EXPRESSED IN PLACENTA, SIGNAL = 1.3; EXPRESSED IN HBL100, SIGNAL =   2; EXPRESSED IN HEART, SIGNAL = 1.4; EXPRESSED IN FETAL LIVER, SIGNAL = 1.3; EST_HUMAN HIT: AW779741.1, EVALUE 8.00e-03; SWISSPROT HIT: P52712, EVALUE 6.30e+00
NDNGALAIGGNMVIIWVDDFGWYVDRGVSL

SEQ ID NO: 36676 - protein, 603 aa, Homo sapiens
  MAP TO AC006078.1; EXPRESSED IN PLACENTA, SIGNAL = 1.4; EXPRESSED IN HBL100, SIGNAL = 1.1; EXPRESSED IN HELA, SIGNAL = 1.9; EXPRESSED IN HEART, SIGNAL = 1.1; EXPRESSED IN BT474, SIGNAL = 1.7; EXPRESSED IN ADULT LIVER, SIGNAL = 1.6; EXPRESSED IN FETAL LIVER, SIGNAL = 1.4; EXPRESSED IN BRAIN, SIGNAL = 1.3; EXPRESSED IN BONE MARROW, SIGNAL = 1.1; EXPRESSED IN LUNG, SIGNAL = 2.7; EST_HUMAN HIT: AW003247.1, EVALUE 1.00e-115; SWISSPROT HIT: P10266, EVALUE 0.00e+00
YRKIKLQKIEIRKDTLKTLNDFQKLLGDINWIRPTLGIPTYVTSNLFSILRGDPDLNSKRIFTPEATKKIKLVEEKIQPAQINRIDPLAPLQLLIFATAHSPAGINVQNTDLVEWSFLPHSTIKTFTLYLDQIVTLIGQAKLRIIKLCGNDPDKIVVPLNKERVRQAFINSGAWQIGLTDFVGITDNHYPKTKIVQFLKLTTWILPKITRHEPLENALTVFTDGSSNGKAAYIGPKEQVIKTHYQSAQRAELVAVFTVLQDFNQPINIVSDSAYVVQATRDVETALIKYSMDDQLNQLFNLLQQTVRNRNFPFYITHIRAHTNLPGPLTKANEQADLLVPSAFIKAQELHALTHINAAGLKNKFDVTWKQAKNIVQHCTQCQVLHLPTQEAGVNPRGLCPNVLWQMDVTHVPSFGRLSYVHVTVDTYSHFIWAACQTGESTSHVKKHLLSCFAVMGVPEKIKTDNGPGYCSKAFQKFLNQWKITHTTGIPYNSQGQAIVERTNRTLKTQLVKQNEGGDSKECTTPQMQLNLALYTLNFLNIYRNQTTTSAEHLTGKKNSPHEGKLIWWKDNKNKTWEIGKVVTWGKGFACFTRRKSASCLDTH

SEQ ID NO: 36677 - protein, 68 aa, Homo sapiens; identical to SEQ ID NO: 35089
  MAP TO AC010680.3; EXPRESSED IN ADULT LIVER, SIGNAL =   2; EXPRESSED IN BONE MARROW, SIGNAL = 2.1; EXPRESSED IN BT474, SIGNAL =   2; EXPRESSED IN FETAL LIVER, SIGNAL = 2.1; EXPRESSED IN BRAIN, SIGNAL = 1.6; EXPRESSED IN LUNG, SIGNAL = 2.2; EXPRESSED IN PLACENTA, SIGNAL = 1.8; EXPRESSED IN HEART, SIGNAL =   4; EXPRESSED IN HELA, SIGNAL = 2.1; EXPRESSED IN HBL100, SIGNAL = 2.1

SEQ ID NO: 36678 - protein, 38 aa, Homo sapiens; identical to SEQ ID NO: 35242
  MAP TO AL035414.23; EXPRESSED IN HEART, SIGNAL =  13; EXPRESSED IN FETAL LIVER, SIGNAL =  17; EXPRESSED IN ADULT LIVER, SIGNAL =  16; EXPRESSED IN LUNG, SIGNAL =  17; EXPRESSED IN BONE MARROW, SIGNAL =  17; EXPRESSED IN HELA, SIGNAL =  15; EXPRESSED IN BRAIN, SIGNAL =  15; EXPRESSED IN PLACENTA, SIGNAL =  15; EXPRESSED IN HBL100, SIGNAL =  16; EXPRESSED IN BT474, SIGNAL =  13; SWISSPROT HIT: P21522, EVALUE 9.00e-03; EST_HUMAN HIT: H54707.1, EVALUE 2.20e-01

SEQ ID NO: 36679 - protein, 21 aa, Homo sapiens
  MAP TO AC011493.2; EXPRESSED IN BT474, SIGNAL = 2.1; EXPRESSED IN HEART, SIGNAL = 1.5; EXPRESSED IN PLACENTA, SIGNAL = 1.8; EXPRESSED IN FETAL LIVER, SIGNAL = 1.5; EXPRESSED IN ADULT LIVER, SIGNAL = 1.6; EXPRESSED IN BRAIN, SIGNAL = 1.9; EXPRESSED IN LUNG, SIGNAL = 1.3; EXPRESSED IN BONE MARROW, SIGNAL = 1.7; EXPRESSED IN HELA, SIGNAL = 1.9; EXPRESSED IN HBL100, SIGNAL = 2.3; EST_HUMAN HIT: AA601493.1, EVALUE 2.00e-05
WFVPPWNFFTLMMRRKESITN

SEQ ID NO: 36680 - protein, 61 aa, Homo sapiens
  MAP TO AL132661.2; EXPRESSED IN LUNG, SIGNAL = 0.96; EXPRESSED IN PLACENTA, SIGNAL = 1.1; EXPRESSED IN BT474, SIGNAL = 1.2; EXPRESSED IN BONE MARROW, SIGNAL = 1.5; EXPRESSED IN HBL100, SIGNAL = 1.2; EXPRESSED IN HEART, SIGNAL = 1.5; EXPRESSED IN FETAL LIVER, SIGNAL = 0.96; EXPRESSED IN BRAIN, SIGNAL = 2.5; EST_HUMAN HIT: BF591771.1, EVALUE 6.10e-02; SWISSPROT HIT: Q01033, EVALUE 5.00e-10
HQGADKGADEGSQCDEGADEGSQCDEGADEGSQWDEGAGEGSQHDKGTGEGSQRARALVKA

SEQ ID NO: 36681 - protein, 119 aa, Homo sapiens
  MAP TO AC010940.2; EXPRESSED IN BRAIN, SIGNAL = 5.4; EXPRESSED IN BONE MARROW, SIGNAL = 6.8; EXPRESSED IN LUNG, SIGNAL = 6.6; EXPRESSED IN HBL100, SIGNAL = 6.6; EXPRESSED IN HEART, SIGNAL = 6.2; EXPRESSED IN PLACENTA, SIGNAL = 5.8; EXPRESSED IN HELA, SIGNAL = 7.1; EXPRESSED IN FETAL LIVER, SIGNAL = 6.5; EXPRESSED IN BT474, SIGNAL = 5.7; EXPRESSED IN ADULT LIVER, SIGNAL =   7; EST_HUMAN HIT: AI090238.1, EVALUE 1.20e-02; SWISSPROT HIT: P54842, EVALUE 5.00e+00
NECVYGNYPEIPLEEMPDADGVASTPSLNIQEPCSPATSSEAFTPKEGSPYKAPIYIPDDIPIPAEFELRESNMPGAGLGIWTKRKIEVGEKFGPYVGEQRSNLKDPSYGWEVRMYFEL

SEQ ID NO: 36682 - protein, 44 aa, Homo sapiens
  MAP TO AC011561.2; EXPRESSED IN HEART, SIGNAL = 2.2; EXPRESSED IN PLACENTA, SIGNAL = 3.1; EXPRESSED IN HBL100, SIGNAL = 2.6; EXPRESSED IN BT474, SIGNAL = 2.5; EXPRESSED IN FETAL LIVER, SIGNAL = 3.2; EXPRESSED IN ADULT LIVER, SIGNAL = 3.6; EXPRESSED IN LUNG, SIGNAL = 2.8; EXPRESSED IN BONE MARROW, SIGNAL = 2.1; EXPRESSED IN BRAIN, SIGNAL = 2.6; EXPRESSED IN HELA, SIGNAL = 2.8; EST_HUMAN HIT: BF244984.1, EVALUE 3.60e-01; SWISSPROT HIT: P18480, EVALUE 2.10e+00
LDAHVSCPQRPRPAEPPCSWIFTSRVGHYTPTNVLLPPLTSTLC

SEQ ID NO: 36683 - protein, 45 aa, Homo sapiens
  MAP TO AC011561.2; EXPRESSED IN HEART, SIGNAL = 2.2; EXPRESSED IN PLACENTA, SIGNAL = 3.1; EXPRESSED IN HBL100, SIGNAL = 2.6; EXPRESSED IN BT474, SIGNAL = 2.5; EXPRESSED IN FETAL LIVER, SIGNAL = 3.2; EXPRESSED IN ADULT LIVER, SIGNAL = 3.6; EXPRESSED IN LUNG, SIGNAL = 2.8; EXPRESSED IN BONE MARROW, SIGNAL = 2.1; EXPRESSED IN BRAIN, SIGNAL = 2.6; EXPRESSED IN HELA, SIGNAL = 2.8; EST_HUMAN HIT: AI828143.1, EVALUE 2.70e+00
PRRPRVLPSEATPCRAALLLDLHLQSGTLHTNQRPLATTDIYPVL

SEQ ID NO: 36684 - protein, 29 aa, Homo sapiens
  MAP TO AC011032.2; EXPRESSED IN LUNG, SIGNAL = 5.9; EXPRESSED IN BONE MARROW, SIGNAL = 5.4; EXPRESSED IN BRAIN, SIGNAL = 4.4; EXPRESSED IN PLACENTA, SIGNAL = 4.9; EXPRESSED IN HBL100, SIGNAL = 4.9; EXPRESSED IN HELA, SIGNAL = 5.6; EXPRESSED IN HEART, SIGNAL = 4.6; EXPRESSED IN FETAL LIVER, SIGNAL = 5.2; EXPRESSED IN BT474, SIGNAL = 4.3; EXPRESSED IN ADULT LIVER, SIGNAL =   7; EST_HUMAN HIT: AL118641.1, EVALUE 1.40e+00; SWISSPROT HIT: Q03172, EVALUE 3.70e+00
FRGEKSKINQPEDMSSAKGPLPHRQPSLH

SEQ ID NO: 36685 - protein, 173 aa, Homo sapiens
  MAP TO AC012122.1; EXPRESSED IN BRAIN, SIGNAL = 1.2; EXPRESSED IN HEART, SIGNAL =   1; EXPRESSED IN HBL100, SIGNAL = 0.99; EXPRESSED IN BT474, SIGNAL = 0.96; EXPRESSED IN FETAL LIVER, SIGNAL = 0.94; EXPRESSED IN LUNG, SIGNAL = 1.2; EST_HUMAN HIT: AW610485.1, EVALUE 7.00e-42; SWISSPROT HIT: P28159, EVALUE 1.00e+00
PASGAEIQRFPVPAVEPVPAPGADSPPGTALELEEAPEPSCRCPGTAQDQPSEELPDFMAPPVEPPASALELKVWLELEVAERGGQHSSSQQLPHCSQSWAQWKLWRQRPGFAIWAPLPHWRGTSLIQQSSSPAAEGPAATAAGAVCLPAGGAGEQEKEPVSRGSSRSSCSQR

SEQ ID NO: 36686 - protein, 25 aa, Homo sapiens
  MAP TO AC012122.1; EXPRESSED IN BRAIN, SIGNAL = 1.2; EXPRESSED IN HEART, SIGNAL =   1; EXPRESSED IN HBL100, SIGNAL = 0.99; EXPRESSED IN BT474, SIGNAL = 0.96; EXPRESSED IN FETAL LIVER, SIGNAL = 0.94; EXPRESSED IN LUNG, SIGNAL = 1.2; EST_HUMAN HIT: AI826549.1, EVALUE 1.20e+00
KGLLLLLLGLFACLQEVLESKKRSL

SEQ ID NO: 36687 - protein, 17 aa, Homo sapiens
  MAP TO AC011851.2; EXPRESSED IN BT474, SIGNAL =  39; EXPRESSED IN FETAL LIVER, SIGNAL =  12; EXPRESSED IN ADULT LIVER, SIGNAL = 3.4; EXPRESSED IN LUNG, SIGNAL = 7.5; EXPRESSED IN BONE MARROW, SIGNAL =  15; EXPRESSED IN BRAIN, SIGNAL =  20; EXPRESSED IN HELA, SIGNAL =  20; EXPRESSED IN PLACENTA, SIGNAL =  10; EXPRESSED IN HBL100, SIGNAL =  37; EXPRESSED IN HEART, SIGNAL =  26; EST_HUMAN HIT: F33997.1, EVALUE 4.20e-01
NELDKVVVEGSASPSIE

SEQ ID NO: 36688 - protein, 54 aa, Homo sapiens
  MAP TO AC010958.2; EXPRESSED IN ADULT LIVER, SIGNAL =  10; EXPRESSED IN BONE MARROW, SIGNAL = 9.2; EXPRESSED IN PLACENTA, SIGNAL = 8.7; EXPRESSED IN BT474, SIGNAL = 7.8; EXPRESSED IN FETAL LIVER, SIGNAL = 9.8; EXPRESSED IN BRAIN, SIGNAL =   8; EXPRESSED IN LUNG, SIGNAL =  11; EXPRESSED IN HEART, SIGNAL = 7.8; EXPRESSED IN HELA, SIGNAL = 9.1; EXPRESSED IN HBL100, SIGNAL = 8.3
SSPSVNTNAPPLPSSSTPTSPSNPCQGTVFKSSKNWRKRNANTLRKSALRSLLC

SEQ ID NO: 36689 - protein, 46 aa, Homo sapiens
  MAP TO AC011112.2; EXPRESSED IN PLACENTA, SIGNAL = 6.9; EXPRESSED IN HBL100, SIGNAL = 6.1; EXPRESSED IN HEART, SIGNAL = 5.2; EXPRESSED IN LUNG, SIGNAL = 6.4; EXPRESSED IN BRAIN, SIGNAL = 6.3; EXPRESSED IN HELA, SIGNAL = 6.6; EXPRESSED IN BT474, SIGNAL = 5.9; EXPRESSED IN ADULT LIVER, SIGNAL =   7; EXPRESSED IN FETAL LIVER, SIGNAL = 5.7; EXPRESSED IN BONE MARROW, SIGNAL = 6.3; SWISSPROT HIT: Q58113, EVALUE 7.90e+00; EST_HUMAN HIT: BE966206.2, EVALUE 1.40e+00
FYLCGTQEQKTTKRMKSKIKQIAKEKYPKTHHRKKGKIEVSTDECF

SEQ ID NO: 36690 - protein, 17 aa, Homo sapiens
  MAP TO AC011112.2; EXPRESSED IN PLACENTA, SIGNAL = 6.9; EXPRESSED IN HBL100, SIGNAL = 6.1; EXPRESSED IN HEART, SIGNAL = 5.2; EXPRESSED IN LUNG, SIGNAL = 6.4; EXPRESSED IN BRAIN, SIGNAL = 6.3; EXPRESSED IN HELA, SIGNAL = 6.6; EXPRESSED IN BT474, SIGNAL = 5.9; EXPRESSED IN ADULT LIVER, SIGNAL =   7; EXPRESSED IN FETAL LIVER, SIGNAL = 5.7; EXPRESSED IN BONE MARROW, SIGNAL = 6.3
LLSLWNTGAENHQKNEE

SEQ ID NO: 36691 - protein, 273 aa, Homo sapiens
  MAP TO AC006460.2; EXPRESSED IN LUNG, SIGNAL = 4.5; EXPRESSED IN PLACENTA, SIGNAL = 2.6; EXPRESSED IN HEART, SIGNAL = 2.1; EXPRESSED IN HBL100, SIGNAL = 2.7; EXPRESSED IN HELA, SIGNAL =   3; EXPRESSED IN FETAL LIVER, SIGNAL = 2.5; EXPRESSED IN BT474, SIGNAL = 2.4; EXPRESSED IN ADULT LIVER, SIGNAL = 2.3; EXPRESSED IN BONE MARROW, SIGNAL = 1.8; EXPRESSED IN BRAIN, SIGNAL = 1.8; SWISSPROT HIT: Q62722, EVALUE 0.00e+00; EST_HUMAN HIT: AU131373.1, EVALUE 1.00e-114
MAAALPRTLGELQLYRILQKANLLSYFDAFIQQGGDDVQQLCEAGEEEFLEIMALVGMASKPLHVRRLQKALRDWVTNPGLFNQPLTSLPVSSIPIYKLPEGSPTWLGISCSSYERSSNAREPHLKIPKCAATTCVQSLGQGKSDVVGSLALQSVGESRLWQGHHATESEHSLSPADLGSPASPKESSEALDAAAALSVAECVERMAPTLPKSDLNEVKELLKTNKKLAKMIGHIFEMNDDDPHKEEEIRKYSAIYGRFDSKRKDGKHLTLHE

SEQ ID NO: 36692 - protein, 71 aa, Homo sapiens
  MAP TO AC006460.2; EXPRESSED IN LUNG, SIGNAL = 4.5; EXPRESSED IN PLACENTA, SIGNAL = 2.6; EXPRESSED IN HEART, SIGNAL = 2.1; EXPRESSED IN HBL100, SIGNAL = 2.7; EXPRESSED IN HELA, SIGNAL =   3; EXPRESSED IN FETAL LIVER, SIGNAL = 2.5; EXPRESSED IN BT474, SIGNAL = 2.4; EXPRESSED IN ADULT LIVER, SIGNAL = 2.3; EXPRESSED IN BONE MARROW, SIGNAL = 1.8; EXPRESSED IN BRAIN, SIGNAL = 1.8; EST_HUMAN HIT: AU131373.1, EVALUE 3.00e-31
WLRPYPGPWGSCSCIEYYKKPIYFLILMPLSNKVVMMSSNSVKQEKRSFWKSWHSWAWLASPFMLEGCRRL

SEQ ID NO: 36693 - protein, 48 aa, Homo sapiens
  MAP TO AP000095.1; EXPRESSED IN HBL100, SIGNAL = 0.72; EXPRESSED IN ADULT LIVER, SIGNAL = 0.89; EXPRESSED IN BRAIN, SIGNAL = 1.1; EXPRESSED IN PLACENTA, SIGNAL =   1; EXPRESSED IN BT474, SIGNAL = 0.7; EXPRESSED IN HEART, SIGNAL = 0.93; EXPRESSED IN FETAL LIVER, SIGNAL = 0.84; EXPRESSED IN HELA, SIGNAL = 0.85; EXPRESSED IN LUNG, SIGNAL = 0.83; EXPRESSED IN BONE MARROW, SIGNAL = 0.79; EST_HUMAN HIT: AU129570.1, EVALUE 3.90e+00; SWISSPROT HIT: P47319, EVALUE 6.00e+00
NVASFLHYTYLCSPNKPLTFRLLQNDLEVNVYVSKTLADTSNSFPTTN

SEQ ID NO: 36694 - protein, 49 aa, Homo sapiens
  MAP TO AP000055.1; EXPRESSED IN HBL100, SIGNAL = 0.68; EXPRESSED IN FETAL LIVER, SIGNAL = 0.7; EXPRESSED IN ADULT LIVER, SIGNAL = 0.86; EXPRESSED IN HEART, SIGNAL = 0.8; EXPRESSED IN PLACENTA, SIGNAL = 0.72; EXPRESSED IN BRAIN, SIGNAL = 0.8; EXPRESSED IN HELA, SIGNAL = 1.8; EXPRESSED IN LUNG, SIGNAL = 0.81; EXPRESSED IN BONE MARROW, SIGNAL = 0.74; SWISSPROT HIT: P46607, EVALUE 1.80e-01
DRCVALRTVVHPAPDSQLIGDPEETVSQLVKVTIHILIPMGIQVLGLSE

SEQ ID NO: 36695 - protein, 21 aa, Homo sapiens
  MAP TO AL035534.1; EXPRESSED IN HELA, SIGNAL = 1.1; EXPRESSED IN ADULT LIVER, SIGNAL = 0.95; EXPRESSED IN BT474, SIGNAL = 0.91; EXPRESSED IN HBL100, SIGNAL = 1.3; EXPRESSED IN HEART, SIGNAL = 1.2; EXPRESSED IN PLACENTA, SIGNAL = 0.94; EXPRESSED IN BONE MARROW, SIGNAL = 0.83; EXPRESSED IN FETAL LIVER, SIGNAL = 0.81; EXPRESSED IN LUNG, SIGNAL =   1; EXPRESSED IN BRAIN, SIGNAL = 0.96
FMLMHRQLIATTMAQLLASRQ

SEQ ID NO: 36696 - protein, 34 aa, Homo sapiens
  MAP TO AC010130.3; EXPRESSED IN BONE MARROW, SIGNAL = 1.4; EXPRESSED IN LUNG, SIGNAL = 1.2; EXPRESSED IN PLACENTA, SIGNAL = 1.2; EXPRESSED IN HBL100, SIGNAL = 0.93; EXPRESSED IN HEART, SIGNAL =   1; EXPRESSED IN FETAL LIVER, SIGNAL = 1.4; EXPRESSED IN HELA, SIGNAL = 1.2; EXPRESSED IN BT474, SIGNAL =   1; EXPRESSED IN ADULT LIVER, SIGNAL = 1.2
GSEVKHSQGDSVMAELKCEYCGTLVWDVVMKTGQ

SEQ ID NO: 36697 - protein, 48 aa, Homo sapiens
  MAP TO AP000156.1; EXPRESSED IN BT474, SIGNAL = 0.84; EXPRESSED IN HBL100, SIGNAL = 0.74; EXPRESSED IN FETAL LIVER, SIGNAL = 0.72; EXPRESSED IN LUNG, SIGNAL = 0.71; EXPRESSED IN BRAIN, SIGNAL = 1.3; EXPRESSED IN PLACENTA, SIGNAL = 1.1; EXPRESSED IN BONE MARROW, SIGNAL = 0.81; EXPRESSED IN HELA, SIGNAL = 0.73; EXPRESSED IN ADULT LIVER, SIGNAL = 1.2; EXPRESSED IN HEART, SIGNAL = 0.96; EST_HUMAN HIT: BF308036.1, EVALUE 7.80e-01
LTSWRATPWIRTSKAQWPFTSQSCLSRPGMTCQDTSAEIGPKGKSRGT

SEQ ID NO: 36698 - protein, 75 aa, Homo sapiens
  MAP TO AP000156.1; EXPRESSED IN BT474, SIGNAL = 0.84; EXPRESSED IN HBL100, SIGNAL = 0.74; EXPRESSED IN FETAL LIVER, SIGNAL = 0.72; EXPRESSED IN LUNG, SIGNAL = 0.71; EXPRESSED IN BRAIN, SIGNAL = 1.3; EXPRESSED IN PLACENTA, SIGNAL = 1.1; EXPRESSED IN BONE MARROW, SIGNAL = 0.81; EXPRESSED IN HELA, SIGNAL = 0.73; EXPRESSED IN ADULT LIVER, SIGNAL = 1.2; EXPRESSED IN HEART, SIGNAL = 0.96; EST_HUMAN HIT: AI792302.1, EVALUE 8.60e-01; SWISSPROT HIT: P48550, EVALUE 1.00e-32
FSVSFLFSKPPANVLEGDSMDQDVESPVAIHQPKLPKQARDDLPRHISRDRTKRKIQRYVRKDGKCNVHHGNVRE

SEQ ID NO: 36699 - protein, 30 aa, Homo sapiens
  MAP TO AP000045.1; EXPRESSED IN BT474, SIGNAL = 0.87; EXPRESSED IN BONE MARROW, SIGNAL = 0.84; EXPRESSED IN LUNG, SIGNAL = 1.2; EXPRESSED IN HBL100, SIGNAL = 0.79; EXPRESSED IN HELA, SIGNAL = 0.69; EXPRESSED IN ADULT LIVER, SIGNAL = 0.91; EXPRESSED IN BRAIN, SIGNAL = 1.4; EXPRESSED IN PLACENTA, SIGNAL = 0.85; EXPRESSED IN HEART, SIGNAL =   1; EXPRESSED IN FETAL LIVER, SIGNAL = 0.88; SWISSPROT HIT: P56557, EVALUE 5.00e-11; EST_HUMAN HIT: AI498344.1, EVALUE 2.00e-10
ARVWLFIGFMLMFGSLIASMWILFGAYVTQ

SEQ ID NO: 36700 - protein, 22 aa, Homo sapiens
  MAP TO AP000039.1; EXPRESSED IN HBL100, SIGNAL =   1; EXPRESSED IN FETAL LIVER, SIGNAL = 1.2; EXPRESSED IN LUNG, SIGNAL = 1.1; EXPRESSED IN BRAIN, SIGNAL = 1.1; EXPRESSED IN HEART, SIGNAL = 1.2; EXPRESSED IN PLACENTA, SIGNAL = 1.2; EXPRESSED IN BT474, SIGNAL = 0.97; EXPRESSED IN BONE MARROW, SIGNAL = 0.99; EXPRESSED IN ADULT LIVER, SIGNAL = 1.3; EXPRESSED IN HELA, SIGNAL = 1.1; EST_HUMAN HIT: H11666.1, EVALUE 2.00e-06
GKHGTTFQALSSSDQHSGCLCT

SEQ ID NO: 36701 - protein, 69 aa, Homo sapiens
  MAP TO AC011236.2; EXPRESSED IN BONE MARROW, SIGNAL = 1.3; EXPRESSED IN BRAIN, SIGNAL = 1.1; EXPRESSED IN HBL100, SIGNAL =   1; EXPRESSED IN HELA, SIGNAL = 0.97; EXPRESSED IN PLACENTA, SIGNAL =   1; EXPRESSED IN HEART, SIGNAL = 1.1; EXPRESSED IN BT474, SIGNAL = 1.2; EXPRESSED IN FETAL LIVER, SIGNAL = 0.99; EXPRESSED IN ADULT LIVER, SIGNAL = 1.7; EXPRESSED IN LUNG, SIGNAL = 1.2; EST_HUMAN HIT: BE252236.1, EVALUE 6.10e+00; SWISSPROT HIT: P53695, EVALUE 6.50e-01
SPPHRAHGFSTLPGKGLDGGPVCKNSGICSTRTKTQEQMSFMEALYQEGFLRETVVQAVRKVPQTPRKA

SEQ ID NO: 36702 - protein, 47 aa, Homo sapiens
  MAP TO AL033379.2; EXPRESSED IN PLACENTA, SIGNAL = 0.95; EXPRESSED IN BT474, SIGNAL = 0.71; EXPRESSED IN HBL100, SIGNAL = 0.93; EXPRESSED IN FETAL LIVER, SIGNAL = 0.83; EXPRESSED IN LUNG, SIGNAL = 1.4; EXPRESSED IN ADULT LIVER, SIGNAL = 1.2; EXPRESSED IN BRAIN, SIGNAL = 1.2; EXPRESSED IN HEART, SIGNAL = 1.3; EXPRESSED IN BONE MARROW, SIGNAL = 0.8; EXPRESSED IN HELA, SIGNAL = 1.1; EST_HUMAN HIT: BF511301.1, EVALUE 5.00e-04
KDDVQRHREKTAIHKPRREAWTDLSLTVLGKNQSFELLDCGLLGSGS

SEQ ID NO: 36703 - protein, 58 aa, Homo sapiens
  MAP TO AC006116.1; EXPRESSED IN LUNG, SIGNAL =   1; EXPRESSED IN HEART, SIGNAL = 0.94; EXPRESSED IN FETAL LIVER, SIGNAL = 0.95; EXPRESSED IN BT474, SIGNAL = 1.1; EST_HUMAN HIT: AW450464.1, EVALUE 4.70e+00; SWISSPROT HIT: Q10411, EVALUE 5.80e+00
WEYVFKNSEFSSKQETYEESSKVVTVGARHLSYSLDYPSLREDCQSEDWYKNQLGSQE

SEQ ID NO: 36704 - protein, 180 aa, Homo sapiens
  MAP TO AC006116.1; EXPRESSED IN LUNG, SIGNAL =   1; EXPRESSED IN HEART, SIGNAL = 0.94; EXPRESSED IN FETAL LIVER, SIGNAL = 0.95; EXPRESSED IN BT474, SIGNAL = 1.1; SWISSPROT HIT: P52742, EVALUE 1.00e-77; EST_HUMAN HIT: BE396279.1, EVALUE 4.00e-84
RIHTGEKPYACVECGKTFSQSANLAQHKRIHTGEKPYECKECRKAFSQNAHLAQHQRVHTGEKPYQCKECKKAFSQIAHLTQHQRVHTGERPFECIECGKAFSNGSFLAQHQRIHTGEKPYVCNVCGKAFSHRGYLIVHQRIHTGERPYECKECRKAFSQYAHLAQHQRVHTGEKPYECK

SEQ ID NO: 36705 - protein, 17 aa, Homo sapiens
  MAP TO AC006116.1; EXPRESSED IN LUNG, SIGNAL =   1; EXPRESSED IN HEART, SIGNAL = 0.94; EXPRESSED IN FETAL LIVER, SIGNAL = 0.95; EXPRESSED IN BT474, SIGNAL = 1.1
TVNFHQSKRHMKNHPKL

SEQ ID NO: 36706 - protein, 49 aa, Homo sapiens
  MAP TO AC009238.1; EXPRESSED IN HELA, SIGNAL = 0.87; EXPRESSED IN ADULT LIVER, SIGNAL = 0.95; EXPRESSED IN BRAIN, SIGNAL = 0.89; EXPRESSED IN HEART, SIGNAL = 0.89; EXPRESSED IN PLACENTA, SIGNAL = 0.9; EXPRESSED IN HBL100, SIGNAL = 0.69; EXPRESSED IN FETAL LIVER, SIGNAL = 0.73; EXPRESSED IN LUNG, SIGNAL = 1.1; EXPRESSED IN BT474, SIGNAL =   2; EXPRESSED IN BONE MARROW, SIGNAL = 0.64; EST_HUMAN HIT: AW832912.1, EVALUE 2.60e-02; SWISSPROT HIT: P18816, EVALUE 2.00e+00
YTNKLRQELQSLKVDTQSLDLLSSAARRDLEALQSSGLQRIHYPDFLVQ

SEQ ID NO: 36707 - protein, 62 aa, Homo sapiens
  MAP TO AC011012.2; EXPRESSED IN BT474, SIGNAL =   2; EXPRESSED IN LUNG, SIGNAL = 1.8; EXPRESSED IN BRAIN, SIGNAL = 2.5; EXPRESSED IN PLACENTA, SIGNAL = 1.6; EXPRESSED IN HBL100, SIGNAL = 2.4; EXPRESSED IN HELA, SIGNAL =   2; EXPRESSED IN HEART, SIGNAL = 1.2; EXPRESSED IN FETAL LIVER, SIGNAL = 1.2; EST_HUMAN HIT: BE380046.1, EVALUE 1.00e-32; SWISSPROT HIT: Q15181, EVALUE 2.00e-33
NPIKQDVKKEKLRYVANLFPYKGYIWNYGAIPQTWKDPGHNDEHTGCCGDSDPIDVCEIGSK

SEQ ID NO: 36708 - protein, 342 aa, Homo sapiens
  MAP TO AC006213.1; EXPRESSED IN HEART, SIGNAL = 1.1; EXPRESSED IN HBL100, SIGNAL = 1.4; EXPRESSED IN BT474, SIGNAL =   1; EXPRESSED IN LUNG, SIGNAL = 1.2; EXPRESSED IN HELA, SIGNAL = 1.2; EST_HUMAN HIT: AU123664.1, EVALUE 2.00e-74; SWISSPROT HIT: Q02386, EVALUE 0.00e+00
AKNLKEMETLQEVGLRYLPHEELFCSQIWQQITRELIKYQDSVVNIQRTGCQLEKRDDLHYKDEGFSNQSSHLQVHRVHTGEKPYKGEHCVKSFSWSSHLQINQRAHAGEKPYKCEKCDNAFRRFSSLQAHQRVHSRAKSYTNDASYRSFSQRSHLPHHQRVPTGENPYKYEECGRNVGKSSHCQAPLIVHTGEKPYKCEECGVGFSQRSYLQVHLKVHTGKKPYKCEECGKSFSWRSRLQAHERIHTGEKPYKCNACGKSFSYSSHLNIHCRIHTGEKPYKCEECGKGFSVGSHLQAHQISHTGEKPYKCEECGKGFCRASNLLDHQRGHTGEKPYQCDAC

SEQ ID NO: 36709 - protein, 43 aa, Homo sapiens
  MAP TO AF002223.1; EXPRESSED IN PLACENTA, SIGNAL =   5; EXPRESSED IN HBL100, SIGNAL = 4.3; EXPRESSED IN HEART, SIGNAL = 3.9; EXPRESSED IN ADULT LIVER, SIGNAL = 5.4; EXPRESSED IN BT474, SIGNAL = 5.3; EXPRESSED IN FETAL LIVER, SIGNAL = 4.8; EXPRESSED IN BONE MARROW, SIGNAL = 4.6; EXPRESSED IN LUNG, SIGNAL = 5.5; EXPRESSED IN BRAIN, SIGNAL = 4.6; EXPRESSED IN HELA, SIGNAL = 4.3
FSKMEPHVHSPYLAVICYGPGTQQWQQEQWQQQQQQWVSVLFS

SEQ ID NO: 36710 - protein, 131 aa, Homo sapiens
  MAP TO AF030453.1; EXPRESSED IN HBL100, SIGNAL =   2; EXPRESSED IN HELA, SIGNAL =   2; EXPRESSED IN PLACENTA, SIGNAL = 3.3; EXPRESSED IN HEART, SIGNAL = 2.2; EXPRESSED IN ADULT LIVER, SIGNAL = 2.3; EXPRESSED IN BT474, SIGNAL = 2.4; EXPRESSED IN FETAL LIVER, SIGNAL = 1.5; EXPRESSED IN BRAIN, SIGNAL = 2.2; EXPRESSED IN BONE MARROW, SIGNAL = 2.3; EXPRESSED IN LUNG, SIGNAL = 3.7; EST_HUMAN HIT: BF341828.1, EVALUE 5.00e-42; SWISSPROT HIT: Q09511, EVALUE 4.00e-01
YLANDMEEDDEDSKQNIFHFLYRKNRSRIPLLRKRWFQLGHSMNPRARKNRSRIPLLRKRRFQLYRSTNPRARKNRSRIPLLCKRRFQLYRSMNSRARKNRSQIVLFQKRRFHFFCSMSCRAWVSPEELEE

SEQ ID NO: 36711 - protein, 63 aa, Homo sapiens
  MAP TO AF030453.1; EXPRESSED IN HBL100, SIGNAL =   2; EXPRESSED IN HELA, SIGNAL =   2; EXPRESSED IN PLACENTA, SIGNAL = 3.3; EXPRESSED IN HEART, SIGNAL = 2.2; EXPRESSED IN ADULT LIVER, SIGNAL = 2.3; EXPRESSED IN BT474, SIGNAL = 2.4; EXPRESSED IN FETAL LIVER, SIGNAL = 1.5; EXPRESSED IN BRAIN, SIGNAL = 2.2; EXPRESSED IN BONE MARROW, SIGNAL = 2.3; EXPRESSED IN LUNG, SIGNAL = 3.7; EST_HUMAN HIT: BF062887.1, EVALUE 2.00e-12
TDAYRARVCESGSSWPSGSWNGITGTDAYGARVCESGSSWPSGSWNGLTGTNAYGARVCESGS

SEQ ID NO: 36712 - protein, 138 aa, Homo sapiens
  MAP TO AC009237.1; EXPRESSED IN LUNG, SIGNAL = 0.72; EXPRESSED IN BT474, SIGNAL = 0.7; EXPRESSED IN HBL100, SIGNAL = 0.93; EXPRESSED IN FETAL LIVER, SIGNAL = 0.7; EXPRESSED IN BRAIN, SIGNAL = 0.74; EXPRESSED IN PLACENTA, SIGNAL = 0.84; EXPRESSED IN BONE MARROW, SIGNAL = 0.7; EXPRESSED IN HELA, SIGNAL = 0.65; EXPRESSED IN ADULT LIVER, SIGNAL =   1; EXPRESSED IN HEART, SIGNAL = 0.79; EST_HUMAN HIT: AW373933.1, EVALUE 4.00e-34; SWISSPROT HIT: P17480, EVALUE 7.00e-35
EEHPDLDQKGKKSDISKRIQTKVQKKVQKNIEEVTSLPKTDQFFKKVKFHGEPQKPPMNGYHKFHQDSWSSKELQHLSLRERMVEIGRRWQRIPQSQKDHYKSQAELLQKEYKVELDLWLKTLSPEDYAAYKESTYAK

SEQ ID NO: 36713 - protein, 103 aa, Homo sapiens
  MAP TO AP000052.1; EXPRESSED IN BONE MARROW, SIGNAL = 1.1; EXPRESSED IN HBL100, SIGNAL = 1.1; EXPRESSED IN ADULT LIVER, SIGNAL = 1.3; EXPRESSED IN BRAIN, SIGNAL = 0.92; EXPRESSED IN HEART, SIGNAL = 1.4; EXPRESSED IN PLACENTA, SIGNAL =   1; EXPRESSED IN FETAL LIVER, SIGNAL = 1.1; EXPRESSED IN HELA, SIGNAL = 1.2; EXPRESSED IN LUNG, SIGNAL = 0.94; EXPRESSED IN BT474, SIGNAL = 0.88; SWISSPROT HIT: Q9Y6J6, EVALUE 2.00e-55; EST_HUMAN HIT: AI962650.1, EVALUE 1.00e-54
FITYMDNWRQNTTAEQEALQAKVDAENFYYVILYLMVMIGMFSFIIVAILVSTVKSKRREHSNDPYHQYIVEDWQEKYKSQILNLEESKATIHENIGAAGFKM

SEQ ID NO: 36714 - protein, 67 aa, Homo sapiens; identical to SEQ ID NO: 33669
  MAP TO AP000111.1; EXPRESSED IN HBL100, SIGNAL = 0.91; EXPRESSED IN FETAL LIVER, SIGNAL = 0.73; EXPRESSED IN LUNG, SIGNAL =   1; EXPRESSED IN ADULT LIVER, SIGNAL = 1.4; EXPRESSED IN BRAIN, SIGNAL = 0.71; EXPRESSED IN BONE MARROW, SIGNAL = 3.2; EXPRESSED IN PLACENTA, SIGNAL = 0.72; EXPRESSED IN HEART, SIGNAL =   1; EXPRESSED IN HELA, SIGNAL = 0.62; EXPRESSED IN BT474, SIGNAL = 0.61; SWISSPROT HIT: P56396, EVALUE 8.60e+00; EST_HUMAN HIT: BE162737.1, EVALUE 4.00e-05

SEQ ID NO: 36715 - protein, 61 aa, Homo sapiens
  MAP TO AP000111.1; EXPRESSED IN HBL100, SIGNAL = 0.91; EXPRESSED IN FETAL LIVER, SIGNAL = 0.73; EXPRESSED IN LUNG, SIGNAL =   1; EXPRESSED IN ADULT LIVER, SIGNAL = 1.4; EXPRESSED IN BRAIN, SIGNAL = 0.71; EXPRESSED IN BONE MARROW, SIGNAL = 3.2; EXPRESSED IN PLACENTA, SIGNAL = 0.72; EXPRESSED IN HEART, SIGNAL =   1; EXPRESSED IN HELA, SIGNAL = 0.62; EXPRESSED IN BT474, SIGNAL = 0.61; EST_HUMAN HIT: BE162737.1, EVALUE 2.00e-06; SWISSPROT HIT: P44843, EVALUE 6.00e+00
LIASHWGLGFHHMHFVGDTEPAAAIHRLQRVCGFFWFSWYDPVLVLGVKFDDVGLHALLCP

SEQ ID NO: 36716 - protein, 41 aa, Homo sapiens
  MAP TO AF196779.1; EXPRESSED IN LUNG, SIGNAL =   6; EXPRESSED IN BRAIN, SIGNAL = 5.7; EXPRESSED IN HEART, SIGNAL = 5.6; EXPRESSED IN FETAL LIVER, SIGNAL = 5.9; EXPRESSED IN ADULT LIVER, SIGNAL = 6.1; EXPRESSED IN BONE MARROW, SIGNAL = 5.7; EXPRESSED IN PLACENTA, SIGNAL = 5.5; EXPRESSED IN HELA, SIGNAL = 5.9; EXPRESSED IN HBL100, SIGNAL =   5; EXPRESSED IN BT474, SIGNAL = 4.5; EST_HUMAN HIT: BF219779.1, EVALUE 7.00e-17; SWISSPROT HIT: Q92917, EVALUE 1.00e-16
SKKSLEERENAGVDPTLAIPMIQKGCTPSGEGADSEPRAET

SEQ ID NO: 36717 - protein, 40 aa, Homo sapiens
  MAP TO AC011897.2; EXPRESSED IN BT474, SIGNAL =   1; EXPRESSED IN ADULT LIVER, SIGNAL = 1.4; EXPRESSED IN BONE MARROW, SIGNAL = 1.3; EXPRESSED IN LUNG, SIGNAL = 1.1; EXPRESSED IN BRAIN, SIGNAL = 1.2; EXPRESSED IN HELA, SIGNAL = 1.1; EXPRESSED IN HBL100, SIGNAL = 0.99; EXPRESSED IN HEART, SIGNAL = 0.98; EXPRESSED IN FETAL LIVER, SIGNAL =   1
REDMVAEKSTFTQVEGVQLQYKELVVGGSPKSIHETKIQL

SEQ ID NO: 36718 - protein, 85 aa, Homo sapiens
  MAP TO AL031283.15; EXPRESSED IN BONE MARROW, SIGNAL =   1; EXPRESSED IN FETAL LIVER, SIGNAL = 1.1; EXPRESSED IN ADULT LIVER, SIGNAL = 1.1; EXPRESSED IN HBL100, SIGNAL = 1.1; EXPRESSED IN HEART, SIGNAL = 0.96; EST_HUMAN HIT: BE888078.1, EVALUE 3.00e-26; SWISSPROT HIT: P42566, EVALUE 2.00e-03
IMVEERLILQQKMVKALQDEQESQRHGFEEEIMEYKEQIKQHAQTIVSLEEKLQKVTQHHKKIEGEIATLKDNDPGKSEGRPRKS

SEQ ID NO: 36719 - protein, 86 aa, Homo sapiens
  MAP TO AL033392.5; EXPRESSED IN ADULT LIVER, SIGNAL = 0.75; EXPRESSED IN HEART, SIGNAL = 0.92; EXPRESSED IN BONE MARROW, SIGNAL = 0.88; EXPRESSED IN FETAL LIVER, SIGNAL = 0.93; EXPRESSED IN BRAIN, SIGNAL = 0.89; EXPRESSED IN PLACENTA, SIGNAL = 0.89; EXPRESSED IN BT474, SIGNAL = 0.62; EXPRESSED IN HBL100, SIGNAL = 0.83; EXPRESSED IN LUNG, SIGNAL =   1; EXPRESSED IN HELA, SIGNAL = 0.74; EST_HUMAN HIT: AI384007.1, EVALUE 4.00e-44; SWISSPROT HIT: Q02952, EVALUE 5.00e-23
LLQKNGQLSTINGVAEQDELSLQEGDLNGQKGALNGQGALNSQEEEEVIVTEGKPPLQELEGTQHLQQTLDSAENTLSYCLVVDWC

SEQ ID NO: 36720 - protein, 283 aa, Homo sapiens
  MAP TO AC006547.9; EXPRESSED IN LUNG, SIGNAL =  17; EXPRESSED IN PLACENTA, SIGNAL =  11; EXPRESSED IN HELA, SIGNAL = 8.6; EXPRESSED IN HEART, SIGNAL =   9; EXPRESSED IN HBL100, SIGNAL =  12; EXPRESSED IN BT474, SIGNAL =  11; EXPRESSED IN FETAL LIVER, SIGNAL =  10; EXPRESSED IN ADULT LIVER, SIGNAL = 8.4; EXPRESSED IN BONE MARROW, SIGNAL =  10; EXPRESSED IN BRAIN, SIGNAL =  12
DGGGGGGGSDGGGGGDGGGGSDGGGGGGSDGGGGGGSDGGGGGDGGGGSDGGGGGGGSDGGGGGSDGGGGGGGSDGGGSGSDGGGGGSDGGGGGGGGDDGGGGGGSDGGGGGGGSDGDGGSDGGGGSDGGGGGGGSDGDGGGDGDGGGGDGGSDGYGGGRSDGGGGGSGCSDGGGGGGGGSDGGGSDGDGGGGGGGSDGGGDGDGGGGGSDGDGGGGGSDRGGGGGSDGGGGSDGGGGGDGGGSHGGGGGGSDGDGGGGGGDAGGADHDGGYGHAHGDSGDDV

SEQ ID NO: 36721 - protein, 36 aa, Homo sapiens
  MAP TO AC011994.2; EXPRESSED IN HELA, SIGNAL = 2.7; EXPRESSED IN HBL100, SIGNAL = 2.9; EXPRESSED IN HEART, SIGNAL = 2.8; EXPRESSED IN FETAL LIVER, SIGNAL = 2.3; EXPRESSED IN ADULT LIVER, SIGNAL = 3.2; EXPRESSED IN LUNG, SIGNAL = 2.8; EXPRESSED IN PLACENTA, SIGNAL = 3.6; EXPRESSED IN BT474, SIGNAL = 2.8; EXPRESSED IN BRAIN, SIGNAL =   3; EXPRESSED IN BONE MARROW, SIGNAL =   3
VLFKAKSSGRAGTMICRFLLRVLQQCAGSSTKTSIQ

SEQ ID NO: 36722 - protein, 245 aa, Homo sapiens
  MAP TO AL023280.1; EXPRESSED IN BRAIN, SIGNAL = 1.1; EXPRESSED IN BONE MARROW, SIGNAL = 1.1; EXPRESSED IN LUNG, SIGNAL = 2.2; EXPRESSED IN HBL100, SIGNAL = 1.1; EXPRESSED IN HEART, SIGNAL = 0.96; EXPRESSED IN BT474, SIGNAL = 1.2; EXPRESSED IN FETAL LIVER, SIGNAL = 1.5; EXPRESSED IN ADULT LIVER, SIGNAL = 1.1; EST_HUMAN HIT: AW867015.1, EVALUE 2.00e-58; SWISSPROT HIT: P10262, EVALUE 3.00e-31
ERRRVLQAATKWLEEHAPADYQNPQEYVRTQLPGTDPQWDPNEREDMQRLNRYREALLEGLKRGAQKATNVAIQGKEESPAQFYERLCEAYCMYTPFDPNSPENQRMINMALVSQSAEDIRRKLQKQAGFAGMNTSQLLEIANQVFVNRDAVSPKENRRENEHQVRRNADLLAAAITGVPPKRQGKGGPGKEIQPGCQSLQRNQCAYCKEIGHWKNKCPQLKGKQGDSEQEDPDKEEGALLNLAE

SEQ ID NO: 36723 - protein, 73 aa, Homo sapiens
  MAP TO AC008177.1; EXPRESSED IN LUNG, SIGNAL =  12; EXPRESSED IN HELA, SIGNAL = 1.1; EXPRESSED IN PLACENTA, SIGNAL = 1.1; EXPRESSED IN BT474, SIGNAL = 1.1; EXPRESSED IN BONE MARROW, SIGNAL = 1.7; EXPRESSED IN HBL100, SIGNAL =   1; EXPRESSED IN FETAL LIVER, SIGNAL = 0.9; EXPRESSED IN ADULT LIVER, SIGNAL = 0.9; EXPRESSED IN BRAIN, SIGNAL = 1.2; EXPRESSED IN HEART, SIGNAL = 1.2; SWISSPROT HIT: P55006, EVALUE 4.00e-11; EST_HUMAN HIT: AW404541.1, EVALUE 6.00e-37
LDKLKGNKSYVNMDLSPVVECMDHALTSLFPKTHYAAGKDAKIFWIPLSHMPAALQDFLLLKQKAELANPKAV

SEQ ID NO: 36724 - protein, 21 aa, Homo sapiens
  MAP TO AC011235.2; EXPRESSED IN BRAIN, SIGNAL = 1.1; EXPRESSED IN HELA, SIGNAL = 1.1; EXPRESSED IN HBL100, SIGNAL = 1.1; EXPRESSED IN HEART, SIGNAL = 1.1; EXPRESSED IN FETAL LIVER, SIGNAL =   1; EXPRESSED IN LUNG, SIGNAL = 1.1; EXPRESSED IN BONE MARROW, SIGNAL = 1.3; EXPRESSED IN PLACENTA, SIGNAL = 0.9; EXPRESSED IN ADULT LIVER, SIGNAL = 1.4; EXPRESSED IN BT474, SIGNAL =   1
RWLWMLTMCLSWNTFSSWMTA

SEQ ID NO: 36725 - protein, 38 aa, Homo sapiens
  MAP TO AL049562.7; EXPRESSED IN BT474, SIGNAL = 1.2; EXPRESSED IN HELA, SIGNAL = 0.59; EXPRESSED IN PLACENTA, SIGNAL = 0.75; EXPRESSED IN FETAL LIVER, SIGNAL = 0.68; EXPRESSED IN LUNG, SIGNAL = 0.6; EXPRESSED IN ADULT LIVER, SIGNAL = 0.95; EXPRESSED IN HEART, SIGNAL = 0.98; EST_HUMAN HIT: AA775221.1, EVALUE 2.20e-02
AALQIEPNNPADPMLCEMSVVDGDTVWSFTQDLIGNCS

SEQ ID NO: 36726 - protein, 17 aa, Homo sapiens
  MAP TO AP000121.1; EXPRESSED IN FETAL LIVER, SIGNAL = 0.82; EXPRESSED IN HEART, SIGNAL = 1.1; EXPRESSED IN BRAIN, SIGNAL = 0.82; EXPRESSED IN ADULT LIVER, SIGNAL = 0.95; EXPRESSED IN HELA, SIGNAL = 0.8; EXPRESSED IN LUNG, SIGNAL = 0.85; EXPRESSED IN HBL100, SIGNAL = 0.67; EXPRESSED IN BONE MARROW, SIGNAL = 0.86; EXPRESSED IN BT474, SIGNAL = 1.2; EXPRESSED IN PLACENTA, SIGNAL = 1.1
DVAGQPEDENHRVDADD

SEQ ID NO: 36727 - protein, 120 aa, Homo sapiens
  MAP TO AP000121.1; EXPRESSED IN FETAL LIVER, SIGNAL = 0.82; EXPRESSED IN HEART, SIGNAL = 1.1; EXPRESSED IN BRAIN, SIGNAL = 0.82; EXPRESSED IN ADULT LIVER, SIGNAL = 0.95; EXPRESSED IN HELA, SIGNAL = 0.8; EXPRESSED IN LUNG, SIGNAL = 0.85; EXPRESSED IN HBL100, SIGNAL = 0.67; EXPRESSED IN BONE MARROW, SIGNAL = 0.86; EXPRESSED IN BT474, SIGNAL = 1.2; EXPRESSED IN PLACENTA, SIGNAL = 1.1; EST_HUMAN HIT: BF525861.1, EVALUE 3.10e+00; SWISSPROT HIT: P98155, EVALUE 4.20e-01
GAKWTPHEASNQTQASTLLGLLLGDHTEGRNDTNSTRALKVPDGTSAAWYILTIIGIYAVIFVFRLASNILRKNDKSLEDVYYSNLTSELKMTGLQGKVAKCSTLSISNRAVLQPCQAHL

SEQ ID NO: 36728 - protein, 28 aa, Homo sapiens
  MAP TO AC007094.2; EXPRESSED IN FETAL LIVER, SIGNAL = 2.9; EXPRESSED IN ADULT LIVER, SIGNAL = 2.6; EXPRESSED IN BT474, SIGNAL = 2.3; EXPRESSED IN BRAIN, SIGNAL =   3; EXPRESSED IN BONE MARROW, SIGNAL = 2.7; EXPRESSED IN LUNG, SIGNAL =   3; EXPRESSED IN HELA, SIGNAL = 3.1; EXPRESSED IN PLACENTA, SIGNAL = 3.6; EXPRESSED IN HBL100, SIGNAL = 3.1; EXPRESSED IN HEART, SIGNAL = 2.5
FPDLELKNLSQMLIHEFDFLKKLSMKNK

SEQ ID NO: 36729 - protein, 55 aa, Homo sapiens
  MAP TO AC008074.1; EXPRESSED IN HBL100, SIGNAL = 0.75; EXPRESSED IN FETAL LIVER, SIGNAL = 0.91; EXPRESSED IN LUNG, SIGNAL = 0.82; EXPRESSED IN BRAIN, SIGNAL = 0.88; EXPRESSED IN BT474, SIGNAL = 1.1; EXPRESSED IN HELA, SIGNAL = 0.65; EXPRESSED IN ADULT LIVER, SIGNAL = 1.1; EXPRESSED IN HEART, SIGNAL = 0.84; EST_HUMAN HIT: N90645.1, EVALUE 2.00e-24; SWISSPROT HIT: Q29058, EVALUE 1.30e-01
LTCGDSEDPPADVAIELKAVFTDRQLLRNSCISGERGEEQSAIPYFPFIPDQPFR

SEQ ID NO: 36730 - protein, 32 aa, Homo sapiens
  MAP TO AC007460.1; EXPRESSED IN HELA, SIGNAL = 5.7; EXPRESSED IN PLACENTA, SIGNAL = 5.3; EXPRESSED IN HBL100, SIGNAL = 5.1; EXPRESSED IN HEART, SIGNAL = 3.8; EXPRESSED IN ADULT LIVER, SIGNAL = 6.8; EXPRESSED IN BT474, SIGNAL = 4.4; EXPRESSED IN BONE MARROW, SIGNAL = 4.5; EXPRESSED IN BRAIN, SIGNAL = 5.9; EXPRESSED IN FETAL LIVER, SIGNAL = 5.6; EXPRESSED IN LUNG, SIGNAL = 5.8
TAAARRHEFAVHQASFFRAASSYLEFASHQVL

SEQ ID NO: 36731 - protein, 82 aa, Homo sapiens
  MAP TO AP000260.1; EXPRESSED IN BONE MARROW, SIGNAL = 0.76; EXPRESSED IN HBL100, SIGNAL = 0.78; EXPRESSED IN FETAL LIVER, SIGNAL = 0.82; EXPRESSED IN LUNG, SIGNAL = 0.86; EXPRESSED IN ADULT LIVER, SIGNAL = 0.66; EXPRESSED IN BRAIN, SIGNAL = 0.99; EXPRESSED IN PLACENTA, SIGNAL = 1.2; EXPRESSED IN HEART, SIGNAL = 0.87; EXPRESSED IN HELA, SIGNAL = 0.67; EXPRESSED IN BT474, SIGNAL = 1.1; SWISSPROT HIT: O88866, EVALUE 1.00e-25; EST_HUMAN HIT: AA418916.1, EVALUE 1.00e-24
ISLEDLSPSVVLHMTEKLGYKNSDVINTVLSNRACHILAIYFLLNKKLERYLSGVSATLEAIVSAVCGKKSSYTQSASQLLT

SEQ ID NO: 36732 - protein, 46 aa, Homo sapiens
  MAP TO AJ010598.1; EXPRESSED IN PLACENTA, SIGNAL = 1.1; EXPRESSED IN HBL100, SIGNAL = 0.81; EXPRESSED IN FETAL LIVER, SIGNAL = 1.1; EXPRESSED IN LUNG, SIGNAL = 1.2; EXPRESSED IN HELA, SIGNAL = 1.5; EXPRESSED IN BRAIN, SIGNAL = 0.82; EXPRESSED IN HEART, SIGNAL = 0.93; EXPRESSED IN BT474, SIGNAL = 0.83; EXPRESSED IN ADULT LIVER, SIGNAL = 0.87; EST_HUMAN HIT: BF377331.1, EVALUE 4.00e-10; SWISSPROT HIT: Q9UHP3, EVALUE 5.00e-21
QAAGDPEYLEQPSRSDFSKHLKEETIQIITKASHEHEDKSPETVLQ

SEQ ID NO: 36733 - protein, 41 aa, Homo sapiens
  MAP TO AC007097.2; EXPRESSED IN HELA, SIGNAL = 1.9; EXPRESSED IN HEART, SIGNAL = 1.1; EXPRESSED IN BT474, SIGNAL = 1.3; EXPRESSED IN ADULT LIVER, SIGNAL = 1.6; EXPRESSED IN BRAIN, SIGNAL = 1.1; EXPRESSED IN PLACENTA, SIGNAL = 1.2; EXPRESSED IN HBL100, SIGNAL = 1.1; EXPRESSED IN FETAL LIVER, SIGNAL = 1.4; EXPRESSED IN LUNG, SIGNAL = 1.4; EXPRESSED IN BONE MARROW, SIGNAL =   1; EST_HUMAN HIT: BE677194.1, EVALUE 5.00e-09
MPRSILPAFGAAGTARARGLGFPSHGWFLYPGDAYRNPLPE

SEQ ID NO: 36734 - protein, 25 aa, Homo sapiens
  MAP TO AC007097.2; EXPRESSED IN HELA, SIGNAL = 1.9; EXPRESSED IN HEART, SIGNAL = 1.1; EXPRESSED IN BT474, SIGNAL = 1.3; EXPRESSED IN ADULT LIVER, SIGNAL = 1.6; EXPRESSED IN BRAIN, SIGNAL = 1.1; EXPRESSED IN PLACENTA, SIGNAL = 1.2; EXPRESSED IN HBL100, SIGNAL = 1.1; EXPRESSED IN FETAL LIVER, SIGNAL = 1.4; EXPRESSED IN LUNG, SIGNAL = 1.4; EXPRESSED IN BONE MARROW, SIGNAL =   1; EST_HUMAN HIT: BE677194.1, EVALUE 2.00e-08
RIQKPPVTRKTQTPRTCCASCPKSR

SEQ ID NO: 36735 - protein, 35 aa, Homo sapiens
  MAP TO AL049696.8; EXPRESSED IN BT474, SIGNAL = 0.74; EXPRESSED IN BONE MARROW, SIGNAL = 0.8; EXPRESSED IN LUNG, SIGNAL = 0.78; EXPRESSED IN HBL100, SIGNAL = 0.92; EXPRESSED IN HELA, SIGNAL = 0.96; EXPRESSED IN ADULT LIVER, SIGNAL = 0.93; EXPRESSED IN PLACENTA, SIGNAL = 0.83; EXPRESSED IN HEART, SIGNAL = 0.94; EXPRESSED IN BRAIN, SIGNAL = 0.97; EXPRESSED IN FETAL LIVER, SIGNAL = 0.85
TDAVPMFLLLGVSGSGAFLIRGCRRKICLTISGST

SEQ ID NO: 36736 - protein, 34 aa, Homo sapiens
  MAP TO AL049696.8; EXPRESSED IN BT474, SIGNAL = 0.74; EXPRESSED IN BONE MARROW, SIGNAL = 0.8; EXPRESSED IN LUNG, SIGNAL = 0.78; EXPRESSED IN HBL100, SIGNAL = 0.92; EXPRESSED IN HELA, SIGNAL = 0.96; EXPRESSED IN ADULT LIVER, SIGNAL = 0.93; EXPRESSED IN PLACENTA, SIGNAL = 0.83; EXPRESSED IN HEART, SIGNAL = 0.94; EXPRESSED IN BRAIN, SIGNAL = 0.97; EXPRESSED IN FETAL LIVER, SIGNAL = 0.85
VDPEIVRHIFLLQPLIKKAPEPETPNKRNMGTAS

SEQ ID NO: 36737 - protein, 57 aa, Homo sapiens
  MAP TO AC007100.2; EXPRESSED IN BONE MARROW, SIGNAL = 3.4; EXPRESSED IN BRAIN, SIGNAL = 3.5; EXPRESSED IN LUNG, SIGNAL = 6.6; EXPRESSED IN PLACENTA, SIGNAL = 4.5; EXPRESSED IN HELA, SIGNAL = 4.9; EXPRESSED IN HEART, SIGNAL = 3.5; EXPRESSED IN BT474, SIGNAL = 5.4; EXPRESSED IN HBL100, SIGNAL = 4.4; EXPRESSED IN FETAL LIVER, SIGNAL = 4.8; EXPRESSED IN ADULT LIVER, SIGNAL =   5; EST_HUMAN HIT: AA627296.1, EVALUE 4.10e+00
RLPESRGSRPYPEAALESREYTLGSHLTKGRAVPQSLLMTEEEQAPSIADVLKTTDR

SEQ ID NO: 36738 - protein, 35 aa, Homo sapiens
  MAP TO AC008854.2; EXPRESSED IN LUNG, SIGNAL = 1.5; EXPRESSED IN HELA, SIGNAL = 1.1; EXPRESSED IN PLACENTA, SIGNAL = 1.3; EXPRESSED IN HEART, SIGNAL = 1.1; EXPRESSED IN ADULT LIVER, SIGNAL = 1.8; EXPRESSED IN BT474, SIGNAL = 1.1; EXPRESSED IN BONE MARROW, SIGNAL = 1.2; EXPRESSED IN HBL100, SIGNAL = 1.3; EXPRESSED IN FETAL LIVER, SIGNAL = 1.3; EXPRESSED IN BRAIN, SIGNAL = 1.6; EST_HUMAN HIT: AV703184.1, EVALUE 3.00e-15; SWISSPROT HIT: P36175, EVALUE 8.20e+00
CSQCLWKPARNVADYLRGMMRSLLGQVFQHSPQFC

SEQ ID NO: 36739 - protein, 21 aa, Homo sapiens
  MAP TO AC008064.1; EXPRESSED IN LUNG, SIGNAL = 0.77; EXPRESSED IN BONE MARROW, SIGNAL = 0.87; EXPRESSED IN HBL100, SIGNAL = 1.1; EXPRESSED IN FETAL LIVER, SIGNAL = 0.84; EXPRESSED IN BRAIN, SIGNAL = 1.2; EXPRESSED IN BT474, SIGNAL = 1.2; EXPRESSED IN HELA, SIGNAL = 0.77; EXPRESSED IN HEART, SIGNAL = 0.86
GRPISLRWRRKMRMGWTEINL

SEQ ID NO: 36740 - protein, 97 aa, Homo sapiens
  MAP TO AP000049.1; EXPRESSED IN FETAL LIVER, SIGNAL = 0.76; EXPRESSED IN HELA, SIGNAL = 0.66; EXPRESSED IN HEART, SIGNAL = 0.91; EXPRESSED IN ADULT LIVER, SIGNAL = 0.82; EXPRESSED IN LUNG, SIGNAL = 0.67; EXPRESSED IN HBL100, SIGNAL = 0.7; EXPRESSED IN BT474, SIGNAL = 0.87; EXPRESSED IN PLACENTA, SIGNAL = 0.75; SWISSPROT HIT: P34216, EVALUE 2.00e-04; EST_HUMAN HIT: BE538712.1, EVALUE 1.00e-24
GKSANYFVFVLVGVVVLERFFYGHSCSQAMLLVCRALADMNNDGRMDQVEFSIAMKLIKLKLQGYQLPSALPPVMKQQPVAISSAPAFGKSENELVS

SEQ ID NO: 36741 - protein, 72 aa, Homo sapiens
  MAP TO AL031735.9; EXPRESSED IN PLACENTA, SIGNAL = 1.2; EXPRESSED IN HBL100, SIGNAL = 0.84; EXPRESSED IN FETAL LIVER, SIGNAL = 0.94; EXPRESSED IN LUNG, SIGNAL = 1.2; EXPRESSED IN HELA, SIGNAL =   1; EXPRESSED IN ADULT LIVER, SIGNAL = 1.2; EXPRESSED IN BRAIN, SIGNAL = 1.2; EXPRESSED IN HEART, SIGNAL = 1.1; EXPRESSED IN BONE MARROW, SIGNAL = 0.84; EXPRESSED IN BT474, SIGNAL =   1; EST_HUMAN HIT: AW444522.1, EVALUE 5.90e+00; SWISSPROT HIT: O61345, EVALUE 5.10e+00
SLELAMTHPEFYWYVDEGLSADNLKSSLLRSEILFGAPLPNYYSVDDRWEEQRAKFQSFVVTYVAMLAKQST

SEQ ID NO: 36742 - protein, 19 aa, Homo sapiens
  MAP TO AL031735.9; EXPRESSED IN PLACENTA, SIGNAL = 1.2; EXPRESSED IN HBL100, SIGNAL = 0.84; EXPRESSED IN FETAL LIVER, SIGNAL = 0.94; EXPRESSED IN LUNG, SIGNAL = 1.2; EXPRESSED IN HELA, SIGNAL =   1; EXPRESSED IN ADULT LIVER, SIGNAL = 1.2; EXPRESSED IN BRAIN, SIGNAL = 1.2; EXPRESSED IN HEART, SIGNAL = 1.1; EXPRESSED IN BONE MARROW, SIGNAL = 0.84; EXPRESSED IN BT474, SIGNAL =   1
PAELLGPPPLSLQAPWSWP

SEQ ID NO: 36743 - protein, 37 aa, Homo sapiens
  MAP TO AC007554.1; EXPRESSED IN FETAL LIVER, SIGNAL = 0.62; EXPRESSED IN LUNG, SIGNAL = 0.68; EXPRESSED IN HELA, SIGNAL = 0.63; EXPRESSED IN BRAIN, SIGNAL = 0.88; EXPRESSED IN PLACENTA, SIGNAL = 0.93; EXPRESSED IN BONE MARROW, SIGNAL = 1.2; EXPRESSED IN HEART, SIGNAL = 0.98; EST_HUMAN HIT: AU118551.1, EVALUE 6.00e-18; SWISSPROT HIT: P13611, EVALUE 5.00e-19
FDECHSNPCRNGATCVDGFNTFRCLCLPSYVGALCEQ

SEQ ID NO: 36744 - protein, 29 aa, Homo sapiens
  MAP TO AC007554.1; EXPRESSED IN FETAL LIVER, SIGNAL = 0.62; EXPRESSED IN LUNG, SIGNAL = 0.68; EXPRESSED IN HELA, SIGNAL = 0.63; EXPRESSED IN BRAIN, SIGNAL = 0.88; EXPRESSED IN PLACENTA, SIGNAL = 0.93; EXPRESSED IN BONE MARROW, SIGNAL = 1.2; EXPRESSED IN HEART, SIGNAL = 0.98
ILMNVTLIPVVMEPLVLMVLTHSGASAFQ

SEQ ID NO: 36745 - protein, 473 aa, Homo sapiens
  MAP TO AL049767.9; EXPRESSED IN BT474, SIGNAL = 0.87; EXPRESSED IN HELA, SIGNAL = 5.3; EXPRESSED IN FETAL LIVER, SIGNAL = 0.73; EXPRESSED IN LUNG, SIGNAL = 0.77; EXPRESSED IN ADULT LIVER, SIGNAL = 1.2; EXPRESSED IN PLACENTA, SIGNAL = 4.5; EXPRESSED IN BONE MARROW, SIGNAL = 0.92; EXPRESSED IN HBL100, SIGNAL = 1.1; EXPRESSED IN BRAIN, SIGNAL = 0.85; EXPRESSED IN HEART, SIGNAL = 0.82; SWISSPROT HIT: Q02383, EVALUE 0.00e+00; EST_HUMAN HIT: BF678746.1, EVALUE 1.00e-109
KQEGRDHDKSKGHFHMIVIHHKGGQAHHGTQNPSQDQGNSPSGKGLSSQCSNTEKRLWVHGLSKEQASASGAQKGRTQGGSQSSYVLQTEELVVNKQQRETKNSHQNKGHYQNVVDVREEHSSKLQTSLHPAHQDRLQHGPKDIFTTQDELLVYNKNQHQTKNLSQDQEHGRKAHKISYPSSRTEERQLHHGEKSVQKDVSKGSISIQTEEKIHGKSQNQVTIHSQDQEHGHKENKISYQSSSTEERHLNCGEKGIQKGVSKGSISIQTEEQIHGKSQNQVRIPSQAQEYGHKENKISYQSSSTEERRLNSGEKDVQKGVSKGSISIQTEEKIHGKSQNQVTIPSQDQEHGHKENKMSYQSSSTEERRLNYGGKSTQKDVSQSSISFQIEKLVEGKSQIQTPNPNQDQWSGQNAKGKSGQSADSKQDLLSHEQKGRYKQESSESHNIVITEHEVAQDDHLTQQYNEDRNPIST

SEQ ID NO: 36746 - protein, 47 aa, Homo sapiens
  MAP TO AC009237.1; EXPRESSED IN PLACENTA, SIGNAL = 0.94; EXPRESSED IN BONE MARROW, SIGNAL = 0.92; EXPRESSED IN HEART, SIGNAL = 0.79; EXPRESSED IN BT474, SIGNAL = 0.8; EXPRESSED IN HBL100, SIGNAL = 0.76; EXPRESSED IN FETAL LIVER, SIGNAL = 0.65; EXPRESSED IN LUNG, SIGNAL = 0.68; SWISSPROT HIT: Q9X2A2, EVALUE 2.00e+00
FREASYIESGPEEFYQRFKKCFSTTHIFISMKGKDSQNTVHGYLILN

SEQ ID NO: 36747 - protein, 28 aa, Homo sapiens
  MAP TO AC009237.1; EXPRESSED IN PLACENTA, SIGNAL = 0.94; EXPRESSED IN BONE MARROW, SIGNAL = 0.92; EXPRESSED IN HEART, SIGNAL = 0.79; EXPRESSED IN BT474, SIGNAL = 0.8; EXPRESSED IN HBL100, SIGNAL = 0.76; EXPRESSED IN FETAL LIVER, SIGNAL = 0.65; EXPRESSED IN LUNG, SIGNAL = 0.68
SGKLLISRVVQKNSTKDLRSVFLQLISS

SEQ ID NO: 36748 - protein, 77 aa, Homo sapiens
  MAP TO AC007502.2; EXPRESSED IN BRAIN, SIGNAL = 7.5; EXPRESSED IN LUNG, SIGNAL = 7.9; EXPRESSED IN HELA, SIGNAL = 8.8; EXPRESSED IN PLACENTA, SIGNAL = 7.2; EXPRESSED IN HEART, SIGNAL = 7.9; EXPRESSED IN ADULT LIVER, SIGNAL = 8.3; EXPRESSED IN BT474, SIGNAL = 6.5; EXPRESSED IN BONE MARROW, SIGNAL = 7.9; EXPRESSED IN HBL100, SIGNAL = 6.3; EXPRESSED IN FETAL LIVER, SIGNAL =   8; SWISSPROT HIT: O26928, EVALUE 3.30e+00; EST_HUMAN HIT: BF002301.1, EVALUE 5.10e+00
EEKATPDSHLEADHAQFALKETAMPIFTHIVKNLIADVSGFQFEGLPSSGVKEAGERSVFRVTGRKCRGSHPSLSKE

SEQ ID NO: 36749 - protein, 49 aa, Homo sapiens
  MAP TO AL035697.18; EXPRESSED IN PLACENTA, SIGNAL = 0.68; EXPRESSED IN LUNG, SIGNAL = 0.76; EXPRESSED IN HELA, SIGNAL = 0.94; EXPRESSED IN BT474, SIGNAL = 0.63; EXPRESSED IN FETAL LIVER, SIGNAL = 0.68; EXPRESSED IN BRAIN, SIGNAL = 0.91; EXPRESSED IN BONE MARROW, SIGNAL = 0.77; EXPRESSED IN ADULT LIVER, SIGNAL = 0.73; EXPRESSED IN HEART, SIGNAL = 0.96; EST_HUMAN HIT: BF568774.1, EVALUE 5.10e+00; SWISSPROT HIT: P20041, EVALUE 1.20e+00
TTGTSSMVQRSVSCRWGACYAPALAVERGCCRSLTRGKSPAKGAMAWAV

SEQ ID NO: 36750 - protein, 46 aa, Homo sapiens
  MAP TO AL035697.18; EXPRESSED IN PLACENTA, SIGNAL = 0.68; EXPRESSED IN LUNG, SIGNAL = 0.76; EXPRESSED IN HELA, SIGNAL = 0.94; EXPRESSED IN BT474, SIGNAL = 0.63; EXPRESSED IN FETAL LIVER, SIGNAL = 0.68; EXPRESSED IN BRAIN, SIGNAL = 0.91; EXPRESSED IN BONE MARROW, SIGNAL = 0.77; EXPRESSED IN ADULT LIVER, SIGNAL = 0.73; EXPRESSED IN HEART, SIGNAL = 0.96; EST_HUMAN HIT: T78558.1, EVALUE 2.00e+00; SWISSPROT HIT: Q04833, EVALUE 9.10e-01
YNRYQQYGAEECVLQMGGVLCPRPGCGAGLLPEPDQRKVTCEGGNG

SEQ ID NO: 36751 - protein, 48 aa, Homo sapiens
  MAP TO Z84476.6; EXPRESSED IN BONE MARROW, SIGNAL = 0.65; EXPRESSED IN HBL100, SIGNAL = 0.68; EXPRESSED IN FETAL LIVER, SIGNAL = 0.71; EXPRESSED IN LUNG, SIGNAL = 0.61; EXPRESSED IN BT474, SIGNAL = 0.7; EXPRESSED IN HEART, SIGNAL = 0.84; EXPRESSED IN PLACENTA, SIGNAL = 0.72; EXPRESSED IN ADULT LIVER, SIGNAL = 0.67; SWISSPROT HIT: Q9X4E0, EVALUE 6.20e+00; EST_HUMAN HIT: R07702.1, EVALUE 5.00e-23
PRWILDRMLQVVQEGNPAPFIINTVKRGRRDRERQRTPWAPHPLGFQG

SEQ ID NO: 36752 - protein, 25 aa, Homo sapiens
  MAP TO Z84476.6; EXPRESSED IN BONE MARROW, SIGNAL = 0.65; EXPRESSED IN HBL100, SIGNAL = 0.68; EXPRESSED IN FETAL LIVER, SIGNAL = 0.71; EXPRESSED IN LUNG, SIGNAL = 0.61; EXPRESSED IN BT474, SIGNAL = 0.7; EXPRESSED IN HEART, SIGNAL = 0.84; EXPRESSED IN PLACENTA, SIGNAL = 0.72; EXPRESSED IN ADULT LIVER, SIGNAL = 0.67; EST_HUMAN HIT: AI769922.1, EVALUE 3.00e-10
LPDGSWTGCCRWCRRGILPHLSSTQ

SEQ ID NO: 36753 - protein, 89 aa, Homo sapiens
  MAP TO AL023799.5; EXPRESSED IN ADULT LIVER, SIGNAL = 1.3; EXPRESSED IN BRAIN, SIGNAL = 1.5; EXPRESSED IN BT474, SIGNAL = 0.95; EXPRESSED IN PLACENTA, SIGNAL = 1.3; EXPRESSED IN HEART, SIGNAL = 1.4; EXPRESSED IN HELA, SIGNAL = 1.7; EXPRESSED IN LUNG, SIGNAL = 1.4; EXPRESSED IN FETAL LIVER, SIGNAL = 1.1; EXPRESSED IN HBL100, SIGNAL = 1.1; EXPRESSED IN BONE MARROW, SIGNAL = 0.82; EST_HUMAN HIT: AV653002.1, EVALUE 3.90e-01; SWISSPROT HIT: P47100, EVALUE 2.90e-02
PTAPFGCAPGTSFLQVTPPTSQNTTARNPRKSNASRSKTSKLHATTSTASKVNTSKPRGRIAKSKAKPSYKQKRQRNRKNKMSLALKNI

SEQ ID NO: 36754 - protein, 91 aa, Homo sapiens
  MAP TO AC008277.1; EXPRESSED IN BT474, SIGNAL = 1.2; EXPRESSED IN HELA, SIGNAL = 0.84; EXPRESSED IN FETAL LIVER, SIGNAL = 0.89; EXPRESSED IN LUNG, SIGNAL =   1; EXPRESSED IN ADULT LIVER, SIGNAL = 1.2; EXPRESSED IN PLACENTA, SIGNAL = 1.2; EXPRESSED IN BONE MARROW, SIGNAL = 1.2; EXPRESSED IN HBL100, SIGNAL = 0.77; EXPRESSED IN BRAIN, SIGNAL = 1.2; EXPRESSED IN HEART, SIGNAL = 0.96; EST_HUMAN HIT: AU129635.1, EVALUE 2.20e+00; SWISSPROT HIT: P13608, EVALUE 9.60e-01
VKGGVSMMGLQFCGWPTGVVTSNIPFTSSVPSLGSGLGLSEGNGNSFLTSNVASSKSESPVPQNEKATSAQPAAVEVAKPVDFPSPKPIPE

SEQ ID NO: 36755 - protein, 102 aa, Homo sapiens
  MAP TO AL009029.1; EXPRESSED IN PLACENTA, SIGNAL = 3.6; EXPRESSED IN HELA, SIGNAL = 3.7; EXPRESSED IN HEART, SIGNAL = 3.9; EXPRESSED IN FETAL LIVER, SIGNAL = 4.6; EXPRESSED IN BT474, SIGNAL = 3.4; EXPRESSED IN BRAIN, SIGNAL = 3.5; EXPRESSED IN LUNG, SIGNAL = 3.6; EXPRESSED IN HBL100, SIGNAL = 3.5; EXPRESSED IN ADULT LIVER, SIGNAL = 4.1; EXPRESSED IN BONE MARROW, SIGNAL = 3.9; EST_HUMAN HIT: AA507904.1, EVALUE 3.00e-22; SWISSPROT HIT: P39188, EVALUE 6.00e-20
GVDLSPRLKCSGMLMSHCSLEILGLSDPPVSVSQATGATGTCHHDWIFFFNYMFGEIVSHHVAQAGLEDLASRNPFTSASQSVGIINMSHRIQKILNYITIT

SEQ ID NO: 36756 - protein, 33 aa, Homo sapiens
  MAP TO AL035086.12; EXPRESSED IN FETAL LIVER, SIGNAL = 0.78; EXPRESSED IN BRAIN, SIGNAL = 0.82; EXPRESSED IN HEART, SIGNAL = 0.83; EXPRESSED IN BONE MARROW, SIGNAL = 0.7; EXPRESSED IN ADULT LIVER, SIGNAL = 0.73; EXPRESSED IN HELA, SIGNAL = 0.75; EXPRESSED IN LUNG, SIGNAL = 1.1; EXPRESSED IN PLACENTA, SIGNAL = 0.73; EST_HUMAN HIT: BF359947.1, EVALUE 5.00e-12
ITLTASGTKQNFPWGPKKDQPFLETYRISTTSI

SEQ ID NO: 36757 - protein, 41 aa, Homo sapiens
  MAP TO AC008275.1; EXPRESSED IN FETAL LIVER, SIGNAL = 0.67; EXPRESSED IN BRAIN, SIGNAL = 0.71; EXPRESSED IN HEART, SIGNAL = 0.93; EXPRESSED IN PLACENTA, SIGNAL = 0.96; EXPRESSED IN LUNG, SIGNAL = 0.6; EXPRESSED IN HELA, SIGNAL = 0.66; EST_HUMAN HIT: AW204126.1, EVALUE 9.50e-02; SWISSPROT HIT: P57310, EVALUE 8.30e+00
YLLLLTRFNQHVIINMMGRHNVLWKGKAIKLPVDRMLIESE

SEQ ID NO: 36758 - protein, 47 aa, Homo sapiens
  MAP TO AC009650.2; EXPRESSED IN BRAIN, SIGNAL = 1.7; EXPRESSED IN HELA, SIGNAL = 2.6; EXPRESSED IN PLACENTA, SIGNAL =   1; EXPRESSED IN HBL100, SIGNAL = 1.7; EXPRESSED IN HEART, SIGNAL = 1.1; EXPRESSED IN FETAL LIVER, SIGNAL = 0.93; SWISSPROT HIT: P54105, EVALUE 5.00e-03; EST_HUMAN HIT: AU123910.1, EVALUE 6.90e-02
VNDKFEESKESVADEEEEDSDDVELITEFIFVPSDKSALGAMFTANV

SEQ ID NO: 36759 - protein, 59 aa, Homo sapiens
  MAP TO AC008179.1; EXPRESSED IN ADULT LIVER, SIGNAL = 3.8; EXPRESSED IN BT474, SIGNAL = 0.75; EXPRESSED IN PLACENTA, SIGNAL = 0.92; EXPRESSED IN HEART, SIGNAL = 0.95; EXPRESSED IN HELA, SIGNAL = 0.91; EXPRESSED IN LUNG, SIGNAL = 1.1; EXPRESSED IN FETAL LIVER, SIGNAL = 1.2; EXPRESSED IN HBL100, SIGNAL = 0.82; EXPRESSED IN BONE MARROW, SIGNAL = 2.5; SWISSPROT HIT: Q52877, EVALUE 1.50e+00; EST_HUMAN HIT: H05017.1, EVALUE 3.00e-18
QQTETSGQIQGVAVTSSADVEVTNEKQGKKKSKTAVNVLLKPNPLDQTCIHPESYDIAM

SEQ ID NO: 36760 - protein, 58 aa, Homo sapiens
  MAP TO AF051976.2; EXPRESSED IN PLACENTA, SIGNAL = 3.6; EXPRESSED IN HELA, SIGNAL =   3; EXPRESSED IN HBL100, SIGNAL = 2.8; EXPRESSED IN HEART, SIGNAL = 2.8; EXPRESSED IN FETAL LIVER, SIGNAL =   3; EXPRESSED IN ADULT LIVER, SIGNAL = 4.2; EXPRESSED IN BT474, SIGNAL = 2.8; EXPRESSED IN BRAIN, SIGNAL = 3.1; EXPRESSED IN BONE MARROW, SIGNAL = 2.9; EXPRESSED IN LUNG, SIGNAL = 3.3; EST_HUMAN HIT: AW850757.1, EVALUE 6.00e-03; SWISSPROT HIT: Q13402, EVALUE 2.00e-03
LFLKEHLYQLLESMREHVLNLAALTLQRCLRGFFIKRRFRSLRHKIILLQSRARGYLA

SEQ ID NO: 36761 - protein, 19 aa, Homo sapiens
  MAP TO AF051976.2; EXPRESSED IN PLACENTA, SIGNAL = 3.6; EXPRESSED IN HELA, SIGNAL =   3; EXPRESSED IN HBL100, SIGNAL = 2.8; EXPRESSED IN HEART, SIGNAL = 2.8; EXPRESSED IN FETAL LIVER, SIGNAL =   3; EXPRESSED IN ADULT LIVER, SIGNAL = 4.2; EXPRESSED IN BT474, SIGNAL = 2.8; EXPRESSED IN BRAIN, SIGNAL = 3.1; EXPRESSED IN BONE MARROW, SIGNAL = 2.9; EXPRESSED IN LUNG, SIGNAL = 3.3
ACPESGSPHSAALPPWLLH

SEQ ID NO: 36762 - protein, 22 aa, Homo sapiens
  MAP TO AL022097.1; EXPRESSED IN HEART, SIGNAL = 1.1; EXPRESSED IN BT474, SIGNAL = 1.1; EXPRESSED IN FETAL LIVER, SIGNAL = 1.2; EXPRESSED IN ADULT LIVER, SIGNAL = 1.2; EXPRESSED IN BONE MARROW, SIGNAL = 0.91; EXPRESSED IN LUNG, SIGNAL = 1.1; EXPRESSED IN HBL100, SIGNAL = 0.95; EXPRESSED IN HELA, SIGNAL = 1.2; EST_HUMAN HIT: AI017971.1, EVALUE 3.30e+00
EGREKQIYQEVCGLYPCYRTRF

SEQ ID NO: 36763 - protein, 57 aa, Homo sapiens
  MAP TO AC007967.2; EXPRESSED IN BT474, SIGNAL = 0.65; EXPRESSED IN BONE MARROW, SIGNAL = 0.78; EXPRESSED IN LUNG, SIGNAL = 0.67; EXPRESSED IN ADULT LIVER, SIGNAL = 0.95; EXPRESSED IN PLACENTA, SIGNAL = 0.86; EXPRESSED IN FETAL LIVER, SIGNAL = 0.67; EXPRESSED IN HEART, SIGNAL = 0.93; EST_HUMAN HIT: BE706999.1, EVALUE 3.70e-02; SWISSPROT HIT: Q9XT45, EVALUE 2.00e+00
VPLMVHHQHEGLSCLTVEEAAMIITIHEIDTAEVKRVTQGDVVIFIPVVMSMLAEKT

SEQ ID NO: 36764 - protein, 57 aa, Homo sapiens
  MAP TO AL034406.1; EXPRESSED IN BT474, SIGNAL = 0.6; EXPRESSED IN HELA, SIGNAL = 0.65; EXPRESSED IN PLACENTA, SIGNAL = 0.74; EXPRESSED IN FETAL LIVER, SIGNAL = 0.64; EXPRESSED IN LUNG, SIGNAL = 0.7; EXPRESSED IN ADULT LIVER, SIGNAL = 0.87; EXPRESSED IN BONE MARROW, SIGNAL = 0.73; EXPRESSED IN BRAIN, SIGNAL = 0.79; EXPRESSED IN HEART, SIGNAL = 0.84; EST_HUMAN HIT: AU118230.1, EVALUE 3.00e-07
LDLPFMMMPHPLLPVSLPPASVAMAMNQMNHLNTIANMAAAAQIHSPLSRAGTSVIK

SEQ ID NO: 36765 - protein, 29 aa, Homo sapiens
  MAP TO AC007480.1; EXPRESSED IN BT474, SIGNAL = 1.1; EXPRESSED IN FETAL LIVER, SIGNAL = 1.3; EXPRESSED IN BRAIN, SIGNAL = 1.3; EXPRESSED IN LUNG, SIGNAL = 1.4; EXPRESSED IN HBL100, SIGNAL = 1.3; EXPRESSED IN HELA, SIGNAL = 1.5; EXPRESSED IN PLACENTA, SIGNAL = 1.2; EXPRESSED IN HEART, SIGNAL =   1; EXPRESSED IN ADULT LIVER, SIGNAL = 1.6; EXPRESSED IN BONE MARROW, SIGNAL = 1.3; EST_HUMAN HIT: AA186658.1, EVALUE 1.00e-09
TKKMLTSQKFEISLGTATMAANLPGMWRR

SEQ ID NO: 36766 - protein, 27 aa, Homo sapiens
  MAP TO AJ010597.1; EXPRESSED IN HBL100, SIGNAL = 0.7; EXPRESSED IN FETAL LIVER, SIGNAL = 0.75; EXPRESSED IN LUNG, SIGNAL = 0.95; EXPRESSED IN ADULT LIVER, SIGNAL = 0.92; EXPRESSED IN BRAIN, SIGNAL = 0.97; EXPRESSED IN HEART, SIGNAL = 0.96; EXPRESSED IN PLACENTA, SIGNAL = 0.9; EXPRESSED IN BT474, SIGNAL = 0.71; EXPRESSED IN HELA, SIGNAL = 0.94; EXPRESSED IN BONE MARROW, SIGNAL = 0.92
LGHVVEVVWVLMMILSPLAPFHLDAEK

SEQ ID NO: 36767 - protein, 37 aa, Homo sapiens
  MAP TO AC006009.2; EXPRESSED IN BRAIN, SIGNAL = 1.2; EXPRESSED IN HEART, SIGNAL = 0.81; EXPRESSED IN BT474, SIGNAL = 0.72; EXPRESSED IN PLACENTA, SIGNAL = 0.69; EXPRESSED IN FETAL LIVER, SIGNAL = 0.68; EXPRESSED IN LUNG, SIGNAL = 0.93; EXPRESSED IN ADULT LIVER, SIGNAL = 0.79; EST_HUMAN HIT: BE069355.1, EVALUE 9.00e-10
WGTQGDFTTTHPRPVVKVKLFTESTGVLALEDKELGR

SEQ ID NO: 36768 - protein, 199 aa, Homo sapiens
  MAP TO AC007539.8; EXPRESSED IN HELA, SIGNAL = 1.3; EXPRESSED IN BRAIN, SIGNAL = 1.1; EXPRESSED IN PLACENTA, SIGNAL = 0.88; EXPRESSED IN HBL100, SIGNAL = 0.7; EXPRESSED IN LUNG, SIGNAL = 1.2; EXPRESSED IN ADULT LIVER, SIGNAL = 1.3; EXPRESSED IN HEART, SIGNAL = 1.1; EXPRESSED IN BT474, SIGNAL = 0.7; EXPRESSED IN BONE MARROW, SIGNAL = 0.7; EXPRESSED IN FETAL LIVER, SIGNAL = 0.7; EST_HUMAN HIT: AW887222.1, EVALUE 2.00e-04; SWISSPROT HIT: P15305, EVALUE 1.00e-10
MYHTLQFTPYQTLQITVYHPLQITSYHTLQITLYHNLKLTPYHTFWITVCHTLQITLYHTLKITMYHTLQFTPYQTLQITVCHLLQITSYRTLQITLYHNLKITPYHTFWITVCHTLQTTLYHTLKIMMYHTLQFTAYQTLQITVCHLLQITSYRTLQITLYHNLKITLYHTLRITVCHTLQITQCHALFPEALLHAFS

SEQ ID NO: 36769 - protein, 125 aa, Homo sapiens
  MAP TO AC007539.8; EXPRESSED IN HELA, SIGNAL = 1.3; EXPRESSED IN BRAIN, SIGNAL = 1.1; EXPRESSED IN PLACENTA, SIGNAL = 0.88; EXPRESSED IN HBL100, SIGNAL = 0.7; EXPRESSED IN LUNG, SIGNAL = 1.2; EXPRESSED IN ADULT LIVER, SIGNAL = 1.3; EXPRESSED IN HEART, SIGNAL = 1.1; EXPRESSED IN BT474, SIGNAL = 0.7; EXPRESSED IN BONE MARROW, SIGNAL = 0.7; EXPRESSED IN FETAL LIVER, SIGNAL = 0.7; EST_HUMAN HIT: BF237605.1, EVALUE 1.00e-04; SWISSPROT HIT: P08297, EVALUE 3.30e-02
PIHTIPNSPDHSVPPSPDYVVPHSPDNTVSQPQDHTVPHLLDHSVSHSPDHTVPHPQDHDVPHSPIHSIPNSPDHSVPPSPDYVVPHSPDNTVSQPQDHTVPHSPDHSVPHSPDHTVPRSLSGSV

SEQ ID NO: 36770 - protein, 93 aa, Homo sapiens
  MAP TO AL021917.1; EXPRESSED IN BT474, SIGNAL = 1.1; EXPRESSED IN BONE MARROW, SIGNAL = 1.1; EXPRESSED IN HBL100, SIGNAL =   1; EXPRESSED IN HELA, SIGNAL = 1.1; EXPRESSED IN FETAL LIVER, SIGNAL = 1.3; EXPRESSED IN BRAIN, SIGNAL =   1; EXPRESSED IN LUNG, SIGNAL = 2.4; EXPRESSED IN PLACENTA, SIGNAL = 1.1; EXPRESSED IN HEART, SIGNAL = 1.3; EST_HUMAN HIT: BE814862.1, EVALUE 1.00e-44; SWISSPROT HIT: P18892, EVALUE 1.00e-20
LGSDLHIEVKGYEDGGIHLECRSTGWYPQPQIKWSDTKGENIPAVEAPVVADGVGLYAVAASVIMRGSSGGGVSCIIRNSLLGLEKTASISIA

SEQ ID NO: 36771 - protein, 85 aa, Homo sapiens
  MAP TO AC008177.1; EXPRESSED IN PLACENTA, SIGNAL =   1; EXPRESSED IN FETAL LIVER, SIGNAL = 0.96; EXPRESSED IN LUNG, SIGNAL = 1.3; EXPRESSED IN HELA, SIGNAL = 1.1; EXPRESSED IN BRAIN, SIGNAL = 1.1; EXPRESSED IN HEART, SIGNAL = 1.1; EXPRESSED IN BT474, SIGNAL = 0.8; EXPRESSED IN BONE MARROW, SIGNAL = 1.3; EXPRESSED IN ADULT LIVER, SIGNAL = 0.87; EXPRESSED IN HBL100, SIGNAL = 0.78; SWISSPROT HIT: P50169, EVALUE 4.00e-25; EST_HUMAN HIT: W17165.1, EVALUE 1.00e-31
LWGLINNAGVPGVLAPTDWLTLEDYREPIEVNLFGLISVTLNMLPLVKKAQGRVINVSSVGGRLAIVGGGYTPSKYAVEGFNDSL

SEQ ID NO: 36772 - protein, 40 aa, Homo sapiens
  MAP TO AC007717.1; EXPRESSED IN HBL100, SIGNAL = 0.93; EXPRESSED IN LUNG, SIGNAL = 1.2; EXPRESSED IN BRAIN, SIGNAL =   1; EXPRESSED IN PLACENTA, SIGNAL = 0.99; EXPRESSED IN BT474, SIGNAL = 0.92; EXPRESSED IN BONE MARROW, SIGNAL = 3.3; EXPRESSED IN HEART, SIGNAL = 0.99; EXPRESSED IN ADULT LIVER, SIGNAL =   1; EXPRESSED IN HELA, SIGNAL = 1.2; EXPRESSED IN FETAL LIVER, SIGNAL = 1.1
METWIIYPNHEKCRLTCNYSTQRFQEVINYVLPKVVRGMK

SEQ ID NO: 36773 - protein, 44 aa, Homo sapiens
  MAP TO AC007630.3; EXPRESSED IN FETAL LIVER, SIGNAL = 0.86; EXPRESSED IN HEART, SIGNAL = 1.1; EXPRESSED IN BONE MARROW, SIGNAL =   1; EXPRESSED IN PLACENTA, SIGNAL = 0.84; EXPRESSED IN BT474, SIGNAL = 0.82; EXPRESSED IN LUNG, SIGNAL = 1.2; EXPRESSED IN HELA, SIGNAL =   1; EXPRESSED IN ADULT LIVER, SIGNAL =   1; EXPRESSED IN BRAIN, SIGNAL =   9; SWISSPROT HIT: P55984, EVALUE 2.10e+00
LYAFKTMNSHYPRNKCKWYMRTMLNKKERTALNNNLGVRHISVC

SEQ ID NO: 36774 - protein, 57 aa, Homo sapiens
  MAP TO AL035667.12; EXPRESSED IN PLACENTA, SIGNAL = 0.7; EXPRESSED IN FETAL LIVER, SIGNAL = 0.8; EXPRESSED IN LUNG, SIGNAL = 0.98; EXPRESSED IN HELA, SIGNAL = 0.94; EXPRESSED IN BRAIN, SIGNAL = 0.77; EXPRESSED IN HEART, SIGNAL = 0.94; EXPRESSED IN BT474, SIGNAL = 0.78; EXPRESSED IN ADULT LIVER, SIGNAL = 0.96; EXPRESSED IN HBL100, SIGNAL = 0.8; EXPRESSED IN BONE MARROW, SIGNAL = 0.8; SWISSPROT HIT: P29584, EVALUE 4.50e+00; EST_HUMAN HIT: AA577823.1, EVALUE 3.60e-01
ASQGQAELKRQKKDLPVFQKSRTHLLPFQVPFPCPLNLFSFFAQLLPNLFLHAEKDD

SEQ ID NO: 36775 - protein, 46 aa, Homo sapiens
  MAP TO AJ009614.1; EXPRESSED IN BONE MARROW, SIGNAL = 0.98; EXPRESSED IN LUNG, SIGNAL = 1.1; EXPRESSED IN PLACENTA, SIGNAL =   1; EXPRESSED IN HELA, SIGNAL =   1; EXPRESSED IN HBL100, SIGNAL = 0.94; EXPRESSED IN HEART, SIGNAL = 1.2; EXPRESSED IN FETAL LIVER, SIGNAL = 1.5; EXPRESSED IN ADULT LIVER, SIGNAL = 1.3; EXPRESSED IN BT474, SIGNAL = 1.2; EXPRESSED IN BRAIN, SIGNAL =   1; SWISSPROT HIT: P11721, EVALUE 6.00e+00; EST_HUMAN HIT: AU126718.1, EVALUE 5.20e+00
CPVPAHLHPDFRAANLYTHEKQPHQLLCHAWTQLPMSLVSQTNIPK

SEQ ID NO: 36776 - protein, 41 aa, Homo sapiens
  MAP TO AC008167.1; EXPRESSED IN BONE MARROW, SIGNAL = 1.4; EXPRESSED IN HBL100, SIGNAL = 1.5; EXPRESSED IN PLACENTA, SIGNAL = 1.1; EXPRESSED IN BRAIN, SIGNAL = 1.3; EXPRESSED IN HELA, SIGNAL = 1.4; EXPRESSED IN LUNG, SIGNAL = 1.4; EXPRESSED IN BT474, SIGNAL = 1.2; EXPRESSED IN HEART, SIGNAL = 1.3; EXPRESSED IN ADULT LIVER, SIGNAL = 1.1; EXPRESSED IN FETAL LIVER, SIGNAL = 1.1; EST_HUMAN HIT: BF338655.1, EVALUE 2.00e-04
SCTCSFPTSELEKVLPQTILYKYYERKAEEEVAAAYADELV

SEQ ID NO: 36777 - protein, 41 aa, Homo sapiens
  MAP TO AC008167.1; EXPRESSED IN BONE MARROW, SIGNAL = 1.4; EXPRESSED IN HBL100, SIGNAL = 1.5; EXPRESSED IN PLACENTA, SIGNAL = 1.1; EXPRESSED IN BRAIN, SIGNAL = 1.3; EXPRESSED IN HELA, SIGNAL = 1.4; EXPRESSED IN LUNG, SIGNAL = 1.4; EXPRESSED IN BT474, SIGNAL = 1.2; EXPRESSED IN HEART, SIGNAL = 1.3; EXPRESSED IN ADULT LIVER, SIGNAL = 1.1; EXPRESSED IN FETAL LIVER, SIGNAL = 1.1; EST_HUMAN HIT: AU117398.1, EVALUE 2.00e-17; SWISSPROT HIT: P41411, EVALUE 8.00e+00
AARVRSQPVSWRRCSPRPSCISTMSEKPRRRLRQPTPTSLS

SEQ ID NO: 36778 - protein, 137 aa, Homo sapiens
  MAP TO AL021997.1; EXPRESSED IN PLACENTA, SIGNAL = 7.6; EXPRESSED IN HELA, SIGNAL = 8.3; EXPRESSED IN HEART, SIGNAL = 7.4; EXPRESSED IN BONE MARROW, SIGNAL =  11; EXPRESSED IN HBL100, SIGNAL = 7.8; EXPRESSED IN BT474, SIGNAL = 6.8; EXPRESSED IN ADULT LIVER, SIGNAL =   9; EXPRESSED IN FETAL LIVER, SIGNAL = 8.3; EXPRESSED IN BRAIN, SIGNAL = 6.5; EXPRESSED IN LUNG, SIGNAL = 9.5; SWISSPROT HIT: O43309, EVALUE 6.00e-45; EST_HUMAN HIT: BF676393.1, EVALUE 2.00e-62
QSKPSKLTPGMASTEEQYDLKIVKVEEDPIWDQETHLRGNNFSGQEASRQLFRQFCYQETPGPREALSRLRELCHQWLRPEIHTKEQILELLVLEQFLTILPEELQAWVREHHPESGEEAVAVVEDLEQELSEPGNQ

SEQ ID NO: 36779 - protein, 52 aa, Homo sapiens
  MAP TO AB026898.1; EXPRESSED IN HBL100, SIGNAL = 0.97; EXPRESSED IN HELA, SIGNAL = 1.1; EXPRESSED IN HEART, SIGNAL = 1.2; EXPRESSED IN LUNG, SIGNAL = 0.97; EXPRESSED IN BONE MARROW, SIGNAL = 1.1; EXPRESSED IN BRAIN, SIGNAL = 1.1; SWISSPROT HIT: O02799, EVALUE 1.50e+00
PGPTSQDLLCEIEDSPSPVVLHIEAVFKVLQVELGSGVGPERWQGWDTEPSP

SEQ ID NO: 36780 - protein, 30 aa, Homo sapiens
  MAP TO AC007966.2; EXPRESSED IN BT474, SIGNAL = 0.61; EXPRESSED IN BONE MARROW, SIGNAL = 0.96; EXPRESSED IN HBL100, SIGNAL = 0.71; EXPRESSED IN ADULT LIVER, SIGNAL = 0.88; EXPRESSED IN PLACENTA, SIGNAL = 0.78; EXPRESSED IN FETAL LIVER, SIGNAL = 0.91; EXPRESSED IN LUNG, SIGNAL =   1; EXPRESSED IN HELA, SIGNAL = 1.1; EXPRESSED IN BRAIN, SIGNAL = 0.99; EXPRESSED IN HEART, SIGNAL = 1.2; SWISSPROT HIT: P21675, EVALUE 4.80e+00
IPEEEENGTEKQPSKEEKDKNLLNIKTNIK

SEQ ID NO: 36781 - protein, 22 aa, Homo sapiens
  MAP TO AC007966.2; EXPRESSED IN BT474, SIGNAL = 0.61; EXPRESSED IN BONE MARROW, SIGNAL = 0.96; EXPRESSED IN HBL100, SIGNAL = 0.71; EXPRESSED IN ADULT LIVER, SIGNAL = 0.88; EXPRESSED IN PLACENTA, SIGNAL = 0.78; EXPRESSED IN FETAL LIVER, SIGNAL = 0.91; EXPRESSED IN LUNG, SIGNAL =   1; EXPRESSED IN HELA, SIGNAL = 1.1; EXPRESSED IN BRAIN, SIGNAL = 0.99; EXPRESSED IN HEART, SIGNAL = 1.2
SQKRKRMEQRNNLLKRKRIRIF

SEQ ID NO: 36782 - protein, 68 aa, Homo sapiens
  MAP TO AL021154.1; EXPRESSED IN BT474, SIGNAL =   7; EXPRESSED IN FETAL LIVER, SIGNAL =   9; EXPRESSED IN LUNG, SIGNAL = 7.6; EXPRESSED IN HELA, SIGNAL = 6.4; EXPRESSED IN HEART, SIGNAL = 6.2; EXPRESSED IN HBL100, SIGNAL = 5.8; EXPRESSED IN ADULT LIVER, SIGNAL = 8.4; EXPRESSED IN BRAIN, SIGNAL = 6.9; EXPRESSED IN BONE MARROW, SIGNAL = 6.1; EXPRESSED IN PLACENTA, SIGNAL = 7.8
ACRTRAAMALHRAPKPAPSLGLGGPSASPTAASSPSRRGKARGTVLGGLEVSSMTNSTGRGTYPKCPA

SEQ ID NO: 36783 - protein, 44 aa, Homo sapiens
  MAP TO AC006034.2; EXPRESSED IN PLACENTA, SIGNAL = 1.2; EXPRESSED IN BT474, SIGNAL =   1; EXPRESSED IN HBL100, SIGNAL = 0.77; EXPRESSED IN LUNG, SIGNAL = 0.79; EXPRESSED IN BRAIN, SIGNAL = 0.86; EXPRESSED IN BONE MARROW, SIGNAL = 0.78; EXPRESSED IN FETAL LIVER, SIGNAL = 0.84; EXPRESSED IN HELA, SIGNAL = 0.77; EXPRESSED IN ADULT LIVER, SIGNAL = 0.81; EXPRESSED IN HEART, SIGNAL = 0.89
TSHWQDLTKIRLAIKIWKGNLCGIRNLQHIKEEHRTEIDAEGKE

SEQ ID NO: 36784 - protein, 44 aa, Homo sapiens
  MAP TO AC010092.2; EXPRESSED IN BONE MARROW, SIGNAL = 5.1; EXPRESSED IN LUNG, SIGNAL = 7.2; EXPRESSED IN ADULT LIVER, SIGNAL = 8.7; EXPRESSED IN BT474, SIGNAL = 5.8; EXPRESSED IN BRAIN, SIGNAL = 5.9; EXPRESSED IN HEART, SIGNAL = 4.7; EXPRESSED IN HELA, SIGNAL = 7.3; EXPRESSED IN HBL100, SIGNAL = 5.3; EXPRESSED IN PLACENTA, SIGNAL = 6.6; EXPRESSED IN FETAL LIVER, SIGNAL = 6.2; EST_HUMAN HIT: AU124094.1, EVALUE 5.00e-19; SWISSPROT HIT: P34314, EVALUE 8.00e-08
NILLVDGTACGEIKITDFGLSKIMDDDSYGVDGMDLTSQGAGTY

SEQ ID NO: 36785 - protein, 23 aa, Homo sapiens
  MAP TO AC010092.2; EXPRESSED IN BONE MARROW, SIGNAL = 5.1; EXPRESSED IN LUNG, SIGNAL = 7.2; EXPRESSED IN ADULT LIVER, SIGNAL = 8.7; EXPRESSED IN BT474, SIGNAL = 5.8; EXPRESSED IN BRAIN, SIGNAL = 5.9; EXPRESSED IN HEART, SIGNAL = 4.7; EXPRESSED IN HELA, SIGNAL = 7.3; EXPRESSED IN HBL100, SIGNAL = 5.3; EXPRESSED IN PLACENTA, SIGNAL = 6.6; EXPRESSED IN FETAL LIVER, SIGNAL = 6.2; EST_HUMAN HIT: BE535751.1, EVALUE 7.00e-06
QHVVKSKSLILVCPRLWMMIAMV

SEQ ID NO: 36786 - protein, 55 aa, Homo sapiens
  MAP TO AL031657.2; EXPRESSED IN LUNG, SIGNAL = 1.1; EXPRESSED IN PLACENTA, SIGNAL = 1.1; EXPRESSED IN BT474, SIGNAL = 0.82; EXPRESSED IN BONE MARROW, SIGNAL =   1; EXPRESSED IN HBL100, SIGNAL = 0.68; EXPRESSED IN FETAL LIVER, SIGNAL = 0.91; EXPRESSED IN HELA, SIGNAL = 0.65; EXPRESSED IN ADULT LIVER, SIGNAL = 0.68; EXPRESSED IN BRAIN, SIGNAL = 0.89; EXPRESSED IN HEART, SIGNAL =   1; SWISSPROT HIT: P33125, EVALUE 5.90e+00
VGGGYLVHCEERDYEAMCDNRENVCCDQLAKPAMAEEVGSGCMHTEYAILFYIIQ

SEQ ID NO: 36787 - protein, 35 aa, Homo sapiens
  MAP TO AL024509.1; EXPRESSED IN BONE MARROW, SIGNAL = 3.8; EXPRESSED IN LUNG, SIGNAL = 4.2; EXPRESSED IN BRAIN, SIGNAL =   4; EXPRESSED IN HBL100, SIGNAL = 3.7; EXPRESSED IN PLACENTA, SIGNAL = 3.9; EXPRESSED IN HELA, SIGNAL = 4.2; EXPRESSED IN HEART, SIGNAL = 4.5; EXPRESSED IN ADULT LIVER, SIGNAL = 4.6; EXPRESSED IN BT474, SIGNAL = 3.7; EXPRESSED IN FETAL LIVER, SIGNAL = 4.8
MKKGGHLRQLKEGQYCQERPKCPIKQGDEGHAPRQ

SEQ ID NO: 36788 - protein, 55 aa, Homo sapiens
  MAP TO AC006160.9; EXPRESSED IN BONE MARROW, SIGNAL = 0.9; EXPRESSED IN LUNG, SIGNAL = 0.62; EXPRESSED IN HELA, SIGNAL = 0.91; EXPRESSED IN ADULT LIVER, SIGNAL = 0.85; EXPRESSED IN BRAIN, SIGNAL = 0.79; EXPRESSED IN PLACENTA, SIGNAL = 0.65; EXPRESSED IN FETAL LIVER, SIGNAL = 0.63; EXPRESSED IN HEART, SIGNAL = 0.99; SWISSPROT HIT: O74341, EVALUE 7.90e+00
EDLQALKQLSDLEREKLQRELQETTQQNHAMKAQLEASHQRALRMLEKARHQELK

SEQ ID NO: 36789 - protein, 40 aa, Homo sapiens
  MAP TO AC006160.9; EXPRESSED IN BONE MARROW, SIGNAL = 0.9; EXPRESSED IN LUNG, SIGNAL = 0.62; EXPRESSED IN HELA, SIGNAL = 0.91; EXPRESSED IN ADULT LIVER, SIGNAL = 0.85; EXPRESSED IN BRAIN, SIGNAL = 0.79; EXPRESSED IN PLACENTA, SIGNAL = 0.65; EXPRESSED IN FETAL LIVER, SIGNAL = 0.63; EXPRESSED IN HEART, SIGNAL = 0.99; SWISSPROT HIT: P24127, EVALUE 2.70e+00; EST_HUMAN HIT: BE464093.1, EVALUE 1.40e+00
LWSSAPATTGRTCRHSSSSRTWRGRSCSVSSRRPLSRTTP

SEQ ID NO: 36790 - protein, 32 aa, Homo sapiens
  MAP TO AC010361.2; EXPRESSED IN HBL100, SIGNAL = 1.2; EXPRESSED IN HEART, SIGNAL =   1; EXPRESSED IN ADULT LIVER, SIGNAL = 1.1; EXPRESSED IN BRAIN, SIGNAL =   1
MEKPHYQGQGLGVGYVQKGRGKKREEGQGEGE

SEQ ID NO: 36791 - protein, 61 aa, Homo sapiens
  MAP TO AL031055.1; EXPRESSED IN BT474, SIGNAL = 4.2; EXPRESSED IN FETAL LIVER, SIGNAL = 4.9; EXPRESSED IN BONE MARROW, SIGNAL = 4.4; EXPRESSED IN LUNG, SIGNAL = 4.5; EXPRESSED IN HBL100, SIGNAL = 3.8; EXPRESSED IN HELA, SIGNAL = 5.3; EXPRESSED IN HEART, SIGNAL = 4.8; EXPRESSED IN ADULT LIVER, SIGNAL = 6.2; EXPRESSED IN BRAIN, SIGNAL = 4.4; EXPRESSED IN PLACENTA, SIGNAL = 4.1; EST_HUMAN HIT: AW183729.1, EVALUE 4.50e-01; SWISSPROT HIT: P34708, EVALUE 6.70e-01
SIPSAISINGFPSPISINPKVFAMTSRAPNKPKRFCPLTLLSHPRSIHPTPVTSQTTFPNT

SEQ ID NO: 36792 - protein, 57 aa, Homo sapiens
  MAP TO AC010903.2; EXPRESSED IN LUNG, SIGNAL =   2; EXPRESSED IN HBL100, SIGNAL = 1.4; EXPRESSED IN HELA, SIGNAL = 2.1; EXPRESSED IN PLACENTA, SIGNAL = 3.2; EXPRESSED IN HEART, SIGNAL =   2; EXPRESSED IN ADULT LIVER, SIGNAL = 2.5; EXPRESSED IN BT474, SIGNAL = 1.6; EXPRESSED IN FETAL LIVER, SIGNAL = 1.1; EXPRESSED IN BONE MARROW, SIGNAL = 1.3; EXPRESSED IN BRAIN, SIGNAL = 1.5; EST_HUMAN HIT: AL079752.1, EVALUE 3.00e-10; SWISSPROT HIT: P35228, EVALUE 8.80e-01
VKTFVFHVSVHQQVTSAEEDFNNQVDRMTCSVDTTQLLFLATPVITNGPMNKVAMVA

SEQ ID NO: 36793 - protein, 56 aa, Homo sapiens
  MAP TO AP000178.1; EXPRESSED IN PLACENTA, SIGNAL =   1; EXPRESSED IN ADULT LIVER, SIGNAL = 0.91; EXPRESSED IN BONE MARROW, SIGNAL = 1.2; EXPRESSED IN HBL100, SIGNAL = 1.2; EXPRESSED IN FETAL LIVER, SIGNAL = 1.1; EXPRESSED IN LUNG, SIGNAL = 0.89; EXPRESSED IN HELA, SIGNAL = 1.3; EXPRESSED IN BRAIN, SIGNAL = 2.6; EXPRESSED IN BT474, SIGNAL = 1.2; EXPRESSED IN HEART, SIGNAL =   1; SWISSPROT HIT: Q57634, EVALUE 1.50e+00
VLDMVDVLVEGSEGLDEEIGFTLSEDMILLTFPFSAVVPAALEARNKLLLGTGNEA

SEQ ID NO: 36794 - protein, 21 aa, Homo sapiens
  MAP TO AP000178.1; EXPRESSED IN PLACENTA, SIGNAL =   1; EXPRESSED IN ADULT LIVER, SIGNAL = 0.91; EXPRESSED IN BONE MARROW, SIGNAL = 1.2; EXPRESSED IN HBL100, SIGNAL = 1.2; EXPRESSED IN FETAL LIVER, SIGNAL = 1.1; EXPRESSED IN LUNG, SIGNAL = 0.89; EXPRESSED IN HELA, SIGNAL = 1.3; EXPRESSED IN BRAIN, SIGNAL = 2.6; EXPRESSED IN BT474, SIGNAL = 1.2; EXPRESSED IN HEART, SIGNAL =   1
AGFSSFCLRCSRHGGCPGGGQ

SEQ ID NO: 36795 - protein, 91 aa, Homo sapiens
  MAP TO AC006512.12; EXPRESSED IN PLACENTA, SIGNAL = 1.3; EXPRESSED IN LUNG, SIGNAL =   1; EXPRESSED IN ADULT LIVER, SIGNAL = 1.1; EXPRESSED IN BONE MARROW, SIGNAL = 1.4; EXPRESSED IN HBL100, SIGNAL = 1.7; EXPRESSED IN FETAL LIVER, SIGNAL =   1; EXPRESSED IN HELA, SIGNAL = 1.1; EXPRESSED IN BRAIN, SIGNAL = 1.1; EXPRESSED IN HEART, SIGNAL = 0.96; EST_HUMAN HIT: BE249900.1, EVALUE 2.00e-36; SWISSPROT HIT: O14709, EVALUE 4.00e-08
FLETQSESLTPKPHFVQDTDMEQGLTRVPPVPQVPAFPHEDSPGDQAAALLTARYQQFVTSEDVAVHLTQEEWRYLDLVQRELYRDVRLEN

SEQ ID NO: 36796 - protein, 58 aa, Homo sapiens
  MAP TO AC007566.1; EXPRESSED IN BT474, SIGNAL = 2.2; EXPRESSED IN BONE MARROW, SIGNAL = 0.93; EXPRESSED IN FETAL LIVER, SIGNAL = 0.72; EXPRESSED IN HELA, SIGNAL = 1.3; EXPRESSED IN PLACENTA, SIGNAL = 0.81; EXPRESSED IN HBL100, SIGNAL = 1.2; EXPRESSED IN LUNG, SIGNAL = 0.82; EXPRESSED IN ADULT LIVER, SIGNAL = 1.3; EXPRESSED IN BRAIN, SIGNAL = 1.3; EXPRESSED IN HEART, SIGNAL = 0.96; EST_HUMAN HIT: BE272564.1, EVALUE 1.00e-26; SWISSPROT HIT: O57762, EVALUE 2.60e+00
DLEMVTEDLAQKVNRPYLRTPRHKIIKAACLVQQKRQEFLASVARGVAPADSPEAPRR

SEQ ID NO: 36797 - protein, 251 aa, Homo sapiens
  MAP TO AP000168.1; EXPRESSED IN BONE MARROW, SIGNAL = 0.84; EXPRESSED IN HEART, SIGNAL = 0.98; EXPRESSED IN BRAIN, SIGNAL = 1.1; EXPRESSED IN ADULT LIVER, SIGNAL = 0.97; EXPRESSED IN HELA, SIGNAL = 0.7; EXPRESSED IN LUNG, SIGNAL = 0.8; EXPRESSED IN FETAL LIVER, SIGNAL = 0.96; EXPRESSED IN HBL100, SIGNAL = 0.75; EXPRESSED IN BT474, SIGNAL = 0.72; EXPRESSED IN PLACENTA, SIGNAL = 0.76; SWISSPROT HIT: P46486, EVALUE 1.10e-01; EST_HUMAN HIT: AW664693.1, EVALUE 2.00e-57
MPRFASPLLRNVIIRSQFDGIKRKQCLQYLKTLRTLQYDGFKTVYFGETNIPESLVTGEDISDGYFIQTPTWCIVHAAGSQGWVPWKYRVFLRDELCIKQEDSLFSEFCDVVRKAYGKCVIVVKERRQQEEQRPKEDREAEGQFYIPTVISLASIMCCPEVAKSCGHELLSLPSPCNYLNPLDSAWSSLKWFIINNRNEFCLQSIDSGYSYQCILFSNLISKGIERINASKWRTLTSKVRRWENYYLGKFS

SEQ ID NO: 36798 - protein, 17 aa, Homo sapiens
  MAP TO AP000168.1; EXPRESSED IN BONE MARROW, SIGNAL = 0.84; EXPRESSED IN HEART, SIGNAL = 0.98; EXPRESSED IN BRAIN, SIGNAL = 1.1; EXPRESSED IN ADULT LIVER, SIGNAL = 0.97; EXPRESSED IN HELA, SIGNAL = 0.7; EXPRESSED IN LUNG, SIGNAL = 0.8; EXPRESSED IN FETAL LIVER, SIGNAL = 0.96; EXPRESSED IN HBL100, SIGNAL = 0.75; EXPRESSED IN BT474, SIGNAL = 0.72; EXPRESSED IN PLACENTA, SIGNAL = 0.76; EST_HUMAN HIT: L25181.1, EVALUE 4.40e-02
ASLCKPSFKKCHYQKSI

SEQ ID NO: 36799 - protein, 47 aa, Homo sapiens
  MAP TO AC006840.13; EXPRESSED IN HELA, SIGNAL = 0.67; EXPRESSED IN ADULT LIVER, SIGNAL = 0.82; EXPRESSED IN BRAIN, SIGNAL = 0.83; EXPRESSED IN HEART, SIGNAL = 0.88; EXPRESSED IN PLACENTA, SIGNAL = 0.75; EXPRESSED IN LUNG, SIGNAL = 2.3; EXPRESSED IN FETAL LIVER, SIGNAL = 0.68; EXPRESSED IN BONE MARROW, SIGNAL = 0.66; EST_HUMAN HIT: T79946.1, EVALUE 4.00e+00; SWISSPROT HIT: P52388, EVALUE 2.00e+00
SVQFILNQQIVEMNWIPSHEPLFSDSRTGFCCLQVFFKEFKGLPATK

SEQ ID NO: 36800 - protein, 19 aa, Homo sapiens
  MAP TO AC006840.13; EXPRESSED IN HELA, SIGNAL = 0.67; EXPRESSED IN ADULT LIVER, SIGNAL = 0.82; EXPRESSED IN BRAIN, SIGNAL = 0.83; EXPRESSED IN HEART, SIGNAL = 0.88; EXPRESSED IN PLACENTA, SIGNAL = 0.75; EXPRESSED IN LUNG, SIGNAL = 2.3; EXPRESSED IN FETAL LIVER, SIGNAL = 0.68; EXPRESSED IN BONE MARROW, SIGNAL = 0.66
LSPVHSQPANSGNELDSQP

SEQ ID NO: 36801 - protein, 38 aa, Homo sapiens
  MAP TO AC007387.2; EXPRESSED IN HELA, SIGNAL = 1.1; EXPRESSED IN ADULT LIVER, SIGNAL = 0.9; EXPRESSED IN HEART, SIGNAL = 0.81; EXPRESSED IN PLACENTA, SIGNAL = 0.85; EXPRESSED IN BRAIN, SIGNAL = 0.85; EXPRESSED IN HBL100, SIGNAL = 0.72; EXPRESSED IN LUNG, SIGNAL = 0.92; EXPRESSED IN FETAL LIVER, SIGNAL = 0.78; EXPRESSED IN BONE MARROW, SIGNAL = 0.87; EXPRESSED IN BT474, SIGNAL = 0.66; EST_HUMAN HIT: BE543176.1, EVALUE 2.90e-01; SWISSPROT HIT: P48700, EVALUE 6.20e+00
SVRASCAPWGYSWWRRILAAWLSTPAILTAGHGGVHGR

SEQ ID NO: 36802 - protein, 307 aa, Homo sapiens
  MAP TO AC006230.11; EXPRESSED IN HEART, SIGNAL = 1.1; EXPRESSED IN BRAIN, SIGNAL = 1.4; EXPRESSED IN BT474, SIGNAL = 0.71; EXPRESSED IN LUNG, SIGNAL = 1.2; EXPRESSED IN PLACENTA, SIGNAL = 0.89; EXPRESSED IN BONE MARROW, SIGNAL = 0.83; EXPRESSED IN FETAL LIVER, SIGNAL = 0.8; EST_HUMAN HIT: AI971626.1, EVALUE 1.00e-123; SWISSPROT HIT: P52849, EVALUE 7.00e-27
ATVVSSMAALLLGAVLLVAQPQLVPSRPAELGQQELLRKAGTLQDDVRDGVAPNGSAQQLPQTIIIGVRKGGTRALLEMLSLHPDVAAAENEVHFFDWEEHYSHGLGWYLSQMPFSWPHQLTVEKTPAYFTSPKVPERVYSMNPSIRLLLILRDPSERVLSDYTQVFYNHMQKHKPYPSIEEFLVRDGRLNVDYKALNRSLYHVHMQNWLRFFPLRHIHIVDGDRLIRDPFPEIQKVERFLKLSPQINASNFYFNKTKGFYCLRDSGRDRCLHESKGRAHPQVDPKLLNKLHEYFHEPNKKFFELVG

SEQ ID NO: 36803 - protein, 28 aa, Homo sapiens
  MAP TO AC006516.10; EXPRESSED IN HBL100, SIGNAL = 0.78; EXPRESSED IN ADULT LIVER, SIGNAL = 0.86; EXPRESSED IN BRAIN, SIGNAL = 0.88; EXPRESSED IN HEART, SIGNAL = 1.1; EXPRESSED IN PLACENTA, SIGNAL = 0.87; EXPRESSED IN BT474, SIGNAL = 0.78; EXPRESSED IN HELA, SIGNAL = 0.97; EXPRESSED IN LUNG, SIGNAL =   1; EXPRESSED IN FETAL LIVER, SIGNAL = 0.79; EXPRESSED IN BONE MARROW, SIGNAL = 1.7
SPDSMSGMISGAGTTAVNTTDTFCILME

SEQ ID NO: 36804 - protein, 30 aa, Homo sapiens
  MAP TO AC006516.10; EXPRESSED IN HBL100, SIGNAL = 0.78; EXPRESSED IN ADULT LIVER, SIGNAL = 0.86; EXPRESSED IN BRAIN, SIGNAL = 0.88; EXPRESSED IN HEART, SIGNAL = 1.1; EXPRESSED IN PLACENTA, SIGNAL = 0.87; EXPRESSED IN BT474, SIGNAL = 0.78; EXPRESSED IN HELA, SIGNAL = 0.97; EXPRESSED IN LUNG, SIGNAL =   1; EXPRESSED IN FETAL LIVER, SIGNAL = 0.79; EXPRESSED IN BONE MARROW, SIGNAL = 1.7
SMRIQKVSVVFTAVVPAPDIMPDIESGLCK

SEQ ID NO: 36805 - protein, 106 aa, Homo sapiens
  MAP TO AC006286.12; EXPRESSED IN BONE MARROW, SIGNAL =   1; EXPRESSED IN LUNG, SIGNAL = 1.1; EXPRESSED IN PLACENTA, SIGNAL = 0.93; EXPRESSED IN BT474, SIGNAL = 1.1; EXPRESSED IN HBL100, SIGNAL = 0.72; EXPRESSED IN FETAL LIVER, SIGNAL = 0.91; EXPRESSED IN HELA, SIGNAL = 0.82; EXPRESSED IN ADULT LIVER, SIGNAL = 0.77; EXPRESSED IN BRAIN, SIGNAL = 0.93; EXPRESSED IN HEART, SIGNAL = 0.98; EST_HUMAN HIT: AA293029.1, EVALUE 2.00e-26; SWISSPROT HIT: Q90610, EVALUE 5.00e-05
DFLKPQIRTHPETIIALRGMNVTLTCTAVSSSDSPMSTVWRKDSEILYDVDTENFVRYWQQAGEALEYTSILHLFNVNFTDEGKYQCIVTNHFGSNYSQKAKLTVN

SEQ ID NO: 36806 - protein, 17 aa, Homo sapiens
  MAP TO AL050339.4; EXPRESSED IN PLACENTA, SIGNAL = 0.64; EXPRESSED IN BONE MARROW, SIGNAL = 0.64; EXPRESSED IN FETAL LIVER, SIGNAL = 0.63; EXPRESSED IN ADULT LIVER, SIGNAL = 0.68; EXPRESSED IN BRAIN, SIGNAL = 0.73; EXPRESSED IN LUNG, SIGNAL = 0.77; EXPRESSED IN HELA, SIGNAL = 0.69; EXPRESSED IN HEART, SIGNAL = 0.8; EXPRESSED IN HBL100, SIGNAL =   1
STLLPSWEIWPSSYCLS

SEQ ID NO: 36807 - protein, 59 aa, Homo sapiens
  MAP TO AJ006998.1; EXPRESSED IN BT474, SIGNAL =   1; EXPRESSED IN BONE MARROW, SIGNAL = 0.99; EXPRESSED IN HELA, SIGNAL = 1.2; EXPRESSED IN HEART, SIGNAL = 1.1; EXPRESSED IN PLACENTA, SIGNAL =   1; EXPRESSED IN FETAL LIVER, SIGNAL = 1.7; EXPRESSED IN LUNG, SIGNAL = 1.4; EXPRESSED IN ADULT LIVER, SIGNAL =   1; EXPRESSED IN BRAIN, SIGNAL = 1.3; EXPRESSED IN HBL100, SIGNAL = 0.89; SWISSPROT HIT: P12977, EVALUE 5.90e-02
KTSYQVVNSPMEEPHNMAVKSGDNLEHLRAAKVTQVSLEVDPPRFEKLIPQADIFTETF

SEQ ID NO: 36808 - protein, 45 aa, Homo sapiens
  MAP TO AC007382.2; EXPRESSED IN BT474, SIGNAL = 0.99; EXPRESSED IN BONE MARROW, SIGNAL = 0.89; EXPRESSED IN ADULT LIVER, SIGNAL = 0.71; EXPRESSED IN PLACENTA, SIGNAL = 0.89; EXPRESSED IN BRAIN, SIGNAL = 0.98; EXPRESSED IN HBL100, SIGNAL = 0.78; EXPRESSED IN HEART, SIGNAL = 1.2; EXPRESSED IN LUNG, SIGNAL = 0.76; EXPRESSED IN FETAL LIVER, SIGNAL = 0.98; EST_HUMAN HIT: AA278505.1, EVALUE 9.00e-20; SWISSPROT HIT: P70483, EVALUE 2.00e-18
IVRKKALPDSGEDRDTKEALKEFDFLVTSEEGDNESRSAGDGTDW

SEQ ID NO: 36809 - protein, 75 aa, Homo sapiens [sequence omitted]

SEQ ID NO: 36810 - protein, 115 aa, Homo sapiens
  MAP TO AC008008.2; EXPRESSED IN HEART, SIGNAL = 0.79; EXPRESSED IN BONE MARROW, SIGNAL = 0.67; EXPRESSED IN PLACENTA, SIGNAL = 0.74; EXPRESSED IN BT474, SIGNAL = 1.2; EXPRESSED IN FETAL LIVER, SIGNAL = 0.72; EXPRESSED IN LUNG, SIGNAL = 0.93; EXPRESSED IN HELA, SIGNAL = 1.1; EXPRESSED IN BRAIN, SIGNAL = 0.82; EXPRESSED IN HBL100, SIGNAL = 2.1; EST_HUMAN HIT: AU118123.1, EVALUE 9.00e-62; SWISSPROT HIT: Q02998, EVALUE 2.80e+00
KQLHVARRSRQLLCAVQMVWDREPSDNRQTLVPHGEGGANRLRKCDVEGVEVDGVQSIIKGDRAVIIVQQDAHAPEVGGRLNGDFLAIVSHHPVIVAAAERPGSRVLPNPFMLRG

SEQ ID NO: 36811 - protein, 17 aa, Homo sapiens
  MAP TO AC008008.2; EXPRESSED IN HEART, SIGNAL = 0.79; EXPRESSED IN BONE MARROW, SIGNAL = 0.67; EXPRESSED IN PLACENTA, SIGNAL = 0.74; EXPRESSED IN BT474, SIGNAL = 1.2; EXPRESSED IN FETAL LIVER, SIGNAL = 0.72; EXPRESSED IN LUNG, SIGNAL = 0.93; EXPRESSED IN HELA, SIGNAL = 1.1; EXPRESSED IN BRAIN, SIGNAL = 0.82; EXPRESSED IN HBL100, SIGNAL = 2.1; EST_HUMAN HIT: F07967.1, EVALUE 1.10e-02
GRTLLPGRSAAATITGW

SEQ ID NO: 36812 - protein, 55 aa, Homo sapiens
  MAP TO AP000159.1; EXPRESSED IN PLACENTA, SIGNAL = 0.9; EXPRESSED IN BONE MARROW, SIGNAL = 0.75; EXPRESSED IN ADULT LIVER, SIGNAL = 1.2; EXPRESSED IN BRAIN, SIGNAL = 0.75; EXPRESSED IN BT474, SIGNAL = 0.7; EXPRESSED IN FETAL LIVER, SIGNAL = 0.76; EXPRESSED IN LUNG, SIGNAL = 1.1; EXPRESSED IN HELA, SIGNAL = 0.78; EXPRESSED IN HEART, SIGNAL = 0.88; SWISSPROT HIT: Q09268, EVALUE 6.80e+00; EST_HUMAN HIT: AW664531.1, EVALUE 2.00e-10
FYSMRENQDFFFFLFYVHFLLPPVTLFDCYDCILGWLNCSLLKLKKKILRKTIKW

SEQ ID NO: 36813 - protein, 101 aa, Homo sapiens
  MAP TO AC007465.2; EXPRESSED IN PLACENTA, SIGNAL = 1.2; EXPRESSED IN BT474, SIGNAL =   1; EXPRESSED IN BONE MARROW, SIGNAL = 1.2; EXPRESSED IN HBL100, SIGNAL = 1.2; EXPRESSED IN LUNG, SIGNAL = 1.1; EXPRESSED IN HELA, SIGNAL = 1.2; EXPRESSED IN BRAIN, SIGNAL = 1.2; EXPRESSED IN FETAL LIVER, SIGNAL = 1.3; EXPRESSED IN ADULT LIVER, SIGNAL = 1.1; EXPRESSED IN HEART, SIGNAL = 1.3; SWISSPROT HIT: Q10223, EVALUE 3.70e+00; EST_HUMAN HIT: BE616736.1, EVALUE 2.30e+00
FVYISHGSDSGFYAAIKLHVLQHPTLSCMQYLNTSAMILLKVPTITPRFLDRNQQTKASSLPNFSQYLTSLDHFTVCLLGLLPSSDIIAALPASVVQPMES

SEQ ID NO: 36814 - protein, 32 aa, Homo sapiens
  MAP TO AC007465.2; EXPRESSED IN PLACENTA, SIGNAL = 1.2; EXPRESSED IN BT474, SIGNAL =   1; EXPRESSED IN BONE MARROW, SIGNAL = 1.2; EXPRESSED IN HBL100, SIGNAL = 1.2; EXPRESSED IN LUNG, SIGNAL = 1.1; EXPRESSED IN HELA, SIGNAL = 1.2; EXPRESSED IN BRAIN, SIGNAL = 1.2; EXPRESSED IN FETAL LIVER, SIGNAL = 1.3; EXPRESSED IN ADULT LIVER, SIGNAL = 1.1; EXPRESSED IN HEART, SIGNAL = 1.3; SWISSPROT HIT: P49134, EVALUE 6.30e+00
LSFTSPMAVIPDFMLLSNCMSYSTPLSVACST

SEQ ID NO: 36815 - protein, 25 aa, Homo sapiens
  MAP TO AC007091.3; EXPRESSED IN LUNG, SIGNAL = 0.61; EXPRESSED IN PLACENTA, SIGNAL = 0.87; EXPRESSED IN HEART, SIGNAL = 1.1
KSMLNPHNNYKLNLFATDCVGFFNN

SEQ ID NO: 36816 - protein, 58 aa, Homo sapiens
  MAP TO AC007879.2; EXPRESSED IN HEART, SIGNAL = 1.1; EXPRESSED IN BONE MARROW, SIGNAL =   1; EXPRESSED IN FETAL LIVER, SIGNAL =   1; EXPRESSED IN PLACENTA, SIGNAL = 1.1; EXPRESSED IN BT474, SIGNAL = 0.97; EXPRESSED IN HBL100, SIGNAL = 2.9; EXPRESSED IN LUNG, SIGNAL =   1; EXPRESSED IN HELA, SIGNAL =   1; EXPRESSED IN ADULT LIVER, SIGNAL = 1.1; EXPRESSED IN BRAIN, SIGNAL = 1.4; SWISSPROT HIT: P20917, EVALUE 5.80e+00
NFQNGSQLLQRKTVGNGSRASTMLLMAQSMMLGGKMWMLMAMGQINCTNHDMHSKLNI

SEQ ID NO: 36817 - protein, 51 aa, Homo sapiens
  MAP TO AL049733.3; EXPRESSED IN BONE MARROW, SIGNAL = 0.97; EXPRESSED IN HELA, SIGNAL = 1.2; EXPRESSED IN ADULT LIVER, SIGNAL = 0.93; EXPRESSED IN HEART, SIGNAL = 0.92; EXPRESSED IN PLACENTA, SIGNAL = 0.91; EXPRESSED IN BT474, SIGNAL = 2.1; EXPRESSED IN HBL100, SIGNAL = 1.1; EXPRESSED IN FETAL LIVER, SIGNAL = 0.98; EXPRESSED IN LUNG, SIGNAL = 0.95; EXPRESSED IN BRAIN, SIGNAL = 1.2; EST_HUMAN HIT: AW961297.1, EVALUE 2.00e-03
FDPALGMMTGIPPITPMMPGLGIVPPPIPPDMPVVKEIIHCKSCTLFPPNP

SEQ ID NO: 36818 - protein, 25 aa, Homo sapiens
  MAP TO AL049844.6; EXPRESSED IN PLACENTA, SIGNAL = 0.59; EXPRESSED IN BONE MARROW, SIGNAL = 1.9; EXPRESSED IN HBL100, SIGNAL = 1.2; EXPRESSED IN ADULT LIVER, SIGNAL = 0.84; EXPRESSED IN BRAIN, SIGNAL = 0.71; EXPRESSED IN HEART, SIGNAL = 0.91; EXPRESSED IN BT474, SIGNAL = 0.81; EXPRESSED IN HELA, SIGNAL = 0.66; EXPRESSED IN FETAL LIVER, SIGNAL = 0.98; SWISSPROT HIT: Q10191, EVALUE 1.90e-01; EST_HUMAN HIT: BE893961.1, EVALUE 7.00e-07
VHRSQRDPLAADESAPQRVLLPTQK

SEQ ID NO: 36819 - protein, 69 aa, Homo sapiens
  MAP TO AC010978.2; EXPRESSED IN HEART, SIGNAL = 1.9; EXPRESSED IN ADULT LIVER, SIGNAL =   2; EXPRESSED IN LUNG, SIGNAL = 1.7; EXPRESSED IN BRAIN, SIGNAL =   2; EXPRESSED IN HELA, SIGNAL = 1.8; EXPRESSED IN HBL100, SIGNAL = 1.8; EXPRESSED IN PLACENTA, SIGNAL = 1.7; EXPRESSED IN BT474, SIGNAL =   2; EXPRESSED IN FETAL LIVER, SIGNAL = 1.5; EXPRESSED IN BONE MARROW, SIGNAL =   2; EST_HUMAN HIT: BF206602.1, EVALUE 1.10e+00; SWISSPROT HIT: P05319, EVALUE 3.30e+00
MTNGDNRNKEEEVREDLPEHVSFGPAGHGGAQVRTGSTRGKEDRLHHGCEQKDSEPFSDVKEVLGPHCE

SEQ ID NO: 36820 - protein, 71 aa, Homo sapiens
  MAP TO AC011743.2; EXPRESSED IN BONE MARROW, SIGNAL = 7.3; EXPRESSED IN HEART, SIGNAL =   6; EXPRESSED IN PLACENTA, SIGNAL = 7.5; EXPRESSED IN ADULT LIVER, SIGNAL =  11; EXPRESSED IN BRAIN, SIGNAL = 6.4; EXPRESSED IN HELA, SIGNAL =   8; EXPRESSED IN HBL100, SIGNAL = 8.2; EXPRESSED IN BT474, SIGNAL = 6.4; EXPRESSED IN FETAL LIVER, SIGNAL = 7.6; EXPRESSED IN LUNG, SIGNAL =  10; EST_HUMAN HIT: AW246442.1, EVALUE 9.00e-12; SWISSPROT HIT: P11634, EVALUE 5.60e+00
VPFSATMSPVRLHSSNPNLCADIEFQTPPSHLTDPLESSTDYTKLQEEFCLIAQKGKNKNNAPFKEALFFD

SEQ ID NO: 36821 - protein, 47 aa, Homo sapiens
  MAP TO AC011036.2; EXPRESSED IN FETAL LIVER, SIGNAL = 1.2; EXPRESSED IN LUNG, SIGNAL = 1.3; EXPRESSED IN BONE MARROW, SIGNAL = 1.3; EXPRESSED IN HELA, SIGNAL = 1.2; EXPRESSED IN HEART, SIGNAL = 1.1; EXPRESSED IN PLACENTA, SIGNAL = 1.9; EXPRESSED IN BT474, SIGNAL = 1.2; EXPRESSED IN ADULT LIVER, SIGNAL = 1.4; EXPRESSED IN BRAIN, SIGNAL = 1.3; EXPRESSED IN HBL100, SIGNAL = 1.4; EST_HUMAN HIT: H90358.1, EVALUE 5.00e-06; SWISSPROT HIT: P02719, EVALUE 2.70e+00
KHFASFVFTWNCCKLEDTNFTKRLNKQGPKISSNTTDNKGPRKGQNQ

SEQ ID NO: 36822 - protein, 23 aa, Homo sapiens
  MAP TO AC011036.2; EXPRESSED IN FETAL LIVER, SIGNAL = 1.2; EXPRESSED IN LUNG, SIGNAL = 1.3; EXPRESSED IN BONE MARROW, SIGNAL = 1.3; EXPRESSED IN HELA, SIGNAL = 1.2; EXPRESSED IN HEART, SIGNAL = 1.1; EXPRESSED IN PLACENTA, SIGNAL = 1.9; EXPRESSED IN BT474, SIGNAL = 1.2; EXPRESSED IN ADULT LIVER, SIGNAL = 1.4; EXPRESSED IN BRAIN, SIGNAL = 1.3; EXPRESSED IN HBL100, SIGNAL = 1.4; EST_HUMAN HIT: N31698.1, EVALUE 1.10e-01
NILPALSLHGIVVSWKTPTLQRG

SEQ ID NO: 36823 - protein, 45 aa, Homo sapiens
  MAP TO AC011186.2; EXPRESSED IN LUNG, SIGNAL = 2.1; EXPRESSED IN BONE MARROW, SIGNAL = 2.1; EXPRESSED IN HEART, SIGNAL = 1.7; EXPRESSED IN PLACENTA, SIGNAL = 1.7; EXPRESSED IN ADULT LIVER, SIGNAL = 2.2; EXPRESSED IN BRAIN, SIGNAL =   2; EXPRESSED IN HELA, SIGNAL = 1.9; EXPRESSED IN HBL100, SIGNAL = 2.2; EXPRESSED IN BT474, SIGNAL = 2.1; EXPRESSED IN FETAL LIVER, SIGNAL = 2.1; EST_HUMAN HIT: AV706557.1, EVALUE 4.00e+00; SWISSPROT HIT: P39503, EVALUE 6.10e+00
PHWLLLLPCQTRPLHWLHQTHKPRWPLFTAVLSLELFFLFLEGQL

SEQ ID NO: 36824 - protein, 34 aa, Homo sapiens
  MAP TO AC012061.2; EXPRESSED IN HBL100, SIGNAL = 1.4; EXPRESSED IN ADULT LIVER, SIGNAL = 2.2; EXPRESSED IN FETAL LIVER, SIGNAL = 1.4; EXPRESSED IN LUNG, SIGNAL = 1.3; EXPRESSED IN HEART, SIGNAL = 1.3; EXPRESSED IN HELA, SIGNAL = 1.2; EXPRESSED IN PLACENTA, SIGNAL = 1.3; EXPRESSED IN BT474, SIGNAL = 1.3; EXPRESSED IN BRAIN, SIGNAL = 1.2; EXPRESSED IN BONE MARROW, SIGNAL = 1.2; SWISSPROT HIT: P08566, EVALUE 6.30e+00; EST_HUMAN HIT: AW663302.1, EVALUE 2.30e-02
DVSVSQGFRMLFYTMKPSETSFQTLEEVPDYVKK

SEQ ID NO: 36825 - protein, 167 aa, Homo sapiens
  MAP TO AP000014.2; EXPRESSED IN PLACENTA, SIGNAL = 2.4; EXPRESSED IN ADULT LIVER, SIGNAL = 2.5; EXPRESSED IN LUNG, SIGNAL = 2.6; EXPRESSED IN HBL100, SIGNAL = 2.3; EXPRESSED IN HEART, SIGNAL = 1.5; EXPRESSED IN FETAL LIVER, SIGNAL = 1.5; EXPRESSED IN BT474, SIGNAL = 2.9; EXPRESSED IN BRAIN, SIGNAL = 2.7; EXPRESSED IN BONE MARROW, SIGNAL = 3.1; EXPRESSED IN HELA, SIGNAL = 1.9; EST_HUMAN HIT: M78731.1, EVALUE 2.00e-42; SWISSPROT HIT: P48550, EVALUE 3.00e-91
TETTIGYGYRVITDKCPEGIILLLIQSVLGSIVNAFMVGCMFVKISQPKKRAETLVFSTHAVISMRDGKLCLMFRVGDLRNSHIVEASIRAKLIKSKQTSEGEFIPLNQTDINVGYYTGDDRLFLVSPLIISHEINQQSPFWEISKAQLPKEELEIVVILEGMVEAT

SEQ ID NO: 36826 - protein, 52 aa, Homo sapiens
  MAP TO AC007785.1; EXPRESSED IN PLACENTA, SIGNAL = 0.9; EXPRESSED IN LUNG, SIGNAL = 0.78; EXPRESSED IN HELA, SIGNAL = 0.89; EXPRESSED IN HEART, SIGNAL = 0.94; EXPRESSED IN BT474, SIGNAL = 0.83; EXPRESSED IN BONE MARROW, SIGNAL = 1.2; EXPRESSED IN HBL100, SIGNAL = 0.73; EXPRESSED IN FETAL LIVER, SIGNAL = 0.95; EXPRESSED IN BRAIN, SIGNAL = 0.98; EXPRESSED IN ADULT LIVER, SIGNAL = 0.9; EST_HUMAN HIT: BE122850.1, EVALUE 1.00e-26
ETRRCGSTCTFWPCFELCCPESFGPQQKFLVKLRVLGMKSQCHLSPISRSCT

SEQ ID NO: 36827 - protein, 30 aa, Homo sapiens
  MAP TO AC007785.1; EXPRESSED IN PLACENTA, SIGNAL = 0.9; EXPRESSED IN LUNG, SIGNAL = 0.78; EXPRESSED IN HELA, SIGNAL = 0.89; EXPRESSED IN HEART, SIGNAL = 0.94; EXPRESSED IN BT474, SIGNAL = 0.83; EXPRESSED IN BONE MARROW, SIGNAL = 1.2; EXPRESSED IN HBL100, SIGNAL = 0.73; EXPRESSED IN FETAL LIVER, SIGNAL = 0.95; EXPRESSED IN BRAIN, SIGNAL = 0.98; EXPRESSED IN ADULT LIVER, SIGNAL = 0.9
RPAAVAPPAPSGPALSSAVPSLLAPSRSFL

SEQ ID NO: 36828 - protein, 67 aa, Homo sapiens
  MAP TO AC010197.7; EXPRESSED IN PLACENTA, SIGNAL = 1.2; EXPRESSED IN HBL100, SIGNAL = 1.2; EXPRESSED IN BRAIN, SIGNAL = 1.5; EXPRESSED IN HELA, SIGNAL = 3.4; EXPRESSED IN HEART, SIGNAL =   3; EST_HUMAN HIT: BF214479.1, EVALUE 7.00e-19; SWISSPROT HIT: P07195, EVALUE 9.00e-18
CKMATLKEKLIAPVAEEEATVPNNKITVVGVGQVGMACAISILGKVHFKNTIDDREVQHVYTVSLGT

SEQ ID NO: 36829 - protein, 34 aa, Homo sapiens [sequence omitted]

SEQ ID NO: 36830 - protein, 41 aa, Homo sapiens
  MAP TO AC011208.2; EXPRESSED IN PLACENTA, SIGNAL =  12; EXPRESSED IN HEART, SIGNAL =   6; EXPRESSED IN HBL100, SIGNAL =  20; EXPRESSED IN FETAL LIVER, SIGNAL = 8.7; EXPRESSED IN BT474, SIGNAL = 9.7; EXPRESSED IN ADULT LIVER, SIGNAL =   3; EXPRESSED IN LUNG, SIGNAL =   7; EXPRESSED IN BONE MARROW, SIGNAL = 9.2; EXPRESSED IN BRAIN, SIGNAL = 7.4; EXPRESSED IN HELA, SIGNAL =  16; EST_HUMAN HIT: AA634090.1, EVALUE 3.00e-11; SWISSPROT HIT: P39414, EVALUE 8.00e+00
TAATGTTPATLVLWFGKVLASTTIGARASASKIYSLHGSKI

SEQ ID NO: 36831 - protein, 75 aa, Homo sapiens
  MAP TO AC011208.2; EXPRESSED IN PLACENTA, SIGNAL =  12; EXPRESSED IN HEART, SIGNAL =   6; EXPRESSED IN HBL100, SIGNAL =  20; EXPRESSED IN FETAL LIVER, SIGNAL = 8.7; EXPRESSED IN BT474, SIGNAL = 9.7; EXPRESSED IN ADULT LIVER, SIGNAL =   3; EXPRESSED IN LUNG, SIGNAL =   7; EXPRESSED IN BONE MARROW, SIGNAL = 9.2; EXPRESSED IN BRAIN, SIGNAL = 7.4; EXPRESSED IN HELA, SIGNAL =  16; SWISSPROT HIT: P35961, EVALUE 9.10e+00; EST_HUMAN HIT: AI921212.1, EVALUE 2.00e-15
VVWQSTGFHHHRGQSFCLQNLLSSWVQNLKTVAIAKITVASTTSKIASIITKSMMTIPAATISTITMAATKATMT

SEQ ID NO: 36832 - protein, 60 aa, Homo sapiens
  MAP TO AL121838.2; EXPRESSED IN HELA, SIGNAL = 1.3; EXPRESSED IN HBL100, SIGNAL = 1.4; EXPRESSED IN FETAL LIVER, SIGNAL = 2.1; EXPRESSED IN HEART, SIGNAL =   2; EXPRESSED IN LUNG, SIGNAL = 1.6; EXPRESSED IN PLACENTA, SIGNAL = 2.5; EXPRESSED IN BRAIN, SIGNAL = 1.1; SWISSPROT HIT: P40305, EVALUE 7.00e-09; EST_HUMAN HIT: AW473943.1, EVALUE 1.00e-08
VAVPMVLSAMGFTAAGIASSSIAAKMMSAAAIANGGGVASGSLVATLQSLGKYPGGACWG

SEQ ID NO: 36833 - protein, 65 aa, Homo sapiens [sequence omitted]

SEQ ID NO: 36834 - protein, 90 aa, Homo sapiens
  MAP TO AC006549.20; EXPRESSED IN HELA, SIGNAL = 0.78; EXPRESSED IN HEART, SIGNAL = 0.85; EXPRESSED IN PLACENTA, SIGNAL = 0.82; EXPRESSED IN BT474, SIGNAL = 0.77; EXPRESSED IN BONE MARROW, SIGNAL =   1; EXPRESSED IN HBL100, SIGNAL = 0.8; EXPRESSED IN FETAL LIVER, SIGNAL = 0.82; EXPRESSED IN LUNG, SIGNAL = 0.91; EXPRESSED IN BRAIN, SIGNAL = 1.4; EXPRESSED IN ADULT LIVER, SIGNAL = 0.88; EST_HUMAN HIT: AW630249.1, EVALUE 6.80e-02; SWISSPROT HIT: P21263, EVALUE 7.40e-01
LRSPSYGPWRNRPLTHPNPTGVLGREISRWGPQLPVGPSSPGPPDHSYSGTRPLLPVCWGPSMVWRSQQPPPSSQRRNPRPRRVSLAPNT

SEQ ID NO: 36835 - protein, 76 aa, Homo sapiens
  MAP TO AL096801.16; EXPRESSED IN LUNG, SIGNAL = 2.6; EXPRESSED IN BRAIN, SIGNAL = 1.6; EXPRESSED IN HELA, SIGNAL = 1.4; EXPRESSED IN PLACENTA, SIGNAL = 2.5; EXPRESSED IN HEART, SIGNAL =   2; EXPRESSED IN FETAL LIVER, SIGNAL =   2; EXPRESSED IN ADULT LIVER, SIGNAL = 2.6; EXPRESSED IN BT474, SIGNAL = 2.3; EXPRESSED IN BONE MARROW, SIGNAL = 2.1; EXPRESSED IN HBL100, SIGNAL =   2; EST_HUMAN HIT: AU133604.1, EVALUE 5.00e-38
SQWKDIYQFLCNASEREVAAFSNGYTADHERAYAALQHWTIRGPEASLAQLISALRQHRRNDVVEKIRGLMEDTTQ

SEQ ID NO: 36836 - protein, 38 aa, Homo sapiens
  MAP TO AL096814.11; EXPRESSED IN BT474, SIGNAL = 7.7; EXPRESSED IN BRAIN, SIGNAL = 8.6; EXPRESSED IN HEART, SIGNAL = 6.2; EXPRESSED IN ADULT LIVER, SIGNAL = 6.3; EXPRESSED IN FETAL LIVER, SIGNAL = 6.3; EXPRESSED IN LUNG, SIGNAL = 8.3; EXPRESSED IN BONE MARROW, SIGNAL = 6.7; EXPRESSED IN HELA, SIGNAL = 7.9; EXPRESSED IN PLACENTA, SIGNAL =  12; EXPRESSED IN HBL100, SIGNAL =  10; EST_HUMAN HIT: BE616514.1, EVALUE 3.20e+00
PEPGLQGECEDQILAKGFTGPDTHTSVCWKHYPTKLSH

SEQ ID NO: 36837 - protein, 60 aa, Homo sapiens
  MAP TO AC011997.2; EXPRESSED IN ADULT LIVER, SIGNAL = 1.2; EXPRESSED IN BT474, SIGNAL = 0.93; EXPRESSED IN BRAIN, SIGNAL = 1.7; EXPRESSED IN HELA, SIGNAL = 0.97; EXPRESSED IN HEART, SIGNAL = 0.99; EXPRESSED IN PLACENTA, SIGNAL = 0.98; EXPRESSED IN HBL100, SIGNAL = 1.2; EXPRESSED IN FETAL LIVER, SIGNAL = 0.97
QKRRGRGRRRKKKRKKRKKKEEGEGEEEEEEEEEEEEEEEEEEEEEEEEEEEEEEGVILL

SEQ ID NO: 36838 - protein, 20 aa, Homo sapiens
  MAP TO AC007092.3; EXPRESSED IN PLACENTA, SIGNAL = 4.6; EXPRESSED IN FETAL LIVER, SIGNAL = 3.4; EXPRESSED IN HELA, SIGNAL =   4; EXPRESSED IN ADULT LIVER, SIGNAL = 2.9; EXPRESSED IN BRAIN, SIGNAL = 4.6; EXPRESSED IN BT474, SIGNAL = 3.8; EXPRESSED IN HEART, SIGNAL = 3.1; EXPRESSED IN LUNG, SIGNAL = 3.9; EXPRESSED IN HBL100, SIGNAL = 3.5; EXPRESSED IN BONE MARROW, SIGNAL = 4.4
LSQEMAPPWRPMTIRTWESL

SEQ ID NO: 36839 - protein, 37 aa, Homo sapiens [sequence omitted]

SEQ ID NO: 36840 - protein, 123 aa, Homo sapiens
  MAP TO AL121755.4; EXPRESSED IN BONE MARROW, SIGNAL =   5; EXPRESSED IN LUNG, SIGNAL = 3.3; EXPRESSED IN BRAIN, SIGNAL = 5.4; EXPRESSED IN HELA, SIGNAL = 5.5; EXPRESSED IN HBL100, SIGNAL = 7.2; EXPRESSED IN PLACENTA, SIGNAL = 3.5; EXPRESSED IN HEART, SIGNAL = 5.6; EXPRESSED IN ADULT LIVER, SIGNAL = 2.7; EXPRESSED IN BT474, SIGNAL = 5.8; EXPRESSED IN FETAL LIVER, SIGNAL = 2.6; EST_HUMAN HIT: BE279525.1, EVALUE 3.00e-04; SWISSPROT HIT: P97295, EVALUE 5.00e-09
YGDYDLPMDEDEDMTKTRTFFAAKIVIGIALAGIMLVCGIGNFVFIAALTRYKKLRNLTNLLIANLAISDFLVAIICCPFEMDYYVVRQLSWEHGHVLCASVNYLRTVSLYVSTNALLAIAID

SEQ ID NO: 36841 - protein, 24 aa, Homo sapiens
  MAP TO AC007313.3; EXPRESSED IN PLACENTA, SIGNAL = 0.9; EXPRESSED IN HELA, SIGNAL = 0.84; EXPRESSED IN BRAIN, SIGNAL = 0.88; EXPRESSED IN HEART, SIGNAL = 0.8; EXPRESSED IN BT474, SIGNAL = 0.65; EXPRESSED IN ADULT LIVER, SIGNAL = 0.88; EXPRESSED IN LUNG, SIGNAL = 0.95; EXPRESSED IN FETAL LIVER, SIGNAL = 0.87; EXPRESSED IN HBL100, SIGNAL = 0.73; EXPRESSED IN BONE MARROW, SIGNAL = 0.75
QSGSASALNWSTKRLRLTSSMKPS

SEQ ID NO: 36842 - protein, 38 aa, Homo sapiens
  MAP TO AC012143.1; EXPRESSED IN BONE MARROW, SIGNAL = 1.3; EXPRESSED IN HELA, SIGNAL =  14; EXPRESSED IN PLACENTA, SIGNAL = 1.7; EXPRESSED IN HEART, SIGNAL = 1.4; EXPRESSED IN HBL100, SIGNAL = 1.8; EXPRESSED IN FETAL LIVER, SIGNAL = 1.4; EXPRESSED IN BT474, SIGNAL = 1.7; EXPRESSED IN ADULT LIVER, SIGNAL = 1.4; EXPRESSED IN LUNG, SIGNAL = 1.8
VRWHHLPLMVLTATRTDRCLPTESQKSADGQENVSTLL

SEQ ID NO: 36843 - protein, 62 aa, Homo sapiens
  MAP TO AC012277.1; EXPRESSED IN HBL100, SIGNAL = 5.6; EXPRESSED IN FETAL LIVER, SIGNAL = 5.9; EXPRESSED IN BT474, SIGNAL = 5.5; EXPRESSED IN LUNG, SIGNAL = 5.6; EXPRESSED IN PLACENTA, SIGNAL = 5.5; EXPRESSED IN HEART, SIGNAL = 4.9; EXPRESSED IN HELA, SIGNAL = 5.6; EXPRESSED IN ADULT LIVER, SIGNAL =   7; EXPRESSED IN BRAIN, SIGNAL = 6.6; EXPRESSED IN BONE MARROW, SIGNAL = 6.1; EST_HUMAN HIT: AW859759.1, EVALUE 9.00e-08; SWISSPROT HIT: P33450, EVALUE 2.00e+00
EIYLKESTPTIVDTSKYNICKTGCQAADLGNSWCCNLNPNTVGRQNSLFLRVPQSFCYMTFN

SEQ ID NO: 36844 - protein, 171 aa, Homo sapiens; identical to SEQ ID NO: 34988
  MAP TO AL096774.8; EXPRESSED IN LUNG, SIGNAL = 9.4; EXPRESSED IN BRAIN, SIGNAL = 2.6; EXPRESSED IN HBL100, SIGNAL = 3.4; EXPRESSED IN HELA, SIGNAL = 2.3; EXPRESSED IN PLACENTA, SIGNAL =   4; EXPRESSED IN ADULT LIVER, SIGNAL = 2.1; EXPRESSED IN BONE MARROW, SIGNAL =  16; EXPRESSED IN HEART, SIGNAL = 4.3; EXPRESSED IN BT474, SIGNAL = 4.7; EXPRESSED IN FETAL LIVER, SIGNAL = 2.5; SWISSPROT HIT: Q92558, EVALUE 4.10e-01; EST_HUMAN HIT: AW500022.1, EVALUE 2.00e-12

SEQ ID NO: 36845 - protein, 22 aa, Homo sapiens
  MAP TO AC008170.1; EXPRESSED IN BRAIN, SIGNAL = 1.2; EXPRESSED IN PLACENTA, SIGNAL = 0.66; EXPRESSED IN HELA, SIGNAL = 1.1; EXPRESSED IN ADULT LIVER, SIGNAL = 0.83; EXPRESSED IN HEART, SIGNAL = 0.92; EXPRESSED IN BT474, SIGNAL = 0.62; EXPRESSED IN FETAL LIVER, SIGNAL = 0.8; EXPRESSED IN LUNG, SIGNAL = 1.1; EXPRESSED IN BONE MARROW, SIGNAL = 0.87
LGFNSVSASCCVTMRTTRAETA

SEQ ID NO: 36846 - protein, 114 aa, Homo sapiens; identical to SEQ ID NO: 35330
  MAP TO AL109613.11; EXPRESSED IN BT474, SIGNAL = 4.1; EXPRESSED IN BRAIN, SIGNAL = 3.4; EXPRESSED IN HBL100, SIGNAL = 4.2; EXPRESSED IN HELA, SIGNAL = 3.6; EXPRESSED IN PLACENTA, SIGNAL = 5.2; EXPRESSED IN FETAL LIVER, SIGNAL = 2.6; EXPRESSED IN LUNG, SIGNAL = 4.1; EXPRESSED IN BONE MARROW, SIGNAL =   4; EXPRESSED IN HEART, SIGNAL = 3.3; EXPRESSED IN ADULT LIVER, SIGNAL = 3.7; SWISSPROT HIT: O13993, EVALUE 2.00e+00; EST_HUMAN HIT: BE720648.1, EVALUE 2.00e-44

SEQ ID NO: 36847 - protein, 18 aa, Homo sapiens
  MAP TO AL109613.11; EXPRESSED IN BT474, SIGNAL = 4.1; EXPRESSED IN BRAIN, SIGNAL = 3.4; EXPRESSED IN HBL100, SIGNAL = 4.2; EXPRESSED IN HELA, SIGNAL = 3.6; EXPRESSED IN PLACENTA, SIGNAL = 5.2; EXPRESSED IN FETAL LIVER, SIGNAL = 2.6; EXPRESSED IN LUNG, SIGNAL = 4.1; EXPRESSED IN BONE MARROW, SIGNAL =   4; EXPRESSED IN HEART, SIGNAL = 3.3; EXPRESSED IN ADULT LIVER, SIGNAL = 3.7; EST_HUMAN HIT: BE720648.1, EVALUE 1.00e-03
RVCDAPPGDCLLLQAQRV

SEQ ID NO: 36848 - protein, 44 aa, Homo sapiens
  MAP TO AF001905.1; EXPRESSED IN PLACENTA, SIGNAL = 2.5; EXPRESSED IN FETAL LIVER, SIGNAL = 1.2; EXPRESSED IN HEART, SIGNAL = 1.5; EXPRESSED IN HELA, SIGNAL = 1.4; EXPRESSED IN HBL100, SIGNAL = 1.3; EXPRESSED IN ADULT LIVER, SIGNAL = 1.9; EXPRESSED IN BT474, SIGNAL = 1.4; EXPRESSED IN BRAIN, SIGNAL = 1.3; EXPRESSED IN LUNG, SIGNAL = 1.3; EXPRESSED IN BONE MARROW, SIGNAL = 1.3; EST_HUMAN HIT: AA403053.1, EVALUE 2.00e-13; SWISSPROT HIT: P25362, EVALUE 2.70e+00
HPTSQGANGGVLLAAKYFYANYAFWHWGNDHKRSLGTHWIHCKS

SEQ ID NO: 36849 - protein, 17 aa, Homo sapiens
  MAP TO AC012140.1; EXPRESSED IN BONE MARROW, SIGNAL = 2.1; EXPRESSED IN FETAL LIVER, SIGNAL = 1.7; EXPRESSED IN PLACENTA, SIGNAL = 1.8; EXPRESSED IN HEART, SIGNAL = 1.8; EXPRESSED IN HELA, SIGNAL = 1.8; EXPRESSED IN HBL100, SIGNAL = 2.3; EXPRESSED IN BT474, SIGNAL = 1.8; EXPRESSED IN ADULT LIVER, SIGNAL = 1.7; EXPRESSED IN BRAIN, SIGNAL = 2.1; EXPRESSED IN LUNG, SIGNAL = 2.3; EST_HUMAN HIT: AI652176.1, EVALUE 1.70e-02
AAGQPLPQAEQPRTLVH

SEQ ID NO: 36850 - protein, 40 aa, Homo sapiens
  MAP TO AC012140.1; EXPRESSED IN BONE MARROW, SIGNAL = 2.1; EXPRESSED IN FETAL LIVER, SIGNAL = 1.7; EXPRESSED IN PLACENTA, SIGNAL = 1.8; EXPRESSED IN HEART, SIGNAL = 1.8; EXPRESSED IN HELA, SIGNAL = 1.8; EXPRESSED IN HBL100, SIGNAL = 2.3; EXPRESSED IN BT474, SIGNAL = 1.8; EXPRESSED IN ADULT LIVER, SIGNAL = 1.7; EXPRESSED IN BRAIN, SIGNAL = 2.1; EXPRESSED IN LUNG, SIGNAL = 2.3; EST_HUMAN HIT: AW589833.1, EVALUE 1.00e-04; SWISSPROT HIT: Q92125, EVALUE 8.10e+00
EKPGEMPGQAMSAEPGGACQEAAVATLTVVVLTQESDSQG

SEQ ID NO: 36851 - protein, 88 aa, Homo sapiens
  MAP TO AC012668.1; EXPRESSED IN ADULT LIVER, SIGNAL = 1.6; EXPRESSED IN LUNG, SIGNAL = 4.1; EXPRESSED IN PLACENTA, SIGNAL =  32; EXPRESSED IN HBL100, SIGNAL =   1; EXPRESSED IN HEART, SIGNAL = 1.5; EXPRESSED IN FETAL LIVER, SIGNAL = 2.6; EST_HUMAN HIT: AU140694.1, EVALUE 2.00e-45; SWISSPROT HIT: P02751, EVALUE 2.00e-46
LDAPTNLQFVNETDSTVLVRWTPPRAQITGYRLTVGLTRRGQPRQYNVGPSVSKYPLRNLQPASEYTVSLVAIKGNQESPKATGVFTT

SEQ ID NO: 36852 - protein, 19 aa, Homo sapiens
  MAP TO AC012668.1; EXPRESSED IN ADULT LIVER, SIGNAL = 1.6; EXPRESSED IN LUNG, SIGNAL = 4.1; EXPRESSED IN PLACENTA, SIGNAL =  32; EXPRESSED IN HBL100, SIGNAL =   1; EXPRESSED IN HEART, SIGNAL = 1.5; EXPRESSED IN FETAL LIVER, SIGNAL = 2.6; EST_HUMAN HIT: AU140940.1, EVALUE 1.00e-03
NWMLPLTSSLSMKLILLSW

SEQ ID NO: 36853 - protein, 33 aa, Homo sapiens
  MAP TO AC012678.1; EXPRESSED IN PLACENTA, SIGNAL = 8.2; EXPRESSED IN HEART, SIGNAL = 6.6; EXPRESSED IN ADULT LIVER, SIGNAL = 9.9; EXPRESSED IN LUNG, SIGNAL = 9.3; EXPRESSED IN HELA, SIGNAL = 8.8; EXPRESSED IN HBL100, SIGNAL =   8; EXPRESSED IN BT474, SIGNAL = 7.9; EXPRESSED IN FETAL LIVER, SIGNAL = 8.8; EXPRESSED IN BRAIN, SIGNAL = 7.4; EXPRESSED IN BONE MARROW, SIGNAL = 8.6; SWISSPROT HIT: Q06879, EVALUE 8.20e+00
MENVDQAITKKDQSQVLTQSKEEKEKQLLASSL

SEQ ID NO: 36854 - protein, 78 aa, Homo sapiens
  MAP TO AL109748.2; EXPRESSED IN PLACENTA, SIGNAL = 1.9; EXPRESSED IN HEART, SIGNAL = 2.2; EXPRESSED IN BT474, SIGNAL = 1.6; EXPRESSED IN LUNG, SIGNAL = 1.5; EXPRESSED IN BRAIN, SIGNAL = 1.9; EXPRESSED IN HELA, SIGNAL = 1.6; EXPRESSED IN HBL100, SIGNAL = 1.8; EXPRESSED IN FETAL LIVER, SIGNAL = 1.7; EXPRESSED IN BONE MARROW, SIGNAL = 1.6; EST_HUMAN HIT: AW131856.1, EVALUE 9.00e-32; SWISSPROT HIT: P24793, EVALUE 6.60e-01
LIRIIPPFVNTNIFARTKIDPSALVQKLELDVRSVTSIRRGAEAKTVLPKEKMKLRREQWLQKIEAIKLAEQKHREER

SEQ ID NO: 36855 - protein, 48 aa, Homo sapiens
  MAP TO AL109748.2; EXPRESSED IN PLACENTA, SIGNAL = 1.9; EXPRESSED IN HEART, SIGNAL = 2.2; EXPRESSED IN BT474, SIGNAL = 1.6; EXPRESSED IN LUNG, SIGNAL = 1.5; EXPRESSED IN BRAIN, SIGNAL = 1.9; EXPRESSED IN HELA, SIGNAL = 1.6; EXPRESSED IN HBL100, SIGNAL = 1.8; EXPRESSED IN FETAL LIVER, SIGNAL = 1.7; EXPRESSED IN BONE MARROW, SIGNAL = 1.6; EST_HUMAN HIT: AW328155.1, EVALUE 5.00e-11
GGRGPGWWWGTCTRSGMPCLSYWGLRLAAGARPAAGRATSPGPQSSAG

SEQ ID NO: 36856 - protein, 45 aa, Homo sapiens
  MAP TO AL079338.13; EXPRESSED IN BONE MARROW, SIGNAL = 1.3; EXPRESSED IN HBL100, SIGNAL = 1.7; EXPRESSED IN PLACENTA, SIGNAL = 1.6; EXPRESSED IN HEART, SIGNAL = 1.4; EXPRESSED IN LUNG, SIGNAL = 1.5; EXPRESSED IN HELA, SIGNAL = 1.8; EXPRESSED IN ADULT LIVER, SIGNAL =   2; EXPRESSED IN BT474, SIGNAL = 1.4; EXPRESSED IN FETAL LIVER, SIGNAL = 1.6; EXPRESSED IN BRAIN, SIGNAL =   1; SWISSPROT HIT: Q9Z7H2, EVALUE 4.60e+00
SRQKQSDGGGMIEHTTRKADCRRTILQQQLEKGFQVFLSSQQFAY

SEQ ID NO: 36857 - protein, 52 aa, Homo sapiens
  MAP TO AC007158.5; EXPRESSED IN HBL100, SIGNAL = 5.4; EXPRESSED IN HELA, SIGNAL = 7.2; EXPRESSED IN LUNG, SIGNAL = 8.2; EXPRESSED IN BRAIN, SIGNAL = 6.2; EXPRESSED IN PLACENTA, SIGNAL =   7; EXPRESSED IN HEART, SIGNAL = 4.8; EXPRESSED IN BT474, SIGNAL = 5.2; EXPRESSED IN ADULT LIVER, SIGNAL = 5.6; EXPRESSED IN FETAL LIVER, SIGNAL = 6.2; EXPRESSED IN BONE MARROW, SIGNAL = 4.2; SWISSPROT HIT: P55268, EVALUE 7.80e+00; EST_HUMAN HIT: BE972100.1, EVALUE 6.50e+00
VARNRVHSQGNPKNGLSPGRACKVVLSVLNVPQLEGLFPTQCLDHCQEDLSS

SEQ ID NO: 36858 - protein, 47 aa, Homo sapiens
  MAP TO AL132719.1; EXPRESSED IN BT474, SIGNAL = 9.1; EXPRESSED IN FETAL LIVER, SIGNAL = 5.6; EXPRESSED IN BONE MARROW, SIGNAL =  14; EXPRESSED IN LUNG, SIGNAL = 5.6; EXPRESSED IN BRAIN, SIGNAL = 5.8; EXPRESSED IN HBL100, SIGNAL = 7.1; EXPRESSED IN HELA, SIGNAL = 4.5; EXPRESSED IN PLACENTA, SIGNAL = 5.9; EXPRESSED IN ADULT LIVER, SIGNAL = 6.1; EXPRESSED IN HEART, SIGNAL = 5.5; SWISSPROT HIT: O83256, EVALUE 4.70e+00
MKKNQAKMVQGTQGFHAATETTLGHLSPHRRNTETPPEGGSQGLLIP

SEQ ID NO: 36859 - protein, 114 aa, Homo sapiens
  MAP TO AL121752.2; EXPRESSED IN BONE MARROW, SIGNAL = 2.9; EXPRESSED IN HELA, SIGNAL = 1.6; EXPRESSED IN PLACENTA, SIGNAL = 2.4; EXPRESSED IN HEART, SIGNAL = 1.8; EXPRESSED IN ADULT LIVER, SIGNAL = 2.1; EXPRESSED IN LUNG, SIGNAL = 2.1; EXPRESSED IN BRAIN, SIGNAL = 1.5; EXPRESSED IN HBL100, SIGNAL = 1.9; EXPRESSED IN BT474, SIGNAL = 2.2; EXPRESSED IN FETAL LIVER, SIGNAL = 1.4; EST_HUMAN HIT: AU119732.1, EVALUE 3.00e-47; SWISSPROT HIT: P51512, EVALUE 3.00e-48
IHNYTPKVGELDTRKAIRQAFDVWQKVTPLTFEEVPYHEIKSDRKEADIMIFFASGFHGDSSPFDGEGGFLAHAYFPGPGIGGDTHFDSDEPWTLGNANHDGKAMRGQGSVLGC

SEQ ID NO: 36860 - protein, 75 aa, Homo sapiens
  MAP TO AL035451.5; EXPRESSED IN BRAIN, SIGNAL = 5.6; EXPRESSED IN BONE MARROW, SIGNAL = 5.3; EXPRESSED IN HBL100, SIGNAL = 5.9; EXPRESSED IN PLACENTA, SIGNAL =   7; EXPRESSED IN LUNG, SIGNAL = 5.5; EXPRESSED IN HEART, SIGNAL =   5; EXPRESSED IN HELA, SIGNAL = 5.1; EXPRESSED IN ADULT LIVER, SIGNAL = 7.7; EXPRESSED IN BT474, SIGNAL =   6; EXPRESSED IN FETAL LIVER, SIGNAL = 6.1; SWISSPROT HIT: P31948, EVALUE 5.00e-31; EST_HUMAN HIT: BE618953.1, EVALUE 4.00e-30
DVYRKALDPDSSCKEAADGYQRCMMAQYNRHHSPEDVKRRAMADPEVQQIMSDIAMHLILEQMQKDPPGTQRTLK

SEQ ID NO: 36861 - protein, 111 aa, Homo sapiens
  MAP TO AL078582.7; EXPRESSED IN BT474, SIGNAL = 1.1; EXPRESSED IN BRAIN, SIGNAL = 1.8; EXPRESSED IN BONE MARROW, SIGNAL = 1.4; EXPRESSED IN HBL100, SIGNAL = 1.1; EXPRESSED IN HEART, SIGNAL = 1.3; EXPRESSED IN PLACENTA, SIGNAL = 1.1; EXPRESSED IN FETAL LIVER, SIGNAL = 1.2; EXPRESSED IN LUNG, SIGNAL = 1.7; EXPRESSED IN HELA, SIGNAL = 1.5; EXPRESSED IN ADULT LIVER, SIGNAL = 1.8; EST_HUMAN HIT: AI640322.1, EVALUE 5.00e-46; SWISSPROT HIT: P47291, EVALUE 8.30e-01
LPDDEHDLSDRELELEDSAALSDLHWHDRSADSLLSPQPSSNLSLSLAQPLRSERSGRDTPASVDSIPLEWDHDYDLSRDLESAMSRALPSEDEEGQDDKDFYLRGAVGLS

SEQ ID NO: 36862 - protein, 34 aa, Homo sapiens
  MAP TO AL078594.14; EXPRESSED IN PLACENTA, SIGNAL =  22; EXPRESSED IN ADULT LIVER, SIGNAL =  26; EXPRESSED IN LUNG, SIGNAL =  24; EXPRESSED IN BRAIN, SIGNAL =  16; EXPRESSED IN BONE MARROW, SIGNAL =  18; EXPRESSED IN HEART, SIGNAL =  15; EXPRESSED IN HELA, SIGNAL =  22; EXPRESSED IN HBL100, SIGNAL =  20; EXPRESSED IN BT474, SIGNAL =  18; EXPRESSED IN FETAL LIVER, SIGNAL =  22; EST_HUMAN HIT: AL079862.1, EVALUE 4.00e-04
MYFLTFWKLDVQNQGVSRAVFPLKLVEESFLFSS

SEQ ID NO: 36863 - protein, 130 aa, Homo sapiens
  MAP TO AL121755.4; EXPRESSED IN PLACENTA, SIGNAL = 1.3; EXPRESSED IN ADULT LIVER, SIGNAL = 1.2; EXPRESSED IN HEART, SIGNAL = 1.3; EXPRESSED IN BT474, SIGNAL = 2.1; EXPRESSED IN FETAL LIVER, SIGNAL = 0.97; EXPRESSED IN BONE MARROW, SIGNAL = 2.2; EXPRESSED IN LUNG, SIGNAL = 1.3; EXPRESSED IN BRAIN, SIGNAL = 1.7; EXPRESSED IN HBL100, SIGNAL = 1.4; EXPRESSED IN HELA, SIGNAL = 1.2; EST_HUMAN HIT: AA151699.1, EVALUE 6.80e-01; SWISSPROT HIT: P28834, EVALUE 1.20e+00
NVVTAVGAWPAHGSILGNVPEAPVGADVLGAGGCDWADKEALAPGQRAKVHILLESSGQSDPSYAVLPDSWAATEGFPTYRSQVSSPRIPGSSIWLGSGSGWPILGELRECDQMFSCMLPTGCASFQDPG

SEQ ID NO: 36864 - protein, 66 aa, Homo sapiens
  MAP TO AC011308.2; EXPRESSED IN BONE MARROW, SIGNAL = 1.1; EXPRESSED IN HBL100, SIGNAL = 0.93; EXPRESSED IN HEART, SIGNAL =   1; EXPRESSED IN PLACENTA, SIGNAL =   1; EXPRESSED IN ADULT LIVER, SIGNAL = 1.1; EXPRESSED IN BT474, SIGNAL = 1.1; EXPRESSED IN BRAIN, SIGNAL = 1.1; SWISSPROT HIT: Q02487, EVALUE 3.80e-01; EST_HUMAN HIT: T85726.1, EVALUE 8.00e-05
MLTLTDQETIVIEKTVVIHSSQENGAQNSMQVLKGKHQGSQEADGVGGKHGQEALLWFLQERMGEA

SEQ ID NO: 36865 - protein, 104 aa, Homo sapiens
  MAP TO AL035467.21; EXPRESSED IN BONE MARROW, SIGNAL = 3.8; EXPRESSED IN PLACENTA, SIGNAL = 4.2; EXPRESSED IN BRAIN, SIGNAL = 3.7; EXPRESSED IN LUNG, SIGNAL = 3.9; EXPRESSED IN HEART, SIGNAL =   3; EXPRESSED IN HELA, SIGNAL =   5; EXPRESSED IN HBL100, SIGNAL = 4.6; EXPRESSED IN ADULT LIVER, SIGNAL = 4.7; EXPRESSED IN BT474, SIGNAL = 4.2; EXPRESSED IN FETAL LIVER, SIGNAL = 3.9; EST_HUMAN HIT: BF339061.1, EVALUE 4.30e+00; SWISSPROT HIT: O00214, EVALUE 2.30e+00
RKRILLSGSRVLTQQVPALGAYGTHSITNVQFLQSTVVSSTQQPVALSSNPPLPRSEFVAERFQLLWHVRHLLRSVPAGYGSQRTQLPRPLSLYMVCYGAPPVN

SEQ ID NO: 36866 - protein, 58 aa, Homo sapiens
  MAP TO AL035467.21; EXPRESSED IN BONE MARROW, SIGNAL = 3.8; EXPRESSED IN PLACENTA, SIGNAL = 4.2; EXPRESSED IN BRAIN, SIGNAL = 3.7; EXPRESSED IN LUNG, SIGNAL = 3.9; EXPRESSED IN HEART, SIGNAL =   3; EXPRESSED IN HELA, SIGNAL =   5; EXPRESSED IN HBL100, SIGNAL = 4.6; EXPRESSED IN ADULT LIVER, SIGNAL = 4.7; EXPRESSED IN BT474, SIGNAL = 4.2; EXPRESSED IN FETAL LIVER, SIGNAL = 3.9; SWISSPROT HIT: P75403, EVALUE 4.50e+00
KFTAWEGRVAGKSYWLLSATDYCRLQKLDIGDAVSTISTQCWNLLSEYPGTRKQNSFP

SEQ ID NO: 36867 - protein, 79 aa, Homo sapiens
  MAP TO AL078623.24; EXPRESSED IN BT474, SIGNAL =   2; EXPRESSED IN FETAL LIVER, SIGNAL = 2.2; EXPRESSED IN BRAIN, SIGNAL =   2; EXPRESSED IN BONE MARROW, SIGNAL = 2.3; EXPRESSED IN HBL100, SIGNAL = 2.7; EXPRESSED IN PLACENTA, SIGNAL = 1.9; EXPRESSED IN LUNG, SIGNAL = 2.2; EXPRESSED IN HEART, SIGNAL = 1.6; EXPRESSED IN HELA, SIGNAL = 2.2; EXPRESSED IN ADULT LIVER, SIGNAL = 2.5; EST_HUMAN HIT: AL040217.1, EVALUE 2.60e+00; SWISSPROT HIT: P39285, EVALUE 2.00e+00
MLKPKPCQVYLMFSLKQNCLLSPAKATPDTDLQTWEMLVVVRHPVLRWLIIQHYYGNSQLMHGIDKTSFIKSACSVDLN

SEQ ID NO: 36868 - protein, 40 aa, Homo sapiens
  MAP TO AL109741.3; EXPRESSED IN HBL100, SIGNAL = 8.1; EXPRESSED IN BT474, SIGNAL =  15; EXPRESSED IN FETAL LIVER, SIGNAL = 5.7; EXPRESSED IN ADULT LIVER, SIGNAL = 2.2; EXPRESSED IN BRAIN, SIGNAL = 5.4; EXPRESSED IN BONE MARROW, SIGNAL = 3.5; EXPRESSED IN LUNG, SIGNAL = 8.8; EXPRESSED IN PLACENTA, SIGNAL = 4.2; EXPRESSED IN HELA, SIGNAL =  15; EXPRESSED IN HEART, SIGNAL = 1.9; SWISSPROT HIT: P54674, EVALUE 8.10e+00; EST_HUMAN HIT: AA341221.1, EVALUE 2.00e-03
AQSMKVFVVFGNLSANSLKKMRPKDWLLMAMSKNTVELTM

SEQ ID NO: 36869 - protein, 48 aa, Homo sapiens
  MAP TO AC007114.7; EXPRESSED IN BONE MARROW, SIGNAL =   4; EXPRESSED IN HBL100, SIGNAL = 3.7; EXPRESSED IN HELA, SIGNAL = 4.2; EXPRESSED IN BRAIN, SIGNAL =   4; EXPRESSED IN LUNG, SIGNAL = 4.6; EXPRESSED IN PLACENTA, SIGNAL = 5.3; EXPRESSED IN HEART, SIGNAL = 4.2; EXPRESSED IN BT474, SIGNAL = 3.6; EXPRESSED IN ADULT LIVER, SIGNAL = 6.5; EXPRESSED IN FETAL LIVER, SIGNAL = 4.9
RDRRRKVLIVVGGAVATRNGMGALGVSGSSSPGGCPGWRRLPAAVNTN

SEQ ID NO: 36870 - protein, 67 aa, Homo sapiens
  MAP TO AL110502.1; EXPRESSED IN HELA, SIGNAL = 0.93; EXPRESSED IN HEART, SIGNAL = 1.2; EXPRESSED IN BT474, SIGNAL = 1.1; SWISSPROT HIT: Q01441, EVALUE 3.00e+00; EST_HUMAN HIT: BE257700.1, EVALUE 4.00e-37
KLEAVDRKNPHFICPATIGEVRGSEVLVTFDGWRGAFDYWCRFDSRDIFPVGWCSLTGDNLQPPGTK

SEQ ID NO: 36871 - protein, 30 aa, Homo sapiens
  MAP TO AL110502.1; EXPRESSED IN HELA, SIGNAL = 0.93; EXPRESSED IN HEART, SIGNAL = 1.2; EXPRESSED IN BT474, SIGNAL = 1.1; EST_HUMAN HIT: BE256221.1, EVALUE 6.00e-13
EARSCGQEEPSFHLPSHYWGGSGLRGACHF

SEQ ID NO: 36872 - protein, 151 aa, Homo sapiens
  MAP TO AL096776.12; EXPRESSED IN ADULT LIVER, SIGNAL = 5.1; EXPRESSED IN BRAIN, SIGNAL = 4.4; EXPRESSED IN BONE MARROW, SIGNAL = 4.6; EXPRESSED IN PLACENTA, SIGNAL = 5.4; EXPRESSED IN HELA, SIGNAL =   5; EXPRESSED IN HBL100, SIGNAL = 4.5; EXPRESSED IN BT474, SIGNAL = 4.6; EXPRESSED IN FETAL LIVER, SIGNAL = 4.7; EXPRESSED IN LUNG, SIGNAL = 5.8; EXPRESSED IN HEART, SIGNAL = 3.5; EST_HUMAN HIT: AW298134.1, EVALUE 5.00e-86; SWISSPROT HIT: P25763, EVALUE 6.00e-39
DEFDKLRPLCYTNTDIFLLCFSVVSPSSFQNVSEKWVPEIRCHCPKAPIILVGTQSDLREDVKVLIELDKCKEKPVPEEAAKLCAEEIKAASYIECSALTQKNLKEVFDAAIVAGIQYSDTQQQPKKSKSRTPDKMKNLSKSWWKKYCCFV

SEQ ID NO: 36873 - protein, 18 aa, Homo sapiens
  MAP TO AL096776.12; EXPRESSED IN ADULT LIVER, SIGNAL = 5.1; EXPRESSED IN BRAIN, SIGNAL = 4.4; EXPRESSED IN BONE MARROW, SIGNAL = 4.6; EXPRESSED IN PLACENTA, SIGNAL = 5.4; EXPRESSED IN HELA, SIGNAL =   5; EXPRESSED IN HBL100, SIGNAL = 4.5; EXPRESSED IN BT474, SIGNAL = 4.6; EXPRESSED IN FETAL LIVER, SIGNAL = 4.7; EXPRESSED IN LUNG, SIGNAL = 5.8; EXPRESSED IN HEART, SIGNAL = 3.5; EST_HUMAN HIT: AI124646.1, EVALUE 3.00e-03
HLPALLQCREPLILPERQ

SEQ ID NO: 36874 - protein, 46 aa, Homo sapiens
  MAP TO AP000051.1; EXPRESSED IN PLACENTA, SIGNAL = 0.86; EXPRESSED IN BT474, SIGNAL = 0.64; EXPRESSED IN BONE MARROW, SIGNAL = 0.79; EXPRESSED IN HBL100, SIGNAL = 0.7; EXPRESSED IN LUNG, SIGNAL =   1; EXPRESSED IN HEART, SIGNAL = 0.81; EXPRESSED IN FETAL LIVER, SIGNAL = 0.8; EXPRESSED IN HELA, SIGNAL = 0.99; EXPRESSED IN ADULT LIVER, SIGNAL = 0.84; EXPRESSED IN BRAIN, SIGNAL = 0.89; SWISSPROT HIT: P34641, EVALUE 1.80e-01
SELLVHYCNEDMHRDPNQSSRVIMLWYLLENAVVRQPRCGGNHELV

SEQ ID NO: 36875 - protein, 28 aa, Homo sapiens
  MAP TO AL049539.19; EXPRESSED IN BT474, SIGNAL = 2.3; EXPRESSED IN FETAL LIVER, SIGNAL = 2.9; EXPRESSED IN BONE MARROW, SIGNAL = 2.4; EXPRESSED IN LUNG, SIGNAL = 2.5; EXPRESSED IN BRAIN, SIGNAL = 2.6; EXPRESSED IN PLACENTA, SIGNAL = 3.3; EXPRESSED IN HBL100, SIGNAL = 2.3; EXPRESSED IN HELA, SIGNAL = 2.2; EXPRESSED IN HEART, SIGNAL = 2.2; EXPRESSED IN ADULT LIVER, SIGNAL = 2.4; EST_HUMAN HIT: AV659818.1, EVALUE 4.00e-08
GTALQGVLAVGPAQLQAEQGGPEITDPL

SEQ ID NO: 36876 - protein, 88 aa, Homo sapiens
  MAP TO AL109755.14; EXPRESSED IN PLACENTA, SIGNAL = 1.3; EXPRESSED IN HELA, SIGNAL = 1.9; EXPRESSED IN FETAL LIVER, SIGNAL = 1.6; EXPRESSED IN ADULT LIVER, SIGNAL = 1.8; EXPRESSED IN BT474, SIGNAL = 1.3; EXPRESSED IN BRAIN, SIGNAL = 1.5; EXPRESSED IN HEART, SIGNAL = 1.2; EXPRESSED IN HBL100, SIGNAL = 1.4; EXPRESSED IN LUNG, SIGNAL = 1.3; EXPRESSED IN BONE MARROW, SIGNAL = 1.2; EST_HUMAN HIT: BE299522.1, EVALUE 1.50e+00; SWISSPROT HIT: P41180, EVALUE 8.20e+00
ADRHASGGSGVSLGTGAAASLFSHNHACTQFTISSGYFYIELEKLLHVTLKLPIKFVSRVIRFGLGFISCKKNQLAFQNSTFQSAVLS

SEQ ID NO: 36877 - protein, 73 aa, Homo sapiens
  MAP TO AL109614.15; EXPRESSED IN PLACENTA, SIGNAL = 5.2; EXPRESSED IN HELA, SIGNAL =  17; EXPRESSED IN HEART, SIGNAL = 3.2; EXPRESSED IN HBL100, SIGNAL =  13; EXPRESSED IN BT474, SIGNAL =  13; EXPRESSED IN FETAL LIVER, SIGNAL = 6.1; EXPRESSED IN ADULT LIVER, SIGNAL = 3.6; EXPRESSED IN BRAIN, SIGNAL = 6.2; EXPRESSED IN BONE MARROW, SIGNAL = 4.1; EXPRESSED IN LUNG, SIGNAL = 8.4; EST_HUMAN HIT: BE300363.1, EVALUE 1.00e-30; SWISSPROT HIT: P16152, EVALUE 8.20e+00
FLFHNHKLCNPPGHGREQGKHETQRELQREHKDSRILGANGVEGCSPELQKEWSGGEDKTQVKLIGVVYSQQW

SEQ ID NO: 36878 - protein, 52 aa, Homo sapiens
  MAP TO AC007198.6; EXPRESSED IN BT474, SIGNAL = 7.1; EXPRESSED IN ADULT LIVER, SIGNAL =  10; EXPRESSED IN PLACENTA, SIGNAL = 9.2; EXPRESSED IN HBL100, SIGNAL = 8.4; EXPRESSED IN HELA, SIGNAL = 7.6; EXPRESSED IN FETAL LIVER, SIGNAL = 8.7; EXPRESSED IN BRAIN, SIGNAL = 6.7; EXPRESSED IN LUNG, SIGNAL = 9.7; EXPRESSED IN BONE MARROW, SIGNAL = 8.5; EXPRESSED IN HEART, SIGNAL = 7.3; EST_HUMAN HIT: W27050.1, EVALUE 5.70e+00
ISRRIALTSKEIRFTPGTRNCVQTRGTRSRPVDPREPRWSTFLQHSFSLCTT

SEQ ID NO: 36879 - protein, 43 aa, Homo sapiens
  MAP TO AF178220.1; EXPRESSED IN HEART, SIGNAL = 0.9; EST_HUMAN HIT: AF121169.1, EVALUE 9.30e-01
HTQHLSAGDPQFPWNALGWDYLEMAYFGSPDPGEFPLSYSAQQ

SEQ ID NO: 36880 - protein, 47 aa, Homo sapiens
  MAP TO AC007321.1; EXPRESSED IN LUNG, SIGNAL = 1.6; EXPRESSED IN HBL100, SIGNAL = 1.4; EXPRESSED IN HEART, SIGNAL = 2.6; EXPRESSED IN BONE MARROW, SIGNAL = 1.3; EXPRESSED IN PLACENTA, SIGNAL = 1.2; EXPRESSED IN HELA, SIGNAL = 1.6; EXPRESSED IN BT474, SIGNAL = 1.4; EXPRESSED IN ADULT LIVER, SIGNAL = 1.4; EXPRESSED IN FETAL LIVER, SIGNAL = 1.6; EXPRESSED IN BRAIN, SIGNAL = 1.3; SWISSPROT HIT: P11553, EVALUE 3.50e+00; EST_HUMAN HIT: BE048846.1, EVALUE 5.00e-20
NTLNITNNNYYSVEVENITAQVQFSKTVIGKARLNNITIIGPLDMKQ

SEQ ID NO: 36881 - protein, 25 aa, Homo sapiens
  MAP TO AC007321.1; EXPRESSED IN LUNG, SIGNAL = 1.6; EXPRESSED IN HBL100, SIGNAL = 1.4; EXPRESSED IN HEART, SIGNAL = 2.6; EXPRESSED IN BONE MARROW, SIGNAL = 1.3; EXPRESSED IN PLACENTA, SIGNAL = 1.2; EXPRESSED IN HELA, SIGNAL = 1.6; EXPRESSED IN BT474, SIGNAL = 1.4; EXPRESSED IN ADULT LIVER, SIGNAL = 1.4; EXPRESSED IN FETAL LIVER, SIGNAL = 1.6; EXPRESSED IN BRAIN, SIGNAL = 1.3; EST_HUMAN HIT: BE048846.1, EVALUE 9.00e-07
TITLSKLKTSLPKFNFQKQLLERHA

SEQ ID NO: 36882 - protein, 33 aa, Homo sapiens
  MAP TO AC008109.1; EXPRESSED IN PLACENTA, SIGNAL = 0.94; EXPRESSED IN BT474, SIGNAL = 1.2; EXPRESSED IN HBL100, SIGNAL = 1.3; EXPRESSED IN HELA, SIGNAL = 1.8; EXPRESSED IN LUNG, SIGNAL = 0.62; EXPRESSED IN FETAL LIVER, SIGNAL = 1.3; EXPRESSED IN ADULT LIVER, SIGNAL = 1.4; EXPRESSED IN BRAIN, SIGNAL = 0.92; EXPRESSED IN HEART, SIGNAL = 1.1; EST_HUMAN HIT: AI792146.1, EVALUE 3.50e-01
TEIVSQISTDSIAQGRKGKGAPQHFGDEQIVAE

SEQ ID NO: 36883 - protein, 44 aa, Homo sapiens
  MAP TO AC007567.1; EXPRESSED IN PLACENTA, SIGNAL = 0.83; EXPRESSED IN HEART, SIGNAL = 0.98; EXPRESSED IN BT474, SIGNAL = 0.72; EXPRESSED IN BONE MARROW, SIGNAL = 0.69; EXPRESSED IN HBL100, SIGNAL = 0.74; EXPRESSED IN BRAIN, SIGNAL = 0.95; SWISSPROT HIT: Q44845, EVALUE 3.50e+00
SSVISVGHMGGTQEMVVELNAINTYVTEIQALFKALSRFLTSKN

SEQ ID NO: 36884 - protein, 33 aa, Homo sapiens
  MAP TO AL118508.9; EXPRESSED IN PLACENTA, SIGNAL = 4.5; EXPRESSED IN FETAL LIVER, SIGNAL = 4.6; EXPRESSED IN ADULT LIVER, SIGNAL =   5; EXPRESSED IN BT474, SIGNAL = 4.2; EXPRESSED IN HEART, SIGNAL = 3.5; EXPRESSED IN HELA, SIGNAL = 5.1; EXPRESSED IN HBL100, SIGNAL = 4.6; EXPRESSED IN BRAIN, SIGNAL = 4.5; EXPRESSED IN LUNG, SIGNAL = 4.9; EXPRESSED IN BONE MARROW, SIGNAL = 4.3; SWISSPROT HIT: P17278, EVALUE 6.40e-02; EST_HUMAN HIT: AW859485.1, EVALUE 1.00e+00
CSLQGSHTRPKGHQHPPGSHEPKASAHCPAPQS

SEQ ID NO: 36885 - protein, 65 aa, Homo sapiens
  MAP TO AL109837.15; EXPRESSED IN BONE MARROW, SIGNAL = 1.5; EXPRESSED IN FETAL LIVER, SIGNAL = 1.4; EXPRESSED IN ADULT LIVER, SIGNAL = 1.8; EXPRESSED IN BT474, SIGNAL = 1.5; EXPRESSED IN LUNG, SIGNAL = 1.4; EXPRESSED IN PLACENTA, SIGNAL = 1.2; EXPRESSED IN HEART, SIGNAL = 1.2; EXPRESSED IN HELA, SIGNAL = 1.5; EXPRESSED IN HBL100, SIGNAL = 1.3; EXPRESSED IN BRAIN, SIGNAL =   1; SWISSPROT HIT: P53988, EVALUE 5.70e+00; EST_HUMAN HIT: BF207168.1, EVALUE 4.40e+00
GKGAGIFILPIPDITGCELIMKGIFFPVLPITCMDKVGSGSQRKSSGKEKGVRNSGKLGKNGKAQ

SEQ ID NO: 36886 - protein, 18 aa, Homo sapiens
  MAP TO AL109837.15; EXPRESSED IN BONE MARROW, SIGNAL = 1.5; EXPRESSED IN FETAL LIVER, SIGNAL = 1.4; EXPRESSED IN ADULT LIVER, SIGNAL = 1.8; EXPRESSED IN BT474, SIGNAL = 1.5; EXPRESSED IN LUNG, SIGNAL = 1.4; EXPRESSED IN PLACENTA, SIGNAL = 1.2; EXPRESSED IN HEART, SIGNAL = 1.2; EXPRESSED IN HELA, SIGNAL = 1.5; EXPRESSED IN HBL100, SIGNAL = 1.3; EXPRESSED IN BRAIN, SIGNAL =   1
VRELEYLSYQSQILLVAS

SEQ ID NO: 36887 - protein, 35 aa, Homo sapiens
  MAP TO AC008085.1; EXPRESSED IN HELA, SIGNAL =   1; EXPRESSED IN FETAL LIVER, SIGNAL = 0.82; EXPRESSED IN LUNG, SIGNAL = 0.81; EXPRESSED IN HEART, SIGNAL =   1; EXPRESSED IN BT474, SIGNAL = 0.92; EXPRESSED IN ADULT LIVER, SIGNAL = 0.98; EXPRESSED IN BRAIN, SIGNAL =   1; EXPRESSED IN PLACENTA, SIGNAL = 1.1; EXPRESSED IN BONE MARROW, SIGNAL = 0.68; EXPRESSED IN HBL100, SIGNAL = 0.87
IQQGRYYVITMEKMVPTELHEFIQGYSENKWQEIS

SEQ ID NO: 36888 - protein, 46 aa, Homo sapiens
  MAP TO AC007557.1; EXPRESSED IN BT474, SIGNAL = 0.77; EXPRESSED IN FETAL LIVER, SIGNAL = 0.57; EXPRESSED IN BONE MARROW, SIGNAL = 0.7; EXPRESSED IN LUNG, SIGNAL = 0.61; EXPRESSED IN ADULT LIVER, SIGNAL = 0.66; EXPRESSED IN HEART, SIGNAL = 0.84; EXPRESSED IN PLACENTA, SIGNAL = 0.66; EST_HUMAN HIT: AW002620.1, EVALUE 2.00e-09; SWISSPROT HIT: P09430, EVALUE 3.00e-10
MSTSRKLKSHGMRRSKSRSPHKGVKRGGSKRKYRKGNLKSRKRGDD

SEQ ID NO: 36889 - protein, 107 aa, Homo sapiens
  MAP TO AC007993.8; EXPRESSED IN HEART, SIGNAL = 0.98; EXPRESSED IN HBL100, SIGNAL = 1.2; EXPRESSED IN BT474, SIGNAL = 1.5; EXPRESSED IN FETAL LIVER, SIGNAL = 1.2; EXPRESSED IN ADULT LIVER, SIGNAL = 1.5; EXPRESSED IN BRAIN, SIGNAL = 0.99; EXPRESSED IN BONE MARROW, SIGNAL = 1.6; EXPRESSED IN LUNG, SIGNAL = 1.8; EXPRESSED IN PLACENTA, SIGNAL = 1.1; EXPRESSED IN HELA, SIGNAL = 1.2; EST_HUMAN HIT: BE080485.1, EVALUE 9.00e-15; SWISSPROT HIT: Q92793, EVALUE 6.20e+00
FPQEVEPSLTQQEIPAQIPEPPMEAEPSPTQQEATVQTPEPPKEVEPSSQQMVPSQPPEPPKEVAAQPPAHYEVTVPTQGQDQAQHSILPSITVQPLDLGLTITPES

SEQ ID NO: 36890 - protein, 26 aa, Homo sapiens
  MAP TO AC007160.3; EXPRESSED IN BT474, SIGNAL = 1.4; EXPRESSED IN HBL100, SIGNAL = 0.81; EXPRESSED IN FETAL LIVER, SIGNAL = 1.2; EXPRESSED IN HELA, SIGNAL = 0.81; EXPRESSED IN PLACENTA, SIGNAL = 0.85; EXPRESSED IN HEART, SIGNAL = 1.2; EXPRESSED IN ADULT LIVER, SIGNAL = 0.78; EXPRESSED IN LUNG, SIGNAL = 0.75; EXPRESSED IN BONE MARROW, SIGNAL = 0.91
RGTCVTDGKVDSWASSAGATESKSLG

SEQ ID NO: 36891 - protein, 25 aa, Homo sapiens
  MAP TO AC007160.3; EXPRESSED IN BT474, SIGNAL = 1.4; EXPRESSED IN HBL100, SIGNAL = 0.81; EXPRESSED IN FETAL LIVER, SIGNAL = 1.2; EXPRESSED IN HELA, SIGNAL = 0.81; EXPRESSED IN PLACENTA, SIGNAL = 0.85; EXPRESSED IN HEART, SIGNAL = 1.2; EXPRESSED IN ADULT LIVER, SIGNAL = 0.78; EXPRESSED IN LUNG, SIGNAL = 0.75; EXPRESSED IN BONE MARROW, SIGNAL = 0.91
LGILIQWLQRRRPRNLPFHQSHRCP

SEQ ID NO: 36892 - protein, 43 aa, Homo sapiens
  MAP TO AC007336.2; EXPRESSED IN PLACENTA, SIGNAL =   5; EXPRESSED IN HELA, SIGNAL = 4.7; EXPRESSED IN HEART, SIGNAL = 3.8; EXPRESSED IN HBL100, SIGNAL = 3.8; EXPRESSED IN BT474, SIGNAL = 4.2; EXPRESSED IN FETAL LIVER, SIGNAL = 3.8; EXPRESSED IN ADULT LIVER, SIGNAL = 5.7; EXPRESSED IN BONE MARROW, SIGNAL = 4.4; EXPRESSED IN BRAIN, SIGNAL = 3.7; EXPRESSED IN LUNG, SIGNAL = 2.8; EST_HUMAN HIT: BE160632.1, EVALUE 8.20e-02
LVCGSRYTFSLGPPEIQDDCILKSLTAYICKDSLSKYGHLSEV

SEQ ID NO: 36893 - protein, 141 aa, Homo sapiens
  MAP TO AL050327.6; EXPRESSED IN PLACENTA, SIGNAL = 1.1; EXPRESSED IN FETAL LIVER, SIGNAL = 0.96; EXPRESSED IN LUNG, SIGNAL = 0.94; EXPRESSED IN HBL100, SIGNAL = 0.88; EXPRESSED IN ADULT LIVER, SIGNAL = 0.88; EXPRESSED IN HEART, SIGNAL = 0.9; EXPRESSED IN BT474, SIGNAL = 0.9; EXPRESSED IN BONE MARROW, SIGNAL = 1.1; EXPRESSED IN HELA, SIGNAL = 1.1; EXPRESSED IN BRAIN, SIGNAL = 0.98; EST_HUMAN HIT: AI123597.1, EVALUE 1.20e-01; SWISSPROT HIT: P22105, EVALUE 2.30e+00
GRKGRKREARRRRKNKRKRKKMRESRHKGKDTAGGSENKRVKRKRHSERDKAASDCGRASSSCTPKKPGPNTKLRSALSWEPGGLWLGYRGENHPKFSVKGGTKPRGACMAGRLKPTCGLLTQHCKDAWSIDSQHGIPNQK

SEQ ID NO: 36894 - protein, 33 aa, Homo sapiens
  MAP TO AL031297.4; EXPRESSED IN FETAL LIVER, SIGNAL = 0.93; EXPRESSED IN PLACENTA, SIGNAL = 0.97; EXPRESSED IN BONE MARROW, SIGNAL =  19; EXPRESSED IN HBL100, SIGNAL = 0.87; EXPRESSED IN ADULT LIVER, SIGNAL = 1.4; EXPRESSED IN HEART, SIGNAL = 1.2; EXPRESSED IN BT474, SIGNAL = 1.1; EXPRESSED IN LUNG, SIGNAL = 0.71; EXPRESSED IN HELA, SIGNAL = 0.59
PYCTSSEMTVSATNTQQHLICASVLAFITNHSL

SEQ ID NO: 36895 - protein, 43 aa, Homo sapiens
  MAP TO AL109855.8; EXPRESSED IN ADULT LIVER, SIGNAL = 9.1; EXPRESSED IN BT474, SIGNAL = 6.3; EXPRESSED IN BRAIN, SIGNAL =   5; EXPRESSED IN HELA, SIGNAL = 6.3; EXPRESSED IN FETAL LIVER, SIGNAL = 6.7; EXPRESSED IN LUNG, SIGNAL = 6.3; EXPRESSED IN BONE MARROW, SIGNAL = 6.8; EXPRESSED IN PLACENTA, SIGNAL = 7.4; EXPRESSED IN HEART, SIGNAL = 5.9; EXPRESSED IN HBL100, SIGNAL = 7.1; EST_HUMAN HIT: AI819036.1, EVALUE 8.20e-02
KSHIWSLVPAWADDAHAYNPNDDRAGAEAVPNTQPNLQYQAAD

SEQ ID NO: 36896 - protein, 24 aa, Homo sapiens
  MAP TO AL031057.10; EXPRESSED IN FETAL LIVER, SIGNAL = 0.8; EXPRESSED IN PLACENTA, SIGNAL = 1.6; EXPRESSED IN BT474, SIGNAL = 0.7; EXPRESSED IN BONE MARROW, SIGNAL = 0.89; EXPRESSED IN HELA, SIGNAL = 0.63; EXPRESSED IN HEART, SIGNAL = 0.78; EXPRESSED IN LUNG, SIGNAL = 0.63
PNVKSDLASTRSKGNRHASTLITK

SEQ ID NO: 36897 - protein, 104 aa, Homo sapiens
  MAP TO AL118519.5; EXPRESSED IN PLACENTA, SIGNAL =   1; EXPRESSED IN HEART, SIGNAL = 0.99; EXPRESSED IN ADULT LIVER, SIGNAL = 1.4; EXPRESSED IN BT474, SIGNAL =   1; EXPRESSED IN HELA, SIGNAL = 1.3; EXPRESSED IN HBL100, SIGNAL = 1.2; EXPRESSED IN FETAL LIVER, SIGNAL = 1.1; EXPRESSED IN LUNG, SIGNAL = 1.2; EXPRESSED IN BONE MARROW, SIGNAL = 1.5; EST_HUMAN HIT: AW835049.1, EVALUE 3.00e-04; SWISSPROT HIT: P13944, EVALUE 6.00e-07
ISIVVDGGKKVVEFMFQATEGDVLNYIFRNRELRPLFDRQWHKLGISIQSQVISLYMDCNLIARRQTDEKDTVDFHGRTVIATRASDGKPVDVSCDVSCERELK

SEQ ID NO: 36898 - protein, 89 aa, Homo sapiens
  MAP TO AC007455.7; EXPRESSED IN HBL100, SIGNAL = 0.9; EXPRESSED IN FETAL LIVER, SIGNAL = 0.87; EXPRESSED IN BRAIN, SIGNAL = 1.1; EXPRESSED IN HEART, SIGNAL =   1; EXPRESSED IN BT474, SIGNAL = 0.9; EXPRESSED IN BONE MARROW, SIGNAL = 1.1; EXPRESSED IN LUNG, SIGNAL = 1.2; EXPRESSED IN PLACENTA, SIGNAL = 1.2; EXPRESSED IN ADULT LIVER, SIGNAL = 1.2; EXPRESSED IN HELA, SIGNAL = 1.1; EST_HUMAN HIT: BE887504.1, EVALUE 7.00e-41; SWISSPROT HIT: P02445, EVALUE 4.00e-35
RGCSVPTGPATTICSSDKSCRCGVCLPSTCPHTVWLLEPTCCDNCPPPCHIPQPCVPTCFLLNSCQPTPGLETLNLTTFTQPCCEPCLP

SEQ ID NO: 36899 - protein, 39 aa, Homo sapiens
  MAP TO AL121572.6; EXPRESSED IN BT474, SIGNAL = 0.99; EXPRESSED IN BONE MARROW, SIGNAL =   1; EXPRESSED IN PLACENTA, SIGNAL = 1.2; EXPRESSED IN HBL100, SIGNAL = 1.9; EXPRESSED IN HELA, SIGNAL = 1.7; EXPRESSED IN HEART, SIGNAL = 1.3; EXPRESSED IN FETAL LIVER, SIGNAL = 1.2; EXPRESSED IN ADULT LIVER, SIGNAL = 1.1; SWISSPROT HIT: O75360, EVALUE 2.10e+00; EST_HUMAN HIT: BE542390.1, EVALUE 3.00e-18
EGQEPHESCGTGLGHRLPLWYPSLHPHQAGSGQGPCETD

SEQ ID NO: 36900 - protein, 40 aa, Homo sapiens
  MAP TO AL121749.7; EXPRESSED IN PLACENTA, SIGNAL = 1.2; EXPRESSED IN HEART, SIGNAL = 1.5; EXPRESSED IN BT474, SIGNAL = 1.5; EXPRESSED IN LUNG, SIGNAL = 1.2; EXPRESSED IN BRAIN, SIGNAL = 1.2; EST_HUMAN HIT: H10769.1, EVALUE 2.00e-16; SWISSPROT HIT: P34624, EVALUE 2.00e-08
KSEVPPDYDKHNPEQKQIYRFVRTLFSAAQLTAECAIVTL

SEQ ID NO: 36901 - protein, 34 aa, Homo sapiens
  MAP TO AL109938.4; EXPRESSED IN BT474, SIGNAL = 2.5; EXPRESSED IN BRAIN, SIGNAL = 1.6; EXPRESSED IN BONE MARROW, SIGNAL = 2.5; EXPRESSED IN HELA, SIGNAL = 3.1; EXPRESSED IN ADULT LIVER, SIGNAL = 3.8; EXPRESSED IN FETAL LIVER, SIGNAL = 2.7; EXPRESSED IN LUNG, SIGNAL =   3; EXPRESSED IN PLACENTA, SIGNAL =   3; EXPRESSED IN HEART, SIGNAL = 2.2; EXPRESSED IN HBL100, SIGNAL = 2.9; EST_HUMAN HIT: AI492415.1, EVALUE 7.00e-04
CVVGNELCAVSFHEGAPWLVPVLWGLPPRDFAAA

SEQ ID NO: 36902 - protein, 54 aa, Homo sapiens
  MAP TO AC008045.4; EXPRESSED IN BT474, SIGNAL =   3; EXPRESSED IN ADULT LIVER, SIGNAL =   2; EXPRESSED IN BRAIN, SIGNAL = 2.4; EXPRESSED IN PLACENTA, SIGNAL = 2.3; EXPRESSED IN HBL100, SIGNAL = 2.3; EXPRESSED IN FETAL LIVER, SIGNAL = 2.7; EXPRESSED IN LUNG, SIGNAL =   3; EXPRESSED IN BONE MARROW, SIGNAL =   2; EXPRESSED IN HEART, SIGNAL = 2.5; EXPRESSED IN HELA, SIGNAL = 2.7; EST_HUMAN HIT: BE796798.1, EVALUE 1.00e-25; SWISSPROT HIT: Q05793, EVALUE 9.00e-03
VTISVDGILTTTGYTQEDYTMLGSDDFFYVGGSPSTADLPGSPVSNNFMGCLKE

SEQ ID NO: 36903 - protein, 17 aa, Homo sapiens
  MAP TO AL078600.11; EXPRESSED IN FETAL LIVER, SIGNAL = 2.2; EXPRESSED IN HEART, SIGNAL = 1.3
ILTLAFRTLPPTGVHVH

SEQ ID NO: 36904 - protein, 59 aa, Homo sapiens
  MAP TO AL049837.3; EXPRESSED IN ADULT LIVER, SIGNAL = 0.9; EXPRESSED IN HEART, SIGNAL = 1.1; EXPRESSED IN BONE MARROW, SIGNAL = 0.93; EXPRESSED IN HBL100, SIGNAL = 0.72; EXPRESSED IN BRAIN, SIGNAL = 0.91; EXPRESSED IN PLACENTA, SIGNAL = 0.86; EXPRESSED IN BT474, SIGNAL = 0.71; EXPRESSED IN FETAL LIVER, SIGNAL = 2.7; EXPRESSED IN LUNG, SIGNAL = 0.88; EXPRESSED IN HELA, SIGNAL = 0.82; SWISSPROT HIT: P02564, EVALUE 3.90e-01; EST_HUMAN HIT: BE161026.1, EVALUE 7.00e-02
VDKNIVTATVNILNMFKKVEGKNEHGEEKKVIYQNDLNQTISDIKHELDEINNRFDTAE

SEQ ID NO: 36905 - protein, 114 aa, Homo sapiens
  MAP TO AC008132.26; EXPRESSED IN LUNG, SIGNAL = 7.8; EXPRESSED IN PLACENTA, SIGNAL = 3.2; EXPRESSED IN HELA, SIGNAL = 4.3; EXPRESSED IN HEART, SIGNAL = 3.3; EXPRESSED IN HBL100, SIGNAL = 4.2; EXPRESSED IN BT474, SIGNAL = 3.8; EXPRESSED IN FETAL LIVER, SIGNAL = 4.1; EXPRESSED IN ADULT LIVER, SIGNAL = 4.6; EXPRESSED IN BONE MARROW, SIGNAL = 3.9; EXPRESSED IN BRAIN, SIGNAL = 3.3; EST_HUMAN HIT: AL042278.1, EVALUE 6.00e-37; SWISSPROT HIT: P52591, EVALUE 1.00e-04
MPEQDKDPRVQENPGDQRRVPEVTGDAPSAFRPLRDNRGLSPFVPGPGPLQTDLHAQRSEIRYNQTSQTSWTSSCTNRNAISSSYSSTGGLPGLKRRRGPASSHCQLTLSSSKT

SEQ ID NO: 36906 - protein, 59 aa, Homo sapiens
  MAP TO AP000409.1; EXPRESSED IN HEART, SIGNAL =  18; EXPRESSED IN ADULT LIVER, SIGNAL =   2; EST_HUMAN HIT: AW664990.1, EVALUE 2.00e-03; SWISSPROT HIT: Q55029, EVALUE 5.80e+00
FVECTESWLLVEIRGAPLVENLQPKHNELSLGNGCPVTRMTNDIFEFTYALEFSGIMKY

SEQ ID NO: 36907 - protein, 45 aa, Homo sapiens
  MAP TO AC007426.1; EXPRESSED IN BRAIN, SIGNAL = 2.1; EXPRESSED IN LUNG, SIGNAL = 2.4; EXPRESSED IN HBL100, SIGNAL = 3.2; EXPRESSED IN HEART, SIGNAL = 2.5; EXPRESSED IN BONE MARROW, SIGNAL = 2.8; EXPRESSED IN PLACENTA, SIGNAL = 2.1; EXPRESSED IN HELA, SIGNAL = 2.6; EXPRESSED IN BT474, SIGNAL = 2.6; EXPRESSED IN ADULT LIVER, SIGNAL = 3.3; EXPRESSED IN FETAL LIVER, SIGNAL = 2.5; SWISSPROT HIT: P53244, EVALUE 7.90e+00; EST_HUMAN HIT: AW900048.1, EVALUE 5.00e-08
LDMYGRLRSAAAVAHHFKRNESSIRTIVKKEKEIHEAMAVATPPE

SEQ ID NO: 36908 - protein, 37 aa, Homo sapiens
  MAP TO AC008430.2; EXPRESSED IN BT474, SIGNAL =   1; EXPRESSED IN ADULT LIVER, SIGNAL = 1.1; EXPRESSED IN BRAIN, SIGNAL = 1.3; EXPRESSED IN LUNG, SIGNAL = 1.2; EXPRESSED IN HBL100, SIGNAL = 1.1; EXPRESSED IN FETAL LIVER, SIGNAL = 1.3; EXPRESSED IN BONE MARROW, SIGNAL =   1; EXPRESSED IN PLACENTA, SIGNAL =   1; EXPRESSED IN HEART, SIGNAL = 2.1; EXPRESSED IN HELA, SIGNAL = 1.2; SWISSPROT HIT: P10040, EVALUE 1.00e-08; EST_HUMAN HIT: AA297258.1, EVALUE 1.00e-15
INECEVEPCKNGGICTDLVANYSCECPGEFMGRNCQY

SEQ ID NO: 36909 - protein, 45 aa, Homo sapiens
  MAP TO AL132773.1; EXPRESSED IN BRAIN, SIGNAL =   2; EXPRESSED IN BONE MARROW, SIGNAL = 1.6; EXPRESSED IN HEART, SIGNAL = 1.9; EXPRESSED IN BT474, SIGNAL = 2.5; EXPRESSED IN ADULT LIVER, SIGNAL = 2.1; EXPRESSED IN LUNG, SIGNAL =   2; EXPRESSED IN PLACENTA, SIGNAL = 2.2; EXPRESSED IN HELA, SIGNAL = 1.5; EXPRESSED IN HBL100, SIGNAL = 1.7; EXPRESSED IN FETAL LIVER, SIGNAL = 2.1; SWISSPROT HIT: Q19981, EVALUE 3.00e-11; EST_HUMAN HIT: BE894518.1, EVALUE 5.00e-24
CQCNGHSKCINQSICEKCENLTTGKHCETCISGFYGDPTNGGKCQ

SEQ ID NO: 36910 - protein, 24 aa, Homo sapiens
  MAP TO AJ010597.1; EXPRESSED IN FETAL LIVER, SIGNAL = 1.2; EXPRESSED IN PLACENTA, SIGNAL = 1.2; EXPRESSED IN BT474, SIGNAL = 1.1; EXPRESSED IN BONE MARROW, SIGNAL = 1.3; EXPRESSED IN HBL100, SIGNAL = 0.91; EXPRESSED IN HELA, SIGNAL = 0.82; EXPRESSED IN ADULT LIVER, SIGNAL = 0.9; EXPRESSED IN BRAIN, SIGNAL = 0.91; EXPRESSED IN HEART, SIGNAL = 1.2; EXPRESSED IN LUNG, SIGNAL = 1.1
QVGYQVMFFLSRLQKFNWASPAMQ

SEQ ID NO: 36911 - protein, 44 aa, Homo sapiens
  MAP TO AL121580.6; EXPRESSED IN PLACENTA, SIGNAL = 1.6; EXPRESSED IN HBL100, SIGNAL = 1.6; EXPRESSED IN HEART, SIGNAL = 1.3; EXPRESSED IN ADULT LIVER, SIGNAL = 2.2; EXPRESSED IN BT474, SIGNAL = 1.5; EXPRESSED IN BRAIN, SIGNAL = 1.6; EXPRESSED IN HELA, SIGNAL = 1.6; EXPRESSED IN FETAL LIVER, SIGNAL = 1.7; EXPRESSED IN LUNG, SIGNAL = 1.5; EXPRESSED IN BONE MARROW, SIGNAL = 1.5; SWISSPROT HIT: P38090, EVALUE 3.50e+00; EST_HUMAN HIT: BF687815.1, EVALUE 1.10e+00
ESQLLIAGLWCVVLLCVFDASLMTASVDPLSTPAMIPCCLFPET

SEQ ID NO: 36912 - protein, 30 aa, Homo sapiens
  MAP TO AL121580.6; EXPRESSED IN PLACENTA, SIGNAL = 1.6; EXPRESSED IN HBL100, SIGNAL = 1.6; EXPRESSED IN HEART, SIGNAL = 1.3; EXPRESSED IN ADULT LIVER, SIGNAL = 2.2; EXPRESSED IN BT474, SIGNAL = 1.5; EXPRESSED IN BRAIN, SIGNAL = 1.6; EXPRESSED IN HELA, SIGNAL = 1.6; EXPRESSED IN FETAL LIVER, SIGNAL = 1.7; EXPRESSED IN LUNG, SIGNAL = 1.5; EXPRESSED IN BONE MARROW, SIGNAL = 1.5
GSTDAVIKDASNTQSNTTHQRPAISNWLSL

SEQ ID NO: 36913 - protein, 53 aa, Homo sapiens
  MAP TO AL109942.4; EXPRESSED IN HBL100, SIGNAL = 2.6; EXPRESSED IN HELA, SIGNAL = 3.1; EXPRESSED IN PLACENTA, SIGNAL = 2.3; EXPRESSED IN HEART, SIGNAL = 2.2; EXPRESSED IN ADULT LIVER, SIGNAL = 3.3; EXPRESSED IN FETAL LIVER, SIGNAL = 2.9; EXPRESSED IN BT474, SIGNAL = 2.8; EXPRESSED IN BRAIN, SIGNAL = 3.5; EXPRESSED IN BONE MARROW, SIGNAL = 2.6; EXPRESSED IN LUNG, SIGNAL = 2.8; SWISSPROT HIT: P10827, EVALUE 2.00e+00; EST_HUMAN HIT: BF527726.1, EVALUE 5.00e-26
LQGPGQERAGLCPNYRLDVVLHRDGLLFAQVGAGSQDGCHQFAAPPGLPREVF

SEQ ID NO: 36914 - protein, 42 aa, Homo sapiens
  MAP TO AL109942.4; EXPRESSED IN HBL100, SIGNAL = 2.6; EXPRESSED IN HELA, SIGNAL = 3.1; EXPRESSED IN PLACENTA, SIGNAL = 2.3; EXPRESSED IN HEART, SIGNAL = 2.2; EXPRESSED IN ADULT LIVER, SIGNAL = 3.3; EXPRESSED IN FETAL LIVER, SIGNAL = 2.9; EXPRESSED IN BT474, SIGNAL = 2.8; EXPRESSED IN BRAIN, SIGNAL = 3.5; EXPRESSED IN BONE MARROW, SIGNAL = 2.6; EXPRESSED IN LUNG, SIGNAL = 2.8; EST_HUMAN HIT: BF527726.1, EVALUE 6.00e-20; SWISSPROT HIT: P38226, EVALUE 4.10e-01
PIIGWMWYFTEMVFCSRKWEQDRKTVATSLQHLRDYPEKYFV

SEQ ID NO: 36915 - protein, 83 aa, Homo sapiens
  MAP TO AC007404.2; EXPRESSED IN FETAL LIVER, SIGNAL = 0.95; EXPRESSED IN LUNG, SIGNAL = 0.99; EXPRESSED IN HELA, SIGNAL =   1; EXPRESSED IN BRAIN, SIGNAL = 0.82; EXPRESSED IN HEART, SIGNAL = 0.91; EXPRESSED IN ADULT LIVER, SIGNAL = 0.72; EXPRESSED IN PLACENTA, SIGNAL = 0.83; EXPRESSED IN BT474, SIGNAL = 0.92; EXPRESSED IN BONE MARROW, SIGNAL = 0.77; EST_HUMAN HIT: AI880315.1, EVALUE 2.00e-09; SWISSPROT HIT: P35999, EVALUE 1.10e+00
MSTATLLSSGKDEEAEKKDEMDDDTMFTTLGEEDKSKPFVAPRWATRVFAADCLCRIINLCENADQAHFDLALARSAKLRNPT

SEQ ID NO: 36916 - protein, 37 aa, Homo sapiens
  MAP TO AC007717.1; EXPRESSED IN LUNG, SIGNAL = 0.7; EXPRESSED IN PLACENTA, SIGNAL = 0.85; EXPRESSED IN BONE MARROW, SIGNAL = 0.8; EXPRESSED IN FETAL LIVER, SIGNAL = 0.65; EXPRESSED IN BT474, SIGNAL = 0.77; EXPRESSED IN HELA, SIGNAL = 0.64; EXPRESSED IN HEART, SIGNAL = 0.84; SWISSPROT HIT: Q27409, EVALUE 6.20e+00
CFIATTTCDVVGITSWNIYSYFNSFGCKVVAKYQKVI

SEQ ID NO: 36917 - protein, 52 aa, Homo sapiens
  MAP TO AL109798.13; EXPRESSED IN BRAIN, SIGNAL = 5.2; EXPRESSED IN BONE MARROW, SIGNAL = 6.3; EXPRESSED IN FETAL LIVER, SIGNAL = 5.9; EXPRESSED IN ADULT LIVER, SIGNAL = 7.1; EXPRESSED IN BT474, SIGNAL =   6; EXPRESSED IN LUNG, SIGNAL = 4.5; EXPRESSED IN PLACENTA, SIGNAL = 5.5; EXPRESSED IN HEART, SIGNAL = 4.1; EXPRESSED IN HELA, SIGNAL = 5.3; EXPRESSED IN HBL100, SIGNAL = 5.6; EST_HUMAN HIT: AA429428.1, EVALUE 5.70e-02; SWISSPROT HIT: O15537, EVALUE 3.00e-26
LQIDLKEIKVISGILTQGRCDIDEWMTKYSVQYRTDERLNWIYYKDQTGNNR

SEQ ID NO: 36918 - protein, 58 aa, Homo sapiens
  MAP TO AL031770.12; EXPRESSED IN HBL100, SIGNAL =   1; EXPRESSED IN ADULT LIVER, SIGNAL = 0.68; EXPRESSED IN BRAIN, SIGNAL = 0.68; EXPRESSED IN HEART, SIGNAL =   1; EXPRESSED IN PLACENTA, SIGNAL = 0.62; EXPRESSED IN BT474, SIGNAL = 3.8; EXPRESSED IN BONE MARROW, SIGNAL = 1.1; EXPRESSED IN LUNG, SIGNAL = 0.68; EXPRESSED IN HELA, SIGNAL = 0.85; EXPRESSED IN FETAL LIVER, SIGNAL = 0.64; EST_HUMAN HIT: AI290264.1, EVALUE 9.00e-28; SWISSPROT HIT: P41223, EVALUE 5.10e-01
LTICGHNCLLTAEWMSASKIVCRVGQAKNDKGDIIVTTKSGGRGTSTVSFKLLKPEKI

SEQ ID NO: 36919 - protein, 60 aa, Homo sapiens
  MAP TO AC007445.1; EXPRESSED IN HELA, SIGNAL =   3; EXPRESSED IN HEART, SIGNAL = 2.1; EXPRESSED IN BT474, SIGNAL = 2.5; EXPRESSED IN ADULT LIVER, SIGNAL = 2.9; EXPRESSED IN BRAIN, SIGNAL = 2.5; EXPRESSED IN PLACENTA, SIGNAL = 2.8; EXPRESSED IN HBL100, SIGNAL = 2.5; EXPRESSED IN FETAL LIVER, SIGNAL = 2.9; EXPRESSED IN LUNG, SIGNAL =   3; EXPRESSED IN BONE MARROW, SIGNAL = 2.5; EST_HUMAN HIT: AA720851.1, EVALUE 2.00e-22; SWISSPROT HIT: P12541, EVALUE 5.80e+00
  unsure 29
  unsure 31
  unsure 34
DTVSGRIVTMTGKAKEGEKVEQPSTTEAXSXKWXKEIPESMKIIPGLAEYEVLETLADEK

SEQ ID NO: 36920 - protein, 45 aa, Homo sapiens
  MAP TO AC008496.2; EXPRESSED IN PLACENTA, SIGNAL = 0.9; EXPRESSED IN HELA, SIGNAL =   1; EXPRESSED IN HEART, SIGNAL = 4.6; EXPRESSED IN FETAL LIVER, SIGNAL = 0.93; EXPRESSED IN BRAIN, SIGNAL = 1.1; EXPRESSED IN LUNG, SIGNAL =   1; EST_HUMAN HIT: AW755254.1, EVALUE 2.00e-20; SWISSPROT HIT: P29029, EVALUE 2.10e+00
RLEPQEPNSATSTTIAVYWSMNKEDVIDSFQVYCMEEPQDDQEVN

SEQ ID NO: 36921 - protein, 82 aa, Homo sapiens
  MAP TO AC010951.3; EXPRESSED IN BRAIN, SIGNAL = 1.6; EXPRESSED IN LUNG, SIGNAL = 1.9; EXPRESSED IN HELA, SIGNAL = 2.7; EXPRESSED IN PLACENTA, SIGNAL =   6; EXPRESSED IN FETAL LIVER, SIGNAL = 1.7; EXPRESSED IN ADULT LIVER, SIGNAL = 4.2; EXPRESSED IN BT474, SIGNAL =   2; EXPRESSED IN BONE MARROW, SIGNAL = 2.1; EXPRESSED IN HEART, SIGNAL = 1.2; EXPRESSED IN HBL100, SIGNAL = 2.4; EST_HUMAN HIT: AI492055.1, EVALUE 6.00e-20; SWISSPROT HIT: P30995, EVALUE 4.50e+00
EHSGHPSRSGVMEVCDAVVDGERKLSSSVTNTDQKSTVARFNRVKIELPYKGRGPKGGYRCQLECLGLYPDNCPSRCALRQQ

SEQ ID NO: 36922 - protein, 27 aa, Homo sapiens
  MAP TO AP000013.2; EXPRESSED IN BRAIN, SIGNAL = 2.1; EXPRESSED IN BONE MARROW, SIGNAL = 2.2; EXPRESSED IN HEART, SIGNAL = 1.3; EXPRESSED IN BT474, SIGNAL = 2.5; EXPRESSED IN ADULT LIVER, SIGNAL = 2.5; EXPRESSED IN FETAL LIVER, SIGNAL = 2.1; EXPRESSED IN LUNG, SIGNAL =   2; EXPRESSED IN PLACENTA, SIGNAL = 2.4; EXPRESSED IN HELA, SIGNAL = 1.6; EXPRESSED IN HBL100, SIGNAL =   2
LSRSHTKTFSWMVPVAAVTTRSRVRGE

SEQ ID NO: 36923 - protein, 90 aa, Homo sapiens
  MAP TO AC007870.3; EXPRESSED IN LUNG, SIGNAL = 0.9; EXPRESSED IN PLACENTA, SIGNAL = 1.1; EXPRESSED IN HBL100, SIGNAL = 0.82; EXPRESSED IN FETAL LIVER, SIGNAL = 0.87; EXPRESSED IN BRAIN, SIGNAL = 0.93; EXPRESSED IN BT474, SIGNAL = 0.93; EXPRESSED IN BONE MARROW, SIGNAL =   1; EXPRESSED IN HELA, SIGNAL = 0.64; EXPRESSED IN ADULT LIVER, SIGNAL = 0.8; EXPRESSED IN HEART, SIGNAL = 0.91; EST_HUMAN HIT: AI937253.1, EVALUE 1.00e-15; SWISSPROT HIT: P48746, EVALUE 2.70e+00
PVLAMSLSAAWKRTNTTRILRSSFPIWMPFISFFCLIAVDRTFSTLLSNNGEDEHPCLVPYLRGKAFRFSSFSIPAVGRLCILIIHITGL

SEQ ID NO: 36924 - protein, 48 aa, Homo sapiens
  MAP TO AC007385.2; EXPRESSED IN BT474, SIGNAL = 0.7; EXPRESSED IN HBL100, SIGNAL = 0.67; EXPRESSED IN FETAL LIVER, SIGNAL = 0.68; EXPRESSED IN LUNG, SIGNAL = 0.7; EXPRESSED IN BRAIN, SIGNAL = 0.85; EXPRESSED IN PLACENTA, SIGNAL = 0.81; EXPRESSED IN BONE MARROW, SIGNAL =   1; EXPRESSED IN HELA, SIGNAL = 0.74; EXPRESSED IN ADULT LIVER, SIGNAL = 0.71; EXPRESSED IN HEART, SIGNAL = 0.83; SWISSPROT HIT: P16154, EVALUE 1.20e+00
ACLANTAEASSSWQSIKEKSIYFARRSTILRKKPNWMILTIPRTLNTW

SEQ ID NO: 36925 - protein, 85 aa, Homo sapiens
  MAP TO AC010130.3; EXPRESSED IN LUNG, SIGNAL = 6.7; EXPRESSED IN HELA, SIGNAL =  11; EXPRESSED IN PLACENTA, SIGNAL = 5.7; EXPRESSED IN HBL100, SIGNAL = 7.9; EXPRESSED IN HEART, SIGNAL = 3.9; EXPRESSED IN ADULT LIVER, SIGNAL =   7; EXPRESSED IN BT474, SIGNAL = 5.5; EXPRESSED IN BONE MARROW, SIGNAL = 5.6; EXPRESSED IN BRAIN, SIGNAL = 4.9; EXPRESSED IN FETAL LIVER, SIGNAL = 7.9; EST_HUMAN HIT: AI973112.1, EVALUE 1.00e-35; SWISSPROT HIT: P36197, EVALUE 1.00e-04
VNYDNVVDTGSETDEEDKLHIAEDDGIANPLDQETSPASVPNHESSPHVSQALLPREEEEDEIREGGVEHPWHNNEILQASVDGP

SEQ ID NO: 36926 - protein, 64 aa, Homo sapiens
  MAP TO AL118509.3; EXPRESSED IN BRAIN, SIGNAL = 1.6; EXPRESSED IN BONE MARROW, SIGNAL = 1.6; EXPRESSED IN ADULT LIVER, SIGNAL = 2.2; EXPRESSED IN FETAL LIVER, SIGNAL = 1.9; EXPRESSED IN BT474, SIGNAL = 1.7; EXPRESSED IN LUNG, SIGNAL = 1.8; EXPRESSED IN PLACENTA, SIGNAL = 1.5; EXPRESSED IN HEART, SIGNAL = 1.5; EXPRESSED IN HELA, SIGNAL = 1.2; EXPRESSED IN HBL100, SIGNAL = 1.7; SWISSPROT HIT: P13082, EVALUE 1.50e+00; EST_HUMAN HIT: T02824.1, EVALUE 1.20e-02
STETSPLERLVSLLTSTNCHCPYLLWFPHNGPALPPDKKPSTMEWFWPIYRVHSECFHVLCFNS

SEQ ID NO: 36927 - protein, 102 aa, Homo sapiens
  MAP TO AL121778.4; EXPRESSED IN BONE MARROW, SIGNAL =  20; EXPRESSED IN HBL100, SIGNAL =  75; EXPRESSED IN BT474, SIGNAL =  36; EXPRESSED IN ADULT LIVER, SIGNAL = 6.9; EXPRESSED IN BRAIN, SIGNAL = 4.3; EXPRESSED IN LUNG, SIGNAL =  43; EXPRESSED IN PLACENTA, SIGNAL =  18; EXPRESSED IN HEART, SIGNAL = 7.9; EXPRESSED IN HELA, SIGNAL =  34; EXPRESSED IN FETAL LIVER, SIGNAL =  23; SWISSPROT HIT: P25444, EVALUE 1.00e-53; EST_HUMAN HIT: BF309937.1, EVALUE 1.00e-52
KIMPVQKQTRAGQRTRFKVFVAIGDYNGHVGLGVKCSKEVATAIRGAIILAKLSIVPVCRGYWGNKIGKPHTVPCKVTGRCGSVLVRLIPAPRGTGIVSAPV

SEQ ID NO: 36928 - protein, 64 aa, Homo sapiens
  MAP TO AC007790.1; EXPRESSED IN BONE MARROW, SIGNAL = 0.93; EXPRESSED IN HBL100, SIGNAL = 0.92; EXPRESSED IN FETAL LIVER, SIGNAL = 0.91; EXPRESSED IN BRAIN, SIGNAL = 0.8; EXPRESSED IN PLACENTA, SIGNAL = 0.71; EXPRESSED IN BT474, SIGNAL = 0.72; EXPRESSED IN LUNG, SIGNAL = 0.7; EXPRESSED IN HELA, SIGNAL = 0.87; EXPRESSED IN ADULT LIVER, SIGNAL = 0.97; EXPRESSED IN HEART, SIGNAL = 1.3; EST_HUMAN HIT: AI912763.1, EVALUE 9.80e-01
YLLSIYCVHYIVLGSGVILVTKQKKILFFWNLQGNTDINNIISIILLMNHKIQIIDHLVTSTMK

SEQ ID NO: 36929 - protein, 144 aa, Homo sapiens
  MAP TO AP000021.2; EXPRESSED IN BT474, SIGNAL = 1.2; EXPRESSED IN ADULT LIVER, SIGNAL =   1; EXPRESSED IN FETAL LIVER, SIGNAL =   1; EXPRESSED IN BRAIN, SIGNAL = 1.1; EXPRESSED IN BONE MARROW, SIGNAL = 0.97; EXPRESSED IN PLACENTA, SIGNAL = 1.5; EXPRESSED IN HBL100, SIGNAL = 1.4; EXPRESSED IN HEART, SIGNAL =   1; SWISSPROT HIT: P11308, EVALUE 5.00e-87; EST_HUMAN HIT: BE831331.1, EVALUE 1.00e-59
LLSDSSNSSCITWEGTNGEFKMTDPDEVARRWGERKSKPNMNYDKLSRALRYYYDKNIMTKVHGKRYAYKFDFHGIAQALQPHPPESSLYKYPSDLPYMGSYHAHPQKMNFVAPHPPALPVTSSSFFAAPNPYWNSPTGGIYPN

SEQ ID NO: 36930 - protein, 34 aa, Homo sapiens
  MAP TO AP000021.2; EXPRESSED IN BT474, SIGNAL = 1.2; EXPRESSED IN ADULT LIVER, SIGNAL =   1; EXPRESSED IN FETAL LIVER, SIGNAL =   1; EXPRESSED IN BRAIN, SIGNAL = 1.1; EXPRESSED IN BONE MARROW, SIGNAL = 0.97; EXPRESSED IN PLACENTA, SIGNAL = 1.5; EXPRESSED IN HBL100, SIGNAL = 1.4; EXPRESSED IN HEART, SIGNAL =   1; EST_HUMAN HIT: R82175.1, EVALUE 8.00e-05
AVARSSFGSSSWSSCRTAPTPAASPGKAPTGSSR

SEQ ID NO: 36931 - protein, 27 aa, Homo sapiens
  MAP TO AC007790.1; EXPRESSED IN HBL100, SIGNAL =   1; EXPRESSED IN FETAL LIVER, SIGNAL = 0.94; EXPRESSED IN LUNG, SIGNAL = 0.98; EXPRESSED IN HELA, SIGNAL = 0.59; EXPRESSED IN BRAIN, SIGNAL = 0.74; EXPRESSED IN PLACENTA, SIGNAL = 0.83; EXPRESSED IN BT474, SIGNAL = 1.3; EXPRESSED IN BONE MARROW, SIGNAL = 0.8; EXPRESSED IN ADULT LIVER, SIGNAL = 0.77; EXPRESSED IN HEART, SIGNAL = 1.9e+02
KLFDWIIRVKQPNESHYGRVLEPLSLL

SEQ ID NO: 36932 - protein, 111 aa, Homo sapiens
  MAP TO AL022320.23; EXPRESSED IN PLACENTA, SIGNAL = 0.8; EXPRESSED IN FETAL LIVER, SIGNAL = 0.75; EXPRESSED IN LUNG, SIGNAL = 0.86; EXPRESSED IN BT474, SIGNAL = 0.8; EXPRESSED IN HEART, SIGNAL = 0.98; EXPRESSED IN BRAIN, SIGNAL = 0.71; EXPRESSED IN ADULT LIVER, SIGNAL = 0.78; EXPRESSED IN HELA, SIGNAL = 0.83; EXPRESSED IN HBL100, SIGNAL = 0.93; EXPRESSED IN BONE MARROW, SIGNAL = 0.88; SWISSPROT HIT: P15479, EVALUE 1.90e+00; EST_HUMAN HIT: AW611542.1, EVALUE 3.00e-26
MVKEQESHLLLRFQVSYPETQGIFPVLSSMPLFPMHCAHATNNAASTQFHSTGISLTAEATDCTPTYTDVISETLCSMKKRKDNLNQLYQHHWTEWNYFDKHLKELQDNFS

SEQ ID NO: 36933 - protein, 51 aa, Homo sapiens
  MAP TO AC006459.2; EXPRESSED IN BRAIN, SIGNAL = 0.7; EXPRESSED IN HBL100, SIGNAL = 0.7; EXPRESSED IN FETAL LIVER, SIGNAL = 0.68; EXPRESSED IN LUNG, SIGNAL = 0.79; EXPRESSED IN HELA, SIGNAL = 0.78; EXPRESSED IN HEART, SIGNAL = 1.1; EXPRESSED IN PLACENTA, SIGNAL = 0.81; EXPRESSED IN BT474, SIGNAL = 0.85
FSLHFSRIFMNFLLNLEVLVLYNIGPSPLGAFPSWSCKASFSLSSSKKHGS

SEQ ID NO: 36934 - protein, 208 aa, Homo sapiens
  MAP TO AC010930.2; EXPRESSED IN BONE MARROW, SIGNAL = 1.7; EXPRESSED IN LUNG, SIGNAL = 1.5; EXPRESSED IN HELA, SIGNAL = 1.7; EXPRESSED IN PLACENTA, SIGNAL = 1.7; EXPRESSED IN HBL100, SIGNAL = 1.8; EXPRESSED IN HEART, SIGNAL = 1.5; EXPRESSED IN BT474, SIGNAL = 1.4; EXPRESSED IN BRAIN, SIGNAL = 1.8; EXPRESSED IN ADULT LIVER, SIGNAL = 2.3; EXPRESSED IN FETAL LIVER, SIGNAL = 1.7; EST_HUMAN HIT: AW962764.1, EVALUE 8.00e-28; SWISSPROT HIT: Q95157, EVALUE 2.00e-25
MFFVHLATAVETGLLLTMAFDRYVAICKPLHYKRILTPQVMLGMSMAITIRAIIAITPLSWMVSHLPFCGSNVVVHSYCEHIALARLACADPVPSSLYSLIGSSLMVGSDVAFIAASYILILKAVFGLSSKTAQLKALSTCGSHVGVMALYYLPGMASIYAAWLGQDVVPLHTQVLLADLYVIIPATLNPIIYGMRTKQLRERIWSYL

SEQ ID NO: 36935 - protein, 60 aa, Homo sapiens
  MAP TO AC007736.3; EXPRESSED IN BT474, SIGNAL = 1.2; EXPRESSED IN BONE MARROW, SIGNAL = 1.2; EXPRESSED IN ADULT LIVER, SIGNAL =   1; EXPRESSED IN HEART, SIGNAL = 1.3; EXPRESSED IN PLACENTA, SIGNAL = 1.3; EXPRESSED IN LUNG, SIGNAL = 1.1; EXPRESSED IN HBL100, SIGNAL = 1.2; EXPRESSED IN FETAL LIVER, SIGNAL = 1.1; EXPRESSED IN HELA, SIGNAL = 1.1; EXPRESSED IN BRAIN, SIGNAL = 1.2; SWISSPROT HIT: P06126, EVALUE 4.40e+00; EST_HUMAN HIT: BF528425.1, EVALUE 7.90e+00
NNGQGEGNSEDLKEDKGFRMVWIMLNDMRCRKKKSYTSSCVMGQLGCVELKRVKGVEAEA

SEQ ID NO: 36936 - protein, 22 aa, Homo sapiens
  MAP TO AL132780.1; EXPRESSED IN PLACENTA, SIGNAL = 1.4; EXPRESSED IN HBL100, SIGNAL = 1.2; EXPRESSED IN BT474, SIGNAL = 1.2; EXPRESSED IN BRAIN, SIGNAL =   1; EXPRESSED IN LUNG, SIGNAL = 1.3; EXPRESSED IN BONE MARROW, SIGNAL = 1.1; EXPRESSED IN HEART, SIGNAL = 1.2; EXPRESSED IN HELA, SIGNAL = 1.4; EXPRESSED IN ADULT LIVER, SIGNAL = 1.8; EXPRESSED IN FETAL LIVER, SIGNAL = 1.5; EST_HUMAN HIT: BE246981.1, EVALUE 2.50e-02
RTLRCKAFYSVNGSVYCEEDYL

SEQ ID NO: 36937 - protein, 17 aa, Homo sapiens
  MAP TO AL132780.1; EXPRESSED IN PLACENTA, SIGNAL = 1.4; EXPRESSED IN HBL100, SIGNAL = 1.2; EXPRESSED IN BT474, SIGNAL = 1.2; EXPRESSED IN BRAIN, SIGNAL =   1; EXPRESSED IN LUNG, SIGNAL = 1.3; EXPRESSED IN BONE MARROW, SIGNAL = 1.1; EXPRESSED IN HEART, SIGNAL = 1.2; EXPRESSED IN HELA, SIGNAL = 1.4; EXPRESSED IN ADULT LIVER, SIGNAL = 1.8; EXPRESSED IN FETAL LIVER, SIGNAL = 1.5
ANFALQGFLQCQWLCVL

SEQ ID NO: 36938 - protein, 39 aa, Homo sapiens
  MAP TO AC010947.2; EXPRESSED IN FETAL LIVER, SIGNAL = 1.9; EXPRESSED IN BRAIN, SIGNAL =   2; EXPRESSED IN LUNG, SIGNAL =   2; EXPRESSED IN HELA, SIGNAL = 2.1; EXPRESSED IN PLACENTA, SIGNAL = 2.1; EXPRESSED IN HEART, SIGNAL = 1.6; EXPRESSED IN ADULT LIVER, SIGNAL = 2.5; EXPRESSED IN BT474, SIGNAL = 1.9; EXPRESSED IN BONE MARROW, SIGNAL = 2.4; EXPRESSED IN HBL100, SIGNAL = 2.1; EST_HUMAN HIT: BE740750.1, EVALUE 1.10e+00; SWISSPROT HIT: O14732, EVALUE 8.10e+00
EALSPDASTQTALDGASWRKCTQAAVGFACGQESPPHCP

SEQ ID NO: 36939 - protein, 26 aa, Homo sapiens
  MAP TO AC010947.2; EXPRESSED IN FETAL LIVER, SIGNAL = 1.9; EXPRESSED IN BRAIN, SIGNAL =   2; EXPRESSED IN LUNG, SIGNAL =   2; EXPRESSED IN HELA, SIGNAL = 2.1; EXPRESSED IN PLACENTA, SIGNAL = 2.1; EXPRESSED IN HEART, SIGNAL = 1.6; EXPRESSED IN ADULT LIVER, SIGNAL = 2.5; EXPRESSED IN BT474, SIGNAL = 1.9; EXPRESSED IN BONE MARROW, SIGNAL = 2.4; EXPRESSED IN HBL100, SIGNAL = 2.1
KHCHLMPQHKLPWMVPAGESARKQQW

SEQ ID NO: 36940 - protein, 28 aa, Homo sapiens
  MAP TO AP000010.2; EXPRESSED IN HBL100, SIGNAL = 1.7; EXPRESSED IN HELA, SIGNAL = 1.4; EXPRESSED IN HEART, SIGNAL = 1.3; EXPRESSED IN FETAL LIVER, SIGNAL = 1.1; EXPRESSED IN BRAIN, SIGNAL = 1.1; EXPRESSED IN PLACENTA, SIGNAL = 1.5; EXPRESSED IN ADULT LIVER, SIGNAL = 1.4; EXPRESSED IN BT474, SIGNAL = 1.4; EXPRESSED IN LUNG, SIGNAL =   1; EXPRESSED IN BONE MARROW, SIGNAL = 1.1
SPDFGSHLPCISLMSKREGESHCSRGVR

SEQ ID NO: 36941 - protein, 21 aa, Homo sapiens
  MAP TO AP000010.2; EXPRESSED IN HBL100, SIGNAL = 1.7; EXPRESSED IN HELA, SIGNAL = 1.4; EXPRESSED IN HEART, SIGNAL = 1.3; EXPRESSED IN FETAL LIVER, SIGNAL = 1.1; EXPRESSED IN BRAIN, SIGNAL = 1.1; EXPRESSED IN PLACENTA, SIGNAL = 1.5; EXPRESSED IN ADULT LIVER, SIGNAL = 1.4; EXPRESSED IN BT474, SIGNAL = 1.4; EXPRESSED IN LUNG, SIGNAL =   1; EXPRESSED IN BONE MARROW, SIGNAL = 1.1
LTPRLQWLSPSRLLMRLMQGR

SEQ ID NO: 36942 - protein, 67 aa, Homo sapiens
  MAP TO AC007546.5; EXPRESSED IN PLACENTA, SIGNAL =   1; EXPRESSED IN BT474, SIGNAL = 0.78; EXPRESSED IN FETAL LIVER, SIGNAL = 0.78; EXPRESSED IN LUNG, SIGNAL = 0.9; EXPRESSED IN HELA, SIGNAL = 0.7; EXPRESSED IN ADULT LIVER, SIGNAL = 0.9; EXPRESSED IN BONE MARROW, SIGNAL = 0.9; EXPRESSED IN HBL100, SIGNAL = 0.88; EXPRESSED IN BRAIN, SIGNAL = 0.83; EXPRESSED IN HEART, SIGNAL = 0.89; EST_HUMAN HIT: AU116935.1, EVALUE 3.00e-25; SWISSPROT HIT: O35594, EVALUE 3.00e-24
LMKRLEEEIKFNLYMVTEKFPKELENKKKELHFLQKVVSEPAMGHSDLLELESKVSENHLFIALNFI

SEQ ID NO: 36943 - protein, 33 aa, Homo sapiens
  MAP TO AL121760.4; EXPRESSED IN PLACENTA, SIGNAL = 2.1; EXPRESSED IN HEART, SIGNAL = 1.7; EXPRESSED IN HBL100, SIGNAL = 1.8; EXPRESSED IN HELA, SIGNAL = 1.3; EXPRESSED IN FETAL LIVER, SIGNAL = 1.6; EXPRESSED IN BT474, SIGNAL = 1.6; EXPRESSED IN ADULT LIVER, SIGNAL = 1.5; EXPRESSED IN BRAIN, SIGNAL = 1.5; EXPRESSED IN BONE MARROW, SIGNAL = 1.9; EXPRESSED IN LUNG, SIGNAL = 1.4; EST_HUMAN HIT: W05822.1, EVALUE 5.00e-04; SWISSPROT HIT: Q05738, EVALUE 1.10e-01
GTNLQFKRRPLSQDSLHFRHHKEKQYRLFHVHH

SEQ ID NO: 36944 - protein, 49 aa, Homo sapiens
  MAP TO AC007077.2; EXPRESSED IN PLACENTA, SIGNAL = 0.98; EXPRESSED IN BT474, SIGNAL = 0.65; EXPRESSED IN FETAL LIVER, SIGNAL = 0.63; EXPRESSED IN LUNG, SIGNAL = 0.59; EXPRESSED IN BRAIN, SIGNAL = 0.78; EXPRESSED IN BONE MARROW, SIGNAL = 0.67; EXPRESSED IN HEART, SIGNAL = 1.3; EST_HUMAN HIT: AW958145.1, EVALUE 2.00e-20
SGIATTTHQHKAQIAAQLLGEGPVHLSGIEKFWSQFEDFLLHKVLAGSM

SEQ ID NO: 36945 - protein, 47 aa, Homo sapiens
  MAP TO AC007077.2; EXPRESSED IN PLACENTA, SIGNAL = 0.98; EXPRESSED IN BT474, SIGNAL = 0.65; EXPRESSED IN FETAL LIVER, SIGNAL = 0.63; EXPRESSED IN LUNG, SIGNAL = 0.59; EXPRESSED IN BRAIN, SIGNAL = 0.78; EXPRESSED IN BONE MARROW, SIGNAL = 0.67; EXPRESSED IN HEART, SIGNAL = 1.3; EST_HUMAN HIT: AW958145.1, EVALUE 4.00e-21
VVLPPPHTSIKHRLLPSSLERGQCICQELKSFGASSRTFSCTKCWLE

SEQ ID NO: 36946 - protein, 63 aa, Homo sapiens
  MAP TO AC005076.2; EXPRESSED IN HEART, SIGNAL = 0.83; EXPRESSED IN ADULT LIVER, SIGNAL = 0.72; EXPRESSED IN PLACENTA, SIGNAL = 0.93; EXPRESSED IN BONE MARROW, SIGNAL = 1.5; EXPRESSED IN LUNG, SIGNAL = 0.95; EXPRESSED IN HELA, SIGNAL = 0.97; EXPRESSED IN BT474, SIGNAL = 2.2; EXPRESSED IN HBL100, SIGNAL = 1.6; EXPRESSED IN FETAL LIVER, SIGNAL = 1.2; EXPRESSED IN BRAIN, SIGNAL = 1.5; EST_HUMAN HIT: BE007943.1, EVALUE 2.00e-29; SWISSPROT HIT: P19096, EVALUE 8.70e-01
QLHENQKNNPTLLENKSGSGVPNSNTNSSVQHVQIRVARLEDNTAISSSPMAALQIPVQITHV

SEQ ID NO: 36947 - protein, 44 aa, Homo sapiens
  MAP TO AC012064.1; EXPRESSED IN BT474, SIGNAL = 2.2; EXPRESSED IN FETAL LIVER, SIGNAL = 2.2; EXPRESSED IN BONE MARROW, SIGNAL = 2.1; EXPRESSED IN BRAIN, SIGNAL = 2.3; EXPRESSED IN LUNG, SIGNAL = 2.2; EXPRESSED IN HELA, SIGNAL = 1.8; EXPRESSED IN PLACENTA, SIGNAL = 1.9; EXPRESSED IN HBL100, SIGNAL = 2.2; EXPRESSED IN HEART, SIGNAL = 2.1; EXPRESSED IN ADULT LIVER, SIGNAL = 2.7; SWISSPROT HIT: O75949, EVALUE 6.20e-02; EST_HUMAN HIT: AW206581.1, EVALUE 3.00e-08
ACEDEAVCDSYHKGYYRWTNFKQVYHHYHPHHKTVSIKGNTIQY

SEQ ID NO: 36948 - protein, 34 aa, Homo sapiens
  MAP TO AC006387.3; EXPRESSED IN LUNG, SIGNAL = 0.76; EXPRESSED IN FETAL LIVER, SIGNAL = 1.1; EXPRESSED IN ADULT LIVER, SIGNAL = 0.82; EXPRESSED IN BRAIN, SIGNAL = 1.1; EXPRESSED IN HEART, SIGNAL =   1; EXPRESSED IN PLACENTA, SIGNAL = 0.69; EXPRESSED IN BONE MARROW, SIGNAL = 0.9; EXPRESSED IN HBL100, SIGNAL = 1.3; EXPRESSED IN HELA, SIGNAL = 0.85; EST_HUMAN HIT: AI915939.1, EVALUE 6.00e-13; SWISSPROT HIT: P31323, EVALUE 4.00e-14
QMSQVLDAMFEKLVKDGEHVIDQGDDGDNFYVID

SEQ ID NO: 36949 - protein, 52 aa, Homo sapiens
  MAP TO AC007344.2; EXPRESSED IN FETAL LIVER, SIGNAL = 1.2; EXPRESSED IN HELA, SIGNAL = 1.5; EXPRESSED IN ADULT LIVER, SIGNAL = 1.4; EXPRESSED IN BRAIN, SIGNAL = 1.4; EXPRESSED IN HEART, SIGNAL = 1.4; EXPRESSED IN BT474, SIGNAL = 1.1; EXPRESSED IN PLACENTA, SIGNAL = 1.3; EXPRESSED IN LUNG, SIGNAL = 1.5; EXPRESSED IN HBL100, SIGNAL =   1; EXPRESSED IN BONE MARROW, SIGNAL = 1.4; SWISSPROT HIT: P11653, EVALUE 7.80e+00; EST_HUMAN HIT: BF223981.1, EVALUE 3.80e+00
LALKEASCHVVSSSMLSGPHPKALPTASKDWDLPVGIFPQSHFETLTQRLKL

SEQ ID NO: 36950 - protein, 43 aa, Homo sapiens
  MAP TO AC007344.2; EXPRESSED IN FETAL LIVER, SIGNAL = 1.2; EXPRESSED IN HELA, SIGNAL = 1.5; EXPRESSED IN ADULT LIVER, SIGNAL = 1.4; EXPRESSED IN BRAIN, SIGNAL = 1.4; EXPRESSED IN HEART, SIGNAL = 1.4; EXPRESSED IN BT474, SIGNAL = 1.1; EXPRESSED IN PLACENTA, SIGNAL = 1.3; EXPRESSED IN LUNG, SIGNAL = 1.5; EXPRESSED IN HBL100, SIGNAL =   1; EXPRESSED IN BONE MARROW, SIGNAL = 1.4; SWISSPROT HIT: Q06364, EVALUE 6.20e-02; EST_HUMAN HIT: AU160102.1, EVALUE 1.80e+00
FLPSKKQVAMLSVAPCCQAHIPKPYQQPARTGTCLWGFSPSPT

SEQ ID NO: 36951 - protein, 159 aa, Homo sapiens
  MAP TO AC007374.3; EXPRESSED IN PLACENTA, SIGNAL = 0.9; EXPRESSED IN BT474, SIGNAL = 1.9; EXPRESSED IN LUNG, SIGNAL = 0.96; EXPRESSED IN HELA, SIGNAL = 1.1; EXPRESSED IN HBL100, SIGNAL = 1.2; EXPRESSED IN FETAL LIVER, SIGNAL = 1.2; EXPRESSED IN ADULT LIVER, SIGNAL = 1.3; EXPRESSED IN BRAIN, SIGNAL = 1.2; EXPRESSED IN BONE MARROW, SIGNAL = 1.3; EXPRESSED IN HEART, SIGNAL = 1.2; EST_HUMAN HIT: AA485663.1, EVALUE 1.00e-67
MTLSPLFYILMGHNYWRVYPFCRKCKNGLAEEIKFMFKYYFFTAPGNKHFKHVLAADSALWNGCDPVSNGFEQKRGSDWQKSPEIDLCLGKVVCPEIELCLDRVACRARDDSVKPCLFLLLALCFLLCWLPSRASSLCGVTNDHWQPMLTLSLCLAVSE

SEQ ID NO: 36952 - protein, 60 aa, Homo sapiens
  MAP TO AC011330.4; EXPRESSED IN BONE MARROW, SIGNAL = 6.4; EXPRESSED IN PLACENTA, SIGNAL = 6.4; EXPRESSED IN HEART, SIGNAL =   5; EXPRESSED IN BT474, SIGNAL = 6.3; EXPRESSED IN LUNG, SIGNAL = 7.7; EXPRESSED IN BRAIN, SIGNAL = 6.9; EXPRESSED IN HELA, SIGNAL = 7.1; EXPRESSED IN HBL100, SIGNAL =   6; EXPRESSED IN ADULT LIVER, SIGNAL =  12; EXPRESSED IN FETAL LIVER, SIGNAL = 7.2; EST_HUMAN HIT: BE873170.1, EVALUE 2.00e-20; SWISSPROT HIT: P30275, EVALUE 2.00e-21
RVRTGRSIRGLSLPPACTRAERREVERVVVDALSGLKGDLAGRYYRLSEMTEAEQQQLID

SEQ ID NO: 36953 - protein, 91 aa, Homo sapiens
  MAP TO AC012073.1; EXPRESSED IN BONE MARROW, SIGNAL =   4; EXPRESSED IN HELA, SIGNAL = 4.5; EXPRESSED IN PLACENTA, SIGNAL = 3.6; EXPRESSED IN HEART, SIGNAL = 2.8; EXPRESSED IN BRAIN, SIGNAL = 3.8; EXPRESSED IN LUNG, SIGNAL = 3.7; EXPRESSED IN HBL100, SIGNAL = 4.1; EXPRESSED IN BT474, SIGNAL = 3.4; EXPRESSED IN ADULT LIVER, SIGNAL = 4.2; EXPRESSED IN FETAL LIVER, SIGNAL = 3.6; SWISSPROT HIT: P39057, EVALUE 2.00e+00; EST_HUMAN HIT: BE901209.1, EVALUE 5.00e-30
LIPPFYSRWLAGAAPQPSAHLADALVYESWFQEHLPGPARSAALQTVYGICSLGSLAFPSELKHLRRVKGEFYKKLRISHCGNRKHLREEQ

SEQ ID NO: 36954 - protein, 50 aa, Homo sapiens
  MAP TO AC011440.4; EXPRESSED IN BT474, SIGNAL = 6.6; EXPRESSED IN FETAL LIVER, SIGNAL = 7.2; EXPRESSED IN BONE MARROW, SIGNAL = 7.2; EXPRESSED IN LUNG, SIGNAL = 7.7; EXPRESSED IN BRAIN, SIGNAL = 6.8; EXPRESSED IN HELA, SIGNAL = 7.1; EXPRESSED IN HBL100, SIGNAL = 7.3; EXPRESSED IN PLACENTA, SIGNAL = 7.4; EXPRESSED IN ADULT LIVER, SIGNAL = 8.9; EXPRESSED IN HEART, SIGNAL = 5.2
WIIIKVFIIIVFMLSRLRRRKREVSLAVSGMAEVEDMEEVEGEAKEAVYS

SEQ ID NO: 36955 - protein, 38 aa, Homo sapiens
  MAP TO AC012113.1; EXPRESSED IN PLACENTA, SIGNAL = 1.3; EXPRESSED IN ADULT LIVER, SIGNAL = 1.5; EXPRESSED IN BT474, SIGNAL = 1.3; EXPRESSED IN FETAL LIVER, SIGNAL = 1.4; EXPRESSED IN BONE MARROW, SIGNAL = 1.4; EXPRESSED IN LUNG, SIGNAL = 1.4; EXPRESSED IN BRAIN, SIGNAL = 1.6; EXPRESSED IN HELA, SIGNAL = 1.5; EXPRESSED IN HBL100, SIGNAL =   1; EXPRESSED IN HEART, SIGNAL = 1.3; EST_HUMAN HIT: AI167312.1, EVALUE 2.90e+00
QGRLVMHYKSTPGPACRVLPAGQAGGVERGSVPSFTVL

SEQ ID NO: 36956 - protein, 151 aa, Homo sapiens
  MAP TO AC011589.2; EXPRESSED IN HBL100, SIGNAL = 2.2; EXPRESSED IN HELA, SIGNAL = 2.3; EXPRESSED IN HEART, SIGNAL = 1.8; EXPRESSED IN PLACENTA, SIGNAL = 2.3; EXPRESSED IN ADULT LIVER, SIGNAL = 3.2; EXPRESSED IN BT474, SIGNAL = 2.1; EXPRESSED IN FETAL LIVER, SIGNAL = 2.4; EXPRESSED IN BRAIN, SIGNAL = 2.4; EXPRESSED IN BONE MARROW, SIGNAL = 2.5; EXPRESSED IN LUNG, SIGNAL = 2.7; SWISSPROT HIT: P08547, EVALUE 4.40e-01; EST_HUMAN HIT: AA581921.1, EVALUE 1.10e-01
GAANKELIVPTILHPNSFHNGKELRGGAVAQTQKEIKWPQNRSNMPLAQTHKRKNQKTACLPSSYKTNVKKIKHSQVHEQYAIRKYNENTIPLVISIKHTMIGLKLVRNVQDLSIENYALALLKETNKQKGINESKNVVLYNISPQGNLYI

SEQ ID NO: 36957 - protein, 27 aa, Homo sapiens
  MAP TO AC007380.3; EXPRESSED IN PLACENTA, SIGNAL = 0.67; EXPRESSED IN FETAL LIVER, SIGNAL = 0.61; EXPRESSED IN LUNG, SIGNAL = 0.61; EXPRESSED IN HEART, SIGNAL = 0.82; EXPRESSED IN HELA, SIGNAL = 0.63
CWKEEIGAFEQIIPPTQQRLIRDGKKH

SEQ ID NO: 36958 - protein, 20 aa, Homo sapiens
  MAP TO AC007380.3; EXPRESSED IN PLACENTA, SIGNAL = 0.67; EXPRESSED IN FETAL LIVER, SIGNAL = 0.61; EXPRESSED IN LUNG, SIGNAL = 0.61; EXPRESSED IN HEART, SIGNAL = 0.82; EXPRESSED IN HELA, SIGNAL = 0.63
SVGRRKLVPLSRLSPPHNSA

SEQ ID NO: 36959 - protein, 96 aa, Homo sapiens
  MAP TO AC007540.3; EXPRESSED IN PLACENTA, SIGNAL = 0.66; EXPRESSED IN BT474, SIGNAL = 0.67; EXPRESSED IN BONE MARROW, SIGNAL = 0.74; EXPRESSED IN FETAL LIVER, SIGNAL = 0.74; EXPRESSED IN LUNG, SIGNAL = 0.63; EXPRESSED IN HELA, SIGNAL = 0.89; EXPRESSED IN ADULT LIVER, SIGNAL = 0.67; EXPRESSED IN HEART, SIGNAL = 0.85; EST_HUMAN HIT: AW968369.1, EVALUE 1.40e-01
KKEKKEKGEGEGEEEEEEEEEEQQQPQPSDELHLPHSYQAETSKMEVSPCDILPAPAQHSCPAPIILSITQCPFSLLNLLLDSECSWSGWKSKRTF

SEQ ID NO: 36960 - protein, 34 aa, Homo sapiens
  MAP TO AC007437.16; EXPRESSED IN PLACENTA, SIGNAL = 1.1; EXPRESSED IN BT474, SIGNAL = 0.77; EXPRESSED IN BONE MARROW, SIGNAL = 0.87; EXPRESSED IN HBL100, SIGNAL = 0.77; EXPRESSED IN FETAL LIVER, SIGNAL = 0.76; EXPRESSED IN LUNG, SIGNAL = 0.75; EXPRESSED IN HELA, SIGNAL = 0.72; EXPRESSED IN ADULT LIVER, SIGNAL = 0.75; EXPRESSED IN HEART, SIGNAL = 0.93
SNFVTQCFTVNIINCNNVIKVTFLQINPPQEYVL

SEQ ID NO: 36961 - protein, 74 aa, Homo sapiens
  MAP TO AC011561.2; EXPRESSED IN PLACENTA, SIGNAL = 2.7; EXPRESSED IN HBL100, SIGNAL = 1.9; EXPRESSED IN HEART, SIGNAL = 2.2; EXPRESSED IN ADULT LIVER, SIGNAL = 2.5; EXPRESSED IN BT474, SIGNAL = 1.9; EXPRESSED IN FETAL LIVER, SIGNAL = 2.1; EXPRESSED IN BONE MARROW, SIGNAL = 2.2; EXPRESSED IN HELA, SIGNAL = 2.2; EXPRESSED IN BRAIN, SIGNAL = 2.1; EXPRESSED IN LUNG, SIGNAL = 2.8; SWISSPROT HIT: Q90456, EVALUE 7.30e+00; EST_HUMAN HIT: BF185868.1, EVALUE 1.00e+00
GSQQLHSQHALQTFAVLIFSLARVPNISLRTYLKSMSLAVSADYPICKAVPFPSLAVAFIILLILKSWSLDYEQ

SEQ ID NO: 36962 - protein, 37 aa, Homo sapiens
  MAP TO AP000134.1; EXPRESSED IN BONE MARROW, SIGNAL = 0.83; EXPRESSED IN FETAL LIVER, SIGNAL = 0.66; EXPRESSED IN HELA, SIGNAL = 0.71; EXPRESSED IN ADULT LIVER, SIGNAL = 0.81; EXPRESSED IN BRAIN, SIGNAL = 0.79; EXPRESSED IN PLACENTA, SIGNAL = 0.69; EXPRESSED IN LUNG, SIGNAL = 0.83; EXPRESSED IN HEART, SIGNAL =   1; SWISSPROT HIT: P40872, EVALUE 6.20e+00
ITHNPQNCNEGQSHPTEKWDWKQALNIPEGKRGAQGS

SEQ ID NO: 36963 - protein, 76 aa, Homo sapiens
  MAP TO AL049610.9; EXPRESSED IN BRAIN, SIGNAL = 1.2; EXPRESSED IN HEART, SIGNAL = 0.88; EXPRESSED IN BT474, SIGNAL =   1; EXPRESSED IN BONE MARROW, SIGNAL = 0.81; EXPRESSED IN HBL100, SIGNAL =  17; EXPRESSED IN FETAL LIVER, SIGNAL = 0.75; EXPRESSED IN HELA, SIGNAL = 1.2; EXPRESSED IN ADULT LIVER, SIGNAL = 0.9; EXPRESSED IN PLACENTA, SIGNAL = 0.7; EXPRESSED IN LUNG, SIGNAL = 0.67; EST_HUMAN HIT: BF446574.1, EVALUE 1.00e-06
PKTDEERPPVEHSPEKQSPEEQSSEEQSSEEEFFPEELLPELLPEMLLSEERPPQEGLSRKDLFEGRPPMEQPPCG

SEQ ID NO: 36964 - protein, 67 aa, Homo sapiens
  MAP TO AC005973.2; EXPRESSED IN FETAL LIVER, SIGNAL =   1; EXPRESSED IN PLACENTA, SIGNAL = 1.1; EXPRESSED IN BT474, SIGNAL = 0.86; EXPRESSED IN BONE MARROW, SIGNAL = 1.5; EXPRESSED IN HBL100, SIGNAL = 0.78; EXPRESSED IN LUNG, SIGNAL =   1; EXPRESSED IN HELA, SIGNAL = 0.81; EXPRESSED IN ADULT LIVER, SIGNAL = 0.99; EXPRESSED IN BRAIN, SIGNAL = 1.3; EXPRESSED IN HEART, SIGNAL =   1; EST_HUMAN HIT: H55867.1, EVALUE 2.80e+00; SWISSPROT HIT: Q44772, EVALUE 1.50e+00
IEGSPDLQELSLAEETDKRINHKNVIGVTKESVQGIVGGEDCEGHFLEVTLSQWRSGGTGTRHPGKE

SEQ ID NO: 36965 - protein, 66 aa, Homo sapiens
  MAP TO AB020867.1; EXPRESSED IN HELA, SIGNAL =   1; EXPRESSED IN HEART, SIGNAL = 0.92; EXPRESSED IN ADULT LIVER, SIGNAL = 1.2; EST_HUMAN HIT: AU130730.1, EVALUE 4.00e-31; SWISSPROT HIT: P24082, EVALUE 8.60e-01
DSLAKFAGRKLKDCGEDLLVEISEVLFNELAFFKLMQDLDNNSITVKQRCKRKIEATGVIQSCAKE

SEQ ID NO: 36966 - protein, 85 aa, Homo sapiens [sequence omitted]

SEQ ID NO: 36967 - protein, 51 aa, Homo sapiens
  MAP TO AP000038.1; EXPRESSED IN ADULT LIVER, SIGNAL = 0.9; EXPRESSED IN BRAIN, SIGNAL = 0.72; EXPRESSED IN BONE MARROW, SIGNAL = 0.68; EXPRESSED IN LUNG, SIGNAL = 0.93; EXPRESSED IN HELA, SIGNAL = 0.77; EXPRESSED IN PLACENTA, SIGNAL = 0.78; EXPRESSED IN BT474, SIGNAL = 0.74; EXPRESSED IN FETAL LIVER, SIGNAL = 0.76; EXPRESSED IN HEART, SIGNAL = 0.93; EST_HUMAN HIT: AL119970.1, EVALUE 4.00e-09; SWISSPROT HIT: O43426, EVALUE 6.00e-23
MLAKQLEALGLAEKPQLVTRFQEVFRSMWSVNGDSISKIYAGTGALEGKAK

SEQ ID NO: 36968 - protein, 46 aa, Homo sapiens
  MAP TO AP000159.1; EXPRESSED IN BT474, SIGNAL = 0.73; EXPRESSED IN BONE MARROW, SIGNAL = 6.6; EXPRESSED IN HBL100, SIGNAL = 0.73; EXPRESSED IN FETAL LIVER, SIGNAL = 0.59; EXPRESSED IN LUNG, SIGNAL = 0.89; EXPRESSED IN HELA, SIGNAL = 0.84; EXPRESSED IN ADULT LIVER, SIGNAL = 0.65; EXPRESSED IN BRAIN, SIGNAL =   1; EXPRESSED IN PLACENTA, SIGNAL = 0.93; EXPRESSED IN HEART, SIGNAL = 0.84; EST_HUMAN HIT: AA160020.1, EVALUE 1.00e-01
CTTQVRELPFCFCECRWDGPLHPEAFLQCCAVRPSGSSCLQCLCPC

SEQ ID NO: 36969 - protein, 105 aa, Homo sapiens
  MAP TO AL121748.2; EXPRESSED IN PLACENTA, SIGNAL =   2; EXPRESSED IN HEART, SIGNAL = 1.1; EXPRESSED IN ADULT LIVER, SIGNAL = 1.1; EXPRESSED IN LUNG, SIGNAL = 1.3; EST_HUMAN HIT: AW959505.1, EVALUE 2.00e-54; SWISSPROT HIT: O14786, EVALUE 1.00e-51
QITSSNQGDRNWMPENIRLVTSRSGWALPPAPHSYINEWLQIDLGEEKIVRGIIIQGGKHRENKVFMRKFKIGYSNNGSDWKMIMDDSKRKAKVRAGDWEEVIPY

SEQ ID NO: 36970 - protein, 21 aa, Homo sapiens
  MAP TO AE000658.1; EXPRESSED IN LUNG, SIGNAL = 2.5; EXPRESSED IN BRAIN, SIGNAL = 2.9; EXPRESSED IN BONE MARROW, SIGNAL = 3.2; EXPRESSED IN HEART, SIGNAL = 2.3; EXPRESSED IN FETAL LIVER, SIGNAL = 2.7; EXPRESSED IN ADULT LIVER, SIGNAL = 2.9; EXPRESSED IN PLACENTA, SIGNAL = 2.4; EXPRESSED IN HELA, SIGNAL = 2.5; EXPRESSED IN HBL100, SIGNAL = 2.8; EXPRESSED IN BT474, SIGNAL = 2.6; EST_HUMAN HIT: BE539035.1, EVALUE 8.30e+00
AQSLWLELGSPAPCMGLSRPP

SEQ ID NO: 36971 - protein, 32 aa, Homo sapiens
  MAP TO AL023804.1; EXPRESSED IN HEART, SIGNAL = 0.79; EXPRESSED IN PLACENTA, SIGNAL = 1.1; EXPRESSED IN BT474, SIGNAL = 0.98; EXPRESSED IN FETAL LIVER, SIGNAL = 0.93; EXPRESSED IN LUNG, SIGNAL = 0.68; EXPRESSED IN HELA, SIGNAL = 0.92; EXPRESSED IN ADULT LIVER, SIGNAL = 0.98; EXPRESSED IN BONE MARROW, SIGNAL = 1.2; EXPRESSED IN HBL100, SIGNAL = 2.2; EST_HUMAN HIT: AA374489.1, EVALUE 2.00e-11
DMVRRGEIIDNDTEEEFYLRRLDAGLFVLQHI

SEQ ID NO: 36972 - protein, 48 aa, Homo sapiens
  MAP TO AL023804.1; EXPRESSED IN HEART, SIGNAL = 0.79; EXPRESSED IN PLACENTA, SIGNAL = 1.1; EXPRESSED IN BT474, SIGNAL = 0.98; EXPRESSED IN FETAL LIVER, SIGNAL = 0.93; EXPRESSED IN LUNG, SIGNAL = 0.68; EXPRESSED IN HELA, SIGNAL = 0.92; EXPRESSED IN ADULT LIVER, SIGNAL = 0.98; EXPRESSED IN BONE MARROW, SIGNAL = 1.2; EXPRESSED IN HBL100, SIGNAL = 2.2; EST_HUMAN HIT: AI688948.1, EVALUE 4.50e-01
YSCYCCVYYGQTRSPFFPPIHCPAFIPKRSFVSRTWSGEERSSTMTPR

SEQ ID NO: 36973 - protein, 45 aa, Homo sapiens
  MAP TO AE000661.1; EXPRESSED IN BONE MARROW, SIGNAL = 2.5; EXPRESSED IN HEART, SIGNAL = 2.5; EXPRESSED IN PLACENTA, SIGNAL = 2.5; EXPRESSED IN FETAL LIVER, SIGNAL = 2.7; EXPRESSED IN ADULT LIVER, SIGNAL = 2.5; EXPRESSED IN LUNG, SIGNAL = 2.5; EXPRESSED IN HELA, SIGNAL = 2.1; EXPRESSED IN HBL100, SIGNAL =   3; EXPRESSED IN BT474, SIGNAL = 2.8; EXPRESSED IN BRAIN, SIGNAL = 2.7; EST_HUMAN HIT: BF663230.1, EVALUE 5.30e+00; SWISSPROT HIT: P06310, EVALUE 4.10e-01
VMSAIELVPEHQTVPVSIGVPATLRCSMKGEAIGNYYINWYRKTQ

SEQ ID NO: 36974 - protein, 131 aa, Homo sapiens
  MAP TO AC012330.5; EXPRESSED IN BT474, SIGNAL = 2.1; EXPRESSED IN LUNG, SIGNAL = 1.6; EXPRESSED IN BRAIN, SIGNAL = 2.3; EXPRESSED IN BONE MARROW, SIGNAL = 2.8; EXPRESSED IN HEART, SIGNAL = 1.7; EXPRESSED IN FETAL LIVER, SIGNAL = 1.6; EXPRESSED IN ADULT LIVER, SIGNAL = 2.1; EXPRESSED IN PLACENTA, SIGNAL = 2.4; EXPRESSED IN HELA, SIGNAL = 2.3; EXPRESSED IN HBL100, SIGNAL = 2.4; SWISSPROT HIT: P52591, EVALUE 9.00e-07; EST_HUMAN HIT: AL042278.1, EVALUE 7.00e-48
LCPGKIVLRALKESGAGMPEQDKDPRVQENPGDQRRVPEVTGDAPSAFRPLRDNGGLSPFVPGPGPLQTDLHAQRSEIRYNQTSQTSWTSSCTNRNAISSSYSSTGGLPGLKRRRGPASSHCQLTLSSSKT

SEQ ID NO: 36975 - protein, 19 aa, Homo sapiens
  MAP TO AC012330.5; EXPRESSED IN BT474, SIGNAL = 2.1; EXPRESSED IN LUNG, SIGNAL = 1.6; EXPRESSED IN BRAIN, SIGNAL = 2.3; EXPRESSED IN BONE MARROW, SIGNAL = 2.8; EXPRESSED IN HEART, SIGNAL = 1.7; EXPRESSED IN FETAL LIVER, SIGNAL = 1.6; EXPRESSED IN ADULT LIVER, SIGNAL = 2.1; EXPRESSED IN PLACENTA, SIGNAL = 2.4; EXPRESSED IN HELA, SIGNAL = 2.3; EXPRESSED IN HBL100, SIGNAL = 2.4; EST_HUMAN HIT: AL042278.1, EVALUE 3.00e-03
LVSREDSVEGPQGERGRDA

SEQ ID NO: 36976 - protein, 91 aa, Homo sapiens
  MAP TO AF001548.1; EXPRESSED IN BT474, SIGNAL = 1.3; EXPRESSED IN LUNG, SIGNAL = 1.3; EXPRESSED IN HEART, SIGNAL = 1.4; EXPRESSED IN PLACENTA, SIGNAL = 1.7; EXPRESSED IN HBL100, SIGNAL = 1.2; SWISSPROT HIT: P35749, EVALUE 3.00e-28; EST_HUMAN HIT: BE835639.1, EVALUE 2.00e-24
LSDSKKKLQDFASTVEALEEGKKRFQKEIENLTQQYEEKAAAYDKLEKTKNRLQQELDDLVVDLDNQRQLVSNLEKKQRKFDQVEGVGCPP

SEQ ID NO: 36977 - protein, 45 aa, Homo sapiens
  MAP TO AF001550.1; EXPRESSED IN BONE MARROW, SIGNAL = 1.3; EXPRESSED IN PLACENTA, SIGNAL = 1.2; EXPRESSED IN ADULT LIVER, SIGNAL = 1.3; EXPRESSED IN LUNG, SIGNAL = 1.1; EXPRESSED IN HEART, SIGNAL = 1.2; EXPRESSED IN HELA, SIGNAL = 1.2; EXPRESSED IN HBL100, SIGNAL = 1.3; EXPRESSED IN BT474, SIGNAL = 1.7; EXPRESSED IN FETAL LIVER, SIGNAL = 1.1; EXPRESSED IN BRAIN, SIGNAL = 1.4; EST_HUMAN HIT: BE439656.1, EVALUE 1.80e-01; SWISSPROT HIT: Q05996, EVALUE 5.00e-22
CAYDLDNYQTTFHPVGSSVTHPDHYQRFDMKAFAFVSEAHVLSSL

SEQ ID NO: 36978 - protein, 46 aa, Homo sapiens
  MAP TO AF002223.1; EXPRESSED IN BT474, SIGNAL = 4.4; EXPRESSED IN LUNG, SIGNAL =   5; EXPRESSED IN BRAIN, SIGNAL = 5.1; EXPRESSED IN BONE MARROW, SIGNAL = 4.8; EXPRESSED IN HEART, SIGNAL = 3.9; EXPRESSED IN ADULT LIVER, SIGNAL = 6.5; EXPRESSED IN FETAL LIVER, SIGNAL = 4.7; EXPRESSED IN PLACENTA, SIGNAL = 4.9; EXPRESSED IN HELA, SIGNAL = 4.5; EXPRESSED IN HBL100, SIGNAL = 5.3; SWISSPROT HIT: Q13496, EVALUE 2.00e-20; EST_HUMAN HIT: AV763090.1, EVALUE 2.00e-19
QPLVGMSGKRNKDDEKYLDVIRETNKQISKLTIYDARPSVNAVANK

SEQ ID NO: 36979 - protein, 71 aa, Homo sapiens
  MAP TO AF030453.1; EXPRESSED IN PLACENTA, SIGNAL = 3.2; EXPRESSED IN HBL100, SIGNAL = 3.4; EXPRESSED IN LUNG, SIGNAL = 3.3; EXPRESSED IN BRAIN, SIGNAL = 3.4; EXPRESSED IN BONE MARROW, SIGNAL = 3.3; EXPRESSED IN HELA, SIGNAL = 3.3; EXPRESSED IN HEART, SIGNAL = 3.2; EXPRESSED IN BT474, SIGNAL = 3.2; EXPRESSED IN ADULT LIVER, SIGNAL = 4.7; EXPRESSED IN FETAL LIVER, SIGNAL =   3; SWISSPROT HIT: P03103, EVALUE 2.00e+00; EST_HUMAN HIT: AA143501.1, EVALUE 2.00e+00
HPSLGRTQMLFGQVIPPAWSDSHPLTRYESLSPLQIQEHSTQRSLCFTAEYVGVGFQARVTAHLRRDHIPT

SEQ ID NO: 36980 - protein, 24 aa, Homo sapiens
  MAP TO AF030453.1; EXPRESSED IN PLACENTA, SIGNAL = 3.2; EXPRESSED IN HBL100, SIGNAL = 3.4; EXPRESSED IN LUNG, SIGNAL = 3.3; EXPRESSED IN BRAIN, SIGNAL = 3.4; EXPRESSED IN BONE MARROW, SIGNAL = 3.3; EXPRESSED IN HELA, SIGNAL = 3.3; EXPRESSED IN HEART, SIGNAL = 3.2; EXPRESSED IN BT474, SIGNAL = 3.2; EXPRESSED IN ADULT LIVER, SIGNAL = 4.7; EXPRESSED IN FETAL LIVER, SIGNAL =   3; EST_HUMAN HIT: F01065.1, EVALUE 1.90e+00
TPPWAGHRCSLGRSSLRPGVTPTR

SEQ ID NO: 36981 - protein, 135 aa, Homo sapiens
  MAP TO AF110324.1; EXPRESSED IN BRAIN, SIGNAL =   1; EXPRESSED IN LUNG, SIGNAL =   1; EXPRESSED IN HEART, SIGNAL = 1.1; EXPRESSED IN HELA, SIGNAL = 0.99; EXPRESSED IN ADULT LIVER, SIGNAL =   1; SWISSPROT HIT: Q9T1R5, EVALUE 1.20e+00; EST_HUMAN HIT: BE252133.1, EVALUE 4.00e-30
MSRISSSDANSTISFGDVDCDFCPVEDHVDATTTETYMGEWKNDKRNGFGVSERSNGMKYEGEWANNKRHGYGCTVFPDGSKEEGKYKNNILVRGIRKQLIPIRHTKTREKVDRAIEGAQRAAAMARTKVEIANS

SEQ ID NO: 36982 - protein, 63 aa, Homo sapiens
  MAP TO AL121748.2; EXPRESSED IN PLACENTA, SIGNAL = 1.5; EXPRESSED IN ADULT LIVER, SIGNAL = 1.4; EXPRESSED IN BT474, SIGNAL = 1.9; EXPRESSED IN BONE MARROW, SIGNAL = 3.2; EXPRESSED IN HBL100, SIGNAL = 1.3; EXPRESSED IN HEART, SIGNAL = 1.4; EXPRESSED IN BRAIN, SIGNAL = 1.7; EXPRESSED IN LUNG, SIGNAL = 1.2; EST_HUMAN HIT: R61632.1, EVALUE 3.00e-25; SWISSPROT HIT: O14786, EVALUE 7.00e-34
VIKSPGFPEKYPNSLECTYIVFVPKMSEIILEFESFDLEPDSNPPGGMFCRYDRLEIWDGFPD

SEQ ID NO: 36983 - protein, 325 aa, Homo sapiens
  MAP TO AC004129.1; EXPRESSED IN LUNG, SIGNAL = 1.6; EXPRESSED IN HBL100, SIGNAL = 1.2; EXPRESSED IN HELA, SIGNAL = 1.3; EXPRESSED IN HEART, SIGNAL = 1.1; EXPRESSED IN PLACENTA, SIGNAL = 1.3; EXPRESSED IN ADULT LIVER, SIGNAL = 1.1; EXPRESSED IN FETAL LIVER, SIGNAL = 1.3; EXPRESSED IN BRAIN, SIGNAL =   1; EXPRESSED IN BONE MARROW, SIGNAL =   1; EST_HUMAN HIT: BF240303.1, EVALUE 2.00e-96; SWISSPROT HIT: P10659, EVALUE 3.80e+00
FNVFKLVSKSIAMYTPMPISCTQTMKMGMTFDLPFVAISLINFFLLFIPQLQQEKFHPVFKPPRPLEGRIARLIQNRRSLEAIVQQRPRSCPDCTPRVLCNFHTFVPSSKEMVALSDNIPAGVTHKNQDIEEKIIEEQSLLSTYELPSCYPTKDLTSIYDIKPFPKITDTKKTEDLYWRQQSLKTQPTPYCKPDHWIHYENLKSPLRDQYNMCPDPVSLSKPSVLQNKQDTEAFTLEHFLSKPEEELFLNMENNEETRPVLGWIPRAGVTKPQTNLLELKNSFSKTGAQKRFHKSILEDHKDLRDNEHSGMKHQFYGHNSYYFYN

SEQ ID NO: 36984 - protein, 82 aa, Homo sapiens
  MAP TO AL031058.1; EXPRESSED IN LUNG, SIGNAL = 1.6; EXPRESSED IN BRAIN, SIGNAL = 1.1; EXPRESSED IN HELA, SIGNAL = 3.9; EXPRESSED IN PLACENTA, SIGNAL = 2.6; EXPRESSED IN BT474, SIGNAL = 3.8; EXPRESSED IN ADULT LIVER, SIGNAL = 1.2; EXPRESSED IN BONE MARROW, SIGNAL = 0.97; EXPRESSED IN HEART, SIGNAL = 4.5; EXPRESSED IN HBL100, SIGNAL = 1.3; EXPRESSED IN FETAL LIVER, SIGNAL = 2.3; EST_HUMAN HIT: AW847688.1, EVALUE 9.00e-19
KGFPGEDCEGPGYHAVPELSERAAAAEAEGGRGAESAEEDRVRRLLQEEEAGGRAGRHEEVAEGASHQNHQPDPAAGAGIHC

SEQ ID NO: 36985 - protein, 191 aa, Homo sapiens
  MAP TO AL121756.6; EXPRESSED IN BONE MARROW, SIGNAL = 2.3; EXPRESSED IN BRAIN, SIGNAL = 1.3; EXPRESSED IN HBL100, SIGNAL =   1; EXPRESSED IN HEART, SIGNAL = 0.96; SWISSPROT HIT: Q05819, EVALUE 7.80e+00
ISGMLQQSDALHSALREVPLGKARGDGGGPLLGGLLGGSGSGGGGGGGLLGGLLGGGGGGGGSDLLGGGLLGGSGSSGGELLGGGGGSGGGLLGGSGGGLLGGSGGGLLGGSRGGLLGGSGGGLLGGGRHHYNDYRRIEFPRGVGDIPYNDFHVRGPPPVYTNGKKLDGIYQYGHIETNDNTAQLGGKYRY

SEQ ID NO: 36986 - protein, 95 aa, Homo sapiens
  MAP TO AP000014.2; EXPRESSED IN PLACENTA, SIGNAL =  16; EXPRESSED IN HBL100, SIGNAL =  36; EXPRESSED IN ADULT LIVER, SIGNAL = 4.1; EXPRESSED IN BT474, SIGNAL =  21; EXPRESSED IN BONE MARROW, SIGNAL =  16; EXPRESSED IN BRAIN, SIGNAL =  10; EXPRESSED IN HEART, SIGNAL =  12; EXPRESSED IN FETAL LIVER, SIGNAL =  11; EXPRESSED IN LUNG, SIGNAL =  14; EXPRESSED IN HELA, SIGNAL =  15; SWISSPROT HIT: P48051, EVALUE 7.00e-40; EST_HUMAN HIT: AW015600.1, EVALUE 6.00e-19
MTCQARSSYITSEILWGYRFTPVLTLEDGFYEVDYNSFHETYETSTPSLSAKELAELASRAELPLSWSVSSKLNQHAELETEEEEKNLEEQTERN

SEQ ID NO: 36987 - protein, 96 aa, Homo sapiens
  MAP TO AF031078.1; EXPRESSED IN BRAIN, SIGNAL = 2.2; EXPRESSED IN HELA, SIGNAL = 2.4; EXPRESSED IN HBL100, SIGNAL = 2.7; EXPRESSED IN FETAL LIVER, SIGNAL = 2.2; EXPRESSED IN ADULT LIVER, SIGNAL = 2.4; EXPRESSED IN LUNG, SIGNAL = 2.4; EXPRESSED IN BONE MARROW, SIGNAL = 2.3; EXPRESSED IN PLACENTA, SIGNAL = 2.1; EXPRESSED IN HEART, SIGNAL =   2; EXPRESSED IN BT474, SIGNAL = 2.2; EST_HUMAN HIT: BE797838.1, EVALUE 2.00e-32; SWISSPROT HIT: P51608, EVALUE 2.00e-33
KVKKDKKEEKEGKHEPVQPSAHHSAEPAEAGKAETSEGSGSAPAVPEASASPKQRRSIIRDRGPMYDDPTLPEGWTRKLKQRKSGRSAGKYDVYLI

SEQ ID NO: 36988 - protein, 190 aa, Homo sapiens; identical to SEQ ID NO: 34862
  MAP TO AC010130.3; EXPRESSED IN FETAL LIVER, SIGNAL = 2.7; EXPRESSED IN LUNG, SIGNAL = 3.2; EXPRESSED IN BRAIN, SIGNAL =   6; EXPRESSED IN HELA, SIGNAL = 1.7; EXPRESSED IN PLACENTA, SIGNAL = 1.8; EXPRESSED IN BT474, SIGNAL = 0.95; EXPRESSED IN ADULT LIVER, SIGNAL = 1.4; EXPRESSED IN BONE MARROW, SIGNAL = 1.5; EXPRESSED IN HEART, SIGNAL = 2.4; EXPRESSED IN HBL100, SIGNAL = 1.3; EST_HUMAN HIT: BF245591.1, EVALUE 1.00e-53; SWISSPROT HIT: P37275, EVALUE 2.00e-33

SEQ ID NO: 36989 - protein, 39 aa, Homo sapiens
  MAP TO AC012330.5; EXPRESSED IN ADULT LIVER, SIGNAL = 0.99; EXPRESSED IN HEART, SIGNAL = 1.1; EXPRESSED IN BT474, SIGNAL =   1; EXPRESSED IN FETAL LIVER, SIGNAL =   1; EXPRESSED IN BONE MARROW, SIGNAL = 1.1; EXPRESSED IN BRAIN, SIGNAL =   1; EXPRESSED IN PLACENTA, SIGNAL = 0.98
ASSEPPPFSSLSPYHCYSSSYSYRYPLFVVAPGTSNSWL

SEQ ID NO: 36990 - protein, 36 aa, Homo sapiens
  MAP TO AF042089.1; EXPRESSED IN PLACENTA, SIGNAL = 1.6; EXPRESSED IN HBL100, SIGNAL = 1.1; EXPRESSED IN FETAL LIVER, SIGNAL = 1.1; EXPRESSED IN BT474, SIGNAL = 0.95; EXPRESSED IN BRAIN, SIGNAL = 1.2; EXPRESSED IN LUNG, SIGNAL = 1.3; EXPRESSED IN HEART, SIGNAL = 1.3; SWISSPROT HIT: Q15746, EVALUE 3.00e-11
MRGVLKRCMETRQHTEEAIHQEEMEQLDFRDLLGKK

SEQ ID NO: 36991 - protein, 20 aa, Homo sapiens
  MAP TO AF042089.1; EXPRESSED IN PLACENTA, SIGNAL = 1.6; EXPRESSED IN HBL100, SIGNAL = 1.1; EXPRESSED IN FETAL LIVER, SIGNAL = 1.1; EXPRESSED IN BT474, SIGNAL = 0.95; EXPRESSED IN BRAIN, SIGNAL = 1.2; EXPRESSED IN LUNG, SIGNAL = 1.3; EXPRESSED IN HEART, SIGNAL = 1.3
GQQEGRVGQRRKTARTCEGC

SEQ ID NO: 36992 - protein, 279 aa, Homo sapiens
  MAP TO AL049576.15; EXPRESSED IN BONE MARROW, SIGNAL = 1.1; EXPRESSED IN HBL100, SIGNAL =   1; EXPRESSED IN HEART, SIGNAL =   2; SWISSPROT HIT: P28221, EVALUE 0.00e+00; EST_HUMAN HIT: BF196846.1, EVALUE 1.00e-66
TITHTWNFGQILCDIWLSSDITCCTASILHLCVIALDRYWAITDALEYSKRRTAGHAATMIAIVWAISICISIPPLFWRQAKAQEEMSDCLVNTSQISYTIYSTCGAFYIPSVLLIILYGRIYRAARNRILNPPSLYGKRFTTAHLITGSAGSSLCSLNSSLHEGHSHSAGSPLFFNHVKIKLADSALERKRISAARERKATKILGIILGAFIICWLPFFVVSLVLPICRDSCWIHPALFDFFTWLGYLNSLINPIIYTVFNEEFRQAFQKIVPFRKAS

SEQ ID NO: 36993 - protein, 76 aa, Homo sapiens
  MAP TO AC010930.2; EXPRESSED IN LUNG, SIGNAL = 2.3; EXPRESSED IN BONE MARROW, SIGNAL =   2; EXPRESSED IN BRAIN, SIGNAL = 1.7; EXPRESSED IN HELA, SIGNAL = 2.3; EXPRESSED IN PLACENTA, SIGNAL =   3; EXPRESSED IN BT474, SIGNAL = 1.8; EXPRESSED IN HEART, SIGNAL = 2.8; EXPRESSED IN HBL100, SIGNAL = 1.9; EXPRESSED IN ADULT LIVER, SIGNAL = 2.5; EXPRESSED IN FETAL LIVER, SIGNAL = 2.4; EST_HUMAN HIT: AI138213.1, EVALUE 6.00e-22
SSTACLSGGPLQGIWDMCLSYRCHLSLLHNCGHLFSHAPCSPPCCPSCPHPPCQFLSALPTHGQSHNLWCQDQANP

SEQ ID NO: 36994 - protein, 95 aa, Homo sapiens
  MAP TO AP000090.1; EXPRESSED IN LUNG, SIGNAL = 1.4; EXPRESSED IN HELA, SIGNAL = 1.4; EXPRESSED IN ADULT LIVER, SIGNAL = 1.2; EXPRESSED IN BRAIN, SIGNAL = 1.2; EXPRESSED IN HEART, SIGNAL = 1.1; EXPRESSED IN BONE MARROW, SIGNAL = 1.1; EXPRESSED IN PLACENTA, SIGNAL = 0.93; EXPRESSED IN BT474, SIGNAL =   1; EXPRESSED IN FETAL LIVER, SIGNAL =   1; EXPRESSED IN HBL100, SIGNAL = 0.85; EST_HUMAN HIT: BF089074.1, EVALUE 2.90e+00
SSLIPHSSHSTLCIPLTSTLALSLHRYASLYGSQKFLCDLRNLQFPPQSPVIRHLFLELQGMSSLLSFWLSDSLGTVVSSTVSQWHRLMGAFSPH

SEQ ID NO: 36995 - protein, 171 aa, Homo sapiens
  MAP TO AF121781.1; EXPRESSED IN HEART, SIGNAL = 1.6; EST_HUMAN HIT: AW300339.1, EVALUE 3.00e-29; SWISSPROT HIT: O95447, EVALUE 1.00e-92
QKEISVEKKHTWNASLFNSQIHMIAQRRDAMAHRILSARLHKIKGLKNELADMHHKLEAILTENQFLKQLQLRHLKAIGKYENSQNNLPQIMAKHQNEVKNLRQLLRKSQEKERTLSRKLRETDSQLLKTKDILQALQKLSEDKNLAEREELTHKLSIITTKMDANDKKIQ

SEQ ID NO: 36996 - protein, 48 aa, Homo sapiens [sequence omitted]

SEQ ID NO: 36997 - protein, 38 aa, Homo sapiens
  MAP TO AP000070.1; EXPRESSED IN BONE MARROW, SIGNAL = 1.1; EXPRESSED IN BRAIN, SIGNAL = 1.5; EXPRESSED IN HBL100, SIGNAL = 1.5; EXPRESSED IN PLACENTA, SIGNAL = 1.2; EXPRESSED IN HEART, SIGNAL = 1.2; EXPRESSED IN BT474, SIGNAL = 1.5; EST_HUMAN HIT: BF241514.1, EVALUE 3.20e+00; SWISSPROT HIT: P40072, EVALUE 8.10e+00
GNEHKRINSTKVWAPDVCPALHQALERQSFCPQGGHCA

SEQ ID NO: 36998 - protein, 229 aa, Homo sapiens
  MAP TO AL049563.4; EXPRESSED IN LUNG, SIGNAL = 1.1; EXPRESSED IN HELA, SIGNAL = 1.1; EXPRESSED IN ADULT LIVER, SIGNAL = 1.1; EXPRESSED IN HEART, SIGNAL = 1.1; EXPRESSED IN BONE MARROW, SIGNAL = 0.77; EXPRESSED IN BRAIN, SIGNAL = 1.1; EXPRESSED IN PLACENTA, SIGNAL = 0.9; EXPRESSED IN BT474, SIGNAL = 0.7; EXPRESSED IN FETAL LIVER, SIGNAL = 0.84; EXPRESSED IN HBL100, SIGNAL = 0.81; SWISSPROT HIT: Q9UL62, EVALUE 1.00e-106; EST_HUMAN HIT: BF571666.1, EVALUE 8.80e-01
ELKQDISSFRYEVLDLLGNRKHPRSFSTSSTELSQRDDNNDGSGGARAKSKSVSFNLGCKKKTCHGPPLIRTMPRSSGAQGKSKAESSSKRSFMGPSLKKLGLLFSKFNGHMSEPSSEPMYTISDGIVQQHCMWQDIRYSQMEKGKAEACSQSEINLSEVELGEVQGAAQSSECPLACSSSLHCASSICSSNSKLLDSSEDVFETWGEACDLLMHKWGDGQEEQVTTRL

SEQ ID NO: 36999 - protein, 61 aa, Homo sapiens
  MAP TO AC005291.1; EXPRESSED IN HELA, SIGNAL =   3; EXPRESSED IN PLACENTA, SIGNAL = 4.5; EXPRESSED IN BT474, SIGNAL = 4.5; EXPRESSED IN BRAIN, SIGNAL =   5; EXPRESSED IN HBL100, SIGNAL =   5; EXPRESSED IN HEART, SIGNAL = 3.3; EXPRESSED IN ADULT LIVER, SIGNAL = 3.3; EXPRESSED IN FETAL LIVER, SIGNAL =   3; EXPRESSED IN LUNG, SIGNAL = 4.7; EXPRESSED IN BONE MARROW, SIGNAL = 5.7
VMMVIMMTVMMMMMMVMMTVIIMVVVKLEEGDLRIIFCCHRCCQSSSISNPTVSKAFGVGW

SEQ ID NO: 37000 - protein, 26 aa, Homo sapiens
  MAP TO AC005291.1; EXPRESSED IN HELA, SIGNAL =   3; EXPRESSED IN PLACENTA, SIGNAL = 4.5; EXPRESSED IN BT474, SIGNAL = 4.5; EXPRESSED IN BRAIN, SIGNAL =   5; EXPRESSED IN HBL100, SIGNAL =   5; EXPRESSED IN HEART, SIGNAL = 3.3; EXPRESSED IN ADULT LIVER, SIGNAL = 3.3; EXPRESSED IN FETAL LIVER, SIGNAL =   3; EXPRESSED IN LUNG, SIGNAL = 4.7; EXPRESSED IN BONE MARROW, SIGNAL = 5.7
TSPPQMPLTQWGWKLRRIGSSGGSRK

SEQ ID NO: 37001 - protein, 79 aa, Homo sapiens
  MAP TO AC007629.3; EXPRESSED IN FETAL LIVER, SIGNAL = 0.98; EXPRESSED IN LUNG, SIGNAL = 0.93; EXPRESSED IN HELA, SIGNAL = 1.5; EXPRESSED IN ADULT LIVER, SIGNAL = 1.1; EXPRESSED IN HEART, SIGNAL = 1.2; EXPRESSED IN PLACENTA, SIGNAL = 0.59; EXPRESSED IN BT474, SIGNAL = 0.95; EXPRESSED IN BONE MARROW, SIGNAL = 0.72; EXPRESSED IN HBL100, SIGNAL = 0.99; SWISSPROT HIT: Q59536, EVALUE 7.30e-02; EST_HUMAN HIT: Z21249.1, EVALUE 5.00e-41
PITETASPRKTEDSFYNNSYNPFKEVQTPQYLNPFDEPEAFVTIKDSPPQSTKRKNIRPVDMSKYLYADSSKTEEEELD

SEQ ID NO: 37002 - protein, 32 aa, Homo sapiens
  MAP TO AC007629.3; EXPRESSED IN FETAL LIVER, SIGNAL = 0.98; EXPRESSED IN LUNG, SIGNAL = 0.93; EXPRESSED IN HELA, SIGNAL = 1.5; EXPRESSED IN ADULT LIVER, SIGNAL = 1.1; EXPRESSED IN HEART, SIGNAL = 1.2; EXPRESSED IN PLACENTA, SIGNAL = 0.59; EXPRESSED IN BT474, SIGNAL = 0.95; EXPRESSED IN BONE MARROW, SIGNAL = 0.72; EXPRESSED IN HBL100, SIGNAL = 0.99; EST_HUMAN HIT: AI240273.1, EVALUE 1.00e-10
NLSLKQLHLEKQKTLFIITAIIPLKRCRLHSI

SEQ ID NO: 37003 - protein, 70 aa, Homo sapiens
  MAP TO AL035423.4; EXPRESSED IN PLACENTA, SIGNAL =   1; EXPRESSED IN HBL100, SIGNAL = 0.98; EXPRESSED IN HEART, SIGNAL = 1.7; EXPRESSED IN BT474, SIGNAL =   1; EXPRESSED IN FETAL LIVER, SIGNAL = 1.6; EXPRESSED IN ADULT LIVER, SIGNAL = 1.1; EXPRESSED IN BONE MARROW, SIGNAL = 1.4; EXPRESSED IN HELA, SIGNAL =   1; EXPRESSED IN BRAIN, SIGNAL =   1; EST_HUMAN HIT: BE164243.1, EVALUE 2.10e+00; SWISSPROT HIT: P12036, EVALUE 4.90e-01
MFHLSNLLAVHGGNLEHVAVEEDKEEHGWEEANAGEGQHEVRVKYSKEAALPFVGSLLEHGDSEWEEANE

SEQ ID NO: 37004 - protein, 261 aa, Homo sapiens
  MAP TO AL035423.4; EXPRESSED IN PLACENTA, SIGNAL =   1; EXPRESSED IN HBL100, SIGNAL = 0.98; EXPRESSED IN HEART, SIGNAL = 1.7; EXPRESSED IN BT474, SIGNAL =   1; EXPRESSED IN FETAL LIVER, SIGNAL = 1.6; EXPRESSED IN ADULT LIVER, SIGNAL = 1.1; EXPRESSED IN BONE MARROW, SIGNAL = 1.4; EXPRESSED IN HELA, SIGNAL =   1; EXPRESSED IN BRAIN, SIGNAL =   1; SWISSPROT HIT: P41596, EVALUE 2.00e-20; EST_HUMAN HIT: AU131780.1, EVALUE 5.00e-08
SLCFTLNLAVADTLIGVAISGLLTDQLSSPSRPTQKTLCSLRMAFVTSSAAASVLTVMLITFDRYLAIKQPFRYLKIMSGFVAGACIAGLWLVSYLIGFLPLGIPMFQQTAYKGQCSFFAVFHPHFVLTLSCVGFFPAMLLFVFFYCDMLKIASMHSQQIRKMEHAGAMAGGYRSPRTPSDFKALRTVSVLIGSFALSWTPFLITGIVQVACQECHLYLVLERYLWLLGVGNSLLNPLIYAYWQKEVRLQLYHMALGVKKV

SEQ ID NO: 37005 - protein, 35 aa, Homo sapiens [sequence omitted]

SEQ ID NO: 37006 - protein, 201 aa, Homo sapiens
  MAP TO AC003037.1; EXPRESSED IN ADULT LIVER, SIGNAL = 8.6; EXPRESSED IN LUNG, SIGNAL =   8; EXPRESSED IN BRAIN, SIGNAL = 6.2; EXPRESSED IN HBL100, SIGNAL = 7.3; EXPRESSED IN HELA, SIGNAL = 6.5; EXPRESSED IN HEART, SIGNAL = 5.7; EXPRESSED IN PLACENTA, SIGNAL =   7; EXPRESSED IN BT474, SIGNAL = 6.4; EXPRESSED IN FETAL LIVER, SIGNAL = 6.1; EXPRESSED IN BONE MARROW, SIGNAL = 7.2; EST_HUMAN HIT: AA610816.1, EVALUE 3.00e-46; SWISSPROT HIT: P22016, EVALUE 1.50e+00
LENEVYCNPKQSVIDRSVNGLINGNVVPCNGEISGDFLNNPFKQENVLARMVASRITNYPTAWVEGSSPDSDLEFVANTKARVKELQQEAERLEKAFRSYHRRVIKNSAKSPLAAKSPPSLHLLEAFKNITSSSPERHIFGEDRVVSEQPQVGTLEERNDVVEALTGSAASRLRGGTSSRRLSSTPLPKAKRSLESEMYLE

SEQ ID NO: 37007 - protein, 19 aa, Homo sapiens
  MAP TO AC003037.1; EXPRESSED IN ADULT LIVER, SIGNAL = 8.6; EXPRESSED IN LUNG, SIGNAL =   8; EXPRESSED IN BRAIN, SIGNAL = 6.2; EXPRESSED IN HBL100, SIGNAL = 7.3; EXPRESSED IN HELA, SIGNAL = 6.5; EXPRESSED IN HEART, SIGNAL = 5.7; EXPRESSED IN PLACENTA, SIGNAL =   7; EXPRESSED IN BT474, SIGNAL = 6.4; EXPRESSED IN FETAL LIVER, SIGNAL = 6.1; EXPRESSED IN BONE MARROW, SIGNAL = 7.2; EST_HUMAN HIT: AA463600.1, EVALUE 7.00e-07
CDRSFCQWINKWQCGALQW

SEQ ID NO: 37008 - protein, 187 aa, Homo sapiens
  MAP TO AC005521.1; EXPRESSED IN PLACENTA, SIGNAL = 2.5; EXPRESSED IN ADULT LIVER, SIGNAL = 2.2; EXPRESSED IN BRAIN, SIGNAL = 1.8; EXPRESSED IN HEART, SIGNAL = 1.7; EXPRESSED IN HELA, SIGNAL = 1.6; EXPRESSED IN HBL100, SIGNAL = 1.6; EXPRESSED IN BT474, SIGNAL = 1.5; EXPRESSED IN FETAL LIVER, SIGNAL = 2.1; EXPRESSED IN LUNG, SIGNAL = 2.2; EXPRESSED IN BONE MARROW, SIGNAL = 1.7; EST_HUMAN HIT: BF058517.1, EVALUE 5.00e-66; SWISSPROT HIT: P53538, EVALUE 2.00e-37
VAVVCVSNINRSMEAHSILRRKGLSVRSFGTESHVRLPGRRPNHPVVYDFATTYKEMYNDLLRKDRECYTHNGILHILGRNERIKPGPERFQECTEFFDVIFTCEERVYDTVVEDLCSREQQTFQPVHVINMDIKDTLEGAILGAFLICEICQCLQQSDDMEDSLEELLLQMEEKAGKSFLHTVCFY

SEQ ID NO: 37009 - protein, 35 aa, Homo sapiens
  MAP TO AC005521.1; EXPRESSED IN PLACENTA, SIGNAL = 2.5; EXPRESSED IN ADULT LIVER, SIGNAL = 2.2; EXPRESSED IN BRAIN, SIGNAL = 1.8; EXPRESSED IN HEART, SIGNAL = 1.7; EXPRESSED IN HELA, SIGNAL = 1.6; EXPRESSED IN HBL100, SIGNAL = 1.6; EXPRESSED IN BT474, SIGNAL = 1.5; EXPRESSED IN FETAL LIVER, SIGNAL = 2.1; EXPRESSED IN LUNG, SIGNAL = 2.2; EXPRESSED IN BONE MARROW, SIGNAL = 1.7
LPTQGGCGVCEQHQQEHGGPQHPQEKRAKCPVFRN

SEQ ID NO: 37010 - protein, 413 aa, Homo sapiens
  MAP TO AC003682.1; EXPRESSED IN BONE MARROW, SIGNAL = 4.3; EXPRESSED IN HELA, SIGNAL = 3.6; EXPRESSED IN PLACENTA, SIGNAL = 4.9; EXPRESSED IN BT474, SIGNAL = 4.2; EXPRESSED IN ADULT LIVER, SIGNAL = 4.7; EXPRESSED IN BRAIN, SIGNAL =   4; EXPRESSED IN HEART, SIGNAL = 3.9; EXPRESSED IN HBL100, SIGNAL = 4.2; EXPRESSED IN FETAL LIVER, SIGNAL = 4.1; EXPRESSED IN LUNG, SIGNAL = 4.8; EST_HUMAN HIT: BE880254.1, EVALUE 1.00e-114; SWISSPROT HIT: P52741, EVALUE 0.00e+00
CWHEVKDEESSSEQSISIAVSHVNTSKAGLPAQTALPCDICGPILKDILHLDEHQGTHHGLKLHTCGACGRQFWFSANLHQYQKCYSIEQPLRRDKSEASIVKNCTVSKEPHPSEKPFTCKEEQKNFQATLGGCQQKAIHSKRKTHRSTESGDAFHGEQMHYKCSECGKAFSRKDTLVQHQRIHSGEKPYECSECGKAFSRKATLVQHQRIHTGERPYECSECGKTFSRKDNLTQHKRIHTGEMPYKCNECGKYFSHHSNLIVHQRVHNGARPYKCSDCGKVFRHKSTLVQHESIHTGENPYDCSDCGKSFGHKYTLIKHQRIHTESKPFECIECGKFFSRSSDYIAHQRVHTGERPFVCSKCGKDFIRTSHLVRHQRVHTGERPYECSECGKAYSLSSHLNRHQKVHTAGRL

SEQ ID NO: 37011 - protein, 446 aa, Homo sapiens
  MAP TO AL035685.17; EXPRESSED IN HELA, SIGNAL = 1.3; EXPRESSED IN PLACENTA, SIGNAL = 1.2; EXPRESSED IN FETAL LIVER, SIGNAL = 1.5; EXPRESSED IN BRAIN, SIGNAL =   3; EXPRESSED IN LUNG, SIGNAL = 1.3; EXPRESSED IN BONE MARROW, SIGNAL = 1.3; EXPRESSED IN HEART, SIGNAL = 1.6; EXPRESSED IN HBL100, SIGNAL = 1.2; EXPRESSED IN ADULT LIVER, SIGNAL = 1.4; EXPRESSED IN BT474, SIGNAL = 1.2; SWISSPROT HIT: Q14721, EVALUE 0.00e+00; EST_HUMAN HIT: U69191.1, EVALUE 2.00e-54
ILAIISIMFIVLSTIALSLNTLPELQSLDEFGQSTDNPQLAHVEAVCIAWFTMEYLLRFLSSPKKWKFFKGPLNAIDLLAILPYYVTIFLTESNKSVLQFQNVRRVVQIFRIMRILRILKLARHSTGLQSLGFTLRRSYNELGLLILFLAMGIMIFSSLVFFAEKDEDDTKFKSIPASFWWATITMTTVGYGDIYPKTLLGKIVGGLCCIAGVLVIALPIPIIVNNFSEFYKEQKRQEKAIKRREALERAKRNGSIVSMNMKDAFARSIEMMDIVVEKNGENMGKKDKVQDNHLSPNKWKWTKRTLSETSSSKSFETKEQGSPEKARSSSSPQHLNVQQLEDMYNKMAKTQSQPILNTKESAAQSKPKEELEMESIPSPVAPLPTRTEGVIDMRSMSSIDSFISCATDFPEATRFSHSPLTSLPSKTGGSTAPEVGWRGALGASGG

SEQ ID NO: 37012 - protein, 26 aa, Homo sapiens
  MAP TO AC007444.1; EXPRESSED IN PLACENTA, SIGNAL = 1.5; EXPRESSED IN ADULT LIVER, SIGNAL = 1.4; EXPRESSED IN BRAIN, SIGNAL = 1.1; EXPRESSED IN HEART, SIGNAL = 1.3; EXPRESSED IN FETAL LIVER, SIGNAL = 1.3; EXPRESSED IN BT474, SIGNAL = 1.2; EXPRESSED IN LUNG, SIGNAL = 1.5; EXPRESSED IN BONE MARROW, SIGNAL = 1.3; EXPRESSED IN HBL100, SIGNAL = 1.2; SWISSPROT HIT: P22460, EVALUE 2.20e+00
MTRCPTPIGLSAGAKEPGPSGLMVFI

SEQ ID NO: 37013 - protein, 30 aa, Homo sapiens
  MAP TO AJ011929.1; EXPRESSED IN PLACENTA, SIGNAL = 2.7; EXPRESSED IN HBL100, SIGNAL = 2.7; EXPRESSED IN HEART, SIGNAL = 2.3; EXPRESSED IN ADULT LIVER, SIGNAL = 3.8; EXPRESSED IN LUNG, SIGNAL = 3.3; EXPRESSED IN BRAIN, SIGNAL = 2.5; EXPRESSED IN HELA, SIGNAL = 2.9; EXPRESSED IN BT474, SIGNAL = 2.5; EXPRESSED IN FETAL LIVER, SIGNAL = 2.8; EXPRESSED IN BONE MARROW, SIGNAL = 2.5; EST_HUMAN HIT: AI734881.1, EVALUE 6.10e-01
GRILPSLFLVSDGCWHFLTLGRMTPISPLH

SEQ ID NO: 37014 - protein, 348 aa, Homo sapiens
  MAP TO AC005731.2; EXPRESSED IN PLACENTA, SIGNAL = 1.4; EXPRESSED IN ADULT LIVER, SIGNAL = 1.4; EXPRESSED IN BT474, SIGNAL = 0.91; EXPRESSED IN FETAL LIVER, SIGNAL = 1.1; EXPRESSED IN LUNG, SIGNAL = 0.94; EXPRESSED IN BONE MARROW, SIGNAL = 1.3; EXPRESSED IN BRAIN, SIGNAL = 1.1; EXPRESSED IN HEART, SIGNAL = 0.99; EST_HUMAN HIT: AW236201.1, EVALUE 3.00e-61; SWISSPROT HIT: P51816, EVALUE 0.00e+00
PEPPSTNKWQLDKWLNKVTSQNKSFICGQNETPMETISLPPPIIQPMEVQMKVKTNASQVPAEPKERPLLSLIREKARPRPTQKIPETKALKHKLSTTSETVSQRTIGKKQPKKVEKNTSTDEFTWPKPNITSSTPKEKESVELHDPPRGRNKATAHKPAPRKEPRPNIPLAPEKKKYRGPGKIVPKSREFIETDSSTSDSNTDQEETLQIKVLPPCIISGGNTAKSKEICGASLTLSTLMSSSGSNNNLSISNEEPTFSPIPVMQTEILSPLRDHENLKNLWVKIDLDLLSRVPGHSSLHAAPAKPDHKETATKPKRQTAVTAVEKPAPKGKRKHKVSCLKWPAKCL

SEQ ID NO: 37015 - protein, 266 aa, Homo sapiens
  MAP TO AC000015.2; EXPRESSED IN PLACENTA, SIGNAL = 2.9; EXPRESSED IN ADULT LIVER, SIGNAL = 1.8; EXPRESSED IN BRAIN, SIGNAL = 1.4; EXPRESSED IN HEART, SIGNAL = 1.9; EXPRESSED IN HELA, SIGNAL = 2.5; EXPRESSED IN HBL100, SIGNAL =   2; EXPRESSED IN BT474, SIGNAL = 2.5; EXPRESSED IN FETAL LIVER, SIGNAL = 1.9; EXPRESSED IN LUNG, SIGNAL = 2.6; EXPRESSED IN BONE MARROW, SIGNAL = 2.4; EST_HUMAN HIT: AI986247.1, EVALUE 1.00e-69; SWISSPROT HIT: P19246, EVALUE 9.00e-07
EKNESLTEHPRSTELPKTHIEQIQKHFSEDNNEMIPMECDSFCSDQNESEVEPSVNADLKQMNENSVTHCSENNMPSSDLADEKVETVSQPSESPKDTIDKTKKPRTRRSRFHSPSTTWSPNKDTPQEKKRPQSPSPRRETGKESRKSQSPSPKNESARGRKKSRSQSPKKDIARERRQSQSRSPKRDTTRESRRSESLSPRRETSRENKRSQPRVKDSSPGEKSRSQSRERESDRDGQRRERERRTRKWSRSRSHSRSPSRCRTK

SEQ ID NO: 37016 - protein, 43 aa, Homo sapiens
  MAP TO AL121588.14; EXPRESSED IN BRAIN, SIGNAL = 1.5; EXPRESSED IN BONE MARROW, SIGNAL = 1.5; EXPRESSED IN HBL100, SIGNAL = 1.6; EXPRESSED IN PLACENTA, SIGNAL = 1.6; EXPRESSED IN HEART, SIGNAL = 1.3; EXPRESSED IN LUNG, SIGNAL = 1.4; EXPRESSED IN HELA, SIGNAL = 1.7; EXPRESSED IN ADULT LIVER, SIGNAL = 1.8; EXPRESSED IN BT474, SIGNAL = 1.7; EXPRESSED IN FETAL LIVER, SIGNAL = 2.1; SWISSPROT HIT: P37001, EVALUE 8.00e+00
MTSELSWLESVCNDGDESLWRPLKDPNNHRKGLNRDLQVYEAE

SEQ ID NO: 37017 - protein, 41 aa, Homo sapiens
  MAP TO AC007245.3; EXPRESSED IN HELA, SIGNAL = 0.8; EXPRESSED IN BRAIN, SIGNAL = 0.74; EXPRESSED IN HEART, SIGNAL = 0.82; EXPRESSED IN BT474, SIGNAL = 0.6; EXPRESSED IN FETAL LIVER, SIGNAL = 1.1; EXPRESSED IN LUNG, SIGNAL = 0.89; EXPRESSED IN ADULT LIVER, SIGNAL = 0.73; EXPRESSED IN PLACENTA, SIGNAL = 0.77; EXPRESSED IN BONE MARROW, SIGNAL = 0.73; SWISSPROT HIT: Q90502, EVALUE 4.70e+00; EST_HUMAN HIT: BE074793.1, EVALUE 4.80e+00
GASSMGRMNTASSSSERSTLKTASAGPCFHGHCKHTLTCKV

SEQ ID NO: 37018 - protein, 90 aa, Homo sapiens
  MAP TO AC009819.2; EXPRESSED IN PLACENTA, SIGNAL = 2.4; EXPRESSED IN HELA, SIGNAL = 2.7; EXPRESSED IN HEART, SIGNAL = 2.4; EXPRESSED IN ADULT LIVER, SIGNAL = 2.8; EXPRESSED IN FETAL LIVER, SIGNAL = 2.7; EXPRESSED IN BRAIN, SIGNAL = 2.5; EXPRESSED IN BT474, SIGNAL = 2.2; EXPRESSED IN LUNG, SIGNAL = 2.3; EXPRESSED IN BONE MARROW, SIGNAL = 2.3; EXPRESSED IN HBL100, SIGNAL = 2.4; EST_HUMAN HIT: BE865670.1, EVALUE 3.90e+00; SWISSPROT HIT: P44567, EVALUE 6.70e-01
AQQNLVEHCDQVPPNGKNLVPKFLSFNFLYLPKSWAFQFQFLLSHLPLVSFHYPLLSPFGSLIRERRLGVVVVTAAGDSGNLGKFLEVKL

SEQ ID NO: 37019 - protein, 353 aa, Homo sapiens
  MAP TO AC002431.1; EXPRESSED IN LUNG, SIGNAL = 4.3; EXPRESSED IN BONE MARROW, SIGNAL = 3.3; EXPRESSED IN HELA, SIGNAL = 5.4; EXPRESSED IN PLACENTA, SIGNAL = 7.8; EXPRESSED IN BT474, SIGNAL = 7.2; EXPRESSED IN ADULT LIVER, SIGNAL = 3.7; EXPRESSED IN BRAIN, SIGNAL = 3.9; EXPRESSED IN HEART, SIGNAL = 3.5; EXPRESSED IN HBL100, SIGNAL = 5.3; EXPRESSED IN FETAL LIVER, SIGNAL = 5.6; EST_HUMAN HIT: BE141863.1, EVALUE 9.00e-14; SWISSPROT HIT: P36747, EVALUE 2.00e-04
VSANAKGSVCTSATMARPGIDRQASYGDLIGASVPAFPPPSANKIEENGPSTGSTPDPTSSTPPLPSNAAPPTAQTPGIAPQNSQAPPMHSLHSPCANTSLHPGLNPRIQAARFRFQGNANDPDQNGNTTQSPPSRDVSPTSRDNLVAKQLARNTVTQALSRFTSPQAGAPSRPGVPPTGDVGTHPPVGRTSLKTHGVARVDRGNPPPIPPKKPGLSQTPSPPHPQLKVIIDSSRASNTGAKVDNKTVASTPSSLPQGNRVINEENLPKSSSPQLPPKPSIDLTVAPAGCAVSALATSQVGAWPAATPGLNQPACSDSSLVIPTTIAFCSSINPVSASSCRPGASDSLLVTAS

SEQ ID NO: 37020 - protein, 62 aa, Homo sapiens
  MAP TO AC009886.2; EXPRESSED IN BONE MARROW, SIGNAL = 4.2; EXPRESSED IN HBL100, SIGNAL = 4.8; EXPRESSED IN HELA, SIGNAL = 5.8; EXPRESSED IN ADULT LIVER, SIGNAL = 6.6; EXPRESSED IN BRAIN, SIGNAL =   5; EXPRESSED IN LUNG, SIGNAL = 7.1; EXPRESSED IN PLACENTA, SIGNAL = 5.8; EXPRESSED IN HEART, SIGNAL =   5; EXPRESSED IN BT474, SIGNAL = 5.2; EXPRESSED IN FETAL LIVER, SIGNAL = 5.4; EST_HUMAN HIT: AA209456.1, EVALUE 5.00e-14; SWISSPROT HIT: Q58556, EVALUE 4.00e-13
VVIGTPTLKQRKEILQVITSKMPISSHVDLGLLAEMTVGYVGADLTALCREAAMHALLHSEK

SEQ ID NO: 37021 - protein, 20 aa, Homo sapiens
  MAP TO AC009886.2; EXPRESSED IN BONE MARROW, SIGNAL = 4.2; EXPRESSED IN HBL100, SIGNAL = 4.8; EXPRESSED IN HELA, SIGNAL = 5.8; EXPRESSED IN ADULT LIVER, SIGNAL = 6.6; EXPRESSED IN BRAIN, SIGNAL =   5; EXPRESSED IN LUNG, SIGNAL = 7.1; EXPRESSED IN PLACENTA, SIGNAL = 5.8; EXPRESSED IN HEART, SIGNAL =   5; EXPRESSED IN BT474, SIGNAL = 5.2; EXPRESSED IN FETAL LIVER, SIGNAL = 5.4
  unsure 3
LLXSFFCFALHIGGHWDSHT

SEQ ID NO: 37022 - protein, 67 aa, Homo sapiens
  MAP TO AC007016.5; EXPRESSED IN FETAL LIVER, SIGNAL = 1.8; EXPRESSED IN ADULT LIVER, SIGNAL = 0.97; EXPRESSED IN LUNG, SIGNAL = 1.1; EXPRESSED IN PLACENTA, SIGNAL = 1.6; EXPRESSED IN HBL100, SIGNAL = 2.4; EXPRESSED IN HEART, SIGNAL = 1.3; SWISSPROT HIT: P12868, EVALUE 2.40e+00
HFKTVLLKFFWETVEVFKLSLIMRIPLGADIYPKALGDALGKKVPGPGLMVQDLLIPTIISPVIPKM

SEQ ID NO: 37023 - protein, 24 aa, Homo sapiens
  MAP TO AC007221.1; EXPRESSED IN PLACENTA, SIGNAL = 2.7; EXPRESSED IN HBL100, SIGNAL =   3; EXPRESSED IN HEART, SIGNAL = 3.4; EXPRESSED IN BT474, SIGNAL =   3; EXPRESSED IN FETAL LIVER, SIGNAL = 3.1; EXPRESSED IN ADULT LIVER, SIGNAL = 3.7; EXPRESSED IN LUNG, SIGNAL = 3.3; EXPRESSED IN BONE MARROW, SIGNAL = 2.7; EXPRESSED IN BRAIN, SIGNAL = 2.7; EXPRESSED IN HELA, SIGNAL = 3.3
VCKTRRILATMSELMALCVAVRHV

SEQ ID NO: 37024 - protein, 40 aa, Homo sapiens
  MAP TO AC007029.2; EXPRESSED IN BRAIN, SIGNAL =  26; EXPRESSED IN HELA, SIGNAL =  41; EXPRESSED IN PLACENTA, SIGNAL =  40; EXPRESSED IN HBL100, SIGNAL =  29; EXPRESSED IN HEART, SIGNAL =  28; EXPRESSED IN BT474, SIGNAL =  28; EXPRESSED IN FETAL LIVER, SIGNAL =  39; EXPRESSED IN ADULT LIVER, SIGNAL =  46; EXPRESSED IN BONE MARROW, SIGNAL =  32; EXPRESSED IN LUNG, SIGNAL =  45; EST_HUMAN HIT: F03846.1, EVALUE 1.00e-08; SWISSPROT HIT: P39188, EVALUE 6.00e-06
QGLILSPRLEYSGTIASHCVLKHLGSSDLLTSVSLVAGTS

SEQ ID NO: 37025 - protein, 32 aa, Homo sapiens
  MAP TO AC007029.2; EXPRESSED IN BRAIN, SIGNAL =  26; EXPRESSED IN HELA, SIGNAL =  41; EXPRESSED IN PLACENTA, SIGNAL =  40; EXPRESSED IN HBL100, SIGNAL =  29; EXPRESSED IN HEART, SIGNAL =  28; EXPRESSED IN BT474, SIGNAL =  28; EXPRESSED IN FETAL LIVER, SIGNAL =  39; EXPRESSED IN ADULT LIVER, SIGNAL =  46; EXPRESSED IN BONE MARROW, SIGNAL =  32; EXPRESSED IN LUNG, SIGNAL =  45; EST_HUMAN HIT: AV726208.1, EVALUE 1.00e-06; SWISSPROT HIT: P39188, EVALUE 1.30e-02
RVSFCHPGWSTVVPLHLTVSSNTWAQVTFSPQ

SEQ ID NO: 37026 - protein, 485 aa, Homo sapiens
  MAP TO AC003002.1; EXPRESSED IN HEART, SIGNAL = 2.5; EXPRESSED IN ADULT LIVER, SIGNAL =   2; EXPRESSED IN FETAL LIVER, SIGNAL = 2.5; EXPRESSED IN LUNG, SIGNAL = 2.5; EXPRESSED IN BRAIN, SIGNAL = 2.2; EXPRESSED IN HBL100, SIGNAL = 2.5; EXPRESSED IN HELA, SIGNAL = 2.5; EXPRESSED IN PLACENTA, SIGNAL = 3.2; EXPRESSED IN BT474, SIGNAL = 2.8; EXPRESSED IN BONE MARROW, SIGNAL = 2.3; SWISSPROT HIT: P52740, EVALUE 1.00e-127; EST_HUMAN HIT: AV683451.1, EVALUE 1.00e-120
SWHGAEDEEAPSQQGFSVGVSEVTASKPCLSSQKVHPSETCGPPLKDILCLVEHNGIHPEQHIYICEAELFQHPKQQIGENLSRGDDWIPSFGKNHRVHMAEEIFTCMEGWKDLPATSCLLQHQGPQSEWKPYRDTEDREAFQTGQNDYKCSECGKTFTCSYSFVEHQKIHTGERSYECNKCGKFFKYSANFMKHQTVHTSERTYECRECGKSFMYNYRLMRHKRVHTGERPYECNTCGKFFRYSSTFVRHQRVHTGERPYECRECGKFFMDSSTLIKHQRVHTGERPYKCNDCGKFFRYISTLIRHQRIHTGERPYECSVCGELFRYNSSLVKHWRNHTGERPYKCSECGKSFRYHCRLIRHQRVHTGERPYECSECGKFFRYNSNLIKHWRNHTGERPYECRECGKAFSHKHILVEHQKIHSGERPYECSECQKAFIRKSHLVHHQKIHSEERLVCSMNVGNSLAKTPTSLNIRDFTMEKVYH

SEQ ID NO: 37027 - protein, 72 aa, Homo sapiens
  MAP TO AP000065.1; EXPRESSED IN BONE MARROW, SIGNAL = 4.6; EXPRESSED IN LUNG, SIGNAL = 4.1; EXPRESSED IN PLACENTA, SIGNAL = 3.8; EXPRESSED IN HELA, SIGNAL = 5.2; EXPRESSED IN HEART, SIGNAL = 4.8; EXPRESSED IN HBL100, SIGNAL = 5.1; EXPRESSED IN FETAL LIVER, SIGNAL = 4.3; EXPRESSED IN BT474, SIGNAL = 4.6; EXPRESSED IN ADULT LIVER, SIGNAL = 5.1; EXPRESSED IN BRAIN, SIGNAL = 3.7; EST_HUMAN HIT: AL046866.2, EVALUE 2.00e-40; EST_HUMAN HIT: AL046866.2, EVALUE 2.00e-40; SWISSPROT HIT: P24077, EVALUE 3.90e-01
DPLFSAQRLPPHGYPLEHPFNKDGYRYILAEPDPHAPDPEKLELDCWAGKPIPGDLYRACLYERVLLALHDR

SEQ ID NO: 37028 - protein, 52 aa, Homo sapiens
  MAP TO AP000556.2; EXPRESSED IN BT474, SIGNAL = 1.6; EXPRESSED IN FETAL LIVER, SIGNAL = 2.3; EXPRESSED IN BRAIN, SIGNAL = 1.4; EXPRESSED IN BONE MARROW, SIGNAL = 2.6; EXPRESSED IN HBL100, SIGNAL = 2.1; EXPRESSED IN PLACENTA, SIGNAL = 3.1; EXPRESSED IN LUNG, SIGNAL = 2.1; EXPRESSED IN HEART, SIGNAL = 2.2; EXPRESSED IN HELA, SIGNAL = 2.3; EXPRESSED IN ADULT LIVER, SIGNAL = 1.8; SWISSPROT HIT: P42356, EVALUE 2.00e-23; EST_HUMAN HIT: BE670661.1, EVALUE 9.00e-27
FGFMFESSPGGNLGWEPDIKLTDEMVMIMGGKMEATPFKWFMEMCVQATWLC

SEQ ID NO: 37029 - protein, 21 aa, Homo sapiens
  MAP TO AP000556.2; EXPRESSED IN BT474, SIGNAL = 1.6; EXPRESSED IN FETAL LIVER, SIGNAL = 2.3; EXPRESSED IN BRAIN, SIGNAL = 1.4; EXPRESSED IN BONE MARROW, SIGNAL = 2.6; EXPRESSED IN HBL100, SIGNAL = 2.1; EXPRESSED IN PLACENTA, SIGNAL = 3.1; EXPRESSED IN LUNG, SIGNAL = 2.1; EXPRESSED IN HEART, SIGNAL = 2.2; EXPRESSED IN HELA, SIGNAL = 2.3; EXPRESSED IN ADULT LIVER, SIGNAL = 1.8; EST_HUMAN HIT: BF035480.1, EVALUE 7.00e-04
TLASCLKARRAAISAGNPTSS

SEQ ID NO: 37030 - protein, 211 aa, Homo sapiens
  MAP TO AB019441.1; EXPRESSED IN HEART, SIGNAL = 6.1; EXPRESSED IN HBL100, SIGNAL =  20; EXPRESSED IN BT474, SIGNAL =  13; EXPRESSED IN FETAL LIVER, SIGNAL =  17; EXPRESSED IN ADULT LIVER, SIGNAL = 3.9; EXPRESSED IN BRAIN, SIGNAL = 4.2; EXPRESSED IN BONE MARROW, SIGNAL =  14; EXPRESSED IN LUNG, SIGNAL =  31; EXPRESSED IN PLACENTA, SIGNAL =  18; EXPRESSED IN HELA, SIGNAL =  15; SWISSPROT HIT: P09058, EVALUE 1.00e-107; EST_HUMAN HIT: BF526768.1, EVALUE 1.00e-108
RRAMGTSRDNWHKGRKAGGKRRPCHKKRKYELGRPAANSKTDPCRIHTVRVRGGNKKYCAPRLDVGNFSWGSECCAGETRVIDVVYNASNNELVRTKTVVKNCIVPIDSTPYRQWYESHCALPLGRKKGAKLTPEEEEILNKKRSKKIQKKYDERKKNAKMSSLLGEQFQQGKLLACMASRPGQCGRADGYVLEGKELEFYLRKIKAQKGK

SEQ ID NO: 37031 - protein, 59 aa, Homo sapiens
  MAP TO AC006387.3; EXPRESSED IN PLACENTA, SIGNAL = 0.74; EXPRESSED IN BONE MARROW, SIGNAL = 0.69; EXPRESSED IN BT474, SIGNAL = 0.62; EXPRESSED IN FETAL LIVER, SIGNAL = 0.73; EXPRESSED IN LUNG, SIGNAL = 0.65; EXPRESSED IN HEART, SIGNAL = 0.96; EST_HUMAN HIT: AI453055.1, EVALUE 6.10e-01
LKVIPNHKTVPYTACYAFIDGISTAAVCSVCPTDVHEIFALTFTIAFKDYLKAITCSNK

SEQ ID NO: 37032 - protein, 62 aa, Homo sapiens
  MAP TO AC009965.3; EXPRESSED IN FETAL LIVER, SIGNAL = 5.6; EXPRESSED IN BONE MARROW, SIGNAL = 4.9; EXPRESSED IN HBL100, SIGNAL = 5.1; EXPRESSED IN BT474, SIGNAL = 5.1; EXPRESSED IN ADULT LIVER, SIGNAL = 6.8; EXPRESSED IN BRAIN, SIGNAL = 4.4; EXPRESSED IN LUNG, SIGNAL = 5.9; EXPRESSED IN PLACENTA, SIGNAL = 4.6; EXPRESSED IN HEART, SIGNAL = 4.3; EXPRESSED IN HELA, SIGNAL = 5.6; EST_HUMAN HIT: BE293193.1, EVALUE 5.10e+00
TCITKNNKLQLPSGLESKALLMTVRLRLGIWPTSLIKNLKNLEMGTFSRRGMEFQNRRLREE

SEQ ID NO: 37033 - protein, 31 aa, Homo sapiens
  MAP TO AC006317.3; EXPRESSED IN BT474, SIGNAL = 0.78; EXPRESSED IN BONE MARROW, SIGNAL = 0.75; EXPRESSED IN BRAIN, SIGNAL = 0.79; EXPRESSED IN PLACENTA, SIGNAL = 0.85; EXPRESSED IN HEART, SIGNAL = 0.79; EXPRESSED IN ADULT LIVER, SIGNAL = 0.66; EXPRESSED IN LUNG, SIGNAL = 0.94; EXPRESSED IN FETAL LIVER, SIGNAL = 0.68
ELVVKYYQHTTVYNPNENVALCLKVVMILCK

SEQ ID NO: 37034 - protein, 92 aa, Homo sapiens
  MAP TO AC007746.1; EXPRESSED IN HEART, SIGNAL = 0.8; EXPRESSED IN PLACENTA, SIGNAL = 0.68; EXPRESSED IN BONE MARROW, SIGNAL = 0.71; EXPRESSED IN FETAL LIVER, SIGNAL = 0.9; EXPRESSED IN LUNG, SIGNAL = 0.68; SWISSPROT HIT: Q10223, EVALUE 3.10e+00
DSGFYAAIKLHVLQHPTLSCMQYLNTSAMILLKVPTITPRFLDRNQQTKASSLPNFSQYLTSLDHFTVCLLGLLPSSDIIAAQGSAILPRGG

SEQ ID NO: 37035 - protein, 24 aa, Homo sapiens
  MAP TO AC007746.1; EXPRESSED IN HEART, SIGNAL = 0.8; EXPRESSED IN PLACENTA, SIGNAL = 0.68; EXPRESSED IN BONE MARROW, SIGNAL = 0.71; EXPRESSED IN FETAL LIVER, SIGNAL = 0.9; EXPRESSED IN LUNG, SIGNAL = 0.68
VIPDFMLLSNCMSYSTPLSVACST

SEQ ID NO: 37036 - protein, 77 aa, Homo sapiens
  MAP TO AC010807.2; EXPRESSED IN PLACENTA, SIGNAL = 1.3; EXPRESSED IN HELA, SIGNAL = 1.8; EXPRESSED IN HEART, SIGNAL = 1.4; EXPRESSED IN ADULT LIVER, SIGNAL = 1.7; EXPRESSED IN FETAL LIVER, SIGNAL = 1.8; EXPRESSED IN HBL100, SIGNAL = 1.5; EXPRESSED IN BT474, SIGNAL = 1.8; EXPRESSED IN BRAIN, SIGNAL = 1.3; EXPRESSED IN LUNG, SIGNAL = 1.7; EXPRESSED IN BONE MARROW, SIGNAL = 1.4; EST_HUMAN HIT: AL040338.1, EVALUE 8.00e-37; SWISSPROT HIT: P42945, EVALUE 2.00e-03
SDSGDSIEVSRNVEEIVVKIISVFVDALPHVPEHRRLPILVQLVDTLGAEKFLWILLILLFEQYVTKTVLAAAYGEK

SEQ ID NO: 37037 - protein, 26 aa, Homo sapiens
  MAP TO AB016897.1; EXPRESSED IN HELA, SIGNAL = 1.7; EXPRESSED IN LUNG, SIGNAL = 0.67; EXPRESSED IN BRAIN, SIGNAL = 0.97; EXPRESSED IN BONE MARROW, SIGNAL = 1.5; EXPRESSED IN HEART, SIGNAL = 0.83; EXPRESSED IN ADULT LIVER, SIGNAL = 0.85; EXPRESSED IN PLACENTA, SIGNAL = 0.59; EXPRESSED IN FETAL LIVER, SIGNAL = 3.3
QQSSDNILICADARYSGCLPKSESFS

SEQ ID NO: 37038 - protein, 67 aa, Homo sapiens
  MAP TO AC009307.1; EXPRESSED IN ADULT LIVER, SIGNAL = 0.68; EXPRESSED IN BT474, SIGNAL = 0.66; EXPRESSED IN HELA, SIGNAL = 0.78; EXPRESSED IN HEART, SIGNAL = 0.83; EXPRESSED IN PLACENTA, SIGNAL = 0.63; EXPRESSED IN BONE MARROW, SIGNAL = 0.69; EXPRESSED IN HBL100, SIGNAL = 0.71; EXPRESSED IN FETAL LIVER, SIGNAL = 0.74; EXPRESSED IN LUNG, SIGNAL = 0.81; EXPRESSED IN BRAIN, SIGNAL = 0.74; EST_HUMAN HIT: BE076073.1, EVALUE 2.00e-33; SWISSPROT HIT: Q91739, EVALUE 6.50e-01
TYTIVTYVLVHVPQQTQLLGVSGISGICTKMLSLKSGVAHSPVAHGQKAGMSDHMQGASNNPTTGCT

SEQ ID NO: 37039 - protein, 42 aa, Homo sapiens
  MAP TO AC007720.1; EXPRESSED IN PLACENTA, SIGNAL = 0.63; EXPRESSED IN BONE MARROW, SIGNAL = 0.74; EXPRESSED IN FETAL LIVER, SIGNAL = 0.59; EXPRESSED IN LUNG, SIGNAL = 0.78; EXPRESSED IN ADULT LIVER, SIGNAL = 0.72; EXPRESSED IN BT474, SIGNAL = 0.64; EXPRESSED IN HBL100, SIGNAL = 1.6; EXPRESSED IN HELA, SIGNAL = 0.69; EXPRESSED IN BRAIN, SIGNAL = 0.95; EXPRESSED IN HEART, SIGNAL = 0.82; SWISSPROT HIT: O69552, EVALUE 3.60e+00
APRGISRRGARLPLSWLMKRGLPRAKKRMLTVVSKAQPRTGK

SEQ ID NO: 37040 - protein, 93 aa, Homo sapiens
  MAP TO AC010812.2; EXPRESSED IN BRAIN, SIGNAL = 1.7; EXPRESSED IN BONE MARROW, SIGNAL = 1.7; EXPRESSED IN LUNG, SIGNAL = 2.4; EXPRESSED IN HBL100, SIGNAL = 1.7; EXPRESSED IN HEART, SIGNAL =   2; EXPRESSED IN PLACENTA, SIGNAL = 1.7; EXPRESSED IN HELA, SIGNAL =   2; EXPRESSED IN ADULT LIVER, SIGNAL =   2; EXPRESSED IN BT474, SIGNAL = 1.8; EXPRESSED IN FETAL LIVER, SIGNAL = 2.1; EST_HUMAN HIT: BF333207.1, EVALUE 7.50e-02; SWISSPROT HIT: P97680, EVALUE 5.00e+00
LNWMGRMGKVTCTIHVEPLLPPRRMKSILPSTLHAKASYPVKNVWRQILGPFPCHSSALGALSQSLCLQKSPQRVGVNGKTWRSLWPWNTVPS

SEQ ID NO: 37041 - protein, 40 aa, Homo sapiens
  MAP TO AC007052.4; EXPRESSED IN HELA, SIGNAL = 1.1; EXPRESSED IN PLACENTA, SIGNAL = 1.1; EXPRESSED IN HBL100, SIGNAL = 0.91; EXPRESSED IN HEART, SIGNAL = 1.1; EXPRESSED IN FETAL LIVER, SIGNAL = 1.1; EXPRESSED IN ADULT LIVER, SIGNAL = 1.1; EXPRESSED IN LUNG, SIGNAL = 1.1; EXPRESSED IN BONE MARROW, SIGNAL =   1
CGHQQDAPSDEAGRICQASNGLEKISLKPIILSCDSTLTI

SEQ ID NO: 37042 - protein, 41 aa, Homo sapiens
  MAP TO AC007052.4; EXPRESSED IN HELA, SIGNAL = 1.1; EXPRESSED IN PLACENTA, SIGNAL = 1.1; EXPRESSED IN HBL100, SIGNAL = 0.91; EXPRESSED IN HEART, SIGNAL = 1.1; EXPRESSED IN FETAL LIVER, SIGNAL = 1.1; EXPRESSED IN ADULT LIVER, SIGNAL = 1.1; EXPRESSED IN LUNG, SIGNAL = 1.1; EXPRESSED IN BONE MARROW, SIGNAL =   1
AVVINKMPQVMKQGEFARLPMGWKKSLSSLSSSAVTPHSPS

SEQ ID NO: 37043 - protein, 215 aa, Homo sapiens
  MAP TO AC004099.1; EXPRESSED IN PLACENTA, SIGNAL = 1.9; EXPRESSED IN FETAL LIVER, SIGNAL =   1; EXPRESSED IN ADULT LIVER, SIGNAL = 1.2; EXPRESSED IN BONE MARROW, SIGNAL = 1.3; EXPRESSED IN LUNG, SIGNAL = 1.3; EXPRESSED IN BRAIN, SIGNAL = 1.3; EXPRESSED IN HEART, SIGNAL =   1; EXPRESSED IN HELA, SIGNAL = 0.98; EXPRESSED IN HBL100, SIGNAL = 0.97; EXPRESSED IN BT474, SIGNAL = 2.4; EST_HUMAN HIT: AW502213.1, EVALUE 2.00e-96; SWISSPROT HIT: Q02208, EVALUE 1.60e+00
MTALAATKTSSLADDFGEFSLFGEYSGLAPVGEQDDFADFMAFSNSSISSEQKPDDKYDALKEEASPVPLTSNVGSTVKGGQNSTAASTKYDVFRQLSLEGSGLGVEDLKDNTPSGKSDDDFADFHSSKFSSINSDKSLGEKAVAFRHTKEDSASVKSLDLPSIGGSSVGKEDSEDALSVQFDMKLADVGGDLKHVMSDSSLDLPTVSGQHPPAA

SEQ ID NO: 37044 - protein, 18 aa, Homo sapiens
  MAP TO AC004099.1; EXPRESSED IN PLACENTA, SIGNAL = 1.9; EXPRESSED IN FETAL LIVER, SIGNAL =   1; EXPRESSED IN ADULT LIVER, SIGNAL = 1.2; EXPRESSED IN BONE MARROW, SIGNAL = 1.3; EXPRESSED IN LUNG, SIGNAL = 1.3; EXPRESSED IN BRAIN, SIGNAL = 1.3; EXPRESSED IN HEART, SIGNAL =   1; EXPRESSED IN HELA, SIGNAL = 0.98; EXPRESSED IN HBL100, SIGNAL = 0.97; EXPRESSED IN BT474, SIGNAL = 2.4; EST_HUMAN HIT: AA626557.1, EVALUE 2.00e-04
TVNRFCCYYDSIGSNKNF

SEQ ID NO: 37045 - protein, 23 aa, Homo sapiens
  MAP TO AC000382.1; EXPRESSED IN LUNG, SIGNAL = 1.9; EXPRESSED IN PLACENTA, SIGNAL = 2.8; EXPRESSED IN HEART, SIGNAL = 1.9; EXPRESSED IN BT474, SIGNAL = 1.6; EXPRESSED IN ADULT LIVER, SIGNAL = 1.8; EXPRESSED IN BRAIN, SIGNAL = 1.1; EST_HUMAN HIT: AA742978.1, EVALUE 2.00e-04
RPQQESSGILCEGQTFRPKQECS

SEQ ID NO: 37046 - protein, 197 aa, Homo sapiens
  MAP TO AC002081.1; EXPRESSED IN ADULT LIVER, SIGNAL = 3.5; EXPRESSED IN BRAIN, SIGNAL = 3.2; EXPRESSED IN BONE MARROW, SIGNAL = 1.8; EXPRESSED IN PLACENTA, SIGNAL = 3.9; EXPRESSED IN HELA, SIGNAL = 2.9; EXPRESSED IN HBL100, SIGNAL =   2; EXPRESSED IN BT474, SIGNAL = 2.1; EXPRESSED IN FETAL LIVER, SIGNAL = 2.9; EXPRESSED IN LUNG, SIGNAL = 3.2; EXPRESSED IN HEART, SIGNAL = 2.4; EST_HUMAN HIT: AL040113.2, EVALUE 2.00e-83; SWISSPROT HIT: Q14832, EVALUE 1.00e-112
HNNTPLVKASGRELCYILLFGVGLSYCMTFFFIAKPSPVICALRRLGLGSSFAICYSALLTKTNCIARIFDGVKNGAQRPKFISPSSQVFICLGLILVQIVMVSVWLILEAPGTRRYTLAEKRETVILKCNVKDSSMLISLTYDVILVILCTVYAFKTRKCPENFNEAKFIGFTMYTTCIIWLAFLPIFYVTSSDYR

SEQ ID NO: 37047 - protein, 26 aa, Homo sapiens
  MAP TO AC009974.3; EXPRESSED IN BT474, SIGNAL = 5.6; EXPRESSED IN FETAL LIVER, SIGNAL =   7; EXPRESSED IN BONE MARROW, SIGNAL = 5.2; EXPRESSED IN PLACENTA, SIGNAL = 6.7; EXPRESSED IN HBL100, SIGNAL = 4.9; EXPRESSED IN HELA, SIGNAL = 6.5; EXPRESSED IN ADULT LIVER, SIGNAL = 7.1; EXPRESSED IN BRAIN, SIGNAL = 4.8; EXPRESSED IN LUNG, SIGNAL = 8.1; EXPRESSED IN HEART, SIGNAL = 5.1; EST_HUMAN HIT: AI444640.1, EVALUE 4.00e-08; SWISSPROT HIT: Q02318, EVALUE 5.00e-09
LYPVVPTNSRIIEKEIEVDGFLFPKN

SEQ ID NO: 37048 - protein, 34 aa, Homo sapiens
  MAP TO AC010825.2; EXPRESSED IN FETAL LIVER, SIGNAL = 1.4; EXPRESSED IN BONE MARROW, SIGNAL = 1.1; EXPRESSED IN PLACENTA, SIGNAL = 0.99; EXPRESSED IN HBL100, SIGNAL = 1.1; EXPRESSED IN BT474, SIGNAL = 1.1; EXPRESSED IN ADULT LIVER, SIGNAL = 1.3; EXPRESSED IN BRAIN, SIGNAL = 1.1; EXPRESSED IN LUNG, SIGNAL = 1.3; EXPRESSED IN HEART, SIGNAL = 1.8; EXPRESSED IN HELA, SIGNAL = 1.3; EST_HUMAN HIT: AW848295.1, EVALUE 3.00e-02
GACQLLPRFQKCFKQSGASGRDLSQGWSHCREPL

SEQ ID NO: 37049 - protein, 144 aa, Homo sapiens
  MAP TO AC005674.9; EXPRESSED IN FETAL LIVER, SIGNAL =   1; EXPRESSED IN HELA, SIGNAL = 1.3; EXPRESSED IN BRAIN, SIGNAL = 1.2; EXPRESSED IN HEART, SIGNAL = 0.87; EXPRESSED IN PLACENTA, SIGNAL = 0.97; EXPRESSED IN BONE MARROW, SIGNAL = 1.1; EXPRESSED IN BT474, SIGNAL = 1.2; EXPRESSED IN ADULT LIVER, SIGNAL = 0.9; EXPRESSED IN LUNG, SIGNAL = 1.2; EXPRESSED IN HBL100, SIGNAL = 0.87; SWISSPROT HIT: P42674, EVALUE 2.20e+00; EST_HUMAN HIT: AW387312.1, EVALUE 5.00e-70
MKICSLTLLSFLLLAAQVLLVEGKKKVKNGLHSKVVSEQKDTLGNTQIKQKSRPGNKGKFVTKDQANCRWAATEQEEGISLKVECTQLDHEFSCVFAGNPTSCLKLKDERVYWKQVARNLRSQKDICRYSKTAVKTRVCRKDFP

SEQ ID NO: 37050 - protein, 42 aa, Homo sapiens
  MAP TO AC005497.2; EXPRESSED IN BT474, SIGNAL = 0.93; EXPRESSED IN BONE MARROW, SIGNAL =   1; EXPRESSED IN HBL100, SIGNAL = 0.7; EXPRESSED IN LUNG, SIGNAL = 0.93; EXPRESSED IN BRAIN, SIGNAL = 0.72; EXPRESSED IN PLACENTA, SIGNAL = 1.1; EXPRESSED IN FETAL LIVER, SIGNAL = 0.71; EXPRESSED IN ADULT LIVER, SIGNAL = 0.92; EXPRESSED IN HEART, SIGNAL = 1.3; SWISSPROT HIT: Q09625, EVALUE 6.10e+00
DCSTSSSPSKGLNLLSTFTVCLPHASCIFQTTSTQMASKSSS

SEQ ID NO: 37051 - protein, 22 aa, Homo sapiens
  MAP TO AP000337.1; EXPRESSED IN LUNG, SIGNAL = 0.87; EXPRESSED IN BRAIN, SIGNAL = 0.74; EXPRESSED IN HEART, SIGNAL =   1; EXPRESSED IN PLACENTA, SIGNAL = 0.65; EXPRESSED IN BT474, SIGNAL = 0.83; EXPRESSED IN BONE MARROW, SIGNAL = 0.96; EXPRESSED IN ADULT LIVER, SIGNAL = 1.5; EXPRESSED IN HELA, SIGNAL = 0.97; EXPRESSED IN FETAL LIVER, SIGNAL = 1.7; EXPRESSED IN HBL100, SIGNAL = 0.82
APCIFSPWATSSTKKWTTRSSA

SEQ ID NO: 37052 - protein, 87 aa, Homo sapiens
  MAP TO AL121959.4; EXPRESSED IN BT474, SIGNAL =   1; EXPRESSED IN BONE MARROW, SIGNAL = 0.93; EXPRESSED IN BRAIN, SIGNAL = 0.96; EXPRESSED IN HBL100, SIGNAL = 1.2; EXPRESSED IN HEART, SIGNAL =   1; EXPRESSED IN ADULT LIVER, SIGNAL = 1.3; EST_HUMAN HIT: BE790217.1, EVALUE 1.30e+00; SWISSPROT HIT: Q14524, EVALUE 1.50e+00
KYSPQPCLYPHRRLMYRSRALAAGQCEAADRAREWREQWNRTEGEGRGIVPRTTTWDGGPREQKTPLEPLQGAFWQSGTTARHCHGC

SEQ ID NO: 37053 - protein, 76 aa, Homo sapiens
  MAP TO AL121959.4; EXPRESSED IN BT474, SIGNAL =   1; EXPRESSED IN BONE MARROW, SIGNAL = 0.93; EXPRESSED IN BRAIN, SIGNAL = 0.96; EXPRESSED IN HBL100, SIGNAL = 1.2; EXPRESSED IN HEART, SIGNAL =   1; EXPRESSED IN ADULT LIVER, SIGNAL = 1.3
ASIALSPACTLTGDSCTGPGLWLQDSVRLLTGRENGENNGTGLREKEEESSPELLLGTVVPGSKKHPWSPFKGPFG

SEQ ID NO: 37054 - protein, 26 aa, Homo sapiens
  MAP TO AC005100.2; EXPRESSED IN ADULT LIVER, SIGNAL = 0.69; EXPRESSED IN HEART, SIGNAL = 0.86; EXPRESSED IN PLACENTA, SIGNAL = 0.61; EST_HUMAN HIT: AU130995.1, EVALUE 4.70e+00
PLPPPCTQQPEEEAKVYLREKTEKIS

SEQ ID NO: 37055 - protein, 26 aa, Homo sapiens
  MAP TO AC005100.2; EXPRESSED IN ADULT LIVER, SIGNAL = 0.69; EXPRESSED IN HEART, SIGNAL = 0.86; EXPRESSED IN PLACENTA, SIGNAL = 0.61; EST_HUMAN HIT: AW613845.1, EVALUE 1.60e+00
PFPHHAHSSLRRRPKCTFGRRQRKFQ

SEQ ID NO: 37056 - protein, 74 aa, Homo sapiens; identical to SEQ ID NO: 33576
  MAP TO AP000247.1; EXPRESSED IN ADULT LIVER, SIGNAL = 0.87; EXPRESSED IN BRAIN, SIGNAL =   1; EXPRESSED IN HEART, SIGNAL = 1.1; EXPRESSED IN BT474, SIGNAL = 0.8; EXPRESSED IN LUNG, SIGNAL = 0.95; EXPRESSED IN PLACENTA, SIGNAL = 0.64; EXPRESSED IN HELA, SIGNAL = 0.7; EXPRESSED IN FETAL LIVER, SIGNAL = 0.66; EXPRESSED IN HBL100, SIGNAL = 0.88; EXPRESSED IN BONE MARROW, SIGNAL = 0.84; EST_HUMAN HIT: AW197823.1, EVALUE 9.00e-11; SWISSPROT HIT: Q13009, EVALUE 5.00e-27

SEQ ID NO: 37057 - protein, 42 aa, Homo sapiens
  MAP TO AL049797.8; EXPRESSED IN PLACENTA, SIGNAL = 0.66; EXPRESSED IN BONE MARROW, SIGNAL = 0.74; EXPRESSED IN HELA, SIGNAL = 0.73; EXPRESSED IN LUNG, SIGNAL = 0.67; EXPRESSED IN HEART, SIGNAL = 0.9; EXPRESSED IN ADULT LIVER, SIGNAL = 0.8; SWISSPROT HIT: O77793, EVALUE 7.00e-20; EST_HUMAN HIT: AU120946.1, EVALUE 9.00e-19
FSPYEIGMAKYGTFMAPDLFGSKFFMGTVVKKYEENPLHFLM

SEQ ID NO: 37058 - protein, 40 aa, Homo sapiens
  MAP TO AL049797.8; EXPRESSED IN PLACENTA, SIGNAL = 0.66; EXPRESSED IN BONE MARROW, SIGNAL = 0.74; EXPRESSED IN HELA, SIGNAL = 0.73; EXPRESSED IN LUNG, SIGNAL = 0.67; EXPRESSED IN HEART, SIGNAL = 0.9; EXPRESSED IN ADULT LIVER, SIGNAL = 0.8; SWISSPROT HIT: O05467, EVALUE 8.10e+00; EST_HUMAN HIT: AU120946.1, EVALUE 1.00e-17
LVHTKLAWLNMVLLWLPTYLEANFLWEQSLRSMKKTPCIS

SEQ ID NO: 37059 - protein, 69 aa, Homo sapiens
  MAP TO AL122035.1; EXPRESSED IN BT474, SIGNAL = 0.92; EXPRESSED IN BRAIN, SIGNAL = 1.2; EXPRESSED IN BONE MARROW, SIGNAL = 1.5; EXPRESSED IN PLACENTA, SIGNAL = 1.1; EXPRESSED IN HBL100, SIGNAL =   2; EXPRESSED IN HELA, SIGNAL = 1.8; EXPRESSED IN HEART, SIGNAL = 1.1; EXPRESSED IN FETAL LIVER, SIGNAL = 0.95; EXPRESSED IN ADULT LIVER, SIGNAL = 1.5; EST_HUMAN HIT: AU143389.1, EVALUE 2.00e-21; SWISSPROT HIT: Q58762, EVALUE 1.60e+00
MRHRVCRGRSGQGRRRSSVIPWPVPKHVGWVVLLGCGGSGTSILVVSIVGSGLIKAMAPAEILNGKEIS

SEQ ID NO: 37060 - protein, 49 aa, Homo sapiens
  MAP TO AC010787.2; EXPRESSED IN PLACENTA, SIGNAL = 1.1; EXPRESSED IN HBL100, SIGNAL = 1.2; EXPRESSED IN HEART, SIGNAL = 0.96; EXPRESSED IN BT474, SIGNAL = 0.99; EXPRESSED IN FETAL LIVER, SIGNAL = 1.1; EXPRESSED IN ADULT LIVER, SIGNAL = 1.2; EXPRESSED IN BRAIN, SIGNAL =   1; EXPRESSED IN BONE MARROW, SIGNAL =   1; EXPRESSED IN LUNG, SIGNAL = 0.94; EST_HUMAN HIT: AI123054.1, EVALUE 1.50e+00
VIPADRVTHISAYWLSGMRKTKWQLSSLSFQLNESATMFPIGSIFSLSN

SEQ ID NO: 37061 - protein, 71 aa, Homo sapiens
  MAP TO AC010682.1; EXPRESSED IN FETAL LIVER, SIGNAL = 3.1; EXPRESSED IN HEART, SIGNAL = 1.7; EXPRESSED IN HELA, SIGNAL = 1.8; EXPRESSED IN BONE MARROW, SIGNAL = 1.1; EXPRESSED IN LUNG, SIGNAL = 0.88
LTVESISRKKKKKKKKKKQKKKKKKKKKKKKKKKKKKKKKKKKRKRKKKKKKKKKKKKKKKKKKKKKKSAH

SEQ ID NO: 37062 - protein, 107 aa, Homo sapiens
  MAP TO AC010809.2; EXPRESSED IN BRAIN, SIGNAL = 1.2; EXPRESSED IN BONE MARROW, SIGNAL = 1.2; EXPRESSED IN LUNG, SIGNAL = 1.8; EXPRESSED IN HBL100, SIGNAL = 1.7; EXPRESSED IN PLACENTA, SIGNAL = 2.6; EXPRESSED IN HELA, SIGNAL = 1.1; EXPRESSED IN HEART, SIGNAL = 1.3; EXPRESSED IN BT474, SIGNAL = 1.6; EXPRESSED IN FETAL LIVER, SIGNAL = 1.9; EST_HUMAN HIT: AW984088.1, EVALUE 2.00e-30; SWISSPROT HIT: P30957, EVALUE 6.00e-47
IGKQMVDTLVESSTNVEMILKFFDMFLKLKDLTSSDTFKEYDPDGKGIISKKEFQKAMEGQKQYTQSEIDFLLSCAEADENDMFNYVDFVDRFHEPAKDIGFNVAVL

SEQ ID NO: 37063 - protein, 41 aa, Homo sapiens
  MAP TO L39891.1; EXPRESSED IN BRAIN, SIGNAL = 3.7; EXPRESSED IN BONE MARROW, SIGNAL = 3.6; EXPRESSED IN FETAL LIVER, SIGNAL = 2.1; EXPRESSED IN ADULT LIVER, SIGNAL = 2.9; EXPRESSED IN BT474, SIGNAL =   3; EXPRESSED IN LUNG, SIGNAL = 2.1; EXPRESSED IN PLACENTA, SIGNAL = 3.2; EXPRESSED IN HEART, SIGNAL = 1.9; EXPRESSED IN HELA, SIGNAL = 2.4; EXPRESSED IN HBL100, SIGNAL = 1.4; EST_HUMAN HIT: T79647.1, EVALUE 1.10e-01; SWISSPROT HIT: P40989, EVALUE 6.10e+00
LPWPLQSSRKEHVCLPPKYIPCWKADPRQGLPHEQGERHPK

SEQ ID NO: 37064 - protein, 53 aa, Homo sapiens [sequence omitted]

SEQ ID NO: 37065 - protein, 551 aa, Homo sapiens
  MAP TO AC005261.1; EXPRESSED IN FETAL LIVER, SIGNAL = 1.8; EXPRESSED IN BRAIN, SIGNAL = 1.5; EXPRESSED IN BONE MARROW, SIGNAL = 1.3; EXPRESSED IN HEART, SIGNAL = 1.6; EXPRESSED IN BT474, SIGNAL = 2.2; EXPRESSED IN ADULT LIVER, SIGNAL = 1.8; EXPRESSED IN LUNG, SIGNAL =   4; EXPRESSED IN PLACENTA, SIGNAL = 1.9; EXPRESSED IN HELA, SIGNAL = 2.3; EXPRESSED IN HBL100, SIGNAL = 2.3; SWISSPROT HIT: P51522, EVALUE 0.00e+00; EST_HUMAN HIT: AF150239.1, EVALUE 1.00e-105; EST_HUMAN HIT: AF150239.1, EVALUE 1.00e-105
ALLCAGFLSGDKGKPKTTEPTTCEPALSEGISLQGQVTQGNSVDSQLGQAEDQDGLSEMQEGHFRPGIDPQEKSPGKMSPECDGLGTADGVCSRIGQEQVSPGDRVRSHNSCESGKDPMIQEEENNFKCSECGKVFNKKHLLAGHEKIHSGVKPYECTECGKTFIKSTHLLQHHMIHTGERPYECMECGKAFNRKSYLTQHQRIHSGEKPYKCNECGKAFTHRSNFVLHNRRHTGEKSFVCTECGQVFRHRPGFLRHYVVHSGENPYECLECGKVFKHRSYLMWHQQTHTGEKPYECSECGKVFLESAALIHHYVIHTGEKPFECLECGKAFNHRSYLKRHQRIHTGEKPFVCSECGKAFTHCSTFILHKRAHTGEKPFECKECGKAFSNRKDLIRHFSIHTGEKPYECVECGKAFTRMSGLTRHKRIHSGEKPYECVECGKSFCWSTNLIRHAIIHTGEKPYKCSECGKAFSRSSSLTQHQRMHTGKNPISVTDVGRPFTSGQTSVTLRELLLGKDFLNVTTEANILPEETSSSASDQPYQRETPQVSSL

SEQ ID NO: 37066 - protein, 70 aa, Homo sapiens
  MAP TO AP000279.1; EXPRESSED IN BT474, SIGNAL = 1.2; EXPRESSED IN HELA, SIGNAL = 0.88; EXPRESSED IN HEART, SIGNAL = 0.95; EXPRESSED IN LUNG, SIGNAL = 0.93; EXPRESSED IN PLACENTA, SIGNAL = 1.2; EXPRESSED IN BONE MARROW, SIGNAL = 1.1; EXPRESSED IN HBL100, SIGNAL = 1.2; EXPRESSED IN FETAL LIVER, SIGNAL = 0.99; EXPRESSED IN ADULT LIVER, SIGNAL = 0.83; EXPRESSED IN BRAIN, SIGNAL = 0.74; EST_HUMAN HIT: BF184889.1, EVALUE 3.00e-16
EQPLDKTGHVKDTNQEDGVIISEHGEDEMDMESEKEEEKPKTGGAFSNALSSLNVLRPGVYSKVFLRTKL

SEQ ID NO: 37067 - protein, 30 aa, Homo sapiens
  MAP TO AL078584.17; EXPRESSED IN BONE MARROW, SIGNAL = 1.4; EXPRESSED IN FETAL LIVER, SIGNAL = 0.86; EXPRESSED IN LUNG, SIGNAL = 1.2; EXPRESSED IN PLACENTA, SIGNAL = 0.85; EXPRESSED IN HEART, SIGNAL = 1.1; EXPRESSED IN BRAIN, SIGNAL = 0.78; EXPRESSED IN ADULT LIVER, SIGNAL = 0.88; EXPRESSED IN HELA, SIGNAL = 0.69; EXPRESSED IN HBL100, SIGNAL = 0.81; EXPRESSED IN BT474, SIGNAL = 0.77; EST_HUMAN HIT: BE247575.1, EVALUE 4.00e-09
CCFSRLSSPRCSFLMLRSSWSMKRMMFLVK

SEQ ID NO: 37068 - protein, 29 aa, Homo sapiens
  MAP TO AL078584.17; EXPRESSED IN BONE MARROW, SIGNAL = 1.4; EXPRESSED IN FETAL LIVER, SIGNAL = 0.86; EXPRESSED IN LUNG, SIGNAL = 1.2; EXPRESSED IN PLACENTA, SIGNAL = 0.85; EXPRESSED IN HEART, SIGNAL = 1.1; EXPRESSED IN BRAIN, SIGNAL = 0.78; EXPRESSED IN ADULT LIVER, SIGNAL = 0.88; EXPRESSED IN HELA, SIGNAL = 0.69; EXPRESSED IN HBL100, SIGNAL = 0.81; EXPRESSED IN BT474, SIGNAL = 0.77; EST_HUMAN HIT: BE247575.1, EVALUE 2.00e-07
FTKNIILFIDQELLSIKKLHLGEDRREKQ

SEQ ID NO: 37069 - protein, 35 aa, Homo sapiens
  MAP TO AL050308.9; EXPRESSED IN BONE MARROW, SIGNAL = 1.2; EXPRESSED IN LUNG, SIGNAL = 0.94; EXPRESSED IN HELA, SIGNAL = 0.7; EXPRESSED IN PLACENTA, SIGNAL = 0.98; EXPRESSED IN BT474, SIGNAL = 0.87; EXPRESSED IN HBL100, SIGNAL =   1; EXPRESSED IN FETAL LIVER, SIGNAL = 0.85; EXPRESSED IN ADULT LIVER, SIGNAL = 0.75; EXPRESSED IN BRAIN, SIGNAL = 0.79; EXPRESSED IN HEART, SIGNAL = 0.78; EST_HUMAN HIT: AV688962.1, EVALUE 3.00e-05
RIQQQSTIVETESEPLPDNESASALILDFSISITV

SEQ ID NO: 37070 - protein, 50 aa, Homo sapiens
  MAP TO AC003666.1; EXPRESSED IN FETAL LIVER, SIGNAL = 0.65; EXPRESSED IN LUNG, SIGNAL = 0.74; EXPRESSED IN PLACENTA, SIGNAL = 0.69; EXPRESSED IN BONE MARROW, SIGNAL = 0.83; EXPRESSED IN BRAIN, SIGNAL = 0.83; EXPRESSED IN HEART, SIGNAL = 0.86; SWISSPROT HIT: P51793, EVALUE 2.00e-27; EST_HUMAN HIT: AI650246.1, EVALUE 1.00e-26
MTDLKEGVCLSAFWYSHEQCCWTSNETTFEDRDKCPLWQKWSELLVNQSE

SEQ ID NO: 37071 - protein, 38 aa, Homo sapiens
  MAP TO AP000268.1; EXPRESSED IN FETAL LIVER, SIGNAL = 0.78; EXPRESSED IN LUNG, SIGNAL = 1.6; EXPRESSED IN PLACENTA, SIGNAL = 0.73; EXPRESSED IN BT474, SIGNAL = 0.86; EXPRESSED IN BONE MARROW, SIGNAL = 0.83; EXPRESSED IN HBL100, SIGNAL = 0.8; EXPRESSED IN HELA, SIGNAL = 0.86; EXPRESSED IN ADULT LIVER, SIGNAL = 0.72; EXPRESSED IN BRAIN, SIGNAL = 0.73; EXPRESSED IN HEART, SIGNAL = 0.78
DAETILLKAVLLQVICLYQKVVPHVVMQYNFDFSKLLK

SEQ ID NO: 37072 - protein, 268 aa, Homo sapiens
  MAP TO AC004534.1; EXPRESSED IN BONE MARROW, SIGNAL = 1.6; EXPRESSED IN LUNG, SIGNAL = 2.6; EXPRESSED IN HELA, SIGNAL =   4; EXPRESSED IN PLACENTA, SIGNAL = 5.1; EXPRESSED IN HEART, SIGNAL = 1.8; EXPRESSED IN ADULT LIVER, SIGNAL = 1.4; EXPRESSED IN FETAL LIVER, SIGNAL = 1.9; EXPRESSED IN BT474, SIGNAL = 3.2; EXPRESSED IN BRAIN, SIGNAL = 1.2; SWISSPROT HIT: P07799, EVALUE 2.50e-01; EST_HUMAN HIT: BF335270.1, EVALUE 6.00e-40
DSALMEAEEAQRGASPPISAIEEFSIIPEAPMRSSQVSALGLEAQEDEDPSYKWREEHRLSATQQSELRDVCDYAIETMPSFPKEGSADVEPNQESLVAEACDTPEHWEAVPQSLAGRQARTLAPPELWACPIQSEHLDMAPFSSDLGSEEEEVEFWPGLTSLTLGSGQAEEEEETSSDNSGQTRYYSPCEEHPAETNQNEGSESGTIRQGEELPPEELQESQGLLHPQEVQVLEEQGQQEAGFRGEGTLREDVCADGLLGEEQMIEQ

SEQ ID NO: 37073 - protein, 18 aa, Homo sapiens
  MAP TO AC005193.2; EXPRESSED IN FETAL LIVER, SIGNAL = 0.8; EXPRESSED IN LUNG, SIGNAL = 0.59; EXPRESSED IN HELA, SIGNAL = 0.69; EXPRESSED IN PLACENTA, SIGNAL = 0.65; EXPRESSED IN ADULT LIVER, SIGNAL = 0.98; EXPRESSED IN BRAIN, SIGNAL = 0.97; EXPRESSED IN HEART, SIGNAL = 0.85
GQKWLAPPLSFLCQMQEM

SEQ ID NO: 37074 - protein, 291 aa, Homo sapiens
  MAP TO AC004616.1; EXPRESSED IN FETAL LIVER, SIGNAL =   1; EXPRESSED IN ADULT LIVER, SIGNAL = 1.2; EXPRESSED IN BT474, SIGNAL = 2.9; EXPRESSED IN BRAIN, SIGNAL =   1; EXPRESSED IN LUNG, SIGNAL = 1.4; EXPRESSED IN BONE MARROW, SIGNAL = 1.1; EXPRESSED IN PLACENTA, SIGNAL = 1.4; EXPRESSED IN HEART, SIGNAL = 1.4; EST_HUMAN HIT: AW888221.1, EVALUE 0.00e+00; SWISSPROT HIT: P35331, EVALUE 3.00e-22
PMEKPIFHDPISEKITAMAGHTISLNCSAAGTPTPSLVWVLPNGTDLQSGQQLQRFYHKADGMLHISGLSSVDAGAYRCVARNAAGHTERLVSLKVGLKPEANKQYHNLVSIINGETLKLPCTPPGAGQGRFSWTLPNGMHLEGPQTLGRVSLLDNGTLTVREASVFDRGTYVCRMETEYGPSVTSIPVIVIAYPPRITSEPTPVIYTRPGNTVKLNCMAMGIPKADITWELPDKSHLKAGVQARLYGNRFLHPQGSLTIQHATQRDAGFYKCMAKNILGSDSKTTYIHVF

SEQ ID NO: 37075 - protein, 57 aa, Homo sapiens
  MAP TO AC004616.1; EXPRESSED IN FETAL LIVER, SIGNAL =   1; EXPRESSED IN ADULT LIVER, SIGNAL = 1.2; EXPRESSED IN BT474, SIGNAL = 2.9; EXPRESSED IN BRAIN, SIGNAL =   1; EXPRESSED IN LUNG, SIGNAL = 1.4; EXPRESSED IN BONE MARROW, SIGNAL = 1.1; EXPRESSED IN PLACENTA, SIGNAL = 1.4; EXPRESSED IN HEART, SIGNAL = 1.4; EST_HUMAN HIT: AW888221.1, EVALUE 1.00e-30; SWISSPROT HIT: O53657, EVALUE 1.20e+00
WCGSFPMAPICRVDSSCSASTTRLTACYTLAVSPRWTPGPTAAWPAMPLATRRGWSP

SEQ ID NO: 37076 - protein, 32 aa, Homo sapiens
  MAP TO AL049859.7; EXPRESSED IN BONE MARROW, SIGNAL = 0.64; EXPRESSED IN ADULT LIVER, SIGNAL = 0.65; EXPRESSED IN HEART, SIGNAL = 1.3; EST_HUMAN HIT: AI830329.1, EVALUE 1.40e-02
TSNRTWKLVRSAESQPCPRPCNSESVFYQDPQ

SEQ ID NO: 37077 - protein, 59 aa, Homo sapiens
  MAP TO AP000169.1; EXPRESSED IN ADULT LIVER, SIGNAL = 0.65; EXPRESSED IN BONE MARROW, SIGNAL = 0.74; EXPRESSED IN LUNG, SIGNAL =   1; EXPRESSED IN HELA, SIGNAL = 0.63; EXPRESSED IN PLACENTA, SIGNAL = 0.99; EXPRESSED IN BT474, SIGNAL = 0.88; EXPRESSED IN HBL100, SIGNAL = 0.68; EXPRESSED IN FETAL LIVER, SIGNAL = 0.85; EXPRESSED IN BRAIN, SIGNAL = 0.75; EXPRESSED IN HEART, SIGNAL = 0.99; EST_HUMAN HIT: AI538087.1, EVALUE 2.70e-01; SWISSPROT HIT: P16794, EVALUE 2.60e+00
MVAAEVVNTEDPKMKNYGGKLRKVVLSHSQSGAGDPPVQAKTGKQNICLVFNIHQAKQG

SEQ ID NO: 37078 - protein, 71 aa, Homo sapiens
  MAP TO AC011994.2; EXPRESSED IN PLACENTA, SIGNAL = 3.7; EXPRESSED IN HELA, SIGNAL = 3.9; EXPRESSED IN HEART, SIGNAL = 3.2; EXPRESSED IN BRAIN, SIGNAL = 3.2; EXPRESSED IN LUNG, SIGNAL = 3.8; EXPRESSED IN BT474, SIGNAL = 3.8; EXPRESSED IN ADULT LIVER, SIGNAL = 4.5; EXPRESSED IN FETAL LIVER, SIGNAL = 4.3; EXPRESSED IN BONE MARROW, SIGNAL = 3.7; EXPRESSED IN HBL100, SIGNAL = 3.3; EST_HUMAN HIT: BE790207.1, EVALUE 3.60e-01; SWISSPROT HIT: Q04635, EVALUE 3.80e-01
GRWWNWLKHMSSGFRASLLNPQETFSATPDPSSFQTILADMSNLSSSVSPRRPEAMIVPRITLRPGESWAL

SEQ ID NO: 37079 - protein, 46 aa, Homo sapiens
  MAP TO AC007263.3; EXPRESSED IN LUNG, SIGNAL = 0.79; EXPRESSED IN PLACENTA, SIGNAL = 0.6; EXPRESSED IN BT474, SIGNAL = 1.2; EXPRESSED IN BONE MARROW, SIGNAL = 0.87; EXPRESSED IN FETAL LIVER, SIGNAL = 0.83; EXPRESSED IN ADULT LIVER, SIGNAL = 0.65; EXPRESSED IN BRAIN, SIGNAL = 0.76; EXPRESSED IN HEART, SIGNAL = 0.93
GQLEKSEYGLDDRHRTELFETFLGVTIAWGYRKGCLCSELHAEKFT

SEQ ID NO: 37080 - protein, 221 aa, Homo sapiens
  MAP TO AC004763.1; EXPRESSED IN BONE MARROW, SIGNAL = 1.9; EXPRESSED IN LUNG, SIGNAL = 2.4; EXPRESSED IN HELA, SIGNAL = 2.5; EXPRESSED IN PLACENTA, SIGNAL = 3.1; EXPRESSED IN HBL100, SIGNAL = 1.9; EXPRESSED IN HEART, SIGNAL = 1.8; EXPRESSED IN ADULT LIVER, SIGNAL = 3.2; EXPRESSED IN BT474, SIGNAL = 1.7; EXPRESSED IN FETAL LIVER, SIGNAL = 2.6; EXPRESSED IN BRAIN, SIGNAL = 1.8; EST_HUMAN HIT: BE613543.1, EVALUE 1.00e-69; SWISSPROT HIT: Q9Z507, EVALUE 5.40e+00
NFPQLPTGILCVADRCQGLRELALNYYILTDELFLALSSETHVNLEHLRIDVVSENPGQIKFHAVKKHSWDALIKHSPRVNVVMHFFLYEEEFETFFKEETPVTHLYFGRSVSKVVLGRVGLNCPRLIELVVCANDLQPLDNELICIAEHCTNLTALGLSKCEVSCSAFIRFVRLCERRLTQLSVMEEVLIPDEDYSLDEIHTEVSKYLGRVWFPDVMPLW

SEQ ID NO: 37081 - protein, 29 aa, Homo sapiens
  MAP TO AF015262.1; EXPRESSED IN HELA, SIGNAL = 1.1; EXPRESSED IN PLACENTA, SIGNAL = 0.99; EXPRESSED IN HBL100, SIGNAL = 1.1; EXPRESSED IN HEART, SIGNAL =   1; EXPRESSED IN FETAL LIVER, SIGNAL = 1.1; EXPRESSED IN ADULT LIVER, SIGNAL = 1.6; EXPRESSED IN BT474, SIGNAL = 1.1; EXPRESSED IN BRAIN, SIGNAL = 1.2; EXPRESSED IN BONE MARROW, SIGNAL =   1; EXPRESSED IN LUNG, SIGNAL = 1.3
ELQMTPAIVELNHSLEEESKFMWVMHYTK

SEQ ID NO: 37082 - protein, 34 aa, Homo sapiens
  MAP TO AP000208.1; EXPRESSED IN PLACENTA, SIGNAL = 0.77; EXPRESSED IN LUNG, SIGNAL = 0.61; EXPRESSED IN HBL100, SIGNAL = 0.81; EXPRESSED IN FETAL LIVER, SIGNAL = 0.62; EXPRESSED IN HELA, SIGNAL = 0.6; EXPRESSED IN ADULT LIVER, SIGNAL = 0.65; EXPRESSED IN BRAIN, SIGNAL = 0.99; EXPRESSED IN BT474, SIGNAL = 0.77; EXPRESSED IN HEART, SIGNAL = 0.82; EST_HUMAN HIT: AA326765.1, EVALUE 5.00e-13; SWISSPROT HIT: Q13009, EVALUE 5.00e-14
HSLCSEQGSSAETAPEETEGPDLESSDETDHSSK

SEQ ID NO: 37083 - protein, 54 aa, Homo sapiens
  MAP TO AP000134.1; EXPRESSED IN LUNG, SIGNAL = 0.83; EXPRESSED IN HELA, SIGNAL = 0.79; EXPRESSED IN ADULT LIVER, SIGNAL = 0.81; EXPRESSED IN BRAIN, SIGNAL = 0.89; EXPRESSED IN PLACENTA, SIGNAL = 0.81; EXPRESSED IN BT474, SIGNAL = 0.71; EXPRESSED IN BONE MARROW, SIGNAL = 0.72; EXPRESSED IN HBL100, SIGNAL = 1.4; EXPRESSED IN FETAL LIVER, SIGNAL = 0.69; EXPRESSED IN HEART, SIGNAL = 0.92; EST_HUMAN HIT: BE868304.1, EVALUE 2.80e+00; SWISSPROT HIT: P49716, EVALUE 1.50e+00
MNVAETLPSKSLRSGKCPQRPKLDYNNTQKRNIVTIQKGRDDFKSRRKQNIEEN

SEQ ID NO: 37084 - protein, 40 aa, Homo sapiens
  MAP TO AC007370.7; EXPRESSED IN ADULT LIVER, SIGNAL = 0.8; EXPRESSED IN BRAIN, SIGNAL = 0.73; EXPRESSED IN HEART, SIGNAL = 0.85; EXPRESSED IN LUNG, SIGNAL = 0.67; EXPRESSED IN PLACENTA, SIGNAL = 0.72; EXPRESSED IN HELA, SIGNAL = 0.77; SWISSPROT HIT: Q60299, EVALUE 1.20e+00
MVIVLVTINVCLNKELVNNKNSLKKVQEVLFTKYAMGLKK

SEQ ID NO: 37085 - protein, 412 aa, Homo sapiens
  MAP TO AL033520.9; EXPRESSED IN PLACENTA, SIGNAL = 3.5; EXPRESSED IN HBL100, SIGNAL = 3.6; EXPRESSED IN HELA, SIGNAL = 4.3; EXPRESSED IN BRAIN, SIGNAL = 2.8; EXPRESSED IN BONE MARROW, SIGNAL = 3.4; EXPRESSED IN HEART, SIGNAL = 3.2; EXPRESSED IN BT474, SIGNAL = 3.9; EXPRESSED IN ADULT LIVER, SIGNAL =   5; EXPRESSED IN FETAL LIVER, SIGNAL = 4.1; EXPRESSED IN LUNG, SIGNAL = 4.7; EST_HUMAN HIT: BE378602.1, EVALUE 2.00e-68; SWISSPROT HIT: Q09769, EVALUE 2.80e-02
LLHMLFLHHAFQMDSCLPQPNTLPPQRPKASWDLWSVHFTQISLDFEGTENFKGHTLNFVAPFPLSIWACLPLRWQQAQARKLLLASEGRLKPSASFGSPVQSEALAPDSMSHPRSKTEHDLKSLSGLTEVMEILKEGSSGMDNKGPLTELEDVADVHMLVHSPAHVRVRLDHYQYLALLRLKEVLQRLQEQLTKDTESMTGSPLQNQTACIGVLFPSAEVALLMHPAPGAVDADSAGSDSTSLVDSELSPSEDRELKSDASSDQGPASPEKVLEESSIENQDVSQERPHSNGELQDSGPLAQQLAGKGHEAVESLQAKKLSRTQASSSPAALKPPAGRETAVNGQGELIPLKNIEGELSSAIHMTKDATKEALHATMDLTKEAVSLTKDAFSLGRDRMTSTMHKMLSLPPA

SEQ ID NO: 37086 - protein, 102 aa, Homo sapiens
  MAP TO AL078474.2; EXPRESSED IN PLACENTA, SIGNAL = 1.2; EXPRESSED IN HEART, SIGNAL = 1.3; EXPRESSED IN ADULT LIVER, SIGNAL = 0.76; SWISSPROT HIT: P22897, EVALUE 4.00e-04; EST_HUMAN HIT: AU125569.1, EVALUE 5.00e-57
QKVCFADFKHPCYKMAYFHELSSRVSFQEARLACESEGGVLLSLENEAEQKLIESMLQNLTKPGTGISDGDFWIGLWRNGDGQTSGACPDLYQWSDGSNSQY

SEQ ID NO: 37087 - protein, 72 aa, Homo sapiens
  MAP TO AP000124.1; EXPRESSED IN BONE MARROW, SIGNAL = 1.1; EXPRESSED IN ADULT LIVER, SIGNAL = 0.74; EXPRESSED IN BT474, SIGNAL = 0.65; EXPRESSED IN LUNG, SIGNAL =   1; EXPRESSED IN HELA, SIGNAL = 0.63; EXPRESSED IN PLACENTA, SIGNAL = 0.91; EXPRESSED IN HBL100, SIGNAL = 0.76; EXPRESSED IN FETAL LIVER, SIGNAL = 0.81; EXPRESSED IN HEART, SIGNAL =   1; SWISSPROT HIT: P36165, EVALUE 2.00e+00
SGAEGNPELNALQDFFQYNYEESTQVETVVAEEKLVCPCQEWCMRAIYMDLTGKQYSIFQHVFGDPDLTLCK

SEQ ID NO: 37088 - protein, 78 aa, Homo sapiens
  MAP TO AC012443.1; EXPRESSED IN HBL100, SIGNAL = 1.5; EXPRESSED IN HEART, SIGNAL = 1.1; EXPRESSED IN BRAIN, SIGNAL = 1.9; EXPRESSED IN LUNG, SIGNAL = 1.6; EXPRESSED IN HELA, SIGNAL = 1.6; EXPRESSED IN PLACENTA, SIGNAL = 1.8; EXPRESSED IN ADULT LIVER, SIGNAL = 1.9; EXPRESSED IN FETAL LIVER, SIGNAL = 1.6; EXPRESSED IN BT474, SIGNAL = 1.3; EXPRESSED IN BONE MARROW, SIGNAL = 1.4; EST_HUMAN HIT: BF351452.1, EVALUE 1.00e-38; SWISSPROT HIT: P34489, EVALUE 1.00e-04
FDLKTLPVDFVECLMRFLPTENEVKVLRLYERERKPLENLSDEDRFMMQFSKIERLMQKMTIMAFIGNFAESIQMLTP

SEQ ID NO: 37089 - protein, 460 aa, Homo sapiens
  MAP TO AC010896.2; EXPRESSED IN BONE MARROW, SIGNAL = 3.7; EXPRESSED IN LUNG, SIGNAL =   4; EXPRESSED IN PLACENTA, SIGNAL =   3; EXPRESSED IN HEART, SIGNAL = 3.7; EXPRESSED IN HBL100, SIGNAL = 3.1; EXPRESSED IN HELA, SIGNAL = 3.7; EXPRESSED IN FETAL LIVER, SIGNAL = 4.1; EXPRESSED IN BT474, SIGNAL = 3.2; EXPRESSED IN ADULT LIVER, SIGNAL = 4.3; EXPRESSED IN BRAIN, SIGNAL =   3; SWISSPROT HIT: O60241, EVALUE 4.00e-10; EST_HUMAN HIT: W03697.1, EVALUE 6.00e-13; EST_HUMAN HIT: W03697.1, EVALUE 6.00e-13
NLLIATDKVLDMDTRSLWTLAQARKPWAGSTLLLAVETLACSLCPQDHPFAFSLPNVLLQSQLFGPTFPADYSISFPTRPPLQAQIPRHSLAPLVRNGTEISITSLVLRKLDHLLPSNYGQGLGDSLYATPGLVLVISIMAGDRAFSQGEVIMDFGNTDGSPHCVFWDHSLFQGRGGWSKEGCQAQVASASPTAQCLCQHLTAFSVLMSPHTVPEEPALALLTQVGLGASILALLVCLGVYWLVWRVVVRNKISYFRHAALLNMVFCLLAADTCFLGAPFLSPGPRSPLCLVPPSSVISSTWPPFSGCGAGPGVGPPAALCLSPAGKAPSSPPHGAPGLPVPTGVGRCHPGALPTSRAIPEGGGMLVGWEGRGVIHLRGPVLAIIGVNGLVLAMAMLKLLRPSLSEGPPAEKRQALLGVIKALLILTPIFGLTWGWPGHSVRGSLHGPSLHLHHSQHPPG

SEQ ID NO: 37090 - protein, 31 aa, Homo sapiens
  MAP TO AC012447.2; EXPRESSED IN BONE MARROW, SIGNAL = 5.7; EXPRESSED IN LUNG, SIGNAL = 5.6; EXPRESSED IN HELA, SIGNAL = 5.8; EXPRESSED IN PLACENTA, SIGNAL = 6.1; EXPRESSED IN HBL100, SIGNAL = 6.2; EXPRESSED IN HEART, SIGNAL = 4.4; EXPRESSED IN BT474, SIGNAL = 5.4; EXPRESSED IN BRAIN, SIGNAL = 4.8; EXPRESSED IN ADULT LIVER, SIGNAL = 6.7; EXPRESSED IN FETAL LIVER, SIGNAL =   5
GISRRMQVDKGTATVREKKLYTQVGKDEEEA

SEQ ID NO: 37091 - protein, 85 aa, Homo sapiens
  MAP TO AL049844.6; EXPRESSED IN BT474, SIGNAL = 1.3; EXPRESSED IN BONE MARROW, SIGNAL = 1.1; EXPRESSED IN HELA, SIGNAL = 0.91; EXPRESSED IN ADULT LIVER, SIGNAL = 1.1; EXPRESSED IN BRAIN, SIGNAL = 0.92; EXPRESSED IN HBL100, SIGNAL = 2.1; EXPRESSED IN FETAL LIVER, SIGNAL = 1.3; EXPRESSED IN LUNG, SIGNAL = 0.94; EXPRESSED IN PLACENTA, SIGNAL = 1.3; EXPRESSED IN HEART, SIGNAL = 0.97; EST_HUMAN HIT: AA947691.1, EVALUE 3.00e-35; SWISSPROT HIT: Q10191, EVALUE 4.10e-02
KSENEDDSEWEDVDDEKGDSNDDYDSAGLLSDEDCMSVPGKTHRAIADHLFWSEETKSRFTEYSMTSSVMRRNEQLTLHDERFEK

SEQ ID NO: 37092 - protein, 63 aa, Homo sapiens
  MAP TO AP000135.1; EXPRESSED IN FETAL LIVER, SIGNAL = 1.2; EXPRESSED IN LUNG, SIGNAL =   1; EXPRESSED IN HEART, SIGNAL = 0.91; EXPRESSED IN BONE MARROW, SIGNAL = 0.94; EXPRESSED IN HBL100, SIGNAL = 1.1; EXPRESSED IN PLACENTA, SIGNAL = 0.71; EXPRESSED IN BRAIN, SIGNAL = 0.76; EXPRESSED IN ADULT LIVER, SIGNAL = 1.2; EXPRESSED IN HELA, SIGNAL =   1; EXPRESSED IN BT474, SIGNAL =   1; SWISSPROT HIT: O95104, EVALUE 7.50e+00
SPKRRRSRSGSRSRRSRHRRSRSRSRDRRRHSPRSRSQERRDREKERERRQKGLPQVKPETAS

SEQ ID NO: 37093 - protein, 49 aa, Homo sapiens
  MAP TO AP000199.1; EXPRESSED IN PLACENTA, SIGNAL =   1; EXPRESSED IN BT474, SIGNAL =   1; EXPRESSED IN BONE MARROW, SIGNAL = 0.87; EXPRESSED IN FETAL LIVER, SIGNAL = 0.67; EXPRESSED IN LUNG, SIGNAL = 1.1; EXPRESSED IN ADULT LIVER, SIGNAL = 0.67; EXPRESSED IN HBL100, SIGNAL = 0.95; EXPRESSED IN HELA, SIGNAL =   1; EXPRESSED IN HEART, SIGNAL = 0.99; EST_HUMAN HIT: AU129570.1, EVALUE 3.90e+00; SWISSPROT HIT: P47319, EVALUE 6.00e+00
ENVASFLHYTYLCSPNKPLTFRLLQNDLEVNVYVSKTLADTSNSFPTTN

SEQ ID NO: 37094 - protein, 34 aa, Homo sapiens
  MAP TO AC012513.2; EXPRESSED IN BONE MARROW, SIGNAL = 1.8; EXPRESSED IN HEART, SIGNAL = 1.1; EXPRESSED IN ADULT LIVER, SIGNAL = 1.4; EXPRESSED IN LUNG, SIGNAL = 1.3; EXPRESSED IN BRAIN, SIGNAL = 1.5; EXPRESSED IN HELA, SIGNAL = 2.4; EXPRESSED IN HBL100, SIGNAL = 3.7; EXPRESSED IN PLACENTA, SIGNAL = 1.3; EXPRESSED IN BT474, SIGNAL = 1.6; EXPRESSED IN FETAL LIVER, SIGNAL = 1.2; EST_HUMAN HIT: AW852198.1, EVALUE 1.00e-06
SPPLPDPPTAVTTCVEQAVAFASSQQAAGLGKPW

SEQ ID NO: 37095 - protein, 18 aa, Homo sapiens
  MAP TO AC012513.2; EXPRESSED IN BONE MARROW, SIGNAL = 1.8; EXPRESSED IN HEART, SIGNAL = 1.1; EXPRESSED IN ADULT LIVER, SIGNAL = 1.4; EXPRESSED IN LUNG, SIGNAL = 1.3; EXPRESSED IN BRAIN, SIGNAL = 1.5; EXPRESSED IN HELA, SIGNAL = 2.4; EXPRESSED IN HBL100, SIGNAL = 3.7; EXPRESSED IN PLACENTA, SIGNAL = 1.3; EXPRESSED IN BT474, SIGNAL = 1.6; EXPRESSED IN FETAL LIVER, SIGNAL = 1.2
VLLCLILQQLSQLVLSKQ

SEQ ID NO: 37096 - protein, 53 aa, Homo sapiens
  MAP TO AC009309.1; EXPRESSED IN BONE MARROW, SIGNAL =   1; EXPRESSED IN HBL100, SIGNAL = 1.2; EXPRESSED IN FETAL LIVER, SIGNAL = 0.96; EXPRESSED IN HEART, SIGNAL =  11; EXPRESSED IN BT474, SIGNAL = 0.99; EXPRESSED IN HELA, SIGNAL = 0.97; EXPRESSED IN ADULT LIVER, SIGNAL = 0.83; EXPRESSED IN BRAIN, SIGNAL = 0.88; EST_HUMAN HIT: N57223.1, EVALUE 2.00e-23; SWISSPROT HIT: P54794, EVALUE 2.60e+00
ASSTYRNCVKNASLISALSTGRFSHIQTPVVSSTPRLTTSERNLTCGHTSVIL

SEQ ID NO: 37097 - protein, 44 aa, Homo sapiens
  MAP TO AC009309.1; EXPRESSED IN BONE MARROW, SIGNAL =   1; EXPRESSED IN HBL100, SIGNAL = 1.2; EXPRESSED IN FETAL LIVER, SIGNAL = 0.96; EXPRESSED IN HEART, SIGNAL =  11; EXPRESSED IN BT474, SIGNAL = 0.99; EXPRESSED IN HELA, SIGNAL = 0.97; EXPRESSED IN ADULT LIVER, SIGNAL = 0.83; EXPRESSED IN BRAIN, SIGNAL = 0.88; SWISSPROT HIT: P12978, EVALUE 1.20e+00; EST_HUMAN HIT: H49897.1, EVALUE 5.00e-21
WHLQPTATVSRMPLLFLHCPLDVLVIFRHQLFPPLPDLPHLRET

SEQ ID NO: 37098 - protein, 48 aa, Homo sapiens
  MAP TO AC007832.1; EXPRESSED IN PLACENTA, SIGNAL = 1.2; EXPRESSED IN BONE MARROW, SIGNAL = 0.96; EXPRESSED IN HBL100, SIGNAL = 0.85; EXPRESSED IN FETAL LIVER, SIGNAL = 0.91; EXPRESSED IN LUNG, SIGNAL = 0.83; EXPRESSED IN HELA, SIGNAL = 0.83; EXPRESSED IN ADULT LIVER, SIGNAL =   1; EXPRESSED IN BT474, SIGNAL = 0.9; EXPRESSED IN HEART, SIGNAL = 1.2; EXPRESSED IN BRAIN, SIGNAL = 0.96; EST_HUMAN HIT: AA309170.1, EVALUE 1.00e-03
KLNTYIFKVQVEYSLSEMLGTRKVLNFRFFRILEHGHGPNDILVNNDW

SEQ ID NO: 37099 - protein, 29 aa, Homo sapiens
  MAP TO AC008111.1; EXPRESSED IN BT474, SIGNAL = 0.98; EXPRESSED IN BONE MARROW, SIGNAL = 1.3; EXPRESSED IN HELA, SIGNAL = 1.3; EXPRESSED IN PLACENTA, SIGNAL = 1.1; EXPRESSED IN FETAL LIVER, SIGNAL = 1.3; EXPRESSED IN LUNG, SIGNAL = 1.4; EXPRESSED IN ADULT LIVER, SIGNAL = 1.2; EXPRESSED IN BRAIN, SIGNAL = 1.5; EXPRESSED IN HEART, SIGNAL = 1.2; EXPRESSED IN HBL100, SIGNAL = 1.1; EST_HUMAN HIT: BE882677.1, EVALUE 6.00e+00
  unsure 15
MSWPHCQPRISRDQXARPPWDPVRDANCQ

SEQ ID NO: 37100 - protein, 101 aa, Homo sapiens
  MAP TO AP000104.1; EXPRESSED IN PLACENTA, SIGNAL = 0.62; EXPRESSED IN BONE MARROW, SIGNAL = 0.65; EXPRESSED IN LUNG, SIGNAL = 2.8; EXPRESSED IN ADULT LIVER, SIGNAL = 0.65; EXPRESSED IN FETAL LIVER, SIGNAL = 0.89; EXPRESSED IN HEART, SIGNAL = 0.92; SWISSPROT HIT: P15712, EVALUE 9.80e-01; EST_HUMAN HIT: BF346486.1, EVALUE 3.30e-02
GERKRSGLRFLSNVPGVQMAAGSGKRSPLGSPRWSHPFQGTKEGELTAAAVPREVTVTAAATGPWPGCVLGTKRSSRLSVARGRKGHNSCGRGSLGLRAHE

SEQ ID NO: 37101 - protein, 83 aa, Homo sapiens
  MAP TO AP000095.1; EXPRESSED IN BT474, SIGNAL = 1.1; EXPRESSED IN PLACENTA, SIGNAL = 1.2; EXPRESSED IN HEART, SIGNAL = 1.2; EXPRESSED IN BRAIN, SIGNAL = 1.4; EXPRESSED IN ADULT LIVER, SIGNAL =   1; EXPRESSED IN HELA, SIGNAL = 0.87; EXPRESSED IN LUNG, SIGNAL = 0.84; EXPRESSED IN FETAL LIVER, SIGNAL = 1.1; EXPRESSED IN HBL100, SIGNAL = 0.86; EXPRESSED IN BONE MARROW, SIGNAL = 1.1; EST_HUMAN HIT: AW949408.1, EVALUE 7.00e-32; SWISSPROT HIT: P39086, EVALUE 4.00e-38
LQLQEEGKLHMMKEKWWRGNGCPEEDNKEASALGVENIGGIFIVLAAGLVLSVFVAIGEFIYKSRKNNDIEQVSHLFLGLVSL

SEQ ID NO: 37102 - protein, 41 aa, Homo sapiens
  MAP TO AF130866.1; EXPRESSED IN BT474, SIGNAL = 2.3; EXPRESSED IN FETAL LIVER, SIGNAL = 2.8; EXPRESSED IN LUNG, SIGNAL =   3; EXPRESSED IN BONE MARROW, SIGNAL = 2.7; EXPRESSED IN HEART, SIGNAL = 2.4; EXPRESSED IN PLACENTA, SIGNAL = 2.6; EXPRESSED IN ADULT LIVER, SIGNAL = 3.4; EXPRESSED IN BRAIN, SIGNAL = 2.5; EXPRESSED IN HELA, SIGNAL = 2.8; EXPRESSED IN HBL100, SIGNAL = 2.5
GEGMPSALKTLRLGAKRTMEASAAASWVSDWACLGLDEQLD

SEQ ID NO: 37103 - protein, 41 aa, Homo sapiens
  MAP TO AJ003147.1; EXPRESSED IN PLACENTA, SIGNAL = 7.2; EXPRESSED IN HBL100, SIGNAL = 8.2; EXPRESSED IN HELA, SIGNAL =   8; EXPRESSED IN BT474, SIGNAL = 7.6; EXPRESSED IN LUNG, SIGNAL = 7.9; EXPRESSED IN HEART, SIGNAL = 5.6; EXPRESSED IN ADULT LIVER, SIGNAL = 9.6; EXPRESSED IN FETAL LIVER, SIGNAL = 7.8; EXPRESSED IN BRAIN, SIGNAL = 6.7; EXPRESSED IN BONE MARROW, SIGNAL = 7.1; EST_HUMAN HIT: BE387480.1, EVALUE 8.00e-19; SWISSPROT HIT: P17097, EVALUE 3.00e-04
GPVALGDIPFYFSREEWGTLDPAQRDLFWDIKRENSRNTTL

SEQ ID NO: 37104 - protein, 76 aa, Homo sapiens
  MAP TO AL008626.1; EXPRESSED IN PLACENTA, SIGNAL = 1.6; EXPRESSED IN HBL100, SIGNAL = 1.5; EXPRESSED IN BT474, SIGNAL = 1.5; EXPRESSED IN ADULT LIVER, SIGNAL = 1.8; EXPRESSED IN HEART, SIGNAL = 1.3; EXPRESSED IN FETAL LIVER, SIGNAL = 1.6; EXPRESSED IN LUNG, SIGNAL = 1.7; EXPRESSED IN BONE MARROW, SIGNAL = 1.8; EXPRESSED IN BRAIN, SIGNAL = 1.8; EXPRESSED IN HELA, SIGNAL = 1.8; EST_HUMAN HIT: AA481211.1, EVALUE 1.80e-01; SWISSPROT HIT: P41889, EVALUE 3.30e+00
ETILKPSNQLHPELPAVQLYYKTVHLVKSAHHHYGDATQLSLLFDPLFPGLHSFLLHGITPSFWWITPSTSFLIKD

SEQ ID NO: 37105 - protein, 42 aa, Homo sapiens
  MAP TO AC008159.1; EXPRESSED IN BT474, SIGNAL = 0.78; EXPRESSED IN HELA, SIGNAL = 1.1; EXPRESSED IN BRAIN, SIGNAL = 0.72; EXPRESSED IN HEART, SIGNAL =  23; EXPRESSED IN BONE MARROW, SIGNAL = 4.6; EXPRESSED IN HBL100, SIGNAL = 1.2; EST_HUMAN HIT: AW991456.1, EVALUE 9.00e-08; SWISSPROT HIT: P15948, EVALUE 6.10e+00
YVKLRHLLANSPKVKQTDKQKLAQREVCIKLHSLVINDDVLQ

SEQ ID NO: 37106 - protein, 39 aa, Homo sapiens
  MAP TO AC007784.7; EXPRESSED IN HEART, SIGNAL = 0.82
ITWLASGKAGLRGFPLIYIATFTPSIMTVRSWKIEIKLQ

SEQ ID NO: 37107 - protein, 85 aa, Homo sapiens
  MAP TO AL022721.1; EXPRESSED IN LUNG, SIGNAL = 2.2; EXPRESSED IN BRAIN, SIGNAL = 1.6; EXPRESSED IN HELA, SIGNAL = 2.4; EXPRESSED IN HEART, SIGNAL = 1.7; EXPRESSED IN FETAL LIVER, SIGNAL = 2.2; EXPRESSED IN BONE MARROW, SIGNAL = 2.2; EXPRESSED IN PLACENTA, SIGNAL = 1.9; EXPRESSED IN HBL100, SIGNAL = 3.4; EXPRESSED IN BT474, SIGNAL = 1.8; EXPRESSED IN ADULT LIVER, SIGNAL = 1.9; EST_HUMAN HIT: BE281059.1, EVALUE 8.00e-20; SWISSPROT HIT: P70210, EVALUE 8.00e-21
YSKHLFVHIGQTNPAFSDPPLEAVDVRQIYDKFPEKKGGLKELYEKGPPNAFFLVKFWVSPPGLLCSKPPSPPQRCNIQAHCIDL

SEQ ID NO: 37108 - protein, 31 aa, Homo sapiens; identical to SEQ ID NO: 36533
  MAP TO AP000107.1; EXPRESSED IN FETAL LIVER, SIGNAL = 0.68; EXPRESSED IN BRAIN, SIGNAL = 0.7; EXPRESSED IN HEART, SIGNAL = 0.83; EXPRESSED IN LUNG, SIGNAL = 0.65; EXPRESSED IN HELA, SIGNAL = 0.61; EXPRESSED IN ADULT LIVER, SIGNAL = 0.69; EST_HUMAN HIT: F00327.1, EVALUE 2.70e-01

SEQ ID NO: 37109 - protein, 41 aa, Homo sapiens
  MAP TO AL031117.1; EXPRESSED IN BONE MARROW, SIGNAL = 2.7; EXPRESSED IN LUNG, SIGNAL = 3.5; EXPRESSED IN BRAIN, SIGNAL = 4.1; EXPRESSED IN HELA, SIGNAL = 3.4; EXPRESSED IN HEART, SIGNAL = 3.6; EXPRESSED IN FETAL LIVER, SIGNAL = 3.1; EXPRESSED IN ADULT LIVER, SIGNAL = 3.2; EXPRESSED IN PLACENTA, SIGNAL = 4.9; EXPRESSED IN HBL100, SIGNAL = 3.3; EXPRESSED IN BT474, SIGNAL = 4.2; SWISSPROT HIT: P50325, EVALUE 4.70e+00; EST_HUMAN HIT: AA857572.1, EVALUE 7.30e-01
IQVENGDYQTIHHNEDLNPCCYWSITTFSSDFCFDFASIVL

SEQ ID NO: 37110 - protein, 56 aa, Homo sapiens
  MAP TO AL031132.1; EXPRESSED IN PLACENTA, SIGNAL = 1.2; EXPRESSED IN HEART, SIGNAL = 1.6; EXPRESSED IN FETAL LIVER, SIGNAL = 1.5; EXPRESSED IN BT474, SIGNAL = 1.6; EXPRESSED IN BONE MARROW, SIGNAL = 1.5; EXPRESSED IN BRAIN, SIGNAL = 1.5; EXPRESSED IN LUNG, SIGNAL = 1.8; EXPRESSED IN HBL100, SIGNAL = 1.4; EXPRESSED IN HELA, SIGNAL =   2; EXPRESSED IN ADULT LIVER, SIGNAL = 1.6; SWISSPROT HIT: P20189, EVALUE 4.50e+00
MNLHFLSVTVMTRNNWLVRINIEAGKMMASEQVDTALVKAINYTKDRGERLKVVLT

SEQ ID NO: 37111 - protein, 111 aa, Homo sapiens
  MAP TO AL023281.1; EXPRESSED IN HEART, SIGNAL = 9.2; EXPRESSED IN FETAL LIVER, SIGNAL =  12; EXPRESSED IN BT474, SIGNAL = 9.2; EXPRESSED IN BONE MARROW, SIGNAL =  10; EXPRESSED IN BRAIN, SIGNAL = 9.2; EXPRESSED IN PLACENTA, SIGNAL =  12; EXPRESSED IN HELA, SIGNAL =  11; EXPRESSED IN HBL100, SIGNAL =  10; EXPRESSED IN ADULT LIVER, SIGNAL =  16; EXPRESSED IN LUNG, SIGNAL =  13; EST_HUMAN HIT: AW411290.1, EVALUE 5.00e-05; SWISSPROT HIT: P81274, EVALUE 9.00e-06
SLEPTYQQLQKMKLDKSPFVVVSVVGQELLTAGHHGASVVVLEAALKIGTCSLKLRGSVFSALSSAYWSLGNTEKSTGYMQQDLDVAKTLGRVMLLYFSAEREQRKLSNMT

SEQ ID NO: 37112 - protein, 20 aa, Homo sapiens
  MAP TO AJ229042.1; EXPRESSED IN FETAL LIVER, SIGNAL = 6.1; EXPRESSED IN BONE MARROW, SIGNAL = 5.8; EXPRESSED IN HEART, SIGNAL = 4.6; EXPRESSED IN PLACENTA, SIGNAL = 5.4; EXPRESSED IN BT474, SIGNAL = 5.5; EXPRESSED IN ADULT LIVER, SIGNAL = 5.4; EXPRESSED IN BRAIN, SIGNAL = 4.8; EXPRESSED IN LUNG, SIGNAL = 5.9; EXPRESSED IN HELA, SIGNAL =   6; EXPRESSED IN HBL100, SIGNAL =   5
SSRKLTRTSSSRCMVSSSLL

SEQ ID NO: 37113 - protein, 42 aa, Homo sapiens
  MAP TO AJ229043.1; EXPRESSED IN PLACENTA, SIGNAL = 9.4; EXPRESSED IN HBL100, SIGNAL = 8.3; EXPRESSED IN BT474, SIGNAL = 7.5; EXPRESSED IN FETAL LIVER, SIGNAL = 9.1; EXPRESSED IN LUNG, SIGNAL = 8.8; EXPRESSED IN BONE MARROW, SIGNAL = 8.3; EXPRESSED IN HEART, SIGNAL = 7.2; EXPRESSED IN HELA, SIGNAL = 8.9; EXPRESSED IN ADULT LIVER, SIGNAL =  11; EXPRESSED IN BRAIN, SIGNAL = 7.9; EST_HUMAN HIT: AW863068.1, EVALUE 3.00e-07
VPGSIPSRDYDDDDDDDDDDGDDDCYFCFTGGKAEAQSGDVT

SEQ ID NO: 37114 - protein, 40 aa, Homo sapiens
  MAP TO AL031003.1; EXPRESSED IN LUNG, SIGNAL =   5; EXPRESSED IN HEART, SIGNAL = 3.6; EXPRESSED IN FETAL LIVER, SIGNAL = 3.6; EXPRESSED IN BT474, SIGNAL = 3.8; EXPRESSED IN BONE MARROW, SIGNAL =   4; EXPRESSED IN BRAIN, SIGNAL =   4; EXPRESSED IN PLACENTA, SIGNAL =   4; EXPRESSED IN HELA, SIGNAL = 4.2; EXPRESSED IN HBL100, SIGNAL = 3.4; EXPRESSED IN ADULT LIVER, SIGNAL = 4.7
KGQAPVFDVFEAFLNTDNIQVFANAATSYIMCLMKFVKGL

SEQ ID NO: 37115 - protein, 72 aa, Homo sapiens
  MAP TO AL031073.1; EXPRESSED IN PLACENTA, SIGNAL = 9.3; EXPRESSED IN HEART, SIGNAL = 4.6; EXPRESSED IN FETAL LIVER, SIGNAL =  14; EXPRESSED IN BT474, SIGNAL = 4.2; EXPRESSED IN BONE MARROW, SIGNAL = 5.2; EXPRESSED IN BRAIN, SIGNAL = 4.7; EXPRESSED IN LUNG, SIGNAL = 5.4; EXPRESSED IN HELA, SIGNAL = 5.7; EXPRESSED IN HBL100, SIGNAL = 4.2; EXPRESSED IN ADULT LIVER, SIGNAL = 4.9; EST_HUMAN HIT: BE274181.1, EVALUE 5.00e-19
PPRIREEDVEKEEGENTKYKVEEAEEASSSSSSVGCCASTQSSNSTEVGESLSTLRNGTPGTGGMTTSSGAA

SEQ ID NO: 37116 - protein, 27 aa, Homo sapiens
  MAP TO AL031073.1; EXPRESSED IN PLACENTA, SIGNAL = 9.3; EXPRESSED IN HEART, SIGNAL = 4.6; EXPRESSED IN FETAL LIVER, SIGNAL =  14; EXPRESSED IN BT474, SIGNAL = 4.2; EXPRESSED IN BONE MARROW, SIGNAL = 5.2; EXPRESSED IN BRAIN, SIGNAL = 4.7; EXPRESSED IN LUNG, SIGNAL = 5.4; EXPRESSED IN HELA, SIGNAL = 5.7; EXPRESSED IN HBL100, SIGNAL = 4.2; EXPRESSED IN ADULT LIVER, SIGNAL = 4.9; EST_HUMAN HIT: BE303049.1, EVALUE 7.00e-01
PLTLSLSSTGLLDLIIHIPVDTFTCCS

SEQ ID NO: 37117 - protein, 39 aa, Homo sapiens
  MAP TO AL022154.1; EXPRESSED IN BT474, SIGNAL = 2.5; EXPRESSED IN FETAL LIVER, SIGNAL =   3; EXPRESSED IN ADULT LIVER, SIGNAL = 3.9; EXPRESSED IN BONE MARROW, SIGNAL = 2.6; EXPRESSED IN LUNG, SIGNAL = 3.5; EXPRESSED IN BRAIN, SIGNAL = 3.6; EXPRESSED IN HEART, SIGNAL =   3; EXPRESSED IN PLACENTA, SIGNAL = 4.4; EXPRESSED IN HBL100, SIGNAL = 2.4; EXPRESSED IN HELA, SIGNAL = 3.1
DEADSDAEEEDGCKELNSDSECEEQEMEEIKEKKGKLNK

SEQ ID NO: 37118 - protein, 20 aa, Homo sapiens
  MAP TO AL022154.1; EXPRESSED IN BT474, SIGNAL = 2.5; EXPRESSED IN FETAL LIVER, SIGNAL =   3; EXPRESSED IN ADULT LIVER, SIGNAL = 3.9; EXPRESSED IN BONE MARROW, SIGNAL = 2.6; EXPRESSED IN LUNG, SIGNAL = 3.5; EXPRESSED IN BRAIN, SIGNAL = 3.6; EXPRESSED IN HEART, SIGNAL =   3; EXPRESSED IN PLACENTA, SIGNAL = 4.4; EXPRESSED IN HBL100, SIGNAL = 2.4; EXPRESSED IN HELA, SIGNAL = 3.1
IQILNVRNRKWRKLKKRKGN

SEQ ID NO: 37119 - protein, 60 aa, Homo sapiens
  MAP TO AL031076.1; EXPRESSED IN BT474, SIGNAL = 5.9; EXPRESSED IN ADULT LIVER, SIGNAL = 8.3; EXPRESSED IN BONE MARROW, SIGNAL = 7.2; EXPRESSED IN BRAIN, SIGNAL =   7; EXPRESSED IN LUNG, SIGNAL = 8.7; EXPRESSED IN HELA, SIGNAL = 7.4; EXPRESSED IN PLACENTA, SIGNAL = 7.8; EXPRESSED IN HBL100, SIGNAL = 7.1; EXPRESSED IN HEART, SIGNAL = 7.4; EXPRESSED IN FETAL LIVER, SIGNAL = 7.6; SWISSPROT HIT: Q44679, EVALUE 2.00e+00
GLTGATSVSLHCRPGWRLEERGQAHRTSIQTLRMAAGRRRTRHTRTSIQTPRMAAGIPRR

SEQ ID NO: 37120 - protein, 17 aa, Homo sapiens
  MAP TO AL031076.1; EXPRESSED IN BT474, SIGNAL = 5.9; EXPRESSED IN ADULT LIVER, SIGNAL = 8.3; EXPRESSED IN BONE MARROW, SIGNAL = 7.2; EXPRESSED IN BRAIN, SIGNAL =   7; EXPRESSED IN LUNG, SIGNAL = 8.7; EXPRESSED IN HELA, SIGNAL = 7.4; EXPRESSED IN PLACENTA, SIGNAL = 7.8; EXPRESSED IN HBL100, SIGNAL = 7.1; EXPRESSED IN HEART, SIGNAL = 7.4; EXPRESSED IN FETAL LIVER, SIGNAL = 7.6
GSRVPPLYHCTADLDGG

SEQ ID NO: 37121 - protein, 34 aa, Homo sapiens
  MAP TO AL078624.22; EXPRESSED IN BRAIN, SIGNAL = 2.4; EXPRESSED IN BONE MARROW, SIGNAL = 3.5; EXPRESSED IN LUNG, SIGNAL = 3.6; EXPRESSED IN HBL100, SIGNAL =   4; EXPRESSED IN PLACENTA, SIGNAL = 3.2; EXPRESSED IN FETAL LIVER, SIGNAL = 3.9; EXPRESSED IN HEART, SIGNAL =   3; EXPRESSED IN HELA, SIGNAL = 3.9; EXPRESSED IN ADULT LIVER, SIGNAL = 3.8; EXPRESSED IN BT474, SIGNAL = 3.5
KEVYVHSFLETGVTAQHREGMGGAGQGRAGRFRI

SEQ ID NO: 37122 - protein, 21 aa, Homo sapiens
  MAP TO AL031119.1; EXPRESSED IN PLACENTA, SIGNAL = 1.7; EXPRESSED IN BT474, SIGNAL = 1.2; EXPRESSED IN BONE MARROW, SIGNAL = 1.2; EXPRESSED IN BRAIN, SIGNAL = 1.2; EXPRESSED IN LUNG, SIGNAL = 1.5; EXPRESSED IN HELA, SIGNAL = 1.4; EXPRESSED IN HBL100, SIGNAL = 1.3; EXPRESSED IN HEART, SIGNAL = 1.3; EXPRESSED IN ADULT LIVER, SIGNAL = 1.3; EXPRESSED IN FETAL LIVER, SIGNAL = 1.2; EST_HUMAN HIT: BE174901.1, EVALUE 1.70e-02
PSAGKASNIPLLSYLRGISTL

SEQ ID NO: 37123 - protein, 40 aa, Homo sapiens
  MAP TO AL022166.1; EXPRESSED IN BT474, SIGNAL = 1.1; EXPRESSED IN ADULT LIVER, SIGNAL = 1.2; EXPRESSED IN FETAL LIVER, SIGNAL = 0.98; EXPRESSED IN BRAIN, SIGNAL = 0.97; EXPRESSED IN BONE MARROW, SIGNAL = 1.7; EXPRESSED IN LUNG, SIGNAL =   1; EXPRESSED IN HELA, SIGNAL = 1.2; EXPRESSED IN HEART, SIGNAL =   1
VRKRFTSGGRNTIVLKASTRWRDMKSIAQGWQRASLEQQL

SEQ ID NO: 37124 - protein, 55 aa, Homo sapiens
  MAP TO AL023285.1; EXPRESSED IN BT474, SIGNAL = 1.1; EXPRESSED IN FETAL LIVER, SIGNAL = 1.2; EXPRESSED IN ADULT LIVER, SIGNAL = 1.2; EXPRESSED IN BONE MARROW, SIGNAL =   1; EXPRESSED IN LUNG, SIGNAL = 1.2; EXPRESSED IN HELA, SIGNAL = 0.95; EXPRESSED IN PLACENTA, SIGNAL = 1.1; EXPRESSED IN HBL100, SIGNAL = 0.97; EXPRESSED IN HEART, SIGNAL = 0.96; EST_HUMAN HIT: BF340272.1, EVALUE 3.70e+00; SWISSPROT HIT: P39072, EVALUE 2.00e+00
ILLMLYLCDCDGPIVEPTIPCPKSFNNASESQSKLQIESFREFYKTPMRPMIRMN

SEQ ID NO: 37125 - protein, 36 aa, Homo sapiens
  MAP TO AJ229042.1; EXPRESSED IN BONE MARROW, SIGNAL = 4.2; EXPRESSED IN PLACENTA, SIGNAL = 4.3; EXPRESSED IN ADULT LIVER, SIGNAL = 4.5; EXPRESSED IN LUNG, SIGNAL = 4.5; EXPRESSED IN HEART, SIGNAL = 3.5; EXPRESSED IN HELA, SIGNAL = 3.8; EXPRESSED IN HBL100, SIGNAL = 3.9; EXPRESSED IN BT474, SIGNAL = 3.8; EXPRESSED IN FETAL LIVER, SIGNAL = 4.1; EXPRESSED IN BRAIN, SIGNAL = 4.3; EST_HUMAN HIT: BE044257.1, EVALUE 1.00e-04; SWISSPROT HIT: P48190, EVALUE 1.60e+00
HFLLLITEYLKQFIKKRNLFFAVIEVEKSKVKGPHL

SEQ ID NO: 37126 - protein, 22 aa, Homo sapiens
  MAP TO AL021069.1; EXPRESSED IN BT474, SIGNAL = 1.8; EXPRESSED IN LUNG, SIGNAL = 1.8; EXPRESSED IN BRAIN, SIGNAL = 1.8; EXPRESSED IN BONE MARROW, SIGNAL = 1.8; EXPRESSED IN HEART, SIGNAL = 1.5; EXPRESSED IN FETAL LIVER, SIGNAL = 1.9; EXPRESSED IN ADULT LIVER, SIGNAL = 2.4; EXPRESSED IN PLACENTA, SIGNAL = 1.9; EXPRESSED IN HELA, SIGNAL = 2.1; EXPRESSED IN HBL100, SIGNAL =   2
DICIQQIHTGITQPQSRHQQGS

SEQ ID NO: 37127 - protein, 48 aa, Homo sapiens
  MAP TO AL096829.12; EXPRESSED IN PLACENTA, SIGNAL =   7; EXPRESSED IN HEART, SIGNAL = 3.6; EXPRESSED IN HBL100, SIGNAL =  14; EXPRESSED IN HELA, SIGNAL =  10; EXPRESSED IN FETAL LIVER, SIGNAL = 8.8; EXPRESSED IN BT474, SIGNAL = 5.6; EXPRESSED IN ADULT LIVER, SIGNAL = 2.9; EXPRESSED IN BONE MARROW, SIGNAL = 5.9; EXPRESSED IN LUNG, SIGNAL =  17; EXPRESSED IN BRAIN, SIGNAL = 2.1; EST_HUMAN HIT: AA534252.1, EVALUE 2.00e-22; SWISSPROT HIT: O09018, EVALUE 3.50e+00
RGGPQVPEEHALCQEAQQEGPKEDAGQQCQGHECTCKGYQGPGKAQGS

SEQ ID NO: 37128 - protein, 117 aa, Homo sapiens
  MAP TO AL022323.7; EXPRESSED IN BONE MARROW, SIGNAL = 3.9; EXPRESSED IN HELA, SIGNAL = 3.6; EXPRESSED IN HBL100, SIGNAL = 3.4; EXPRESSED IN BT474, SIGNAL = 4.1; EXPRESSED IN BRAIN, SIGNAL = 3.1; EXPRESSED IN LUNG, SIGNAL = 5.7; EXPRESSED IN PLACENTA, SIGNAL = 3.7; EXPRESSED IN HEART, SIGNAL =   3; EXPRESSED IN ADULT LIVER, SIGNAL = 4.9; EXPRESSED IN FETAL LIVER, SIGNAL = 3.9; SWISSPROT HIT: Q02314, EVALUE 3.10e-01; EST_HUMAN HIT: BF697886.1, EVALUE 9.60e-01
MDQRMDRWRRRTLPPNVKFDTFSSLVPEDSPHVGHRRTDYVSPTASALRKPQLSHYRVETQEVNPGASRDQTSPAVKQGSPVEPKATFFAVTYQIPNTQKAKGVVLSGAESLLEHSR

SEQ ID NO: 37129 - protein, 65 aa, Homo sapiens
  MAP TO AL008630.1; EXPRESSED IN HEART, SIGNAL = 1.5; EXPRESSED IN BT474, SIGNAL = 0.97; EXPRESSED IN BRAIN, SIGNAL = 1.4; SWISSPROT HIT: P22281, EVALUE 4.40e+00; EST_HUMAN HIT: Z44668.1, EVALUE 1.00e-32
EYEFIVLPNAYMIHMPHAPSFDITKFRSNKQYRICLKTLKEEFQQDMSRRYGFAALKYLTAENNS

SEQ ID NO: 37130 - protein, 28 aa, Homo sapiens
  MAP TO AL008630.1; EXPRESSED IN HEART, SIGNAL = 1.5; EXPRESSED IN BT474, SIGNAL = 0.97; EXPRESSED IN BRAIN, SIGNAL = 1.4
HDPRLLRVLTLLLSSSRSMSSLCCPTPT

SEQ ID NO: 37131 - protein, 122 aa, Homo sapiens
  MAP TO AL021396.5; EXPRESSED IN LUNG, SIGNAL = 1.1; EXPRESSED IN HBL100, SIGNAL = 0.93; EXPRESSED IN HEART, SIGNAL = 1.5; EXPRESSED IN FETAL LIVER, SIGNAL = 1.2; EXPRESSED IN BRAIN, SIGNAL = 1.3; SWISSPROT HIT: Q05152, EVALUE 7.70e+00; EST_HUMAN HIT: BF031848.1, EVALUE 2.00e-22
QNRRSEEAHRAEQLQDAEEEKDDSNEEENKDSLVDDEEEKEDLGDEDEAEEEEEEDNLAAGVDEERSEANDQGPPGEDGVTREEVEPEEAEEGISEQPCPADTEVVEDSLRQRKSQHADKGL

SEQ ID NO: 37132 - protein, 35 aa, Homo sapiens
  MAP TO AL031665.18; EXPRESSED IN BONE MARROW, SIGNAL = 1.7; EXPRESSED IN BRAIN, SIGNAL = 1.6; EXPRESSED IN LUNG, SIGNAL = 1.8; EXPRESSED IN HBL100, SIGNAL = 1.4; EXPRESSED IN HELA, SIGNAL = 2.9; EXPRESSED IN PLACENTA, SIGNAL = 1.7; EXPRESSED IN HEART, SIGNAL = 1.7; EXPRESSED IN ADULT LIVER, SIGNAL = 2.6; EXPRESSED IN BT474, SIGNAL = 1.6; EXPRESSED IN FETAL LIVER, SIGNAL = 2.1; EST_HUMAN HIT: BF091717.1, EVALUE 5.80e-02
AIDVSEHFTQNQSRPEEITLRENFDNDLIFQAESF

SEQ ID NO: 37133 - protein, 166 aa, Homo sapiens
  MAP TO AJ011929.1; EXPRESSED IN PLACENTA, SIGNAL = 2.9; EXPRESSED IN HBL100, SIGNAL = 2.9; EXPRESSED IN LUNG, SIGNAL = 3.3; EXPRESSED IN BRAIN, SIGNAL = 3.2; EXPRESSED IN BONE MARROW, SIGNAL = 3.1; EXPRESSED IN HEART, SIGNAL = 2.9; EXPRESSED IN HELA, SIGNAL = 3.7; EXPRESSED IN BT474, SIGNAL =   3; EXPRESSED IN ADULT LIVER, SIGNAL = 3.7; EXPRESSED IN FETAL LIVER, SIGNAL = 3.5; EST_HUMAN HIT: BE889419.1, EVALUE 2.50e+00
HTTSSRTTAMHEALKQTGGTPERLRNEQEQSELACPGSGHTGQTQADPVCRWAPIAGLYRTGFPLGRDGFVHVAAWDAQKSVSNSWIPRVTRHNMFGGIGAEESELGEIWQQEDSPFVFPLFEMESPDIFLLISTFSPSLSCLLGRESELTTNYVIPEFYRITFYC

SEQ ID NO: 37134 - protein, 41 aa, Homo sapiens
  MAP TO AL034400.2; EXPRESSED IN BT474, SIGNAL = 2.1; EXPRESSED IN LUNG, SIGNAL = 2.5; EXPRESSED IN HBL100, SIGNAL = 1.9; EXPRESSED IN PLACENTA, SIGNAL = 2.1; EXPRESSED IN FETAL LIVER, SIGNAL = 1.9; EXPRESSED IN ADULT LIVER, SIGNAL = 1.8; EXPRESSED IN BRAIN, SIGNAL = 2.5; EXPRESSED IN BONE MARROW, SIGNAL = 1.7; EXPRESSED IN HEART, SIGNAL = 2.1; EXPRESSED IN HELA, SIGNAL = 1.9; EST_HUMAN HIT: AI651668.1, EVALUE 1.00e-11; SWISSPROT HIT: O75487, EVALUE 8.00e-13
DESSGEGSGSGCEYQQCPSEFDYNATDHAGKSANEKADSAG

SEQ ID NO: 37135 - protein, 21 aa, Homo sapiens
  MAP TO AL034400.2; EXPRESSED IN BT474, SIGNAL = 2.1; EXPRESSED IN LUNG, SIGNAL = 2.5; EXPRESSED IN HBL100, SIGNAL = 1.9; EXPRESSED IN PLACENTA, SIGNAL = 2.1; EXPRESSED IN FETAL LIVER, SIGNAL = 1.9; EXPRESSED IN ADULT LIVER, SIGNAL = 1.8; EXPRESSED IN BRAIN, SIGNAL = 2.5; EXPRESSED IN BONE MARROW, SIGNAL = 1.7; EXPRESSED IN HEART, SIGNAL = 2.1; EXPRESSED IN HELA, SIGNAL = 1.9
ALVCLLMRTSGMKFLFHFFLN

SEQ ID NO: 37136 - protein, 175 aa, Homo sapiens
  MAP TO AL020994.1; EXPRESSED IN BONE MARROW, SIGNAL = 1.8; EXPRESSED IN PLACENTA, SIGNAL = 1.7; EXPRESSED IN HBL100, SIGNAL = 1.9; EXPRESSED IN ADULT LIVER, SIGNAL = 1.7; EXPRESSED IN LUNG, SIGNAL = 1.7; EXPRESSED IN BRAIN, SIGNAL =   2; EXPRESSED IN HEART, SIGNAL =   2; EXPRESSED IN HELA, SIGNAL = 1.8; EXPRESSED IN BT474, SIGNAL = 1.9; EXPRESSED IN FETAL LIVER, SIGNAL = 1.9; EST_HUMAN HIT: AA765508.1, EVALUE 2.70e-01; SWISSPROT HIT: Q00496, EVALUE 6.80e+00
GWSCWSPGEPVPSYPPGTDGGAENSVCNEPASRSRGCLIQMQISKESSEELLAPLLCSPPTTMSEDALEKGQFMWSKVERQLESGTGLNKPSPSLLWASVSRIYLLQFFGDFNGSCRQEVIGQGGICLLNQTLFIEHLLYARQWVGTGYSPEQERQLILTRSCQIVTNSHSEPVN

SEQ ID NO: 37137 - protein, 55 aa, Homo sapiens
  MAP TO AL031682.1; EXPRESSED IN LUNG, SIGNAL = 1.8; EXPRESSED IN BRAIN, SIGNAL = 1.8; EXPRESSED IN PLACENTA, SIGNAL = 1.8; EXPRESSED IN HEART, SIGNAL = 1.9; EXPRESSED IN ADULT LIVER, SIGNAL = 1.9; EXPRESSED IN BONE MARROW, SIGNAL =   2; EXPRESSED IN HELA, SIGNAL = 2.2; EXPRESSED IN HBL100, SIGNAL = 1.7; EXPRESSED IN BT474, SIGNAL = 1.8; EXPRESSED IN FETAL LIVER, SIGNAL =   2; SWISSPROT HIT: P38387, EVALUE 4.50e+00; EST_HUMAN HIT: BE545569.1, EVALUE 8.30e+00
WDHPGVQPIPPLRDPHQDRAPVADSSNLLEICSALAAFLVLSHFLMFLPFLLRYL

SEQ ID NO: 37138 - protein, 21 aa, Homo sapiens
  MAP TO AJ011930.1; EXPRESSED IN HBL100, SIGNAL = 2.9; EXPRESSED IN HELA, SIGNAL = 3.3; EXPRESSED IN BT474, SIGNAL = 2.4; EXPRESSED IN LUNG, SIGNAL =   3; EXPRESSED IN BRAIN, SIGNAL =   3; EXPRESSED IN BONE MARROW, SIGNAL = 2.7; EXPRESSED IN PLACENTA, SIGNAL = 3.1; EXPRESSED IN HEART, SIGNAL = 2.3; EXPRESSED IN ADULT LIVER, SIGNAL = 2.9; EXPRESSED IN FETAL LIVER, SIGNAL = 2.8
NAKKESSENAREEAHLQQAHE

SEQ ID NO: 37139 - protein, 138 aa, Homo sapiens
  MAP TO AL034422.18; EXPRESSED IN BONE MARROW, SIGNAL = 2.9; EXPRESSED IN BRAIN, SIGNAL = 3.5; EXPRESSED IN LUNG, SIGNAL = 3.7; EXPRESSED IN HBL100, SIGNAL = 2.4; EXPRESSED IN HELA, SIGNAL = 2.7; EXPRESSED IN PLACENTA, SIGNAL = 4.6; EXPRESSED IN HEART, SIGNAL =   3; EXPRESSED IN ADULT LIVER, SIGNAL = 2.9; EXPRESSED IN BT474, SIGNAL = 2.7; EXPRESSED IN FETAL LIVER, SIGNAL = 3.6; EST_HUMAN HIT: T23683.1, EVALUE 3.00e-31; SWISSPROT HIT: P49129, EVALUE 9.50e-01
NISYVPSTSSGFPAPITRPRYHRWITESPAANSLPREPRGRAQEPLPVAALSPILPAMPTALRYGWSGRRGELAANGQLVTKPTPFLKLGHRRETGTAVLSPNRTMSHLVPGPSGTPGGVGVGRAGGCSRGFKHKSKV

SEQ ID NO: 37140 - protein, 35 aa, Homo sapiens
  MAP TO AL021155.1; EXPRESSED IN HBL100, SIGNAL = 1.1; EXPRESSED IN LUNG, SIGNAL = 1.3; EXPRESSED IN BRAIN, SIGNAL = 1.9; EXPRESSED IN BONE MARROW, SIGNAL = 1.5; EXPRESSED IN PLACENTA, SIGNAL =  23; EXPRESSED IN HEART, SIGNAL = 2.4; EXPRESSED IN HELA, SIGNAL = 1.2; EXPRESSED IN BT474, SIGNAL = 1.1; EXPRESSED IN ADULT LIVER, SIGNAL = 3.1; EXPRESSED IN FETAL LIVER, SIGNAL =  35; EST_HUMAN HIT: AW179141.1, EVALUE 7.00e-08; SWISSPROT HIT: O35454, EVALUE 8.00e-13
AFLGGVVRMTISLTVILIESTNEITYGLPIMVTLM

SEQ ID NO: 37141 - protein, 88 aa, Homo sapiens
  MAP TO AJ229042.1; EXPRESSED IN BONE MARROW, SIGNAL = 1.6; EXPRESSED IN LUNG, SIGNAL = 1.7; EXPRESSED IN BRAIN, SIGNAL = 1.7; EXPRESSED IN PLACENTA, SIGNAL = 2.1; EXPRESSED IN HELA, SIGNAL =   2; EXPRESSED IN HEART, SIGNAL = 1.5; EXPRESSED IN HBL100, SIGNAL = 2.2; EXPRESSED IN ADULT LIVER, SIGNAL = 1.8; EXPRESSED IN BT474, SIGNAL = 2.1; EXPRESSED IN FETAL LIVER, SIGNAL = 2.1; EST_HUMAN HIT: BE904235.1, EVALUE 1.10e+00
HHPSNHLLQVLVHLSAAAEYAPWSCVLFTFESPGPWLRASHTAGSQGSFNRCRNHLEYDLRLLLCPCYVTCQGVHAATSRWGIWDCTP

SEQ ID NO: 37142 - protein, 52 aa, Homo sapiens
  MAP TO AC007073.2; EXPRESSED IN LUNG, SIGNAL = 1.6; EXPRESSED IN BRAIN, SIGNAL = 1.3; EXPRESSED IN HELA, SIGNAL = 1.5; EXPRESSED IN PLACENTA, SIGNAL = 1.6; EXPRESSED IN HEART, SIGNAL = 1.5; EXPRESSED IN BT474, SIGNAL = 1.2; EXPRESSED IN ADULT LIVER, SIGNAL = 1.4; EXPRESSED IN BONE MARROW, SIGNAL = 1.4; EXPRESSED IN HBL100, SIGNAL = 1.6; EXPRESSED IN FETAL LIVER, SIGNAL = 1.5
LVLASLQLLARPPTAEILKFLLRSHTCQVMKKEAEFSIVEFTFWEVVVMGNR

SEQ ID NO: 37143 - protein, 55 aa, Homo sapiens
  MAP TO AL033521.2; EXPRESSED IN PLACENTA, SIGNAL = 0.99; EXPRESSED IN HELA, SIGNAL = 1.3; EXPRESSED IN HEART, SIGNAL = 1.1; EXPRESSED IN BT474, SIGNAL = 1.2; EXPRESSED IN HBL100, SIGNAL = 1.2; EXPRESSED IN FETAL LIVER, SIGNAL = 1.3; EXPRESSED IN BRAIN, SIGNAL = 1.1; EXPRESSED IN LUNG, SIGNAL = 1.1; EXPRESSED IN BONE MARROW, SIGNAL = 1.2
ILAHLINFILINYQHANRGEALRVLNPLLSKKKCKSILSLFFFLISIKFKTLITT

SEQ ID NO: 37144 - protein, 180 aa, Homo sapiens
  MAP TO AC007204.1; EXPRESSED IN HELA, SIGNAL = 1.5; EXPRESSED IN HBL100, SIGNAL = 1.7; EXPRESSED IN PLACENTA, SIGNAL =  39; EXPRESSED IN HEART, SIGNAL = 1.8; EXPRESSED IN ADULT LIVER, SIGNAL = 1.5; EXPRESSED IN BT474, SIGNAL = 1.3; EXPRESSED IN FETAL LIVER, SIGNAL = 1.8; EXPRESSED IN BONE MARROW, SIGNAL = 1.5; EXPRESSED IN LUNG, SIGNAL = 1.5; EXPRESSED IN BRAIN, SIGNAL = 1.4; EST_HUMAN HIT: AU140987.1, EVALUE 1.00e-06
FATAMGNGLRFLMFRLSSLSIATLLSASPVLLSKSSLPALNLICLLPPSLRPQPTTHPLLPSPSPQLMTPLPLTPPIFPLPVNIMILCQSIMILLRMPPLWLYFFLPLSPTTLLLTLSPPHHHPLPTLRPSSQFPCCPFGKQQGPKGSSVSTSPSPFPISSKLKNVSDFSPPILIPISKN

SEQ ID NO: 37145 - protein, 50 aa, Homo sapiens
  MAP TO AL033532.15; EXPRESSED IN BONE MARROW, SIGNAL =   1; EXPRESSED IN BRAIN, SIGNAL = 0.95; EXPRESSED IN HBL100, SIGNAL = 0.97; EXPRESSED IN HELA, SIGNAL = 0.97; EXPRESSED IN PLACENTA, SIGNAL = 0.9; EXPRESSED IN HEART, SIGNAL = 0.95; EXPRESSED IN ADULT LIVER, SIGNAL =   1; EXPRESSED IN BT474, SIGNAL = 1.5; EST_HUMAN HIT: BE296032.1, EVALUE 5.00e-06; SWISSPROT HIT: P34274, EVALUE 3.10e-01
VVPTTDHIDTEKLKAREQIKFFEEVLLFEDELHDHGVSSLSVKIVSIIFI

SEQ ID NO: 37146 - protein, 40 aa, Homo sapiens
  MAP TO AL021332.1; EXPRESSED IN HBL100, SIGNAL =   2; EXPRESSED IN HELA, SIGNAL = 1.7; EXPRESSED IN FETAL LIVER, SIGNAL =   2; EXPRESSED IN BT474, SIGNAL = 1.9; EXPRESSED IN LUNG, SIGNAL =   2; EXPRESSED IN BRAIN, SIGNAL =   2; EXPRESSED IN PLACENTA, SIGNAL = 1.9; EXPRESSED IN HEART, SIGNAL = 1.9; EXPRESSED IN ADULT LIVER, SIGNAL = 2.6; EXPRESSED IN BONE MARROW, SIGNAL = 1.7; SWISSPROT HIT: O84172, EVALUE 4.70e+00
TPSQPFIADLNICKKDSAAQLGTLTEVTNDSKGAAGPRWK

SEQ ID NO: 37147 - protein, 33 aa, Homo sapiens
  MAP TO AL034344.21; EXPRESSED IN BT474, SIGNAL = 2.8; EXPRESSED IN LUNG, SIGNAL = 3.1; EXPRESSED IN HBL100, SIGNAL = 2.6; EXPRESSED IN PLACENTA, SIGNAL = 3.2; EXPRESSED IN ADULT LIVER, SIGNAL = 3.5; EXPRESSED IN FETAL LIVER, SIGNAL = 3.2; EXPRESSED IN BRAIN, SIGNAL = 3.3; EXPRESSED IN BONE MARROW, SIGNAL = 3.2; EXPRESSED IN HEART, SIGNAL = 3.1; EXPRESSED IN HELA, SIGNAL = 3.8
MALSRVGFRFPVTCKGSHTIHVPVEYNLAGSEK

SEQ ID NO: 37148 - protein, 34 aa, Homo sapiens
  MAP TO AC007223.1; EXPRESSED IN FETAL LIVER, SIGNAL =  40; EXPRESSED IN LUNG, SIGNAL =  44; EXPRESSED IN BRAIN, SIGNAL =  26; EXPRESSED IN HELA, SIGNAL =  40; EXPRESSED IN PLACENTA, SIGNAL =  43; EXPRESSED IN BT474, SIGNAL =  31; EXPRESSED IN ADULT LIVER, SIGNAL =  50; EXPRESSED IN BONE MARROW, SIGNAL =  33; EXPRESSED IN HEART, SIGNAL =  31; EXPRESSED IN HBL100, SIGNAL =  40; SWISSPROT HIT: P39188, EVALUE 6.00e-07; EST_HUMAN HIT: AA229798.1, EVALUE 3.00e-10
GLALLPRLECSGVIMVHCSLNLLGSSNPTTSATQ

SEQ ID NO: 37149 - protein, 130 aa, Homo sapiens
  MAP TO AL034350.2; EXPRESSED IN BONE MARROW, SIGNAL = 1.3; EXPRESSED IN LUNG, SIGNAL = 2.2; EXPRESSED IN BRAIN, SIGNAL = 2.6; EXPRESSED IN PLACENTA, SIGNAL = 3.3; EXPRESSED IN HBL100, SIGNAL = 1.6; EXPRESSED IN HELA, SIGNAL = 1.5; EXPRESSED IN HEART, SIGNAL =   2; EXPRESSED IN BT474, SIGNAL = 1.4; EXPRESSED IN FETAL LIVER, SIGNAL = 1.8; EXPRESSED IN ADULT LIVER, SIGNAL = 1.2; EST_HUMAN HIT: BE150340.1, EVALUE 2.00e-50; SWISSPROT HIT: P10272, EVALUE 7.00e-26
QAELIALTRALTLAKGLCVNIYTDSKYAFHILHHHAVIWARRGFLTMQGSSIINSSLIKTLLKAALLPKETGVIHCKGHQKASDPIAQGSSYADKVAKKAGSIPTSIPHGKFFSFSSVTPTYSPTETSTY

SEQ ID NO: 37150 - protein, 22 aa, Homo sapiens
  MAP TO AC007249.2; EXPRESSED IN HEART, SIGNAL =  10; EXPRESSED IN FETAL LIVER, SIGNAL =  14; EXPRESSED IN LUNG, SIGNAL =  13; EXPRESSED IN HBL100, SIGNAL =  12; EXPRESSED IN HELA, SIGNAL =  13; EXPRESSED IN PLACENTA, SIGNAL =  13; EXPRESSED IN ADULT LIVER, SIGNAL =  12; EXPRESSED IN BT474, SIGNAL =  13; EXPRESSED IN BRAIN, SIGNAL =  12; EXPRESSED IN BONE MARROW, SIGNAL = 9.7
PESLNSWWWWWRWRWRWWWRWR

SEQ ID NO: 37151 - protein, 533 aa, Homo sapiens
  MAP TO AC010130.3; EXPRESSED IN BONE MARROW, SIGNAL = 1.1; EXPRESSED IN LUNG, SIGNAL = 1.8; EXPRESSED IN BRAIN, SIGNAL =   3; EXPRESSED IN PLACENTA, SIGNAL = 1.9; EXPRESSED IN HEART, SIGNAL = 1.2; EST_HUMAN HIT: AI879705.1, EVALUE 3.00e-87; SWISSPROT HIT: P37275, EVALUE 2.00e-45
EKPYECPNCKKRFSHSGSYSSHISSKKCIGLISVNGRMRNNIKTGSSPNSVSSSPTNSAITQLRNKLENGKPLSMSEQTGLLKIKTEPLDFNDYKVLMATHGFSGTSPFMNGGLGATSPLGVHPSAQSPMQHLGVGMEAPLLGFPTMNSNLSEVQKVLQIVDNTVSRQKMDCKAEEISKLKGYHMKDPCSQPEEQGVTSPNIPPVGLPVVSHNGATKSIIDYTLEKVNEAKACLQSLTTDSRRQISNIKKEKLRTLIDLVTDDKMIENHNISTPFSCQFCKESFPGPIPLHQHERYLCKMNEEIKAVLQPHENIVPNKAGVFVDNKALLLSSVLSEKGMTSPINPYKDHMSVLKAYYAMNMEPNSDELLKISIAVGLPQEFVKEWFEQRKVYQYSNSRSPSLERSSKPLAPNSNPPTKDSLLPRSPVKPMDSITSPSIAELHNSVTNCDPPLRLTKPSHFTNIKPVEKLDHSRSNTPSPLNLSSTSSKNSHSSSYTPNSFSSEELQAEPFRLVITKTNERTQKYYSHKEQNKS

SEQ ID NO: 37152 - protein, 515 aa, Homo sapiens
  MAP TO AL049646.17; EXPRESSED IN BONE MARROW, SIGNAL = 1.6; EXPRESSED IN HELA, SIGNAL = 1.9; EXPRESSED IN PLACENTA, SIGNAL = 2.8; EXPRESSED IN HEART, SIGNAL =   2; EXPRESSED IN BT474, SIGNAL = 2.3; EXPRESSED IN BRAIN, SIGNAL = 2.7; EXPRESSED IN HBL100, SIGNAL = 2.6; EXPRESSED IN ADULT LIVER, SIGNAL = 0.99; EXPRESSED IN FETAL LIVER, SIGNAL = 1.9; EXPRESSED IN LUNG, SIGNAL = 1.8; EST_HUMAN HIT: AW953464.1, EVALUE 0.00e+00; SWISSPROT HIT: P52736, EVALUE 0.00e+00; EST_HUMAN HIT: AW953464.1, EVALUE 0.00e+00
SDQAEGPEGEGAMPLFGRTKKRTLGAFSRPPQRQPVSSRNGLRGVELEASPAQSGNPEETDKLLKRIEVLGFGTVNCGECGLSFSKMTNLLSHQRIHSGEKPYVCGVCEKGFSLKKSLARHQKAHSGEKPIVCRECGRGFNRKSTLIIHERTHSGEKPYMCSECGRGFSQKSNLIIHQRTHSGEKPYVCRECGKGFSQKSAVVRHQRTHLEEKTIVCSDCGLGFSDRSNLISHQRTHSGEKPYACKECGRCFRQRTTLVNHQRTHSKEKPYVCGVCGHSFSQNSTLISHRRTHTGEKPYVCGVCGRGFSLKSHLNRHQNIHSGEKPIVCKDCGRGFSQQSNLIRHQRTHSGEKPMVCGECGRGFSQKSNLVAHQRTHSGERPYVCRECGRGFSHQAGLIRHKRKHSREKPYMCRQCGLGFGNKSALITHKRAHSEEKPCVCRECGQGFLQKSHLTLHQMTHTGEKPYVCKTCGRGFSLKSHLSRHRKTTSVHHRLPVQPDPEPCAGQPSDSLYSL

SEQ ID NO: 37153 - protein, 50 aa, Homo sapiens
  MAP TO AL080312.4; EXPRESSED IN BONE MARROW, SIGNAL = 0.96; EXPRESSED IN LUNG, SIGNAL = 1.2; EXPRESSED IN HEART, SIGNAL = 1.1; SWISSPROT HIT: P08548, EVALUE 7.00e-03; EST_HUMAN HIT: AL133853.1, EVALUE 1.00e-05; EST_HUMAN HIT: AL133853.1, EVALUE 1.00e-05
FKTIPIKIPASCFVDINEVILKFVWEGKRLIKANTVALAEIEQGQRTDTT

SEQ ID NO: 37154 - protein, 36 aa, Homo sapiens
  MAP TO AL022323.7; EXPRESSED IN BONE MARROW, SIGNAL = 2.3; EXPRESSED IN LUNG, SIGNAL = 2.6; EXPRESSED IN HELA, SIGNAL = 2.2; EXPRESSED IN HEART, SIGNAL = 2.3; EXPRESSED IN PLACENTA, SIGNAL = 2.4; EXPRESSED IN HBL100, SIGNAL = 2.3; EXPRESSED IN FETAL LIVER, SIGNAL = 2.3; EXPRESSED IN ADULT LIVER, SIGNAL = 2.7; EXPRESSED IN BT474, SIGNAL = 2.2; EXPRESSED IN BRAIN, SIGNAL = 2.1
GDVGQGPALSRLQQALPLNPQPWESKGEKPVQDPGV

SEQ ID NO: 37155 - protein, 20 aa, Homo sapiens
  MAP TO AC010127.2; EXPRESSED IN HEART, SIGNAL = 1.1; EXPRESSED IN BRAIN, SIGNAL = 1.4
KVCTCIFTLLFSSSLGPSSP

SEQ ID NO: 37156 - protein, 35 aa, Homo sapiens
  MAP TO AC005480.3; EXPRESSED IN HBL100, SIGNAL = 0.77; EXPRESSED IN FETAL LIVER, SIGNAL = 0.68; EXPRESSED IN BT474, SIGNAL = 0.78; EXPRESSED IN ADULT LIVER, SIGNAL = 0.85; EXPRESSED IN HEART, SIGNAL = 0.8; EST_HUMAN HIT: N57222.1, EVALUE 6.60e+00
TLLRYDLFHRAFSIIPALKFQSIVTVLLDTFSLYR

SEQ ID NO: 37157 - protein, 190 aa, Homo sapiens
  MAP TO AC011451.2; EXPRESSED IN ADULT LIVER, SIGNAL = 1.5; EXPRESSED IN LUNG, SIGNAL = 1.7; EXPRESSED IN BRAIN, SIGNAL =   2; EXPRESSED IN HBL100, SIGNAL = 1.5; EXPRESSED IN HELA, SIGNAL = 1.5; EXPRESSED IN HEART, SIGNAL = 1.3; EXPRESSED IN PLACENTA, SIGNAL =   2; EXPRESSED IN BT474, SIGNAL = 2.1; EXPRESSED IN FETAL LIVER, SIGNAL = 1.4; EXPRESSED IN BONE MARROW, SIGNAL = 1.3; EST_HUMAN HIT: BE044316.1, EVALUE 3.00e-49; SWISSPROT HIT: P10264, EVALUE 5.00e-11
FHTDDEEEGDKEERECDNVAEEIKEQIRQPLKETQEGEACPCPSAPPQYLEDREWPDPLDLSFLEDTEQKVVSPATVRAEPRVTALSSIQAGIQQARREGNLEAWKFPVRIHPPDQQGNVMATFEAFPFKLLNEFKQAINQYGPRSPFVMGLSKNVATSSQMIPIDGTLLLEPVWLLLSFYSLRPGGQMK

SEQ ID NO: 37158 - protein, 40 aa, Homo sapiens
  MAP TO AC007786.1; EXPRESSED IN LUNG, SIGNAL = 0.81; EXPRESSED IN ADULT LIVER, SIGNAL = 1.4; EXPRESSED IN BRAIN, SIGNAL = 0.88; EXPRESSED IN PLACENTA, SIGNAL = 0.86; EXPRESSED IN BT474, SIGNAL = 0.78; EXPRESSED IN BONE MARROW, SIGNAL = 0.82; EXPRESSED IN HELA, SIGNAL = 0.76; EXPRESSED IN HEART, SIGNAL = 0.82; EXPRESSED IN FETAL LIVER, SIGNAL = 0.92; EST_HUMAN HIT: BE259153.1, EVALUE 7.30e-01
GTRDPRISRPCGHHQDPRCCLSCAYPWGTFLLAERAETRH

SEQ ID NO: 37159 - protein, 40 aa, Homo sapiens
  MAP TO AC007786.1; EXPRESSED IN LUNG, SIGNAL = 0.81; EXPRESSED IN ADULT LIVER, SIGNAL = 1.4; EXPRESSED IN BRAIN, SIGNAL = 0.88; EXPRESSED IN PLACENTA, SIGNAL = 0.86; EXPRESSED IN BT474, SIGNAL = 0.78; EXPRESSED IN BONE MARROW, SIGNAL = 0.82; EXPRESSED IN HELA, SIGNAL = 0.76; EXPRESSED IN HEART, SIGNAL = 0.82; EXPRESSED IN FETAL LIVER, SIGNAL = 0.92; SWISSPROT HIT: P23231, EVALUE 6.20e+00
EPEILEFLGHVDIIRILVAVSVVLTLGGLSYWLREQKQDI

SEQ ID NO: 37160 - protein, 90 aa, Homo sapiens
  MAP TO AC012002.2; EXPRESSED IN PLACENTA, SIGNAL = 1.7; EXPRESSED IN HELA, SIGNAL = 1.7; EXPRESSED IN ADULT LIVER, SIGNAL = 2.1; EXPRESSED IN FETAL LIVER, SIGNAL = 1.7; EXPRESSED IN BRAIN, SIGNAL = 1.3; EXPRESSED IN HEART, SIGNAL = 1.6; EXPRESSED IN BT474, SIGNAL = 1.4; EXPRESSED IN LUNG, SIGNAL = 1.9; EXPRESSED IN BONE MARROW, SIGNAL = 1.5; EXPRESSED IN HBL100, SIGNAL = 1.6; EST_HUMAN HIT: AI452521.1, EVALUE 4.20e-02; SWISSPROT HIT: P07904, EVALUE 6.00e+00
DGERLSQLHVALAGVTCLGSGGSTFKMVHFYGCQMLLAAGWESGWSCGLEDPVSLLVGTSRGCLSFLTSWQLGSKLEHPKSMRQKLCCCL

SEQ ID NO: 37161 - protein, 42 aa, Homo sapiens
  MAP TO AC011257.2; EXPRESSED IN HEART, SIGNAL = 1.1; EXPRESSED IN PLACENTA, SIGNAL = 1.7; EXPRESSED IN ADULT LIVER, SIGNAL =   1; EXPRESSED IN FETAL LIVER, SIGNAL = 1.1; EXPRESSED IN LUNG, SIGNAL = 1.3; EST_HUMAN HIT: BE900611.1, EVALUE 2.40e+00
  unsure 31
QTQSDTRAKNTVSITHTRQHPGHTAGEKGEXMDLKKPESVYH

SEQ ID NO: 37162 - protein, 105 aa, Homo sapiens
  MAP TO AL022169.1; EXPRESSED IN PLACENTA, SIGNAL = 9.2; EXPRESSED IN HEART, SIGNAL = 7.2; EXPRESSED IN LUNG, SIGNAL = 9.4; EXPRESSED IN BRAIN, SIGNAL =   8; EXPRESSED IN HELA, SIGNAL =  10; EXPRESSED IN HBL100, SIGNAL =  10; EXPRESSED IN ADULT LIVER, SIGNAL = 7.5; EXPRESSED IN BT474, SIGNAL = 7.7; EXPRESSED IN FETAL LIVER, SIGNAL = 9.1; EXPRESSED IN BONE MARROW, SIGNAL = 7.7; EST_HUMAN HIT: AW974650.1, EVALUE 5.00e-59; SWISSPROT HIT: Q00994, EVALUE 5.00e-04
NNNNIMQKPCKENEGKPKCSVPKREEKRPYGEFERQQTEGNFRQRLLQSLEEFKEDIDYRHFKDEEMTREGDEMERCLEEIRGLRKKFRALHSNHRHSRDRPYPI

SEQ ID NO: 37163 - protein, 57 aa, Homo sapiens
  MAP TO AL022169.1; EXPRESSED IN PLACENTA, SIGNAL = 9.2; EXPRESSED IN HEART, SIGNAL = 7.2; EXPRESSED IN LUNG, SIGNAL = 9.4; EXPRESSED IN BRAIN, SIGNAL =   8; EXPRESSED IN HELA, SIGNAL =  10; EXPRESSED IN HBL100, SIGNAL =  10; EXPRESSED IN ADULT LIVER, SIGNAL = 7.5; EXPRESSED IN BT474, SIGNAL = 7.7; EXPRESSED IN FETAL LIVER, SIGNAL = 9.1; EXPRESSED IN BONE MARROW, SIGNAL = 7.7; EST_HUMAN HIT: AW974650.1, EVALUE 1.00e-26; SWISSPROT HIT: O07920, EVALUE 2.60e+00
ETTTTSCKNPAKKTKESQSAACQRGRKNARMENLNASKQKGILDRGCFSLSKNLKRT

SEQ ID NO: 37164 - protein, 45 aa, Homo sapiens
  MAP TO AC007011.1; EXPRESSED IN PLACENTA, SIGNAL = 0.9; EXPRESSED IN ADULT LIVER, SIGNAL = 1.1; EXPRESSED IN BT474, SIGNAL = 0.97; EXPRESSED IN FETAL LIVER, SIGNAL = 0.93; EXPRESSED IN BONE MARROW, SIGNAL = 1.3; EXPRESSED IN BRAIN, SIGNAL = 1.4; EXPRESSED IN HELA, SIGNAL = 1.1; EXPRESSED IN HEART, SIGNAL = 1.1; EST_HUMAN HIT: BE262438.1, EVALUE 2.00e-22; SWISSPROT HIT: P16661, EVALUE 1.00e-03
LPSIAVCWFVGCLCGSKLVIDWHNYGYSIMGLVHGPNHPLVLLAK

SEQ ID NO: 37165 - protein, 46 aa, Homo sapiens
  MAP TO AC007011.1; EXPRESSED IN PLACENTA, SIGNAL = 0.9; EXPRESSED IN ADULT LIVER, SIGNAL = 1.1; EXPRESSED IN BT474, SIGNAL = 0.97; EXPRESSED IN FETAL LIVER, SIGNAL = 0.93; EXPRESSED IN BONE MARROW, SIGNAL = 1.3; EXPRESSED IN BRAIN, SIGNAL = 1.4; EXPRESSED IN HELA, SIGNAL = 1.1; EXPRESSED IN HEART, SIGNAL = 1.1; EST_HUMAN HIT: BE262438.1, EVALUE 4.00e-21; SWISSPROT HIT: P26562, EVALUE 7.90e+00
RTPQVCLALLSAGSWAAFVEASSSLTGTTMATPSWVWCMAPTIPSF

SEQ ID NO: 37166 - protein, 42 aa, Homo sapiens
  MAP TO AC007014.1; EXPRESSED IN BONE MARROW, SIGNAL = 9.3; EXPRESSED IN PLACENTA, SIGNAL = 8.8; EXPRESSED IN ADULT LIVER, SIGNAL =  12; EXPRESSED IN BRAIN, SIGNAL = 7.4; EXPRESSED IN HEART, SIGNAL = 7.4; EXPRESSED IN HELA, SIGNAL = 7.8; EXPRESSED IN HBL100, SIGNAL = 9.3; EXPRESSED IN BT474, SIGNAL = 7.6; EXPRESSED IN FETAL LIVER, SIGNAL = 9.1; EXPRESSED IN LUNG, SIGNAL = 9.8; EST_HUMAN HIT: BE832439.1, EVALUE 4.00e-15
AIRVFFMLRSLSLQLRGEPETQLPLTREEDLIKTDDVLDLSE

SEQ ID NO: 37167 - protein, 22 aa, Homo sapiens
  MAP TO AC007014.1; EXPRESSED IN BONE MARROW, SIGNAL = 9.3; EXPRESSED IN PLACENTA, SIGNAL = 8.8; EXPRESSED IN ADULT LIVER, SIGNAL =  12; EXPRESSED IN BRAIN, SIGNAL = 7.4; EXPRESSED IN HEART, SIGNAL = 7.4; EXPRESSED IN HELA, SIGNAL = 7.8; EXPRESSED IN HBL100, SIGNAL = 9.3; EXPRESSED IN BT474, SIGNAL = 7.6; EXPRESSED IN FETAL LIVER, SIGNAL = 9.1; EXPRESSED IN LUNG, SIGNAL = 9.8; EST_HUMAN HIT: BE832439.1, EVALUE 1.00e-03
VGPGHPGVLHAAFPVTAIARGA

SEQ ID NO: 37168 - protein, 87 aa, Homo sapiens
  MAP TO AC007220.1; EXPRESSED IN LUNG, SIGNAL = 4.7; EXPRESSED IN BONE MARROW, SIGNAL = 4.8; EXPRESSED IN HELA, SIGNAL = 3.9; EXPRESSED IN PLACENTA, SIGNAL = 4.2; EXPRESSED IN BT474, SIGNAL = 4.5; EXPRESSED IN ADULT LIVER, SIGNAL = 4.8; EXPRESSED IN BRAIN, SIGNAL = 3.7; EXPRESSED IN HEART, SIGNAL =   4; EXPRESSED IN HBL100, SIGNAL =   5; EXPRESSED IN FETAL LIVER, SIGNAL = 4.2; EST_HUMAN HIT: AI432308.1, EVALUE 7.00e-33; SWISSPROT HIT: P46578, EVALUE 3.00e-10
MPFPLLLTVQDMQVTGVEDDSRALNITIHKPASSPHSKPFPILQATFIFSDHIRCIIAKQRLAKGRIQARRMKMQRIAGEWLDPGRA

SEQ ID NO: 37169 - protein, 39 aa, Homo sapiens
  MAP TO AC011032.2; EXPRESSED IN PLACENTA, SIGNAL = 5.4; EXPRESSED IN HELA, SIGNAL = 5.6; EXPRESSED IN HEART, SIGNAL =   4; EXPRESSED IN ADULT LIVER, SIGNAL = 7.5; EXPRESSED IN FETAL LIVER, SIGNAL = 5.2; EXPRESSED IN BRAIN, SIGNAL = 4.9; EXPRESSED IN BT474, SIGNAL = 4.9; EXPRESSED IN LUNG, SIGNAL = 6.3; EXPRESSED IN BONE MARROW, SIGNAL = 4.3; EXPRESSED IN HBL100, SIGNAL = 4.2; EST_HUMAN HIT: AW631361.1, EVALUE 3.00e-05
LHLLLSYFKKTFQDVEPTCLKFSLKALLSSMANVGAMVL

SEQ ID NO: 37170 - protein, 40 aa, Homo sapiens
  MAP TO AC009721.9; EXPRESSED IN FETAL LIVER, SIGNAL = 1.1; EXPRESSED IN BT474, SIGNAL =   1; EXPRESSED IN ADULT LIVER, SIGNAL = 1.3; EXPRESSED IN LUNG, SIGNAL = 1.1; EXPRESSED IN BONE MARROW, SIGNAL =   1; EXPRESSED IN HELA, SIGNAL = 1.2; EXPRESSED IN PLACENTA, SIGNAL = 1.2; EXPRESSED IN HBL100, SIGNAL = 1.1; EXPRESSED IN HEART, SIGNAL = 1.2; EST_HUMAN HIT: AA835001.1, EVALUE 1.10e-01
KQPILLRPKLGSPKMSLLLYPIGQSSHRASPEKGWTCSTS

SEQ ID NO: 37171 - protein, 38 aa, Homo sapiens
  MAP TO AC009296.1; EXPRESSED IN HEART, SIGNAL = 1.1; EXPRESSED IN BT474, SIGNAL = 0.93; EXPRESSED IN LUNG, SIGNAL = 1.1; EXPRESSED IN HELA, SIGNAL = 0.86; EXPRESSED IN ADULT LIVER, SIGNAL = 1.3; EXPRESSED IN BRAIN, SIGNAL =   1; EXPRESSED IN PLACENTA, SIGNAL = 0.92; EXPRESSED IN BONE MARROW, SIGNAL =   1; EXPRESSED IN HBL100, SIGNAL = 0.85; EXPRESSED IN FETAL LIVER, SIGNAL = 0.77; EST_HUMAN HIT: BE883574.1, EVALUE 1.10e+00; SWISSPROT HIT: P16415, EVALUE 8.20e-02
SRPCDHQEHGQKPPEDKSAGKLISQRSVQKWSRLGVGV

SEQ ID NO: 37172 - protein, 39 aa, Homo sapiens
  MAP TO AC009296.1; EXPRESSED IN HEART, SIGNAL = 1.1; EXPRESSED IN BT474, SIGNAL = 0.93; EXPRESSED IN LUNG, SIGNAL = 1.1; EXPRESSED IN HELA, SIGNAL = 0.86; EXPRESSED IN ADULT LIVER, SIGNAL = 1.3; EXPRESSED IN BRAIN, SIGNAL =   1; EXPRESSED IN PLACENTA, SIGNAL = 0.92; EXPRESSED IN BONE MARROW, SIGNAL =   1; EXPRESSED IN HBL100, SIGNAL = 0.85; EXPRESSED IN FETAL LIVER, SIGNAL = 0.77; EST_HUMAN HIT: BE560046.1, EVALUE 9.50e+00
LAGPVITRSMDKSLQKTKVQESSFLRDQFRSGPGWGWES

SEQ ID NO: 37173 - protein, 69 aa, Homo sapiens
  MAP TO AC008925.2; EXPRESSED IN BRAIN, SIGNAL = 6.3; EXPRESSED IN HELA, SIGNAL =  16; EXPRESSED IN PLACENTA, SIGNAL =   6; EXPRESSED IN HBL100, SIGNAL =  13; EXPRESSED IN HEART, SIGNAL = 6.2; EXPRESSED IN BT474, SIGNAL = 6.2; EXPRESSED IN FETAL LIVER, SIGNAL =  11; EXPRESSED IN ADULT LIVER, SIGNAL = 4.5; EXPRESSED IN BONE MARROW, SIGNAL = 5.9; EXPRESSED IN LUNG, SIGNAL =  11; SWISSPROT HIT: P23581, EVALUE 5.00e-01; EST_HUMAN HIT: BE898082.1, EVALUE 7.00e-28
LLGCNTMYSKATLGVIDQMEIISRLVNADDIHESSRVGYISSYLAINLNEPLHANLYFISCQGILKSVP

SEQ ID NO: 37174 - protein, 60 aa, Homo sapiens
  MAP TO AC007223.1; EXPRESSED IN HEART, SIGNAL = 1.1; EXPRESSED IN ADULT LIVER, SIGNAL = 1.9; EXPRESSED IN FETAL LIVER, SIGNAL = 1.5; EXPRESSED IN LUNG, SIGNAL = 1.5; EXPRESSED IN BRAIN, SIGNAL = 1.5; EXPRESSED IN HBL100, SIGNAL = 1.5; EXPRESSED IN HELA, SIGNAL = 1.3; EXPRESSED IN PLACENTA, SIGNAL = 1.3; EXPRESSED IN BT474, SIGNAL = 1.4; EXPRESSED IN BONE MARROW, SIGNAL = 1.6
ETEKKGVILPDFQEEDFMNISITTTTKKRTTICLFCYQQLKILYLVTMEDGTIRQSSLTN

SEQ ID NO: 37175 - protein, 117 aa, Homo sapiens
  MAP TO AC007248.1; EXPRESSED IN ADULT LIVER, SIGNAL =   2; EXPRESSED IN FETAL LIVER, SIGNAL = 2.1; EXPRESSED IN LUNG, SIGNAL = 2.1; EXPRESSED IN HELA, SIGNAL = 1.6; EXPRESSED IN PLACENTA, SIGNAL = 1.5; EXPRESSED IN BT474, SIGNAL = 1.5; EXPRESSED IN BONE MARROW, SIGNAL =   2; EXPRESSED IN BRAIN, SIGNAL = 1.7; EXPRESSED IN HEART, SIGNAL = 1.4; EXPRESSED IN HBL100, SIGNAL = 5.1; SWISSPROT HIT: P13504, EVALUE 1.00e-11; EST_HUMAN HIT: AV696742.1, EVALUE 2.00e-26
VVDEIHSLIEKSRRLIIVLSKSYMSNEVRYELESGLHEALVERKIKIILIEFTPVTDFTFLPQSLKLLKSHRVLKWKADKSLSYNSRFWKNLLYLMPAKTVKPGRDEPEVLPVLSES

SEQ ID NO: 37176 - protein, 44 aa, Homo sapiens
  MAP TO AC011061.2; EXPRESSED IN BONE MARROW, SIGNAL = 5.6; EXPRESSED IN HBL100, SIGNAL = 4.9; EXPRESSED IN HELA, SIGNAL = 3.7; EXPRESSED IN ADULT LIVER, SIGNAL = 6.3; EXPRESSED IN BRAIN, SIGNAL = 5.1; EXPRESSED IN LUNG, SIGNAL = 5.2; EXPRESSED IN PLACENTA, SIGNAL = 5.9; EXPRESSED IN HEART, SIGNAL =   4; EXPRESSED IN BT474, SIGNAL = 4.6; EXPRESSED IN FETAL LIVER, SIGNAL = 5.1; EST_HUMAN HIT: BE734186.1, EVALUE 5.00e-20; SWISSPROT HIT: P35580, EVALUE 4.00e-21
VINPYKNLPIYSENIIEMYRGKKRHEMPPHIYAISESAYRCMLQ

SEQ ID NO: 37177 - protein, 80 aa, Homo sapiens
  MAP TO AC007540.3; EXPRESSED IN LUNG, SIGNAL = 1.1; EXPRESSED IN BRAIN, SIGNAL = 1.1; EXPRESSED IN HEART, SIGNAL = 0.96; EXPRESSED IN PLACENTA, SIGNAL = 1.2; EXPRESSED IN BT474, SIGNAL = 0.98; EXPRESSED IN HBL100, SIGNAL = 0.96; EXPRESSED IN HELA, SIGNAL = 0.92; EXPRESSED IN ADULT LIVER, SIGNAL = 0.95; EXPRESSED IN BONE MARROW, SIGNAL = 2.5; EXPRESSED IN FETAL LIVER, SIGNAL = 0.82; EST_HUMAN HIT: BE962207.2, EVALUE 4.50e+00; SWISSPROT HIT: P04964, EVALUE 1.40e+00
NQRGLEEMERLHTSCQKHFMPRTNIHICPVPGMSQNHFQVIARIPSIVETGVSGTLPTENPFPMELLQSTRIIYIHNESP

SEQ ID NO: 37178 - protein, 132 aa, Homo sapiens
  MAP TO AC011363.1; EXPRESSED IN HEART, SIGNAL = 0.92; EXPRESSED IN LUNG, SIGNAL = 3.6; EXPRESSED IN BRAIN, SIGNAL = 1.1; EXPRESSED IN FETAL LIVER, SIGNAL = 0.92; EXPRESSED IN ADULT LIVER, SIGNAL = 0.95; EST_HUMAN HIT: BE018556.1, EVALUE 2.00e-33; SWISSPROT HIT: O54827, EVALUE 2.00e-33
VLIPISLYVSIELVKLGQVFFLSNDLDLYDEETDLSIQCRALNIAEDLGQIQYIFSDKTGTLTENKMVFRRCTIMGSEYSHQENGIEAPKGSIPLSKRKYPALLRNEEIKDILLALLEAVWHFHKLLPVSLW

SEQ ID NO: 37179 - protein, 88 aa, Homo sapiens
  MAP TO AC007249.2; EXPRESSED IN BONE MARROW, SIGNAL = 1.5; EXPRESSED IN ADULT LIVER, SIGNAL =   1; EXPRESSED IN LUNG, SIGNAL = 1.1; EXPRESSED IN BRAIN, SIGNAL = 1.1; EXPRESSED IN HEART, SIGNAL =   1; EXPRESSED IN HELA, SIGNAL = 1.2; EXPRESSED IN HBL100, SIGNAL = 1.3; EXPRESSED IN PLACENTA, SIGNAL = 1.6; EXPRESSED IN BT474, SIGNAL = 1.3; EXPRESSED IN FETAL LIVER, SIGNAL = 1.2; EST_HUMAN HIT: BF125150.1, EVALUE 1.30e-01; SWISSPROT HIT: Q01644, EVALUE 8.10e+00
EGHGGAVGCPRYRGGSSPGGRVTGRGPCGDALGTGSSCCGARPRGEALGVFPHPLTPTAFLVLWVPAVSEPSRWAQGQPHQGQCGPML

SEQ ID NO: 37180 - protein, 19 aa, Homo sapiens
  MAP TO AC007249.2; EXPRESSED IN BONE MARROW, SIGNAL = 1.5; EXPRESSED IN ADULT LIVER, SIGNAL =   1; EXPRESSED IN LUNG, SIGNAL = 1.1; EXPRESSED IN BRAIN, SIGNAL = 1.1; EXPRESSED IN HEART, SIGNAL =   1; EXPRESSED IN HELA, SIGNAL = 1.2; EXPRESSED IN HBL100, SIGNAL = 1.3; EXPRESSED IN PLACENTA, SIGNAL = 1.6; EXPRESSED IN BT474, SIGNAL = 1.3; EXPRESSED IN FETAL LIVER, SIGNAL = 1.2
SRTASSTVPWASHCSSMPF

SEQ ID NO: 37181 - protein, 35 aa, Homo sapiens
  MAP TO AC007204.1; EXPRESSED IN BT474, SIGNAL = 3.4; EXPRESSED IN LUNG, SIGNAL = 2.3; EXPRESSED IN FETAL LIVER, SIGNAL = 2.1; EXPRESSED IN ADULT LIVER, SIGNAL = 2.5; EXPRESSED IN BONE MARROW, SIGNAL = 2.8; EXPRESSED IN BRAIN, SIGNAL = 2.5; EXPRESSED IN PLACENTA, SIGNAL = 2.6; EXPRESSED IN HEART, SIGNAL = 2.1; EXPRESSED IN HELA, SIGNAL = 2.3; EXPRESSED IN HBL100, SIGNAL = 2.5; SWISSPROT HIT: P35789, EVALUE 6.00e-15; EST_HUMAN HIT: N31759.1, EVALUE 8.00e-14
VAIEFSLEEWHCLDTAQRNLYRNVMLENYSNLVFL

SEQ ID NO: 37182 - protein, 56 aa, Homo sapiens
  MAP TO AC007016.5; EXPRESSED IN LUNG, SIGNAL =   2; EXPRESSED IN BT474, SIGNAL = 2.1; EXPRESSED IN ADULT LIVER, SIGNAL = 1.7; EXPRESSED IN FETAL LIVER, SIGNAL = 1.7; EXPRESSED IN BONE MARROW, SIGNAL = 2.1; EXPRESSED IN HELA, SIGNAL =   2; EXPRESSED IN BRAIN, SIGNAL = 2.1; EXPRESSED IN PLACENTA, SIGNAL = 1.7; EXPRESSED IN HEART, SIGNAL = 1.8; EXPRESSED IN HBL100, SIGNAL = 1.9
KGENYSPRYICSIPGLPGPPGPPGANGSPGPHGRIGLPGRDGRDGRKGEKGEKGTA

SEQ ID NO: 37183 - protein, 26 aa, Homo sapiens
  MAP TO AL035534.1; EXPRESSED IN BT474, SIGNAL =   1; EXPRESSED IN BONE MARROW, SIGNAL = 1.2; EXPRESSED IN HELA, SIGNAL = 0.92; EXPRESSED IN ADULT LIVER, SIGNAL = 0.93; EXPRESSED IN PLACENTA, SIGNAL = 1.3; EXPRESSED IN HEART, SIGNAL = 1.3; EXPRESSED IN BRAIN, SIGNAL =   1; EXPRESSED IN LUNG, SIGNAL =   1; EXPRESSED IN FETAL LIVER, SIGNAL =   1; EXPRESSED IN HBL100, SIGNAL = 1.2; EST_HUMAN HIT: H63002.1, EVALUE 6.00e-04
KKNFQVFTSKYDVNCGLFIYGLYYVE

SEQ ID NO: 37184 - protein, 49 aa, Homo sapiens
  MAP TO AL035409.15; EXPRESSED IN BT474, SIGNAL = 0.9; EXPRESSED IN BONE MARROW, SIGNAL = 0.96; EXPRESSED IN LUNG, SIGNAL = 1.1; EXPRESSED IN ADULT LIVER, SIGNAL = 0.68; EXPRESSED IN BRAIN, SIGNAL = 1.2; EXPRESSED IN PLACENTA, SIGNAL = 0.85; EXPRESSED IN FETAL LIVER, SIGNAL = 0.78; EXPRESSED IN HEART, SIGNAL = 0.9; SWISSPROT HIT: Q64686, EVALUE 1.00e-04; EST_HUMAN HIT: BE083080.1, EVALUE 3.00e-22
SYMRRDGKGQVYNNLHLLSQVLPRLKAFMITRHKMLQFDELFKQETGKD

SEQ ID NO: 37185 - protein, 42 aa, Homo sapiens
  MAP TO AC007377.3; EXPRESSED IN LUNG, SIGNAL = 0.68; EXPRESSED IN BRAIN, SIGNAL = 0.8; EXPRESSED IN HEART, SIGNAL = 0.86; EXPRESSED IN FETAL LIVER, SIGNAL = 0.57; EXPRESSED IN HELA, SIGNAL = 0.92; EXPRESSED IN PLACENTA, SIGNAL = 0.69; EST_HUMAN HIT: BE936105.1, EVALUE 5.00e-05; SWISSPROT HIT: Q01728, EVALUE 2.00e-18
YDDKQPLTSKEEEERRIAEMGRPILGEHTKLEVIIEESYEFK

SEQ ID NO: 37186 - protein, 126 aa, Homo sapiens
  MAP TO AL096814.11; EXPRESSED IN HEART, SIGNAL = 3.3; EXPRESSED IN ADULT LIVER, SIGNAL = 1.8; EXPRESSED IN BRAIN, SIGNAL = 2.7; EXPRESSED IN BONE MARROW, SIGNAL = 2.7; EXPRESSED IN PLACENTA, SIGNAL = 2.7; EXPRESSED IN HELA, SIGNAL = 3.3; EXPRESSED IN HBL100, SIGNAL = 2.6; EXPRESSED IN BT474, SIGNAL = 2.7; EXPRESSED IN FETAL LIVER, SIGNAL =   3; EXPRESSED IN LUNG, SIGNAL = 3.3; EST_HUMAN HIT: BE893092.1, EVALUE 3.30e+00; SWISSPROT HIT: P13368, EVALUE 6.00e-01
DPHQYTPEQAHTVQLIPLGSMSQYYYQEPQQPYSHPLYQQSHLSQHQQREDSQLKTYSSDRQAQAMLSSHGDLGPPDTGMGDPASSDLTRVSSTLPHRPLLSPSGIHLNNMGPQHQQLSPSAMWPQ

SEQ ID NO: 37187 - protein, 132 aa, Homo sapiens
  MAP TO AL096814.11; EXPRESSED IN HEART, SIGNAL = 3.3; EXPRESSED IN ADULT LIVER, SIGNAL = 1.8; EXPRESSED IN BRAIN, SIGNAL = 2.7; EXPRESSED IN BONE MARROW, SIGNAL = 2.7; EXPRESSED IN PLACENTA, SIGNAL = 2.7; EXPRESSED IN HELA, SIGNAL = 3.3; EXPRESSED IN HBL100, SIGNAL = 2.6; EXPRESSED IN BT474, SIGNAL = 2.7; EXPRESSED IN FETAL LIVER, SIGNAL =   3; EXPRESSED IN LUNG, SIGNAL = 3.3; EST_HUMAN HIT: AW833678.1, EVALUE 4.00e-03
PTAATAASRATAYLHARNTDAAATNSPITATAAATAAAAAAATAAAAAGFNADTSVLSAPTHDAALARAAAATDAPAASFLSQGPSPVYPRAGTHCPADSPGLHVPVLLPGAPAALQPPPLPAEPPVPAPAA

SEQ ID NO: 37188 - protein, 20 aa, Homo sapiens
  MAP TO AC009298.1; EXPRESSED IN BT474, SIGNAL = 0.8; EXPRESSED IN BONE MARROW, SIGNAL = 1.2; EXPRESSED IN FETAL LIVER, SIGNAL = 1.5; EXPRESSED IN HELA, SIGNAL = 0.64; EXPRESSED IN ADULT LIVER, SIGNAL =   1; EXPRESSED IN PLACENTA, SIGNAL = 1.1; EXPRESSED IN HEART, SIGNAL = 0.86; EXPRESSED IN BRAIN, SIGNAL = 0.76; EXPRESSED IN LUNG, SIGNAL = 0.87; EXPRESSED IN HBL100, SIGNAL =   1
AWNPPPPGSTELTSSRPSRF

SEQ ID NO: 37189 - protein, 42 aa, Homo sapiens
  MAP TO AC004916.2; EXPRESSED IN BONE MARROW, SIGNAL = 0.81; EXPRESSED IN FETAL LIVER, SIGNAL = 0.62; EXPRESSED IN BRAIN, SIGNAL = 0.97; EXPRESSED IN ADULT LIVER, SIGNAL =   1; EXPRESSED IN PLACENTA, SIGNAL = 0.79; EXPRESSED IN BT474, SIGNAL = 0.75; EXPRESSED IN HEART, SIGNAL = 0.78; EXPRESSED IN HELA, SIGNAL = 0.98; EXPRESSED IN LUNG, SIGNAL = 0.86; EXPRESSED IN HBL100, SIGNAL = 0.93; EST_HUMAN HIT: AW007350.1, EVALUE 4.00e-08; SWISSPROT HIT: P31285, EVALUE 6.00e-19
MPSVAEGIKIGIQECQHQFRGRRWNCTTVHDSLAIFGPVLDK

SEQ ID NO: 37190 - protein, 45 aa, Homo sapiens
  MAP TO AC004916.2; EXPRESSED IN BONE MARROW, SIGNAL = 0.81; EXPRESSED IN FETAL LIVER, SIGNAL = 0.62; EXPRESSED IN BRAIN, SIGNAL = 0.97; EXPRESSED IN ADULT LIVER, SIGNAL =   1; EXPRESSED IN PLACENTA, SIGNAL = 0.79; EXPRESSED IN BT474, SIGNAL = 0.75; EXPRESSED IN HEART, SIGNAL = 0.78; EXPRESSED IN HELA, SIGNAL = 0.98; EXPRESSED IN LUNG, SIGNAL = 0.86; EXPRESSED IN HBL100, SIGNAL = 0.93; SWISSPROT HIT: P11369, EVALUE 3.50e+00; EST_HUMAN HIT: BF309720.1, EVALUE 6.00e-07
TPIPLSSTGPKMARLSWTVVQFHRRPRNWCWHSWMPILMPSATLG

SEQ ID NO: 37191 - protein, 121 aa, Homo sapiens
  MAP TO AE000658.1; EXPRESSED IN FETAL LIVER, SIGNAL = 8.5; EXPRESSED IN BT474, SIGNAL = 7.1; EXPRESSED IN ADULT LIVER, SIGNAL = 8.3; EXPRESSED IN BRAIN, SIGNAL = 6.3; EXPRESSED IN BONE MARROW, SIGNAL = 7.8; EXPRESSED IN LUNG, SIGNAL =  11; EXPRESSED IN PLACENTA, SIGNAL = 8.3; EXPRESSED IN HELA, SIGNAL =  11; EXPRESSED IN HEART, SIGNAL = 5.6; EXPRESSED IN HBL100, SIGNAL =  15; SWISSPROT HIT: Q09028, EVALUE 4.00e-63; EST_HUMAN HIT: AU135119.1, EVALUE 4.00e-62
PSGECNPDLRLCGHQKEGYGLSWNPNLSGHLLSASDDHTVCLWDISAIPKEGKVDARTIFTGHTAVVEDVFWNLLHESLFRLVADDQKLMIWDTRSKNTSKPSHSVDAYTAEVNCLSFNPY

SEQ ID NO: 37192 - protein, 76 aa, Homo sapiens
  MAP TO AE000658.1; EXPRESSED IN FETAL LIVER, SIGNAL = 8.5; EXPRESSED IN BT474, SIGNAL = 7.1; EXPRESSED IN ADULT LIVER, SIGNAL = 8.3; EXPRESSED IN BRAIN, SIGNAL = 6.3; EXPRESSED IN BONE MARROW, SIGNAL = 7.8; EXPRESSED IN LUNG, SIGNAL =  11; EXPRESSED IN PLACENTA, SIGNAL = 8.3; EXPRESSED IN HELA, SIGNAL =  11; EXPRESSED IN HEART, SIGNAL = 5.6; EXPRESSED IN HBL100, SIGNAL =  15; EST_HUMAN HIT: AU135664.1, EVALUE 3.00e-23; SWISSPROT HIT: P25569, EVALUE 6.00e+00
LTIQNILLNQILLESATQTCVSVDIRRKAMGFHGTQISVGIYLVLQMTTLSACGTSVPFQRREKWMQGPSLRGIQQ

SEQ ID NO: 37193 - protein, 63 aa, Homo sapiens
  MAP TO AL049548.6; EXPRESSED IN BT474, SIGNAL =   1; EXPRESSED IN BONE MARROW, SIGNAL = 1.1; EXPRESSED IN FETAL LIVER, SIGNAL = 0.73; EXPRESSED IN HELA, SIGNAL = 0.66; EXPRESSED IN ADULT LIVER, SIGNAL = 0.89; EXPRESSED IN PLACENTA, SIGNAL =   1; EXPRESSED IN HEART, SIGNAL = 1.1; EXPRESSED IN BRAIN, SIGNAL = 0.88; EXPRESSED IN LUNG, SIGNAL = 0.93; EST_HUMAN HIT: BE814814.1, EVALUE 5.90e+00; SWISSPROT HIT: P13395, EVALUE 1.90e+00
DLCQALESLSSAITAFSASARKVVNRDSCVQEAAALQQQYEDILRRAKERQTALENLLAHWQR

SEQ ID NO: 37194 - protein, 74 aa, Homo sapiens
  MAP TO AP000199.1; EXPRESSED IN BONE MARROW, SIGNAL = 0.95; EXPRESSED IN FETAL LIVER, SIGNAL = 0.8; EXPRESSED IN BRAIN, SIGNAL = 1.3; EXPRESSED IN ADULT LIVER, SIGNAL = 1.1; EXPRESSED IN PLACENTA, SIGNAL = 0.98; EXPRESSED IN BT474, SIGNAL = 0.73; EXPRESSED IN HEART, SIGNAL = 1.2; EXPRESSED IN HELA, SIGNAL = 0.99; EXPRESSED IN LUNG, SIGNAL = 1.3; EXPRESSED IN HBL100, SIGNAL = 0.81; EST_HUMAN HIT: AA977136.1, EVALUE 3.00e-22; SWISSPROT HIT: Q60934, EVALUE 5.00e-38
RADLAVAPLTITYVREKVIDFSKPFMTLGISILYRKPNGTNPGVFSFLNPLSPDIWMYVLLACLGVSCVLFVIA

SEQ ID NO: 37195 - protein, 70 aa, Homo sapiens
  MAP TO AE000661.1; EXPRESSED IN PLACENTA, SIGNAL = 3.9; EXPRESSED IN HBL100, SIGNAL = 4.4; EXPRESSED IN HELA, SIGNAL = 4.8; EXPRESSED IN HEART, SIGNAL = 3.8; EXPRESSED IN BT474, SIGNAL = 4.8; EXPRESSED IN FETAL LIVER, SIGNAL = 4.6; EXPRESSED IN ADULT LIVER, SIGNAL = 5.4; EXPRESSED IN BRAIN, SIGNAL = 3.9; EXPRESSED IN BONE MARROW, SIGNAL = 4.8; EXPRESSED IN LUNG, SIGNAL = 5.2; EST_HUMAN HIT: C16020.1, EVALUE 2.10e+00; SWISSPROT HIT: P33666, EVALUE 1.60e+00
LRFLCDTRNQHFHSNTANFKPLFDRRKHFLPNEGDEAGNPESICHTGLLYSSSELHCLIISYTWHLQIQK

SEQ ID NO: 37196 - protein, 29 aa, Homo sapiens
  MAP TO AC008012.8; EXPRESSED IN HEART, SIGNAL = 1.4; EST_HUMAN HIT: AW838960.1, EVALUE 6.00e+00
FGSFCCMRPQRSPGWWLSTWLHLRITCGA

SEQ ID NO: 37197 - protein, 23 aa, Homo sapiens
  MAP TO AP000128.1; EXPRESSED IN PLACENTA, SIGNAL = 0.62; EXPRESSED IN BT474, SIGNAL = 0.65; EXPRESSED IN BONE MARROW, SIGNAL = 0.68; EXPRESSED IN FETAL LIVER, SIGNAL = 0.57; EXPRESSED IN ADULT LIVER, SIGNAL = 0.73; EXPRESSED IN LUNG, SIGNAL = 0.6; EXPRESSED IN HEART, SIGNAL = 0.78; EST_HUMAN HIT: AI078203.1, EVALUE 3.30e-02; SWISSPROT HIT: P41163, EVALUE 4.90e+00
RCPWSCVCITPTSASISTRPSPG

SEQ ID NO: 37198 - protein, 21 aa, Homo sapiens
  MAP TO AF001548.1; EXPRESSED IN LUNG, SIGNAL = 1.4; EXPRESSED IN HEART, SIGNAL = 1.3
ANSSASTSTSRVTSWEPTLRP

SEQ ID NO: 37199 - protein, 70 aa, Homo sapiens
  MAP TO AF001548.1; EXPRESSED IN LUNG, SIGNAL = 1.4; EXPRESSED IN HEART, SIGNAL = 1.3; EST_HUMAN HIT: AL135029.1, EVALUE 6.00e-04; SWISSPROT HIT: P35580, EVALUE 1.00e-04
RINFDVTGYIVGANIETCILSLSLGQMGTPAPYQSPAQRLGESKSHLYLSSLLGFFQNKSPLNSRHCGAV

SEQ ID NO: 37200 - protein, 39 aa, Homo sapiens
  MAP TO AC007014.1; EXPRESSED IN FETAL LIVER, SIGNAL = 1.5; EXPRESSED IN ADULT LIVER, SIGNAL = 1.8; EXPRESSED IN BRAIN, SIGNAL = 1.1; EXPRESSED IN BONE MARROW, SIGNAL = 1.3; EXPRESSED IN LUNG, SIGNAL = 1.6; EXPRESSED IN HBL100, SIGNAL = 1.4; EXPRESSED IN HEART, SIGNAL = 1.5; EXPRESSED IN BT474, SIGNAL = 1.3; EXPRESSED IN PLACENTA, SIGNAL = 1.5; EXPRESSED IN HELA, SIGNAL = 1.5
PGVEQELLAKVAYTLQFATPLATLYCPHLGPESFMDVHR

SEQ ID NO: 37201 - protein, 137 aa, Homo sapiens
  MAP TO AC007221.1; EXPRESSED IN BT474, SIGNAL = 1.7; EXPRESSED IN FETAL LIVER, SIGNAL = 1.8; EXPRESSED IN ADULT LIVER, SIGNAL = 1.9; EXPRESSED IN BRAIN, SIGNAL = 1.3; EXPRESSED IN BONE MARROW, SIGNAL = 1.4; EXPRESSED IN LUNG, SIGNAL = 1.7; EXPRESSED IN HBL100, SIGNAL = 1.5; EXPRESSED IN PLACENTA, SIGNAL = 1.6; EXPRESSED IN HELA, SIGNAL = 1.9; EXPRESSED IN HEART, SIGNAL = 1.6; SWISSPROT HIT: P40889, EVALUE 1.20e-01
WKSKAITELSMLINARKDMLINASMGMLVNVGMGMLINDSMGMLIKANISMLINASMGMLINASMGVLINASISLPINASTDVLTNTSMGVLINASINLLMNASMSMLNNANMGMPVNASIGVLINKQREHMLKSRA

SEQ ID NO: 37202 - protein, 43 aa, Homo sapiens
  MAP TO AL035530.11; EXPRESSED IN HEART, SIGNAL = 0.86; EXPRESSED IN ADULT LIVER, SIGNAL =   1; EXPRESSED IN HBL100, SIGNAL = 1.7; EXPRESSED IN HELA, SIGNAL = 1.5; EXPRESSED IN BT474, SIGNAL = 0.95; SWISSPROT HIT: P33485, EVALUE 3.60e+00; EST_HUMAN HIT: AI765888.1, EVALUE 3.00e-18
SGVQAVTCDREERQDGDKDQDLTISLGNSLVFMLASDPCVAEF

SEQ ID NO: 37203 - protein, 48 aa, Homo sapiens
  MAP TO AC007228.1; EXPRESSED IN HEART, SIGNAL = 1.1; EXPRESSED IN BT474, SIGNAL = 1.4; EXPRESSED IN ADULT LIVER, SIGNAL = 1.6; EXPRESSED IN LUNG, SIGNAL = 1.4; EXPRESSED IN BRAIN, SIGNAL = 1.2; EXPRESSED IN BONE MARROW, SIGNAL =   1; EXPRESSED IN PLACENTA, SIGNAL = 1.1; EXPRESSED IN HELA, SIGNAL = 1.2; EXPRESSED IN HBL100, SIGNAL = 1.1; EXPRESSED IN FETAL LIVER, SIGNAL = 1.3; SWISSPROT HIT: P44530, EVALUE 7.90e+00; EST_HUMAN HIT: BE965107.2, EVALUE 8.80e+00
HTQETITMIKIKDISIIPKRFLILLYYPSLPFLNPHPQGSPGLLYVTV

SEQ ID NO: 37204 - protein, 30 aa, Homo sapiens
  MAP TO AC007034.2; EXPRESSED IN BONE MARROW, SIGNAL = 1.4; EXPRESSED IN HEART, SIGNAL = 1.9; EXPRESSED IN BT474, SIGNAL = 1.4; EXPRESSED IN BRAIN, SIGNAL = 1.3; EXPRESSED IN LUNG, SIGNAL =   2; EXPRESSED IN PLACENTA, SIGNAL = 1.5; EXPRESSED IN HELA, SIGNAL = 1.6; EXPRESSED IN HBL100, SIGNAL = 1.5; EXPRESSED IN ADULT LIVER, SIGNAL =   2; EXPRESSED IN FETAL LIVER, SIGNAL = 1.9; EST_HUMAN HIT: BE891896.1, EVALUE 7.80e+00
TQLESQSPLKPGPQLRWQPEFQAHERPAQQ

SEQ ID NO: 37205 - protein, 83 aa, Homo sapiens; identical to SEQ ID NO: 33615
  MAP TO AP000114.1; EXPRESSED IN FETAL LIVER, SIGNAL = 0.98; EXPRESSED IN ADULT LIVER, SIGNAL = 0.7; EXPRESSED IN BONE MARROW, SIGNAL = 1.3; EXPRESSED IN HBL100, SIGNAL = 1.9; EXPRESSED IN HEART, SIGNAL = 0.81; EXPRESSED IN PLACENTA, SIGNAL = 0.64; EXPRESSED IN BT474, SIGNAL = 0.87; EXPRESSED IN LUNG, SIGNAL = 0.64; EXPRESSED IN HELA, SIGNAL =   1; EST_HUMAN HIT: AU131027.1, EVALUE 1.00e-42; SWISSPROT HIT: P22102, EVALUE 1.00e-43

SEQ ID NO: 37206 - protein, 18 aa, Homo sapiens
  MAP TO AL049835.3; EXPRESSED IN HEART, SIGNAL = 0.8; EXPRESSED IN PLACENTA, SIGNAL = 1.1
KFDERHECTQEVQQSQAG

SEQ ID NO: 37207 - protein, 24 aa, Homo sapiens
  MAP TO AE000659.1; EXPRESSED IN BT474, SIGNAL =   9; EXPRESSED IN FETAL LIVER, SIGNAL = 9.7; EXPRESSED IN BRAIN, SIGNAL = 4.8; EXPRESSED IN LUNG, SIGNAL =  20; EXPRESSED IN HBL100, SIGNAL =  18; EXPRESSED IN HEART, SIGNAL = 7.7; EXPRESSED IN ADULT LIVER, SIGNAL = 1.1; EXPRESSED IN BONE MARROW, SIGNAL = 5.1; EXPRESSED IN PLACENTA, SIGNAL = 5.1; EXPRESSED IN HELA, SIGNAL = 7.4
DVSEGLDDTIILITDDAAPLRRIR

SEQ ID NO: 37208 - protein, 28 aa, Homo sapiens
  MAP TO AL035563.18; EXPRESSED IN LUNG, SIGNAL = 0.73; EXPRESSED IN PLACENTA, SIGNAL = 0.65; EXPRESSED IN FETAL LIVER, SIGNAL = 0.6; EXPRESSED IN HELA, SIGNAL = 1.4; EXPRESSED IN BRAIN, SIGNAL = 0.78; EXPRESSED IN HEART, SIGNAL = 0.85; EST_HUMAN HIT: AI872941.1, EVALUE 8.10e-01
LLVRASGSTSWQKTKKELEYHMAREEEM

SEQ ID NO: 37209 - protein, 28 aa, Homo sapiens
  MAP TO AL035563.18; EXPRESSED IN LUNG, SIGNAL = 0.73; EXPRESSED IN PLACENTA, SIGNAL = 0.65; EXPRESSED IN FETAL LIVER, SIGNAL = 0.6; EXPRESSED IN HELA, SIGNAL = 1.4; EXPRESSED IN BRAIN, SIGNAL = 0.78; EXPRESSED IN HEART, SIGNAL = 0.85; EST_HUMAN HIT: AW103922.1, EVALUE 2.80e-01
ASGESLREHIMAEDEEGAGISHGKRGRN

SEQ ID NO: 37210 - protein, 46 aa, Homo sapiens
  MAP TO AC007066.4; EXPRESSED IN ADULT LIVER, SIGNAL = 7.7; EXPRESSED IN FETAL LIVER, SIGNAL = 7.5; EXPRESSED IN BRAIN, SIGNAL = 4.7; EXPRESSED IN BONE MARROW, SIGNAL =   5; EXPRESSED IN HBL100, SIGNAL = 4.8; EXPRESSED IN BT474, SIGNAL = 4.9; EXPRESSED IN LUNG, SIGNAL = 6.4; EXPRESSED IN PLACENTA, SIGNAL =   6; EXPRESSED IN HEART, SIGNAL = 4.9; EXPRESSED IN HELA, SIGNAL = 5.4; EST_HUMAN HIT: AA054005.1, EVALUE 4.60e+00
CPSSPYCLLHLFQHLPHLPTAHKGYQRKASPLQQPEWGDWGSAGLS

SEQ ID NO: 37211 - protein, 231 aa, Homo sapiens
  MAP TO AC006115.1; EXPRESSED IN LUNG, SIGNAL =   2; EXPRESSED IN HELA, SIGNAL = 1.6; EXPRESSED IN PLACENTA, SIGNAL =  12; EXPRESSED IN HBL100, SIGNAL = 1.4; EXPRESSED IN HEART, SIGNAL = 1.9; EXPRESSED IN ADULT LIVER, SIGNAL = 1.4; EXPRESSED IN BT474, SIGNAL = 1.3; EXPRESSED IN BONE MARROW, SIGNAL = 1.3; EXPRESSED IN BRAIN, SIGNAL =   6; EXPRESSED IN FETAL LIVER, SIGNAL = 4.9; EST_HUMAN HIT: AV753316.1, EVALUE 3.00e-46; SWISSPROT HIT: P51522, EVALUE 2.00e-04
ELHLEEEEEDEAAAAAAAAAQEVEANVHVPQVVLRIQGLNVEAAEPEVEAAEPEVEAAEPEVEAAEPNGEAEGPDGEAAEPIGEAGQPNGEAEQPNGDADEPDGAGIEDPEERAEEPEGKAEEPEGDADEPDGVGIEDPEEGEDQEIQVEEPYYDCHECTETFTSSTAFSEHLKTHASMIIFEPANAFGECSGYIERASTSTGGANQADEKYFKCDVCGQLFNDRLSLARH

SEQ ID NO: 37212 - protein, 185 aa, Homo sapiens
  MAP TO AL035702.7; EXPRESSED IN HBL100, SIGNAL = 0.8; EXPRESSED IN FETAL LIVER, SIGNAL = 0.66; EXPRESSED IN LUNG, SIGNAL = 0.85; EXPRESSED IN HELA, SIGNAL = 0.59; EXPRESSED IN BRAIN, SIGNAL = 1.1; EXPRESSED IN PLACENTA, SIGNAL = 1.3; EXPRESSED IN HEART, SIGNAL = 1.3; EST_HUMAN HIT: AI609604.1, EVALUE 2.00e-36; SWISSPROT HIT: P50904, EVALUE 3.00e-04
DNCRRAENVLRLWIIEAKDLAPKKKYFCELCLDDTLFARTTSKTKADNIFWGEHFEFFSLPPLHSITVHIYKDVEKKKKKDKNNYVGLVNIPTASVTGRQFVEKWYPVSTPTPNKGKTGGPSIRIKSRFQTITILPMEQYKEFAEFVTSNYTMLCSVLEPVISVRNKEELACALVHILQSTGRAK

SEQ ID NO: 37213 - protein, 59 aa, Homo sapiens
  MAP TO AC007272.2; EXPRESSED IN BT474, SIGNAL = 7.7; EXPRESSED IN ADULT LIVER, SIGNAL = 7.8; EXPRESSED IN BRAIN, SIGNAL = 5.9; EXPRESSED IN LUNG, SIGNAL =  10; EXPRESSED IN BONE MARROW, SIGNAL = 7.5; EXPRESSED IN PLACENTA, SIGNAL = 7.1; EXPRESSED IN HEART, SIGNAL = 6.1; EXPRESSED IN HELA, SIGNAL = 9.4; EXPRESSED IN HBL100, SIGNAL = 7.1; EXPRESSED IN FETAL LIVER, SIGNAL = 6.8; EST_HUMAN HIT: BE621247.1, EVALUE 3.00e-03
SQTECSSRSTRAWAHWMPWRRAAAARNNTSTTGIRRRSRRMSWAPSRTKGPFRSSCPTS

SEQ ID NO: 37214 - protein, 269 aa, Homo sapiens
  MAP TO AL021579.1; EXPRESSED IN PLACENTA, SIGNAL = 4.3; EXPRESSED IN HBL100, SIGNAL = 3.7; EXPRESSED IN HEART, SIGNAL = 1.6; EXPRESSED IN FETAL LIVER, SIGNAL = 2.9; EXPRESSED IN ADULT LIVER, SIGNAL = 2.1; EXPRESSED IN BT474, SIGNAL = 4.3; EXPRESSED IN BRAIN, SIGNAL = 1.9; EXPRESSED IN BONE MARROW, SIGNAL =   3; EXPRESSED IN LUNG, SIGNAL = 3.1; EXPRESSED IN HELA, SIGNAL = 5.9; SWISSPROT HIT: P48634, EVALUE 1.00e-06; EST_HUMAN HIT: AW994568.1, EVALUE 4.00e-57
SEAALDQEQITAAYSVEHNQLEAHPKADFIRESSEAQVQKFLSRSVEDVRPHHTDANNQSACFEAPDQKTLSAPQEERISAVESQPSRKRSVSHGSNHTQKPDEQRSEPSAGIPKVTSRCIDSKEPIERPEEKPKKEGFIRSSEGPKPEKVYKSKSETRWGPRPSSNRREEVNDRPVRRSGPIKKPVLRDMKEEREQRKEKEGEKAEKVTEKVVVKPEKTEKKDLPPPPPPPQPPAPIQPQSVPPPIQPEAEKFPSTETATLAQKPSQD

SEQ ID NO: 37215 - protein, 28 aa, Homo sapiens
  MAP TO AC008165.2; EXPRESSED IN ADULT LIVER, SIGNAL = 0.72; EXPRESSED IN PLACENTA, SIGNAL = 0.67; EXPRESSED IN HEART, SIGNAL = 0.97
MLCPSASWVMKMTGLGSKPRRIGPGEAK

SEQ ID NO: 37216 - protein, 38 aa, Homo sapiens
  MAP TO AC007735.2; EXPRESSED IN HELA, SIGNAL = 0.59; EXPRESSED IN PLACENTA, SIGNAL = 0.69; EXPRESSED IN HEART, SIGNAL = 0.81
TERSYEALTILTPLRKTAHLSSKLLIVIGQCCCQDRIT

SEQ ID NO: 37217 - protein, 64 aa, Homo sapiens
  MAP TO AF001549.1; EXPRESSED IN HBL100, SIGNAL = 6.1; EXPRESSED IN PLACENTA, SIGNAL = 2.2; EXPRESSED IN HELA, SIGNAL = 2.9; EXPRESSED IN HEART, SIGNAL = 2.2; EXPRESSED IN BRAIN, SIGNAL = 2.1; EXPRESSED IN LUNG, SIGNAL = 7.3; EXPRESSED IN BT474, SIGNAL = 2.8; EXPRESSED IN ADULT LIVER, SIGNAL = 2.2; EXPRESSED IN FETAL LIVER, SIGNAL = 2.6; EXPRESSED IN BONE MARROW, SIGNAL = 3.1; EST_HUMAN HIT: BE084834.1, EVALUE 8.00e-12
TILHLPPPMDPLPLCLPVLLMLQWITQHPSLGPMPLKMDLPPGDPGVLPLSCPQECPDPHSYPG

SEQ ID NO: 37218 - protein, 71 aa, Homo sapiens
  MAP TO AC007220.1; EXPRESSED IN PLACENTA, SIGNAL = 4.5; EXPRESSED IN HELA, SIGNAL = 6.6; EXPRESSED IN HEART, SIGNAL = 2.2; EXPRESSED IN ADULT LIVER, SIGNAL = 1.8; EXPRESSED IN FETAL LIVER, SIGNAL = 4.5; EXPRESSED IN BRAIN, SIGNAL = 2.3; EXPRESSED IN BONE MARROW, SIGNAL =   3; EXPRESSED IN HBL100, SIGNAL =  16; EXPRESSED IN BT474, SIGNAL = 7.4; EXPRESSED IN LUNG, SIGNAL = 8.5; EST_HUMAN HIT: BF303773.1, EVALUE 4.00e-19; SWISSPROT HIT: P07910, EVALUE 4.00e-20
QELTQIKQKVDSLLEDPEKMEKKQSKQAVEMKNGKSEEKQSSSSRETHVKIESEGGADDSAEERDLLDDED

SEQ ID NO: 37219 - protein, 58 aa, Homo sapiens
  MAP TO AL034373.13; EXPRESSED IN PLACENTA, SIGNAL = 0.79; EXPRESSED IN HBL100, SIGNAL = 0.94; EXPRESSED IN ADULT LIVER, SIGNAL = 0.71; EXPRESSED IN BRAIN, SIGNAL = 0.96; EXPRESSED IN HEART, SIGNAL =   1; EXPRESSED IN HELA, SIGNAL = 0.8; EXPRESSED IN BT474, SIGNAL = 0.69; EXPRESSED IN FETAL LIVER, SIGNAL = 0.7; EXPRESSED IN LUNG, SIGNAL = 0.88; SWISSPROT HIT: O66455, EVALUE 1.20e+00
NAVRSSIMHIPEKFIILKLSFQLDSSMFRYFGVSLQSKIHLSKLDFKDIHKLASTAFH

SEQ ID NO: 37220 - protein, 60 aa, Homo sapiens
  MAP TO AC007222.1; EXPRESSED IN HELA, SIGNAL = 1.9; EXPRESSED IN ADULT LIVER, SIGNAL = 1.6; EXPRESSED IN BRAIN, SIGNAL = 2.2; EXPRESSED IN LUNG, SIGNAL = 1.7; EXPRESSED IN BONE MARROW, SIGNAL = 2.2; EXPRESSED IN PLACENTA, SIGNAL = 1.7; EXPRESSED IN HEART, SIGNAL = 2.1; EXPRESSED IN HBL100, SIGNAL =   2; EXPRESSED IN BT474, SIGNAL = 1.9; EXPRESSED IN FETAL LIVER, SIGNAL = 1.9
TVTTTSTTTITFITTTTTVTIHNHHHHHFHIITIIATVTTTVTTTITTTITTITSSIKSR

SEQ ID NO: 37221 - protein, 60 aa, Homo sapiens
  MAP TO AC007222.1; EXPRESSED IN HELA, SIGNAL = 1.9; EXPRESSED IN ADULT LIVER, SIGNAL = 1.6; EXPRESSED IN BRAIN, SIGNAL = 2.2; EXPRESSED IN LUNG, SIGNAL = 1.7; EXPRESSED IN BONE MARROW, SIGNAL = 2.2; EXPRESSED IN PLACENTA, SIGNAL = 1.7; EXPRESSED IN HEART, SIGNAL = 2.1; EXPRESSED IN HBL100, SIGNAL =   2; EXPRESSED IN BT474, SIGNAL = 1.9; EXPRESSED IN FETAL LIVER, SIGNAL = 1.9
TIITTTSPSAPSLPPALPPSPSSPLLPPSPFTITTTTIFTSSPSSLPSPPQSPPLSPPPS

SEQ ID NO: 37222 - protein, 125 aa, Homo sapiens
  MAP TO AL022334.1; EXPRESSED IN BT474, SIGNAL = 1.9; EXPRESSED IN BRAIN, SIGNAL = 2.1; EXPRESSED IN LUNG, SIGNAL = 1.7; EXPRESSED IN HBL100, SIGNAL = 2.3; EXPRESSED IN HELA, SIGNAL = 2.7; EXPRESSED IN PLACENTA, SIGNAL = 2.2; EXPRESSED IN ADULT LIVER, SIGNAL = 2.4; EXPRESSED IN FETAL LIVER, SIGNAL = 2.2; EXPRESSED IN BONE MARROW, SIGNAL = 2.7; EXPRESSED IN HEART, SIGNAL = 2.3
DDSDGGDDDDSDDGDDDSDDCDDGDDDDGDDGDDDHSDDGDGDDDDGDDGDDDESDDGDDGDDDGDDDGDDYGDEGNGDDEDDGDSDGNDGDDDIRKRDAVQALRRQQGIIKKDQRIVVQTPRYL

SEQ ID NO: 37223 - protein, 213 aa, Homo sapiens
  MAP TO AC006547.9; EXPRESSED IN PLACENTA, SIGNAL = 5.3; EXPRESSED IN HEART, SIGNAL = 2.7; EXPRESSED IN BT474, SIGNAL = 3.1; EXPRESSED IN LUNG, SIGNAL = 2.7; EXPRESSED IN BRAIN, SIGNAL = 2.7; EXPRESSED IN HELA, SIGNAL = 4.7; EXPRESSED IN HBL100, SIGNAL = 3.8; EXPRESSED IN ADULT LIVER, SIGNAL = 3.1; EXPRESSED IN FETAL LIVER, SIGNAL = 3.6; EXPRESSED IN BONE MARROW, SIGNAL = 3.3; EST_HUMAN HIT: AW964989.1, EVALUE 7.00e-82; SWISSPROT HIT: P51974, EVALUE 1.50e-01
EAVMESRARPFQALPREQSPPPPLQTSSGAEVMDVGSGGDGQSELPAEDPFNFYGASLLSKGSFSKGRLLIDPNCSGHSPRTARHAPAVRKFSPDLKLLKDVKISVSFTESCRSKDRKVLYTGAERDVRAECGLLLSPVSGDVHACPFGGSVGDGVGIGGESADKKDEENELDQEKRVEYAVLDELEDFTDNLELDEEGAGGFTAKAIVQRDR

SEQ ID NO: 37224 - protein, 40 aa, Homo sapiens
  MAP TO AL049838.2; EXPRESSED IN FETAL LIVER, SIGNAL = 0.89; EXPRESSED IN ADULT LIVER, SIGNAL = 0.75; EXPRESSED IN BRAIN, SIGNAL = 0.83; EXPRESSED IN HEART, SIGNAL = 0.94; EXPRESSED IN PLACENTA, SIGNAL = 0.75; EXPRESSED IN HELA, SIGNAL = 0.95; EXPRESSED IN LUNG, SIGNAL = 1.1; EXPRESSED IN HBL100, SIGNAL = 0.98; EXPRESSED IN BONE MARROW, SIGNAL = 1.7; EXPRESSED IN BT474, SIGNAL = 0.6; EST_HUMAN HIT: AV691379.1, EVALUE 8.00e-10
AIQNIHDSWEEDKLSLTGVWRKLILTLMDDVEGFKTSLEE

SEQ ID NO: 37225 - protein, 78 aa, Homo sapiens
  MAP TO AL080317.11; EXPRESSED IN ADULT LIVER, SIGNAL =   1; EXPRESSED IN HBL100, SIGNAL =   2; EXPRESSED IN HEART, SIGNAL = 0.85; SWISSPROT HIT: O60673, EVALUE 3.00e-42; EST_HUMAN HIT: BF028969.1, EVALUE 2.00e-29
DSSPDEALVHLLAGLESDGYRGERNRMPSPCRSFGNNKYPQNSDDEENEPQIEKEEMELSLVMSQRWDSNIEEHCAKK

SEQ ID NO: 37226 - protein, 58 aa, Homo sapiens
  MAP TO AP000101.1; EXPRESSED IN BT474, SIGNAL = 0.85; EXPRESSED IN HBL100, SIGNAL =   1; EXPRESSED IN BRAIN, SIGNAL = 1.3; EXPRESSED IN HEART, SIGNAL = 1.3; EXPRESSED IN ADULT LIVER, SIGNAL =   1; EXPRESSED IN PLACENTA, SIGNAL = 1.2; EXPRESSED IN BONE MARROW, SIGNAL = 1.1; EXPRESSED IN FETAL LIVER, SIGNAL = 1.6; EXPRESSED IN LUNG, SIGNAL = 1.2; EXPRESSED IN HELA, SIGNAL =   1; EST_HUMAN HIT: H28949.1, EVALUE 2.10e-02; SWISSPROT HIT: P28968, EVALUE 8.80e-01
SHTTNRCPTCTSCWRCTNARSSPPTTGWAPSADTLVAVPVASCTESSGHKTSTTHCHS

SEQ ID NO: 37227 - protein, 26 aa, Homo sapiens
  MAP TO AP000101.1; EXPRESSED IN BT474, SIGNAL = 0.85; EXPRESSED IN HBL100, SIGNAL =   1; EXPRESSED IN BRAIN, SIGNAL = 1.3; EXPRESSED IN HEART, SIGNAL = 1.3; EXPRESSED IN ADULT LIVER, SIGNAL =   1; EXPRESSED IN PLACENTA, SIGNAL = 1.2; EXPRESSED IN BONE MARROW, SIGNAL = 1.1; EXPRESSED IN FETAL LIVER, SIGNAL = 1.6; EXPRESSED IN LUNG, SIGNAL = 1.2; EXPRESSED IN HELA, SIGNAL =   1
LALHAGDAQMRAHPRPLQVGLPPLTP

SEQ ID NO: 37228 - protein, 93 aa, Homo sapiens
  MAP TO AL021877.1; EXPRESSED IN PLACENTA, SIGNAL = 1.7; EXPRESSED IN HBL100, SIGNAL = 1.5; EXPRESSED IN BT474, SIGNAL = 1.6; EXPRESSED IN ADULT LIVER, SIGNAL = 1.4; EXPRESSED IN FETAL LIVER, SIGNAL = 1.5; EXPRESSED IN BONE MARROW, SIGNAL = 1.2; EXPRESSED IN LUNG, SIGNAL = 1.6; EXPRESSED IN BRAIN, SIGNAL = 2.6; EXPRESSED IN HELA, SIGNAL = 2.1; EXPRESSED IN HEART, SIGNAL = 5.2; SWISSPROT HIT: P05499, EVALUE 4.50e+00; EST_HUMAN HIT: BF347445.1, EVALUE 9.00e-26
RAVSGKGPNSWVTASCTELALPFSMLMAPLSKLLEMVSKCPRNLSQGPAAEMWSVVPHAGVLVGVLPWAKLCLGKLICIRSLQLELLAILACQ

SEQ ID NO: 37229 - protein, 36 aa, Homo sapiens
  MAP TO AL021877.1; EXPRESSED IN PLACENTA, SIGNAL = 1.7; EXPRESSED IN HBL100, SIGNAL = 1.5; EXPRESSED IN BT474, SIGNAL = 1.6; EXPRESSED IN ADULT LIVER, SIGNAL = 1.4; EXPRESSED IN FETAL LIVER, SIGNAL = 1.5; EXPRESSED IN BONE MARROW, SIGNAL = 1.2; EXPRESSED IN LUNG, SIGNAL = 1.6; EXPRESSED IN BRAIN, SIGNAL = 2.6; EXPRESSED IN HELA, SIGNAL = 2.1; EXPRESSED IN HEART, SIGNAL = 5.2; EST_HUMAN HIT: Z98458.1, EVALUE 1.00e-09; SWISSPROT HIT: Q99798, EVALUE 8.00e-11
NGKANSVHDAVTHEFGPFPDTARYKKYGISWVVIGD

SEQ ID NO: 37230 - protein, 30 aa, Homo sapiens
  MAP TO AL021877.1; EXPRESSED IN PLACENTA, SIGNAL = 1.7; EXPRESSED IN HBL100, SIGNAL = 1.5; EXPRESSED IN BT474, SIGNAL = 1.6; EXPRESSED IN ADULT LIVER, SIGNAL = 1.4; EXPRESSED IN FETAL LIVER, SIGNAL = 1.5; EXPRESSED IN BONE MARROW, SIGNAL = 1.2; EXPRESSED IN LUNG, SIGNAL = 1.6; EXPRESSED IN BRAIN, SIGNAL = 2.6; EXPRESSED IN HELA, SIGNAL = 2.1; EXPRESSED IN HEART, SIGNAL = 5.2; EST_HUMAN HIT: BE720499.1, EVALUE 1.00e-06; SWISSPROT HIT: P20004, EVALUE 3.00e-08
KLEAPDADELPQAEFGPGQDTYQHPRMGYH

SEQ ID NO: 37231 - protein, 73 aa, Homo sapiens
  MAP TO AC007274.1; EXPRESSED IN PLACENTA, SIGNAL = 2.4; EXPRESSED IN HELA, SIGNAL = 2.3; EXPRESSED IN HBL100, SIGNAL = 2.3; EXPRESSED IN HEART, SIGNAL = 2.1; EXPRESSED IN ADULT LIVER, SIGNAL =   3; EXPRESSED IN BT474, SIGNAL = 1.7; EXPRESSED IN FETAL LIVER, SIGNAL = 2.5; EXPRESSED IN BONE MARROW, SIGNAL = 2.1; EXPRESSED IN LUNG, SIGNAL = 2.5; EXPRESSED IN BRAIN, SIGNAL =   2; EST_HUMAN HIT: AI613514.1, EVALUE 9.00e-03; SWISSPROT HIT: P38221, EVALUE 1.10e+00
TNISITPGNATFVTRVQGQAWFASCITGHDMSSLKTSSVVVLRRQSEALLPANLTCNWQDSSALATLESALSQ

SEQ ID NO: 37232 - protein, 60 aa, Homo sapiens
  MAP TO AL031684.11; EXPRESSED IN HEART, SIGNAL =   1; EXPRESSED IN ADULT LIVER, SIGNAL = 1.2; EXPRESSED IN BRAIN, SIGNAL = 0.91; EXPRESSED IN BT474, SIGNAL = 2.2; EXPRESSED IN BONE MARROW, SIGNAL = 1.1; EXPRESSED IN HBL100, SIGNAL = 0.85; EXPRESSED IN FETAL LIVER, SIGNAL = 0.9; EXPRESSED IN HELA, SIGNAL = 1.2; EXPRESSED IN PLACENTA, SIGNAL = 1.3; EXPRESSED IN LUNG, SIGNAL =   1; SWISSPROT HIT: P76262, EVALUE 4.40e+00; EST_HUMAN HIT: AA757671.1, EVALUE 2.00e-06
RKPLRLHHPLPLTLHNHEWQIAVAGKQRQEPASHSGENPVPLPHVSGALHIQRNFPSDKL

SEQ ID NO: 37233 - protein, 18 aa, Homo sapiens
  MAP TO AL031684.11; EXPRESSED IN HEART, SIGNAL =   1; EXPRESSED IN ADULT LIVER, SIGNAL = 1.2; EXPRESSED IN BRAIN, SIGNAL = 0.91; EXPRESSED IN BT474, SIGNAL = 2.2; EXPRESSED IN BONE MARROW, SIGNAL = 1.1; EXPRESSED IN HBL100, SIGNAL = 0.85; EXPRESSED IN FETAL LIVER, SIGNAL = 0.9; EXPRESSED IN HELA, SIGNAL = 1.2; EXPRESSED IN PLACENTA, SIGNAL = 1.3; EXPRESSED IN LUNG, SIGNAL =   1; EST_HUMAN HIT: AA757671.1, EVALUE 2.50e+00
ECEAGSWRCFPATAICHS

SEQ ID NO: 37234 - protein, 76 aa, Homo sapiens
  MAP TO AP000121.1; EXPRESSED IN HEART, SIGNAL = 1.1; EXPRESSED IN ADULT LIVER, SIGNAL = 0.94; EXPRESSED IN PLACENTA, SIGNAL = 0.59; EXPRESSED IN LUNG, SIGNAL = 0.74; EXPRESSED IN HELA, SIGNAL = 0.66; EXPRESSED IN FETAL LIVER, SIGNAL = 0.66; EXPRESSED IN BRAIN, SIGNAL = 0.7; EST_HUMAN HIT: AI246239.1, EVALUE 2.00e-07; SWISSPROT HIT: P15382, EVALUE 1.00e-39
SSDGKLEALYVLMVLGFFGFFTLGIMLSYIRSKKLEHSNDPFNVYIESDAWQEKDKAYVQARVLESYRSCYVVENH

SEQ ID NO: 37235 - protein, 87 aa, Homo sapiens
  MAP TO AL021917.1; EXPRESSED IN BONE MARROW, SIGNAL = 1.3; EXPRESSED IN LUNG, SIGNAL = 1.5; EXPRESSED IN HELA, SIGNAL = 0.99; EXPRESSED IN HEART, SIGNAL = 0.99; EXPRESSED IN FETAL LIVER, SIGNAL = 2.1; EXPRESSED IN ADULT LIVER, SIGNAL = 1.3; EXPRESSED IN BRAIN, SIGNAL = 1.1; EST_HUMAN HIT: BF338725.1, EVALUE 8.00e-44; SWISSPROT HIT: Q13410, EVALUE 5.00e-18
MSAETMELKWVSSSLRQVVNVYADGKEVEDRQSAPYRGRTSILRDGITAGKAALRIHNVTASDSGKYLCYFQDGDFYEKALVELKVA

SEQ ID NO: 37236 - protein, 81 aa, Homo sapiens; identical to SEQ ID NO: 33664
  MAP TO AP000087.1; EXPRESSED IN BT474, SIGNAL = 1.3; EXPRESSED IN HELA, SIGNAL = 1.1; EXPRESSED IN ADULT LIVER, SIGNAL = 0.89; EXPRESSED IN PLACENTA, SIGNAL = 1.3; EXPRESSED IN BONE MARROW, SIGNAL = 1.1; EXPRESSED IN FETAL LIVER, SIGNAL = 1.2; EXPRESSED IN LUNG, SIGNAL =   1; EXPRESSED IN HBL100, SIGNAL =   1; EXPRESSED IN BRAIN, SIGNAL = 1.1; EXPRESSED IN HEART, SIGNAL = 1.2; SWISSPROT HIT: Q06546, EVALUE 2.00e-41; EST_HUMAN HIT: AU140126.1, EVALUE 5.00e-23

SEQ ID NO: 37237 - protein, 26 aa, Homo sapiens
  MAP TO AP000087.1; EXPRESSED IN BT474, SIGNAL = 1.3; EXPRESSED IN HELA, SIGNAL = 1.1; EXPRESSED IN ADULT LIVER, SIGNAL = 0.89; EXPRESSED IN PLACENTA, SIGNAL = 1.3; EXPRESSED IN BONE MARROW, SIGNAL = 1.1; EXPRESSED IN FETAL LIVER, SIGNAL = 1.2; EXPRESSED IN LUNG, SIGNAL =   1; EXPRESSED IN HBL100, SIGNAL =   1; EXPRESSED IN BRAIN, SIGNAL = 1.1; EXPRESSED IN HEART, SIGNAL = 1.2; EST_HUMAN HIT: AU140126.1, EVALUE 1.00e-06
RTLLRLLLIQMPTMLNQKHILLKKLK

SEQ ID NO: 37238 - protein, 44 aa, Homo sapiens
  MAP TO AP000056.1; EXPRESSED IN PLACENTA, SIGNAL = 1.2; EXPRESSED IN BT474, SIGNAL = 1.1; EXPRESSED IN LUNG, SIGNAL = 1.6; EXPRESSED IN HELA, SIGNAL = 1.2; EXPRESSED IN ADULT LIVER, SIGNAL = 1.2; EXPRESSED IN BRAIN, SIGNAL = 1.4; EXPRESSED IN BONE MARROW, SIGNAL = 1.1; EXPRESSED IN HBL100, SIGNAL = 0.87; EXPRESSED IN FETAL LIVER, SIGNAL = 1.2; EXPRESSED IN HEART, SIGNAL = 1.4; EST_HUMAN HIT: AW816405.1, EVALUE 1.00e-20; SWISSPROT HIT: Q9Y696, EVALUE 9.00e-16
EFPSEMTGIWRYLNNAYARDEFTNTCPADQEIEHAYSDVAKRMK

SEQ ID NO: 37239 - protein, 95 aa, Homo sapiens
  MAP TO AC008179.1; EXPRESSED IN PLACENTA, SIGNAL = 0.91; EXPRESSED IN BT474, SIGNAL = 1.3; EXPRESSED IN BONE MARROW, SIGNAL = 0.8; EXPRESSED IN FETAL LIVER, SIGNAL = 1.4; EXPRESSED IN LUNG, SIGNAL = 0.91; EXPRESSED IN HELA, SIGNAL = 0.68; EXPRESSED IN ADULT LIVER, SIGNAL = 1.2; EXPRESSED IN HBL100, SIGNAL = 1.4; EXPRESSED IN HEART, SIGNAL =   1; EST_HUMAN HIT: BE868803.1, EVALUE 4.00e-43; SWISSPROT HIT: P46837, EVALUE 2.00e-08
FDKPDFKRSIVCLEDLQIGTVLTGKVENATLFGIFVDIGVGKSGLIPIRNVTEAKLSKTKKRRSLGLGPGERVEVQVLNIDIPRSRITLDLIRVL

SEQ ID NO: 37240 - protein, 17 aa, Homo sapiens
  MAP TO AC008179.1; EXPRESSED IN PLACENTA, SIGNAL = 0.91; EXPRESSED IN BT474, SIGNAL = 1.3; EXPRESSED IN BONE MARROW, SIGNAL = 0.8; EXPRESSED IN FETAL LIVER, SIGNAL = 1.4; EXPRESSED IN LUNG, SIGNAL = 0.91; EXPRESSED IN HELA, SIGNAL = 0.68; EXPRESSED IN ADULT LIVER, SIGNAL = 1.2; EXPRESSED IN HBL100, SIGNAL = 1.4; EXPRESSED IN HEART, SIGNAL =   1
LTFFLLQILINLISREA

SEQ ID NO: 37241 - protein, 89 aa, Homo sapiens
  MAP TO AC008174.1; EXPRESSED IN HEART, SIGNAL = 0.81; EXPRESSED IN ADULT LIVER, SIGNAL = 0.72; EXPRESSED IN BRAIN, SIGNAL = 0.71; EXPRESSED IN HELA, SIGNAL = 0.71; EST_HUMAN HIT: AA515512.1, EVALUE 8.00e-09
VTSEELNIIIQNVMTWVVATVTSILYPAITKYEKRLQNNTYPVSDDSILSSDSSSFCSTCSEDFTYRSYTSATTKTFQAEPCAFVVDTS

SEQ ID NO: 37242 - protein, 39 aa, Homo sapiens
  MAP TO AL078476.2; EXPRESSED IN PLACENTA, SIGNAL = 0.92; EXPRESSED IN BT474, SIGNAL = 0.88; EXPRESSED IN LUNG, SIGNAL =   1; EXPRESSED IN HELA, SIGNAL = 0.79; EXPRESSED IN BRAIN, SIGNAL = 0.7; EXPRESSED IN FETAL LIVER, SIGNAL = 0.74; EXPRESSED IN HEART, SIGNAL = 1.3; EXPRESSED IN BONE MARROW, SIGNAL = 0.79; EXPRESSED IN ADULT LIVER, SIGNAL = 1.3
GHGSGFPRKRRPRGAGLSGRGGRGRSKLKSGIGAVVLPG

SEQ ID NO: 37243 - protein, 27 aa, Homo sapiens
  MAP TO AL078476.2; EXPRESSED IN PLACENTA, SIGNAL = 0.92; EXPRESSED IN BT474, SIGNAL = 0.88; EXPRESSED IN LUNG, SIGNAL =   1; EXPRESSED IN HELA, SIGNAL = 0.79; EXPRESSED IN BRAIN, SIGNAL = 0.7; EXPRESSED IN FETAL LIVER, SIGNAL = 0.74; EXPRESSED IN HEART, SIGNAL = 1.3; EXPRESSED IN BONE MARROW, SIGNAL = 0.79; EXPRESSED IN ADULT LIVER, SIGNAL = 1.3; SWISSPROT HIT: Q64751, EVALUE 3.30e-01; EST_HUMAN HIT: BF370191.1, EVALUE 2.00e-04
CYIGPWVWISKKAETSRCRTVGARWPR

SEQ ID NO: 37244 - protein, 57 aa, Homo sapiens
  MAP TO AL008710.1; EXPRESSED IN BT474, SIGNAL = 5.1; EXPRESSED IN FETAL LIVER, SIGNAL = 5.8; EXPRESSED IN LUNG, SIGNAL = 5.9; EXPRESSED IN BONE MARROW, SIGNAL = 5.5; EXPRESSED IN HEART, SIGNAL = 4.5; EXPRESSED IN PLACENTA, SIGNAL =  16; EXPRESSED IN ADULT LIVER, SIGNAL = 7.4; EXPRESSED IN BRAIN, SIGNAL = 5.1; EXPRESSED IN HELA, SIGNAL =   6; EXPRESSED IN HBL100, SIGNAL = 4.8; EST_HUMAN HIT: AI953068.1, EVALUE 7.00e-06
CLSIIHAFNPQTTTNNKVIRFGSMSPPNLMSNYNLQCLVGGDWIMEADFPFDAVLVM

SEQ ID NO: 37245 - protein, 17 aa, Homo sapiens
  MAP TO AL008710.1; EXPRESSED IN BT474, SIGNAL = 5.1; EXPRESSED IN FETAL LIVER, SIGNAL = 5.8; EXPRESSED IN LUNG, SIGNAL = 5.9; EXPRESSED IN BONE MARROW, SIGNAL = 5.5; EXPRESSED IN HEART, SIGNAL = 4.5; EXPRESSED IN PLACENTA, SIGNAL =  16; EXPRESSED IN ADULT LIVER, SIGNAL = 7.4; EXPRESSED IN BRAIN, SIGNAL = 5.1; EXPRESSED IN HELA, SIGNAL =   6; EXPRESSED IN HBL100, SIGNAL = 4.8
VFLSFMLSTHKQLPITK

SEQ ID NO: 37246 - protein, 49 aa, Homo sapiens
  MAP TO AC006344.2; EXPRESSED IN BONE MARROW, SIGNAL = 0.97; EXPRESSED IN BRAIN, SIGNAL = 0.71; EXPRESSED IN PLACENTA, SIGNAL = 0.6; EXPRESSED IN BT474, SIGNAL = 0.66; EXPRESSED IN LUNG, SIGNAL = 0.78; EXPRESSED IN HELA, SIGNAL = 0.69; EXPRESSED IN FETAL LIVER, SIGNAL = 0.69; EXPRESSED IN HEART, SIGNAL = 0.78; SWISSPROT HIT: P15056, EVALUE 4.00e-26; EST_HUMAN HIT: AW892583.1, EVALUE 4.00e-25
VRKTFFTLAFCDFCRKLLFQGFRCQTCGYKFHQRCSTEVPLMCVNYDQL

SEQ ID NO: 37247 - protein, 42 aa, Homo sapiens; identical to SEQ ID NO: 35609
  MAP TO AP000326.1; EXPRESSED IN BONE MARROW, SIGNAL = 0.64; EXPRESSED IN ADULT LIVER, SIGNAL = 0.72; EXPRESSED IN PLACENTA, SIGNAL = 0.68; EXPRESSED IN BT474, SIGNAL = 0.6; EXPRESSED IN HBL100, SIGNAL = 0.67; EXPRESSED IN LUNG, SIGNAL = 0.81; EXPRESSED IN HELA, SIGNAL = 0.64; EXPRESSED IN BRAIN, SIGNAL = 0.81; EXPRESSED IN FETAL LIVER, SIGNAL = 0.77; EXPRESSED IN HEART, SIGNAL = 0.89; EST_HUMAN HIT: AI538087.1, EVALUE 2.80e+00

SEQ ID NO: 37248 - protein, 45 aa, Homo sapiens
  MAP TO AC008157.1; EXPRESSED IN ADULT LIVER, SIGNAL = 0.73; EXPRESSED IN LUNG, SIGNAL = 0.67; EXPRESSED IN HEART, SIGNAL = 0.78; EST_HUMAN HIT: AW855702.1, EVALUE 8.00e-04
  unsure 13
IATLTKKEILQYXDNMDEPGGIMLSEISQSEKDKYNDPSYMRYLK

SEQ ID NO: 37249 - protein, 27 aa, Homo sapiens
  MAP TO AC007879.2; EXPRESSED IN PLACENTA, SIGNAL = 0.9; EXPRESSED IN BRAIN, SIGNAL =   1; EXPRESSED IN HEART, SIGNAL = 0.98; EXPRESSED IN BT474, SIGNAL = 0.9; EXPRESSED IN BONE MARROW, SIGNAL =   1; EXPRESSED IN ADULT LIVER, SIGNAL =   1; EXPRESSED IN HELA, SIGNAL = 0.89; EXPRESSED IN LUNG, SIGNAL =   1; EXPRESSED IN FETAL LIVER, SIGNAL = 0.89; EXPRESSED IN HBL100, SIGNAL = 0.99; EST_HUMAN HIT: AI925949.1, EVALUE 3.00e-08
CQFSFKKFILHIQMQANAFDLSILISG

SEQ ID NO: 37250 - protein, 80 aa, Homo sapiens
  MAP TO AL021978.1; EXPRESSED IN PLACENTA, SIGNAL = 5.6; EXPRESSED IN BT474, SIGNAL = 4.5; EXPRESSED IN FETAL LIVER, SIGNAL =  18; EXPRESSED IN BONE MARROW, SIGNAL = 4.7; EXPRESSED IN HEART, SIGNAL = 4.6; EXPRESSED IN ADULT LIVER, SIGNAL = 5.7; EXPRESSED IN BRAIN, SIGNAL = 4.9; EXPRESSED IN LUNG, SIGNAL = 6.4; EXPRESSED IN HELA, SIGNAL = 6.1; EXPRESSED IN HBL100, SIGNAL = 6.1; EST_HUMAN HIT: AI281455.1, EVALUE 4.00e-30; SWISSPROT HIT: P13730, EVALUE 1.40e+00
PESSTCQNEITLQVPNPSELRAKPPSSSSTCTDSATRDISEGGESPVVQSDEEEVQVDTALATSHTDREATPDGGEDSDS

SEQ ID NO: 37251 - protein, 75 aa, Homo sapiens
  MAP TO AL021978.1; EXPRESSED IN PLACENTA, SIGNAL = 5.6; EXPRESSED IN BT474, SIGNAL = 4.5; EXPRESSED IN FETAL LIVER, SIGNAL =  18; EXPRESSED IN BONE MARROW, SIGNAL = 4.7; EXPRESSED IN HEART, SIGNAL = 4.6; EXPRESSED IN ADULT LIVER, SIGNAL = 5.7; EXPRESSED IN BRAIN, SIGNAL = 4.9; EXPRESSED IN LUNG, SIGNAL = 6.4; EXPRESSED IN HELA, SIGNAL = 6.1; EXPRESSED IN HBL100, SIGNAL = 6.1; EST_HUMAN HIT: AI394302.1, EVALUE 6.00e-31; SWISSPROT HIT: P73071, EVALUE 2.50e+00
PSHLLLPPPAPTRPPGTSVRVGSPPLFSPMRRKFRWTLPWPHHTLTERPLRMVVRTATLKLGHGRCLATLESSFG

SEQ ID NO: 37252 - protein, 51 aa, Homo sapiens
  MAP TO AL009172.1; EXPRESSED IN PLACENTA, SIGNAL = 1.8; EXPRESSED IN HBL100, SIGNAL = 2.2; EXPRESSED IN HELA, SIGNAL = 1.9; EXPRESSED IN BT474, SIGNAL = 1.9; EXPRESSED IN FETAL LIVER, SIGNAL = 1.9; EXPRESSED IN LUNG, SIGNAL = 2.2; EXPRESSED IN BONE MARROW, SIGNAL = 2.5; EXPRESSED IN HEART, SIGNAL = 2.3; EXPRESSED IN ADULT LIVER, SIGNAL = 2.1; EXPRESSED IN BRAIN, SIGNAL = 1.9; EST_HUMAN HIT: BE047665.1, EVALUE 2.00e-11; SWISSPROT HIT: P54371, EVALUE 1.50e+00
VPQLHKLEQLFEQEQKVRTSMMNRVGLLALMLHGTIQHDPFTSDLCSRVDI

SEQ ID NO: 37253 - protein, 81 aa, Homo sapiens
  MAP TO AC007314.3; EXPRESSED IN BT474, SIGNAL = 1.3; EXPRESSED IN BONE MARROW, SIGNAL = 1.2; EXPRESSED IN HBL100, SIGNAL = 2.2; EXPRESSED IN LUNG, SIGNAL = 0.93; EXPRESSED IN HEART, SIGNAL = 0.88; EXPRESSED IN PLACENTA, SIGNAL =   1; EXPRESSED IN FETAL LIVER, SIGNAL = 1.1; EXPRESSED IN HELA, SIGNAL = 1.2; EXPRESSED IN ADULT LIVER, SIGNAL = 0.95; EXPRESSED IN BRAIN, SIGNAL = 0.82; EST_HUMAN HIT: BE184921.1, EVALUE 1.00e-28; SWISSPROT HIT: Q07283, EVALUE 3.80e-01
EEEEEPEGKPSDAESSESSDDEKAWVEEVRKQRRLLQQEEKVKRQERLKEDQQTVLKPQFYEIKAGEEFRSFKDSATKQKL

SEQ ID NO: 37254 - protein, 42 aa, Homo sapiens
  MAP TO AC007314.3; EXPRESSED IN BT474, SIGNAL = 1.3; EXPRESSED IN BONE MARROW, SIGNAL = 1.2; EXPRESSED IN HBL100, SIGNAL = 2.2; EXPRESSED IN LUNG, SIGNAL = 0.93; EXPRESSED IN HEART, SIGNAL = 0.88; EXPRESSED IN PLACENTA, SIGNAL =   1; EXPRESSED IN FETAL LIVER, SIGNAL = 1.1; EXPRESSED IN HELA, SIGNAL = 1.2; EXPRESSED IN ADULT LIVER, SIGNAL = 0.95; EXPRESSED IN BRAIN, SIGNAL = 0.82; EST_HUMAN HIT: BE184944.1, EVALUE 4.00e-16
RKRRKSRKENQVMQKVRRVQMMKKPGLKRSGSNADSSSRRKK

SEQ ID NO: 37255 - protein, 19 aa, Homo sapiens
  MAP TO Z85987.13; EXPRESSED IN FETAL LIVER, SIGNAL = 0.86; EXPRESSED IN HELA, SIGNAL = 0.6; EXPRESSED IN ADULT LIVER, SIGNAL = 0.83; EXPRESSED IN LUNG, SIGNAL = 0.91; EXPRESSED IN HEART, SIGNAL = 1.2
PCPYLSLCLSLDIAMAPSC

SEQ ID NO: 37256 - protein, 19 aa, Homo sapiens
  MAP TO AL022344.1; EXPRESSED IN BONE MARROW, SIGNAL = 4.7; EXPRESSED IN BRAIN, SIGNAL =   5; EXPRESSED IN HELA, SIGNAL = 5.9; EXPRESSED IN HEART, SIGNAL = 3.5; EXPRESSED IN PLACENTA, SIGNAL = 8.7; EXPRESSED IN HBL100, SIGNAL = 4.8; EXPRESSED IN BT474, SIGNAL = 5.4; EXPRESSED IN FETAL LIVER, SIGNAL = 4.3; EXPRESSED IN ADULT LIVER, SIGNAL = 8.2; EXPRESSED IN LUNG, SIGNAL =   7
VCTCSLQSSSSSSSSSSLF

SEQ ID NO: 37257 - protein, 38 aa, Homo sapiens
  MAP TO AL022344.1; EXPRESSED IN BONE MARROW, SIGNAL = 4.7; EXPRESSED IN BRAIN, SIGNAL =   5; EXPRESSED IN HELA, SIGNAL = 5.9; EXPRESSED IN HEART, SIGNAL = 3.5; EXPRESSED IN PLACENTA, SIGNAL = 8.7; EXPRESSED IN HBL100, SIGNAL = 4.8; EXPRESSED IN BT474, SIGNAL = 5.4; EXPRESSED IN FETAL LIVER, SIGNAL = 4.3; EXPRESSED IN ADULT LIVER, SIGNAL = 8.2; EXPRESSED IN LUNG, SIGNAL =   7; EST_HUMAN HIT: AI874341.1, EVALUE 1.00e-04; SWISSPROT HIT: P39195, EVALUE 8.00e-04
IIIIIIFVCLGFFEMNLALWPRLDCSGMIKAHCSLRLL

SEQ ID NO: 37258 - protein, 70 aa, Homo sapiens
  MAP TO AL022324.1; EXPRESSED IN HELA, SIGNAL = 2.5; EXPRESSED IN PLACENTA, SIGNAL = 2.1; EXPRESSED IN HBL100, SIGNAL = 2.2; EXPRESSED IN HEART, SIGNAL = 1.9; EXPRESSED IN BT474, SIGNAL = 1.7; EXPRESSED IN ADULT LIVER, SIGNAL = 2.2; EXPRESSED IN FETAL LIVER, SIGNAL = 2.3; EXPRESSED IN LUNG, SIGNAL = 2.4; EXPRESSED IN BONE MARROW, SIGNAL = 2.3; EXPRESSED IN BRAIN, SIGNAL = 2.2; EST_HUMAN HIT: AL045115.1, EVALUE 2.40e-01; SWISSPROT HIT: P06219, EVALUE 1.00e+00
TTLPLQASLANSFTQEATGFLNGWSSGSLTQLFLDQSKGWAQGGKGTCPGSHSVSPTGPGKNPGDNSNGC

SEQ ID NO: 37259 - protein, 55 aa, Homo sapiens
  MAP TO AC007597.2; EXPRESSED IN HEART, SIGNAL = 1.4; EXPRESSED IN FETAL LIVER, SIGNAL = 1.2; EXPRESSED IN BRAIN, SIGNAL = 1.3; EXPRESSED IN BT474, SIGNAL = 1.5; EXPRESSED IN BONE MARROW, SIGNAL = 1.4; EXPRESSED IN HBL100, SIGNAL = 1.2; EXPRESSED IN HELA, SIGNAL = 1.3; EXPRESSED IN ADULT LIVER, SIGNAL = 1.1; EXPRESSED IN PLACENTA, SIGNAL = 1.2; EXPRESSED IN LUNG, SIGNAL = 1.4; SWISSPROT HIT: Q9UTN3, EVALUE 4.00e-05; EST_HUMAN HIT: AU120707.1, EVALUE 2.00e-26
LLIEFFELYGRHFNYLKTGIRIKDGGSYVAKDEVQKNMLDGYRPSMLYIEDPLQP

SEQ ID NO: 37260 - protein, 66 aa, Homo sapiens
  MAP TO AL034408.2; EXPRESSED IN HELA, SIGNAL = 4.3; EXPRESSED IN HEART, SIGNAL = 3.7; EXPRESSED IN FETAL LIVER, SIGNAL = 4.4; EXPRESSED IN BT474, SIGNAL = 3.7; EXPRESSED IN BONE MARROW, SIGNAL =   5; EXPRESSED IN PLACENTA, SIGNAL = 4.3; EXPRESSED IN HBL100, SIGNAL = 4.4; EXPRESSED IN ADULT LIVER, SIGNAL = 4.4; EXPRESSED IN BRAIN, SIGNAL = 3.9; EXPRESSED IN LUNG, SIGNAL = 3.8; SWISSPROT HIT: Q9Y217, EVALUE 2.00e-27; EST_HUMAN HIT: AI655417.1, EVALUE 2.00e-36
CGHLDGDSKEVSPIFTQFLDCIWQLMEQFPCAFEFNENFLLEIHDHVFSCQFGNFLGNCQKDREDL

SEQ ID NO: 37261 - protein, 59 aa, Homo sapiens
  MAP TO AL031678.2; EXPRESSED IN BONE MARROW, SIGNAL =   1; EXPRESSED IN HBL100, SIGNAL =   1; EXPRESSED IN HEART, SIGNAL = 0.97; EXPRESSED IN BT474, SIGNAL = 0.92; EST_HUMAN HIT: AW366274.1, EVALUE 1.00e-29; SWISSPROT HIT: Q08188, EVALUE 1.00e-30
MPFIFAEVNADRITWLYDNTTGKQWKNSVNSHTIGRYISTKAVGSNARMDVTDKYKYPE

SEQ ID NO: 37262 - protein, 149 aa, Homo sapiens
  MAP TO AL034418.2; EXPRESSED IN BT474, SIGNAL = 3.1; EXPRESSED IN BONE MARROW, SIGNAL = 2.6; EXPRESSED IN LUNG, SIGNAL = 2.4; EXPRESSED IN BRAIN, SIGNAL = 2.2; EXPRESSED IN HELA, SIGNAL = 2.1; EXPRESSED IN HEART, SIGNAL =   2; EXPRESSED IN FETAL LIVER, SIGNAL = 2.5; EXPRESSED IN ADULT LIVER, SIGNAL = 2.5; EXPRESSED IN PLACENTA, SIGNAL = 2.1; EXPRESSED IN HBL100, SIGNAL = 2.3; EST_HUMAN HIT: AW503706.1, EVALUE 9.00e-51; SWISSPROT HIT: Q58434, EVALUE 5.30e-01
SSCKESSVSVTSPSGVSSSTSGGVSSTSNMHGSLLQEKHRILHKLLQNGNSPAEVAKITAEATGKDTSSITSCGDGNVVKQEQLSPKKKENNALLRYLLDRDDPSDALSKELQPQVEGVDNKMSQCTSSTIPSSSQEKDPKIKTETSEE

SEQ ID NO: 37263 - protein, 59 aa, Homo sapiens
  MAP TO AC007590.1; EXPRESSED IN PLACENTA, SIGNAL = 1.2; EXPRESSED IN HBL100, SIGNAL = 0.76; EXPRESSED IN FETAL LIVER, SIGNAL = 0.75; EXPRESSED IN HELA, SIGNAL = 0.87; EXPRESSED IN BT474, SIGNAL = 0.69; EXPRESSED IN BONE MARROW, SIGNAL = 0.8; EXPRESSED IN LUNG, SIGNAL = 0.82; EXPRESSED IN ADULT LIVER, SIGNAL = 0.91; EXPRESSED IN BRAIN, SIGNAL = 1.1; EXPRESSED IN HEART, SIGNAL = 1.2
HLCSLGSATPNGMLETIAHSIIPVPSMVPFHLAIAFSPFPFPLAFFASALFCNPSFLFP

SEQ ID NO: 37264 - protein, 38 aa, Homo sapiens
  MAP TO AC007590.1; EXPRESSED IN PLACENTA, SIGNAL = 1.2; EXPRESSED IN HBL100, SIGNAL = 0.76; EXPRESSED IN FETAL LIVER, SIGNAL = 0.75; EXPRESSED IN HELA, SIGNAL = 0.87; EXPRESSED IN BT474, SIGNAL = 0.69; EXPRESSED IN BONE MARROW, SIGNAL = 0.8; EXPRESSED IN LUNG, SIGNAL = 0.82; EXPRESSED IN ADULT LIVER, SIGNAL = 0.91; EXPRESSED IN BRAIN, SIGNAL = 1.1; EXPRESSED IN HEART, SIGNAL = 1.2
LGRGSWDCRRGQKRKMQEEKEKEKMLWPNGKEPSKVLG

SEQ ID NO: 37265 - protein, 52 aa, Homo sapiens
  MAP TO AL031769.1; EXPRESSED IN BT474, SIGNAL = 1.2; EXPRESSED IN ADULT LIVER, SIGNAL = 1.6; EXPRESSED IN FETAL LIVER, SIGNAL = 1.2; EXPRESSED IN BONE MARROW, SIGNAL = 1.3; EXPRESSED IN BRAIN, SIGNAL = 1.3; EXPRESSED IN HBL100, SIGNAL = 1.2; EXPRESSED IN HELA, SIGNAL = 1.3; EXPRESSED IN HEART, SIGNAL = 1.1
WKVIKERKRLMYVVAEKEKWGHLPSMVSMVSYILGKLIRTVSVGPVSFEIFS

SEQ ID NO: 37266 - protein, 52 aa, Homo sapiens
  MAP TO AL035704.9; EXPRESSED IN PLACENTA, SIGNAL = 3.2; EXPRESSED IN HBL100, SIGNAL =   3; EXPRESSED IN BT474, SIGNAL = 3.2; EXPRESSED IN BONE MARROW, SIGNAL = 3.7; EXPRESSED IN LUNG, SIGNAL = 4.2; EXPRESSED IN HELA, SIGNAL =   4; EXPRESSED IN HEART, SIGNAL = 3.5; EXPRESSED IN ADULT LIVER, SIGNAL = 3.6; EXPRESSED IN FETAL LIVER, SIGNAL = 4.1; EXPRESSED IN BRAIN, SIGNAL = 3.5
VDQILRQAMSAPGVAAMSAVVIHNDTVLWTGNFGKKNGSDPASGAPNEYTMY

SEQ ID NO: 37267 - protein, 41 aa, Homo sapiens
  MAP TO AL035704.9; EXPRESSED IN PLACENTA, SIGNAL = 3.2; EXPRESSED IN HBL100, SIGNAL =   3; EXPRESSED IN BT474, SIGNAL = 3.2; EXPRESSED IN BONE MARROW, SIGNAL = 3.7; EXPRESSED IN LUNG, SIGNAL = 4.2; EXPRESSED IN HELA, SIGNAL =   4; EXPRESSED IN HEART, SIGNAL = 3.5; EXPRESSED IN ADULT LIVER, SIGNAL = 3.6; EXPRESSED IN FETAL LIVER, SIGNAL = 4.1; EXPRESSED IN BRAIN, SIGNAL = 3.5; EST_HUMAN HIT: BE898005.1, EVALUE 4.20e+00
WTRSCARQCLPQAWLPCLQLSSTMILCSGQGTLGRRMAQTR

SEQ ID NO: 37268 - protein, 43 aa, Homo sapiens
  MAP TO AL049539.19; EXPRESSED IN PLACENTA, SIGNAL = 5.1; EXPRESSED IN HEART, SIGNAL = 6.2; EXPRESSED IN FETAL LIVER, SIGNAL = 5.2; EXPRESSED IN BT474, SIGNAL = 5.1; EXPRESSED IN BRAIN, SIGNAL = 5.2; EXPRESSED IN BONE MARROW, SIGNAL =   5; EXPRESSED IN LUNG, SIGNAL =   5; EXPRESSED IN HELA, SIGNAL = 5.6; EXPRESSED IN HBL100, SIGNAL = 4.8; EXPRESSED IN ADULT LIVER, SIGNAL = 5.1; SWISSPROT HIT: P50545, EVALUE 2.00e-20; EST_HUMAN HIT: AA149096.1, EVALUE 2.00e-19
AKFPIKWTAPEAINFGSFTIKSDVWSFGILLMEIVTYGRIPYP

SEQ ID NO: 37269 - protein, 18 aa, Homo sapiens
  MAP TO AL049539.19; EXPRESSED IN PLACENTA, SIGNAL = 5.1; EXPRESSED IN HEART, SIGNAL = 6.2; EXPRESSED IN FETAL LIVER, SIGNAL = 5.2; EXPRESSED IN BT474, SIGNAL = 5.1; EXPRESSED IN BRAIN, SIGNAL = 5.2; EXPRESSED IN BONE MARROW, SIGNAL =   5; EXPRESSED IN LUNG, SIGNAL =   5; EXPRESSED IN HELA, SIGNAL = 5.6; EXPRESSED IN HBL100, SIGNAL = 4.8; EXPRESSED IN ADULT LIVER, SIGNAL = 5.1; EST_HUMAN HIT: BF224172.1, EVALUE 1.00e-02
STLAPSPSSQTSGPLVSC

SEQ ID NO: 37270 - protein, 57 aa, Homo sapiens
  MAP TO AL022241.2; EXPRESSED IN BRAIN, SIGNAL =  17; EXPRESSED IN BONE MARROW, SIGNAL =  18; EXPRESSED IN HBL100, SIGNAL =  18; EXPRESSED IN HEART, SIGNAL =  13; EXPRESSED IN PLACENTA, SIGNAL =  17; EXPRESSED IN FETAL LIVER, SIGNAL =  20; EXPRESSED IN LUNG, SIGNAL =  19; EXPRESSED IN HELA, SIGNAL =  18; EXPRESSED IN ADULT LIVER, SIGNAL =  17; EXPRESSED IN BT474, SIGNAL =  16; SWISSPROT HIT: O29248, EVALUE 7.70e+00
SLLDDNTKAGDVTPPADLRENAMSLSLSIYSQVSRPFPSVIMTDDMLCFFISDYKEN

SEQ ID NO: 37271 - protein, 34 aa, Homo sapiens
  MAP TO AL035460.13; EXPRESSED IN LUNG, SIGNAL = 0.99; EXPRESSED IN HELA, SIGNAL = 0.96; EXPRESSED IN PLACENTA, SIGNAL = 0.93; EXPRESSED IN HEART, SIGNAL = 1.4; EXPRESSED IN BT474, SIGNAL =   1; EXPRESSED IN FETAL LIVER, SIGNAL =   1; EXPRESSED IN BONE MARROW, SIGNAL = 0.99; SWISSPROT HIT: O08791, EVALUE 6.00e-07; EST_HUMAN HIT: AI823441.1, EVALUE 5.00e-06
MISAVKQRSAFAPVLRPPSSPPQACPRAHGEGLP

SEQ ID NO: 37272 - protein, 70 aa, Homo sapiens
  MAP TO AL035530.11; EXPRESSED IN FETAL LIVER, SIGNAL = 1.4; EXPRESSED IN BT474, SIGNAL = 1.4; EXPRESSED IN ADULT LIVER, SIGNAL = 1.2; EXPRESSED IN BONE MARROW, SIGNAL = 1.1; EXPRESSED IN LUNG, SIGNAL = 1.3; EXPRESSED IN BRAIN, SIGNAL = 1.1; EXPRESSED IN HBL100, SIGNAL = 1.2; EXPRESSED IN PLACENTA, SIGNAL = 1.6; EXPRESSED IN HELA, SIGNAL = 1.4; EXPRESSED IN HEART, SIGNAL = 1.3; EST_HUMAN HIT: AW664438.1, EVALUE 3.00e-18; SWISSPROT HIT: Q07960, EVALUE 1.30e-01
VADKLPRPNLLLLKHLVYVLHLISKNSEVNRMDSSNLAICIGPNMLTLENDQSLSFEAQKDLNNKVCSAY

SEQ ID NO: 37273 - protein, 33 aa, Homo sapiens
  MAP TO AL078623.24; EXPRESSED IN PLACENTA, SIGNAL = 1.9; EXPRESSED IN ADULT LIVER, SIGNAL =   2; EXPRESSED IN HBL100, SIGNAL = 1.8; EXPRESSED IN HELA, SIGNAL = 2.2; EXPRESSED IN HEART, SIGNAL =   2; EXPRESSED IN FETAL LIVER, SIGNAL =   2; EXPRESSED IN BT474, SIGNAL = 1.9; EXPRESSED IN BRAIN, SIGNAL = 2.3; EXPRESSED IN LUNG, SIGNAL = 2.2; EXPRESSED IN BONE MARROW, SIGNAL = 1.7; EST_HUMAN HIT: AA936284.1, EVALUE 2.00e-07
AVFTPLLILLAAQGLTAQMCSCDEQKQGGMEPP

SEQ ID NO: 37274 - protein, 50 aa, Homo sapiens
  MAP TO AL035633.15; EXPRESSED IN PLACENTA, SIGNAL = 2.9; EXPRESSED IN ADULT LIVER, SIGNAL = 1.8; EXPRESSED IN BONE MARROW, SIGNAL = 1.9; EXPRESSED IN HELA, SIGNAL = 2.5; EXPRESSED IN HBL100, SIGNAL =   2; EXPRESSED IN HEART, SIGNAL = 2.1; EXPRESSED IN BT474, SIGNAL = 2.2; EXPRESSED IN FETAL LIVER, SIGNAL = 2.4; EXPRESSED IN BRAIN, SIGNAL = 2.3; EXPRESSED IN LUNG, SIGNAL = 2.6; EST_HUMAN HIT: AV746139.1, EVALUE 1.00e-08
YTLEHNDGSQSDTAVGTVGAGGKKRRSSLSAKVVAIVSRRSRSTSQLSQT

SEQ ID NO: 37275 - protein, 36 aa, Homo sapiens
  MAP TO AL035633.15; EXPRESSED IN PLACENTA, SIGNAL = 2.9; EXPRESSED IN ADULT LIVER, SIGNAL = 1.8; EXPRESSED IN BONE MARROW, SIGNAL = 1.9; EXPRESSED IN HELA, SIGNAL = 2.5; EXPRESSED IN HBL100, SIGNAL =   2; EXPRESSED IN HEART, SIGNAL = 2.1; EXPRESSED IN BT474, SIGNAL = 2.2; EXPRESSED IN FETAL LIVER, SIGNAL = 2.4; EXPRESSED IN BRAIN, SIGNAL = 2.3; EXPRESSED IN LUNG, SIGNAL = 2.6; EST_HUMAN HIT: AV745552.1, EVALUE 2.60e-02
CTHWSIMTAASQTQLWVQLEQVERNGDPALVPKWLP

SEQ ID NO: 37276 - protein, 228 aa, Homo sapiens
  MAP TO AL078638.6; EXPRESSED IN LUNG, SIGNAL = 1.4; EXPRESSED IN HBL100, SIGNAL = 0.95; EXPRESSED IN PLACENTA, SIGNAL = 1.1; EXPRESSED IN ADULT LIVER, SIGNAL = 1.1; EXPRESSED IN BRAIN, SIGNAL = 1.1; EXPRESSED IN BONE MARROW, SIGNAL = 1.1; EXPRESSED IN HELA, SIGNAL = 1.6; EXPRESSED IN HEART, SIGNAL = 1.5; EXPRESSED IN FETAL LIVER, SIGNAL = 1.1; EXPRESSED IN BT474, SIGNAL =   1; EST_HUMAN HIT: AW408788.1, EVALUE 5.00e-60; SWISSPROT HIT: P75211, EVALUE 1.00e-10
VTNYVMQYVTVPLRKCTSDELRAVMFPMSTMKIPPQTKVEESPLEKVETPPKASVDAPPQVNVEVFCNTSMEASPKAGVGMAPEVSTDSFPVVSVDVSPVVSTYDSEMSMDASPELSIEALPKVDLETVPKVSIVASPEASLEAPPEVSLEALPEVSVEAAPEGSLEAPPKGSAEVAPKESVKGSPKESMEASPEAMVKASPKTSLEASMEASPKAKARDAPKVCQVP

SEQ ID NO: 37277 - protein, 66 aa, Homo sapiens
  MAP TO AP000351.3; EXPRESSED IN BONE MARROW, SIGNAL = 1.3; EXPRESSED IN HBL100, SIGNAL = 0.94; EXPRESSED IN HELA, SIGNAL =   1; EXPRESSED IN HEART, SIGNAL =   1; EXPRESSED IN BRAIN, SIGNAL =   1; EST_HUMAN HIT: AA662274.1, EVALUE 1.00e-31; SWISSPROT HIT: P30712, EVALUE 2.00e-32
LGYELFEGRPRLAAWRGRVEAFLGAELCQEAHSIILSILEQAAKKTLPTPSPEAYQAMLLRIARIP

SEQ ID NO: 37278 - protein, 35 aa, Homo sapiens
  MAP TO AP000351.3; EXPRESSED IN BONE MARROW, SIGNAL = 1.3; EXPRESSED IN HBL100, SIGNAL = 0.94; EXPRESSED IN HELA, SIGNAL =   1; EXPRESSED IN HEART, SIGNAL =   1; EXPRESSED IN BRAIN, SIGNAL =   1; EST_HUMAN HIT: AV708741.1, EVALUE 1.00e-15
SAMNCLRDGHDWQHGVDEWRLSWVLSYARRPTASS

SEQ ID NO: 37279 - protein, 152 aa, Homo sapiens
  MAP TO AL034430.1; EXPRESSED IN HELA, SIGNAL = 1.5; EXPRESSED IN PLACENTA, SIGNAL = 1.5; EXPRESSED IN HBL100, SIGNAL = 1.5; EXPRESSED IN HEART, SIGNAL = 1.3; EXPRESSED IN BT474, SIGNAL = 1.9; EXPRESSED IN ADULT LIVER, SIGNAL =   2; EXPRESSED IN FETAL LIVER, SIGNAL = 1.6; EXPRESSED IN BRAIN, SIGNAL = 1.3; EXPRESSED IN BONE MARROW, SIGNAL = 1.2; EXPRESSED IN LUNG, SIGNAL = 1.7; EST_HUMAN HIT: BE883082.1, EVALUE 2.00e-44; SWISSPROT HIT: P53313, EVALUE 1.00e-20
VSAAPPKRSNKDPPFAAQASHHLVPPEIIQSLLMTVANNLVTDKNSGEVMTVGINAIKEKTARCSLAMTEELLQDLAQYKTHKDKNVMMCARTLIQLFRTLNPQMLQKKFQGKPTEASIEARVQEYGELDAKDYIPGAEVLEGEKEENAEND

SEQ ID NO: 37280 - protein, 41 aa, Homo sapiens
  MAP TO AL034430.1; EXPRESSED IN HELA, SIGNAL = 1.5; EXPRESSED IN PLACENTA, SIGNAL = 1.5; EXPRESSED IN HBL100, SIGNAL = 1.5; EXPRESSED IN HEART, SIGNAL = 1.3; EXPRESSED IN BT474, SIGNAL = 1.9; EXPRESSED IN ADULT LIVER, SIGNAL =   2; EXPRESSED IN FETAL LIVER, SIGNAL = 1.6; EXPRESSED IN BRAIN, SIGNAL = 1.3; EXPRESSED IN BONE MARROW, SIGNAL = 1.2; EXPRESSED IN LUNG, SIGNAL = 1.7; EST_HUMAN HIT: BE883082.1, EVALUE 2.00e-10; SWISSPROT HIT: P53313, EVALUE 1.40e-01
RLVGIHELFLFNFHPCLQRFLQPHQREVTKILRLLHKHLIT

SEQ ID NO: 37281 - protein, 38 aa, Homo sapiens
  MAP TO AL096712.17; EXPRESSED IN HEART, SIGNAL = 0.96; EXPRESSED IN FETAL LIVER, SIGNAL = 0.96; EXPRESSED IN ADULT LIVER, SIGNAL = 1.1; EXPRESSED IN BONE MARROW, SIGNAL = 1.1; SWISSPROT HIT: P48365, EVALUE 2.40e-01; EST_HUMAN HIT: AV649624.1, EVALUE 2.00e-14
IFERILFIWAIRHPASGYVQGINDLVTPFFVVFLSEYV

SEQ ID NO: 37282 - protein, 77 aa, Homo sapiens
  MAP TO AL035703.19; EXPRESSED IN HBL100, SIGNAL =   2; EXPRESSED IN HELA, SIGNAL = 2.1; EXPRESSED IN PLACENTA, SIGNAL = 2.4; EXPRESSED IN HEART, SIGNAL = 2.2; EXPRESSED IN BT474, SIGNAL =   2; EXPRESSED IN FETAL LIVER, SIGNAL = 1.9; EXPRESSED IN ADULT LIVER, SIGNAL = 2.1; EXPRESSED IN BONE MARROW, SIGNAL = 1.9; EXPRESSED IN LUNG, SIGNAL = 2.2; EXPRESSED IN BRAIN, SIGNAL = 1.9; EST_HUMAN HIT: BE256685.1, EVALUE 7.00e-14; SWISSPROT HIT: O09127, EVALUE 2.00e-38
YNAVCRRCPWALSRCEACGSGTRFVPQQTSLVQASLLVANLLAHMNYSFWIEAVNGVSDLSPEPRRAAVVNITTNQA

SEQ ID NO: 37283 - protein, 72 aa, Homo sapiens; identical to SEQ ID NO: 35459
  MAP TO AL049637.33; EXPRESSED IN FETAL LIVER, SIGNAL = 1.2; EXPRESSED IN ADULT LIVER, SIGNAL = 1.4; EXPRESSED IN BONE MARROW, SIGNAL = 1.2; EXPRESSED IN HELA, SIGNAL = 1.2; EXPRESSED IN HBL100, SIGNAL = 1.3; EXPRESSED IN BT474, SIGNAL = 1.3; EXPRESSED IN BRAIN, SIGNAL = 1.1; EXPRESSED IN LUNG, SIGNAL = 1.4; EXPRESSED IN PLACENTA, SIGNAL = 1.2; EXPRESSED IN HEART, SIGNAL = 1.2; SWISSPROT HIT: P54731, EVALUE 5.00e-36; EST_HUMAN HIT: AA862284.1, EVALUE 2.00e-35

SEQ ID NO: 37284 - protein, 81 aa, Homo sapiens
  MAP TO AL035088.1; EXPRESSED IN PLACENTA, SIGNAL = 1.8; EXPRESSED IN HEART, SIGNAL = 1.9; EXPRESSED IN HBL100, SIGNAL = 1.8; EXPRESSED IN BT474, SIGNAL =   2; EXPRESSED IN ADULT LIVER, SIGNAL = 2.2; EXPRESSED IN FETAL LIVER, SIGNAL = 2.2; EXPRESSED IN BONE MARROW, SIGNAL = 2.5; EXPRESSED IN LUNG, SIGNAL =   2; EXPRESSED IN BRAIN, SIGNAL =   2; EXPRESSED IN HELA, SIGNAL = 2.2; SWISSPROT HIT: P05842, EVALUE 3.70e+00; EST_HUMAN HIT: BE002797.1, EVALUE 5.30e+00
DLNSFARSSLPACKNNLRAINRKVHLFEKPDDSKALVDTFAILFQKELMSLKLAGTEPRSVLIAASNYENVTKDPGYARGA

SEQ ID NO: 37285 - protein, 34 aa, Homo sapiens
  MAP TO AL049542.5; EXPRESSED IN PLACENTA, SIGNAL = 1.4; EXPRESSED IN HELA, SIGNAL = 1.3; EXPRESSED IN HEART, SIGNAL = 1.3; EXPRESSED IN BT474, SIGNAL =   1; EXPRESSED IN HBL100, SIGNAL = 1.3; EXPRESSED IN ADULT LIVER, SIGNAL = 1.6; EXPRESSED IN FETAL LIVER, SIGNAL = 2.1; EXPRESSED IN BRAIN, SIGNAL = 1.4; EXPRESSED IN LUNG, SIGNAL = 1.5; EXPRESSED IN BONE MARROW, SIGNAL = 1.4; EST_HUMAN HIT: AL079628.1, EVALUE 2.00e-10
GQIITLSIQGAKSLFSTAFSESLAAEISSVSRDE

SEQ ID NO: 37286 - protein, 33 aa, Homo sapiens [sequence omitted]

SEQ ID NO: 37287 - protein, 47 aa, Homo sapiens
  MAP TO D87675.1; EXPRESSED IN BT474, SIGNAL = 1.3; EXPRESSED IN BONE MARROW, SIGNAL =   1; EXPRESSED IN PLACENTA, SIGNAL = 2.9; EXPRESSED IN BRAIN, SIGNAL = 3.3; EXPRESSED IN LUNG, SIGNAL =   2; EXPRESSED IN HEART, SIGNAL = 1.4; EXPRESSED IN HELA, SIGNAL =   3; EXPRESSED IN HBL100, SIGNAL = 1.6; EST_HUMAN HIT: BE077213.1, EVALUE 1.00e-19; SWISSPROT HIT: Q95241, EVALUE 2.00e-20
PRHVFNMLKKYVRAEQKDRQHTLKHFEHVRMVDPKKAAQIRSQVSVG

SEQ ID NO: 37288 - protein, 68 aa, Homo sapiens
  MAP TO AC010092.2; EXPRESSED IN FETAL LIVER, SIGNAL = 1.2; EXPRESSED IN LUNG, SIGNAL = 1.3; EXPRESSED IN BRAIN, SIGNAL = 1.1; EXPRESSED IN HELA, SIGNAL = 1.7; EXPRESSED IN HBL100, SIGNAL = 1.2; EXPRESSED IN PLACENTA, SIGNAL = 1.2; EXPRESSED IN HEART, SIGNAL = 1.1; EXPRESSED IN BT474, SIGNAL = 1.1; SWISSPROT HIT: Q10149, EVALUE 8.00e-04; EST_HUMAN HIT: AU133004.1, EVALUE 6.00e-34
NKDNDTLKDLLKANVEKPVKMLIYSSKTLELRETSVTPSNLWGGQGLLGVSIRFCSFDGANENVWHVL

SEQ ID NO: 37289 - protein, 38 aa, Homo sapiens
  MAP TO AC007029.2; EXPRESSED IN BRAIN, SIGNAL = 1.2; EXPRESSED IN HBL100, SIGNAL =   1; EXPRESSED IN PLACENTA, SIGNAL = 1.5; EXPRESSED IN HEART, SIGNAL = 1.1; EXPRESSED IN ADULT LIVER, SIGNAL = 1.2; EXPRESSED IN BT474, SIGNAL = 1.2; EXPRESSED IN FETAL LIVER, SIGNAL = 0.98; EXPRESSED IN BONE MARROW, SIGNAL = 1.5; EXPRESSED IN LUNG, SIGNAL = 1.7; EST_HUMAN HIT: H94786.1, EVALUE 1.00e-06
AEGGFSSCHFYEPLHQPTDAWCDTAPDKNKYTHYSYEG

SEQ ID NO: 37290 - protein, 29 aa, Homo sapiens
  MAP TO AC007247.2; EXPRESSED IN PLACENTA, SIGNAL = 9.4; EXPRESSED IN HBL100, SIGNAL =  11; EXPRESSED IN HEART, SIGNAL = 8.4; EXPRESSED IN LUNG, SIGNAL = 9.9; EXPRESSED IN BRAIN, SIGNAL = 8.7; EXPRESSED IN BT474, SIGNAL = 8.9; EXPRESSED IN ADULT LIVER, SIGNAL =  10; EXPRESSED IN FETAL LIVER, SIGNAL =  10; EXPRESSED IN BONE MARROW, SIGNAL =  11; EXPRESSED IN HELA, SIGNAL =  11
ISIIEEVQINDCFADVEVTVGKAALTPTA

SEQ ID NO: 37291 - protein, 17 aa, Homo sapiens
  MAP TO AC007247.2; EXPRESSED IN PLACENTA, SIGNAL = 9.4; EXPRESSED IN HBL100, SIGNAL =  11; EXPRESSED IN HEART, SIGNAL = 8.4; EXPRESSED IN LUNG, SIGNAL = 9.9; EXPRESSED IN BRAIN, SIGNAL = 8.7; EXPRESSED IN BT474, SIGNAL = 8.9; EXPRESSED IN ADULT LIVER, SIGNAL =  10; EXPRESSED IN FETAL LIVER, SIGNAL =  10; EXPRESSED IN BONE MARROW, SIGNAL =  11; EXPRESSED IN HELA, SIGNAL =  11
RSMIALQTLKLQLEKPP

SEQ ID NO: 37292 - protein, 24 aa, Homo sapiens
  MAP TO AC010888.2; EXPRESSED IN FETAL LIVER, SIGNAL = 1.3; EXPRESSED IN LUNG, SIGNAL = 1.7; EXPRESSED IN BRAIN, SIGNAL = 1.2; EXPRESSED IN HELA, SIGNAL = 1.7; EXPRESSED IN PLACENTA, SIGNAL = 1.6; EXPRESSED IN BT474, SIGNAL = 1.3; EXPRESSED IN ADULT LIVER, SIGNAL = 1.4; EXPRESSED IN BONE MARROW, SIGNAL = 1.1; EXPRESSED IN HEART, SIGNAL = 1.3; EXPRESSED IN HBL100, SIGNAL = 0.92; EST_HUMAN HIT: BE018348.1, EVALUE 3.30e-02
CHHQGLERRRGGDFHNIHIQVSWF

SEQ ID NO: 37293 - protein, 47 aa, Homo sapiens
  MAP TO AC007249.2; EXPRESSED IN BONE MARROW, SIGNAL = 3.1; EXPRESSED IN LUNG, SIGNAL = 2.5; EXPRESSED IN BRAIN, SIGNAL = 2.6; EXPRESSED IN HELA, SIGNAL = 3.5; EXPRESSED IN HBL100, SIGNAL = 4.3; EXPRESSED IN PLACENTA, SIGNAL = 2.4; EXPRESSED IN HEART, SIGNAL = 2.6; EXPRESSED IN ADULT LIVER, SIGNAL = 2.4; EXPRESSED IN BT474, SIGNAL = 2.5; EXPRESSED IN FETAL LIVER, SIGNAL = 2.7; EST_HUMAN HIT: AV719359.1, EVALUE 2.00e-21; SWISSPROT HIT: P11926, EVALUE 1.00e-22
QLMQQFQNPDFPPEVEEQDASTLPVSCAWESGMKRHRAACASASINV

SEQ ID NO: 37294 - protein, 66 aa, Homo sapiens
  MAP TO AC010385.2; EXPRESSED IN BONE MARROW, SIGNAL = 2.2; EXPRESSED IN BRAIN, SIGNAL =   2; EXPRESSED IN PLACENTA, SIGNAL = 2.1; EXPRESSED IN HEART, SIGNAL = 2.2; EXPRESSED IN HELA, SIGNAL = 2.3; EXPRESSED IN HBL100, SIGNAL = 1.9; EXPRESSED IN ADULT LIVER, SIGNAL = 2.8; EXPRESSED IN FETAL LIVER, SIGNAL =   2; EXPRESSED IN BT474, SIGNAL = 1.9; EXPRESSED IN LUNG, SIGNAL = 2.1; EST_HUMAN HIT: AA442148.1, EVALUE 6.00e+00
HPRRHITLFHKRGSRENQHQCYYCLHYNLTSSTTTTITLASHYPIHYHYYYDHIHNYTAQYYCHDD

SEQ ID NO: 37295 - protein, 34 aa, Homo sapiens
  MAP TO AC010385.2; EXPRESSED IN BONE MARROW, SIGNAL = 2.2; EXPRESSED IN BRAIN, SIGNAL =   2; EXPRESSED IN PLACENTA, SIGNAL = 2.1; EXPRESSED IN HEART, SIGNAL = 2.2; EXPRESSED IN HELA, SIGNAL = 2.3; EXPRESSED IN HBL100, SIGNAL = 1.9; EXPRESSED IN ADULT LIVER, SIGNAL = 2.8; EXPRESSED IN FETAL LIVER, SIGNAL =   2; EXPRESSED IN BT474, SIGNAL = 1.9; EXPRESSED IN LUNG, SIGNAL = 2.1
STIITTMTTSTTTLLNTTAMMTSTSTLAHSNTNT

SEQ ID NO: 37296 - protein, 28 aa, Homo sapiens
  MAP TO AC010904.2; EXPRESSED IN FETAL LIVER, SIGNAL = 9.6; EXPRESSED IN ADULT LIVER, SIGNAL =  12; EXPRESSED IN LUNG, SIGNAL =  11; EXPRESSED IN BONE MARROW, SIGNAL = 9.8; EXPRESSED IN BRAIN, SIGNAL = 8.4; EXPRESSED IN HELA, SIGNAL =  11; EXPRESSED IN PLACENTA, SIGNAL = 9.8; EXPRESSED IN BT474, SIGNAL = 8.5; EXPRESSED IN HEART, SIGNAL = 8.4; EXPRESSED IN HBL100, SIGNAL = 8.8; EST_HUMAN HIT: AI280643.1, EVALUE 2.10e-01
SCMLVCWCMSDCHSTKGKTLPPLWVFWK

SEQ ID NO: 37297 - protein, 28 aa, Homo sapiens
  MAP TO AL031776.6; EXPRESSED IN PLACENTA, SIGNAL = 3.9; EXPRESSED IN HEART, SIGNAL = 3.3; EXPRESSED IN ADULT LIVER, SIGNAL = 4.1; EXPRESSED IN FETAL LIVER, SIGNAL = 3.2; EXPRESSED IN BT474, SIGNAL = 3.1; EXPRESSED IN BRAIN, SIGNAL = 3.8; EXPRESSED IN BONE MARROW, SIGNAL = 3.2; EXPRESSED IN LUNG, SIGNAL = 3.7; EXPRESSED IN HBL100, SIGNAL =   3; EXPRESSED IN HELA, SIGNAL = 3.9; SWISSPROT HIT: P46970, EVALUE 6.40e+00; EST_HUMAN HIT: AV700958.1, EVALUE 3.10e-01
LLTDSEGGEMILNKGDRDNSDDEGDANT

SEQ ID NO: 37298 - protein, 35 aa, Homo sapiens
  MAP TO AC008844.2; EXPRESSED IN HELA, SIGNAL =  22; EXPRESSED IN PLACENTA, SIGNAL =  22; EXPRESSED IN HBL100, SIGNAL =  18; EXPRESSED IN HEART, SIGNAL =  16; EXPRESSED IN LUNG, SIGNAL =  22; EXPRESSED IN BRAIN, SIGNAL =  19; EXPRESSED IN BT474, SIGNAL =  17; EXPRESSED IN ADULT LIVER, SIGNAL =  27; EXPRESSED IN FETAL LIVER, SIGNAL =  22; EXPRESSED IN BONE MARROW, SIGNAL =  20
VYVCVSTMIFSTYCSHFSVLSLCFLIAMTLTFSFS

SEQ ID NO: 37299 - protein, 78 aa, Homo sapiens [sequence omitted]

SEQ ID NO: 37300 - protein, 32 aa, Homo sapiens
  MAP TO AC007386.3; EXPRESSED IN HELA, SIGNAL = 0.66; EXPRESSED IN BT474, SIGNAL = 0.7; EXPRESSED IN LUNG, SIGNAL = 0.65; EXPRESSED IN ADULT LIVER, SIGNAL = 0.77; EXPRESSED IN HEART, SIGNAL = 0.82; EXPRESSED IN PLACENTA, SIGNAL = 0.67; EXPRESSED IN BRAIN, SIGNAL = 0.83; EXPRESSED IN HBL100, SIGNAL = 0.67; EST_HUMAN HIT: BF435335.1, EVALUE 3.00e-11
QFKKDIDEHQSLTESVLQKGEILLQCLLENTP

SEQ ID NO: 37301 - protein, 115 aa, Homo sapiens; identical to SEQ ID NO: 35791
  MAP TO AC010684.2; EXPRESSED IN FETAL LIVER, SIGNAL =   2; EXPRESSED IN ADULT LIVER, SIGNAL = 1.9; EXPRESSED IN LUNG, SIGNAL = 2.1; EXPRESSED IN BONE MARROW, SIGNAL =   2; EXPRESSED IN BRAIN, SIGNAL = 1.8; EXPRESSED IN HELA, SIGNAL = 1.9; EXPRESSED IN PLACENTA, SIGNAL = 1.6; EXPRESSED IN BT474, SIGNAL = 1.6; EXPRESSED IN HEART, SIGNAL = 1.9; EXPRESSED IN HBL100, SIGNAL = 1.7; EST_HUMAN HIT: BE909539.1, EVALUE 5.00e-22; SWISSPROT HIT: P17008, EVALUE 9.00e-15

SEQ ID NO: 37302 - protein, 71 aa, Homo sapiens
  MAP TO AC010684.2; EXPRESSED IN FETAL LIVER, SIGNAL =   2; EXPRESSED IN ADULT LIVER, SIGNAL = 1.9; EXPRESSED IN LUNG, SIGNAL = 2.1; EXPRESSED IN BONE MARROW, SIGNAL =   2; EXPRESSED IN BRAIN, SIGNAL = 1.8; EXPRESSED IN HELA, SIGNAL = 1.9; EXPRESSED IN PLACENTA, SIGNAL = 1.6; EXPRESSED IN BT474, SIGNAL = 1.6; EXPRESSED IN HEART, SIGNAL = 1.9; EXPRESSED IN HBL100, SIGNAL = 1.7; EST_HUMAN HIT: BE258477.1, EVALUE 2.00e-19
DSLAAVCADLHIQGDGHSCGALQMWQWLHQDERGAPGDDQAAHTAIQATGIRSASGQGTACWNGHPCSCEG

SEQ ID NO: 37303 - protein, 110 aa, Homo sapiens
  MAP TO AC010958.2; EXPRESSED IN HBL100, SIGNAL = 9.7; EXPRESSED IN HEART, SIGNAL = 7.8; EXPRESSED IN FETAL LIVER, SIGNAL =  10; EXPRESSED IN LUNG, SIGNAL =  11; EXPRESSED IN BRAIN, SIGNAL =   9; EXPRESSED IN HELA, SIGNAL =  11; EXPRESSED IN PLACENTA, SIGNAL =  11; EXPRESSED IN BT474, SIGNAL = 9.4; EXPRESSED IN ADULT LIVER, SIGNAL =  14; EXPRESSED IN BONE MARROW, SIGNAL = 9.8; EST_HUMAN HIT: AA401438.1, EVALUE 1.00e-51; SWISSPROT HIT: P10108, EVALUE 4.50e+00
DWKSHFRSLAQKFRNFNWCHVTCLAVTTPILTAKNSRAAFHGPIRELRLPDKLAPCSEETGTSRERQHLRAAHPEQKLLDKLALAEKLDNMQDQIGDISRKMETIIKKKC

SEQ ID NO: 37304 - protein, 20 aa, Homo sapiens
  MAP TO AC010958.2; EXPRESSED IN HBL100, SIGNAL = 9.7; EXPRESSED IN HEART, SIGNAL = 7.8; EXPRESSED IN FETAL LIVER, SIGNAL =  10; EXPRESSED IN LUNG, SIGNAL =  11; EXPRESSED IN BRAIN, SIGNAL =   9; EXPRESSED IN HELA, SIGNAL =  11; EXPRESSED IN PLACENTA, SIGNAL =  11; EXPRESSED IN BT474, SIGNAL = 9.4; EXPRESSED IN ADULT LIVER, SIGNAL =  14; EXPRESSED IN BONE MARROW, SIGNAL = 9.8; EST_HUMAN HIT: AA400006.1, EVALUE 1.00e-03
IGSLTLGAWLRSSATSTGVM

SEQ ID NO: 37305 - protein, 34 aa, Homo sapiens
  MAP TO AC009294.6; EXPRESSED IN BONE MARROW, SIGNAL = 1.6; EXPRESSED IN LUNG, SIGNAL = 1.8; EXPRESSED IN HELA, SIGNAL = 1.6; EXPRESSED IN BRAIN, SIGNAL = 1.8; EXPRESSED IN PLACENTA, SIGNAL = 1.6; EXPRESSED IN HBL100, SIGNAL = 1.8; EXPRESSED IN HEART, SIGNAL = 1.5; EXPRESSED IN BT474, SIGNAL = 1.6; EXPRESSED IN ADULT LIVER, SIGNAL = 1.8; EXPRESSED IN FETAL LIVER, SIGNAL = 1.6
LLSLSYIHDFILIFDLHNTSERQLGEYTITPIVQ

SEQ ID NO: 37306 - protein, 70 aa, Homo sapiens
  MAP TO AC009294.6; EXPRESSED IN BONE MARROW, SIGNAL = 1.6; EXPRESSED IN LUNG, SIGNAL = 1.8; EXPRESSED IN HELA, SIGNAL = 1.6; EXPRESSED IN BRAIN, SIGNAL = 1.8; EXPRESSED IN PLACENTA, SIGNAL = 1.6; EXPRESSED IN HBL100, SIGNAL = 1.8; EXPRESSED IN HEART, SIGNAL = 1.5; EXPRESSED IN BT474, SIGNAL = 1.6; EXPRESSED IN ADULT LIVER, SIGNAL = 1.8; EXPRESSED IN FETAL LIVER, SIGNAL = 1.6; SWISSPROT HIT: Q27969, EVALUE 2.10e+00; EST_HUMAN HIT: BE080166.1, EVALUE 2.40e-01
PGAHSGLCWEQWVILMDCLPLSLCSPQGEISIAILLHILGKPPMTLSTSIQRPLHTPIQNLDTLISLQCS

SEQ ID NO: 37307 - protein, 31 aa, Homo sapiens
  MAP TO AC010877.2; EXPRESSED IN BONE MARROW, SIGNAL = 1.2; EXPRESSED IN BRAIN, SIGNAL = 1.2; EXPRESSED IN LUNG, SIGNAL = 1.4; EXPRESSED IN HEART, SIGNAL = 1.6; EXPRESSED IN HELA, SIGNAL = 1.8; EXPRESSED IN HBL100, SIGNAL =   2; EXPRESSED IN PLACENTA, SIGNAL = 1.4; EXPRESSED IN ADULT LIVER, SIGNAL = 1.3; EXPRESSED IN FETAL LIVER, SIGNAL = 1.5; EXPRESSED IN BT474, SIGNAL = 1.6; EST_HUMAN HIT: AI338078.1, EVALUE 1.00e-03
SPNHFGGRRSGRGSFFNPGTSMIFVCCYQTH

SEQ ID NO: 37308 - protein, 131 aa, Homo sapiens
  MAP TO AL033377.2; EXPRESSED IN BT474, SIGNAL = 5.3; EXPRESSED IN BRAIN, SIGNAL =   6; EXPRESSED IN BONE MARROW, SIGNAL = 6.1; EXPRESSED IN HELA, SIGNAL = 5.5; EXPRESSED IN ADULT LIVER, SIGNAL = 7.9; EXPRESSED IN FETAL LIVER, SIGNAL = 6.5; EXPRESSED IN LUNG, SIGNAL =   7; EXPRESSED IN PLACENTA, SIGNAL = 8.3; EXPRESSED IN HEART, SIGNAL = 5.5; EXPRESSED IN HBL100, SIGNAL = 6.7; SWISSPROT HIT: Q61549, EVALUE 6.00e-03; EST_HUMAN HIT: AA401566.1, EVALUE 1.00e-28; EST_HUMAN HIT: AA401566.1, EVALUE 1.00e-28
RHLRGKSAVAQTKLRKVLGKQDMVINLFFFLISSFLSCWIQDPVIFYVTCAGYFGVMFFLNIAMFIVVMVQICGRNGKRSNRTLREEVLRNLRSVVSLTFLLGMTWGFAFFAWGPLNIPFMYLFSIFNSLQ

SEQ ID NO: 37309 - protein, 51 aa, Homo sapiens
  MAP TO AC010885.2; EXPRESSED IN FETAL LIVER, SIGNAL = 1.5; EXPRESSED IN ADULT LIVER, SIGNAL = 1.9; EXPRESSED IN LUNG, SIGNAL = 1.3; EXPRESSED IN BONE MARROW, SIGNAL = 1.7; EXPRESSED IN BRAIN, SIGNAL = 1.5; EXPRESSED IN PLACENTA, SIGNAL = 1.5; EXPRESSED IN HELA, SIGNAL = 1.6; EXPRESSED IN BT474, SIGNAL = 1.5; EXPRESSED IN HEART, SIGNAL = 1.7; EXPRESSED IN HBL100, SIGNAL = 1.7
KETKKRERKGGERDGKKKKGKKEERKEGWKQRRKKGRKEAVISKFYLPFFQ

SEQ ID NO: 37310 - protein, 21 aa, Homo sapiens
  MAP TO AC009492.2; EXPRESSED IN BONE MARROW, SIGNAL = 3.7; EXPRESSED IN HELA, SIGNAL = 4.8; EXPRESSED IN PLACENTA, SIGNAL = 5.5; EXPRESSED IN HEART, SIGNAL = 2.8; EXPRESSED IN BT474, SIGNAL = 3.5; EXPRESSED IN BRAIN, SIGNAL = 3.2; EXPRESSED IN HBL100, SIGNAL = 1.9; EXPRESSED IN ADULT LIVER, SIGNAL = 4.5; EXPRESSED IN FETAL LIVER, SIGNAL = 4.1; EXPRESSED IN LUNG, SIGNAL = 4.4
SPAKTRSKQSRVQTAAGVKKL

SEQ ID NO: 37311 - protein, 59 aa, Homo sapiens
  MAP TO AC010892.2; EXPRESSED IN BRAIN, SIGNAL = 1.9; EXPRESSED IN PLACENTA, SIGNAL = 1.9; EXPRESSED IN HBL100, SIGNAL = 2.1; EXPRESSED IN HELA, SIGNAL = 1.8; EXPRESSED IN HEART, SIGNAL = 2.1; EXPRESSED IN BT474, SIGNAL = 1.9; EXPRESSED IN ADULT LIVER, SIGNAL = 2.1; EXPRESSED IN FETAL LIVER, SIGNAL = 1.9; EXPRESSED IN BONE MARROW, SIGNAL =   2; EXPRESSED IN LUNG, SIGNAL = 1.9; SWISSPROT HIT: P27209, EVALUE 7.60e+00
TGRKQHKQPEHVHPVNPQRVDICFIAAFKNLAVNRIRRGKGIDTSPFATDDWWGEEEAP

SEQ ID NO: 37312 - protein, 27 aa, Homo sapiens
  MAP TO AC010892.2; EXPRESSED IN BRAIN, SIGNAL = 1.9; EXPRESSED IN PLACENTA, SIGNAL = 1.9; EXPRESSED IN HBL100, SIGNAL = 2.1; EXPRESSED IN HELA, SIGNAL = 1.8; EXPRESSED IN HEART, SIGNAL = 2.1; EXPRESSED IN BT474, SIGNAL = 1.9; EXPRESSED IN ADULT LIVER, SIGNAL = 2.1; EXPRESSED IN FETAL LIVER, SIGNAL = 1.9; EXPRESSED IN BONE MARROW, SIGNAL =   2; EXPRESSED IN LUNG, SIGNAL = 1.9; EST_HUMAN HIT: AI188242.1, EVALUE 3.20e+00
WPKAAQTAGTCSPSKPPKSRHLFYCCF

SEQ ID NO: 37313 - protein, 54 aa, Homo sapiens
  MAP TO AP000124.1; EXPRESSED IN ADULT LIVER, SIGNAL =   1; EXPRESSED IN HEART, SIGNAL = 0.84; EST_HUMAN HIT: BE935356.1, EVALUE 9.70e-01
PPVKKDAGLGQHNTCRDANAVLLPSHKKCQSQSTRKDPDTFISIRSSSPKVDAQ

SEQ ID NO: 37314 - protein, 36 aa, Homo sapiens; identical to SEQ ID NO: 36588
  MAP TO AC010899.2; EXPRESSED IN LUNG, SIGNAL =   1; EXPRESSED IN BRAIN, SIGNAL = 1.1; EXPRESSED IN HBL100, SIGNAL = 0.97; EXPRESSED IN HEART, SIGNAL = 1.2; SWISSPROT HIT: P54764, EVALUE 2.20e+00

SEQ ID NO: 37315 - protein, 37 aa, Homo sapiens
  MAP TO AC010899.2; EXPRESSED IN LUNG, SIGNAL =   1; EXPRESSED IN BRAIN, SIGNAL = 1.1; EXPRESSED IN HBL100, SIGNAL = 0.97; EXPRESSED IN HEART, SIGNAL = 1.2; SWISSPROT HIT: Q05017, EVALUE 4.90e+00
PSGLCLGQCGAGGNSHCSFCHQPEVSTEATHCAAPDL

SEQ ID NO: 37316 - protein, 54 aa, Homo sapiens
  MAP TO AC010906.2; EXPRESSED IN HELA, SIGNAL = 5.7; EXPRESSED IN HBL100, SIGNAL = 5.5; EXPRESSED IN HEART, SIGNAL = 5.1; EXPRESSED IN FETAL LIVER, SIGNAL = 5.3; EXPRESSED IN BONE MARROW, SIGNAL = 6.5; EXPRESSED IN LUNG, SIGNAL = 5.1; EXPRESSED IN BRAIN, SIGNAL = 4.2; EXPRESSED IN PLACENTA, SIGNAL = 4.7; EXPRESSED IN ADULT LIVER, SIGNAL = 6.1; EXPRESSED IN BT474, SIGNAL = 5.1; EST_HUMAN HIT: AL119316.1, EVALUE 1.40e+00; SWISSPROT HIT: P13159, EVALUE 6.10e+00; EST_HUMAN HIT: AL119316.1, EVALUE 1.40e+00
VAHPSPTLFWRPLWTTPGVSVVTSISECSSTGEQSSTPSVSSILATKTLNFNAV

SEQ ID NO: 37317 - protein, 62 aa, Homo sapiens
  MAP TO AC012354.2; EXPRESSED IN BONE MARROW, SIGNAL = 2.4; EXPRESSED IN HBL100, SIGNAL = 3.4; EXPRESSED IN HELA, SIGNAL = 4.4; EXPRESSED IN HEART, SIGNAL = 2.4; EXPRESSED IN BRAIN, SIGNAL =   2; EXPRESSED IN LUNG, SIGNAL = 3.1; EXPRESSED IN PLACENTA, SIGNAL = 2.5; EXPRESSED IN BT474, SIGNAL = 2.1; EXPRESSED IN ADULT LIVER, SIGNAL = 2.3; EXPRESSED IN FETAL LIVER, SIGNAL = 2.4; SWISSPROT HIT: P31433, EVALUE 3.40e+00; EST_HUMAN HIT: AW973064.1, EVALUE 2.00e-28
MKQVVTQTRWMRPDAKRANRRHRRISGKVFAWDPLPNTRFSRILKAVRESTKRPEPCRPPWM

SEQ ID NO: 37318 - protein, 51 aa, Homo sapiens
  MAP TO AC012354.2; EXPRESSED IN BONE MARROW, SIGNAL = 2.4; EXPRESSED IN HBL100, SIGNAL = 3.4; EXPRESSED IN HELA, SIGNAL = 4.4; EXPRESSED IN HEART, SIGNAL = 2.4; EXPRESSED IN BRAIN, SIGNAL =   2; EXPRESSED IN LUNG, SIGNAL = 3.1; EXPRESSED IN PLACENTA, SIGNAL = 2.5; EXPRESSED IN BT474, SIGNAL = 2.1; EXPRESSED IN ADULT LIVER, SIGNAL = 2.3; EXPRESSED IN FETAL LIVER, SIGNAL = 2.4; SWISSPROT HIT: P35663, EVALUE 3.50e+00; EST_HUMAN HIT: AA745462.1, EVALUE 1.00e-18
SCSPSLPSRFWRILCLAKDPKQRPSLRFSCASCWLSLHLASSTESVSPPAS

SEQ ID NO: 37319 - protein, 5701 aa, Homo sapiens
  MAP TO AC010680.3; EXPRESSED IN BONE MARROW, SIGNAL =   1; EXPRESSED IN BRAIN, SIGNAL = 0.95; EXPRESSED IN HBL100, SIGNAL = 0.94; EXPRESSED IN HEART, SIGNAL = 3.8; EXPRESSED IN FETAL LIVER, SIGNAL =   1; EXPRESSED IN ADULT LIVER, SIGNAL =   1; SWISSPROT HIT: P16419, EVALUE 2.00e-73; EST_HUMAN HIT: AW384459.1, EVALUE 5.00e-90; EST_HUMAN HIT: AW384459.1, EVALUE 5.00e-90
PPGPPSNPHVTDTTKKSASLAWGKPHYDGGLEITGYVVEHQKVGDEAWIKDTTGTALRITQFVVPDLQTKEKYNFRISAINDAGVGEPAVIPDVEIVEREMAPDFELDAELRRTLVVRAGLSIRIFVPIKGRPAPEVTWTKDNINLKNRANIENTESFTLLIIPECNRYDTGKFVMTIENPAGKKSGFVNVRVLDTPGPVLNLRPTDITKDSVTLHWDLPLIDGGSRITNYIVEKREATRKSYSTATTKCHKCTYKVTGLSEGCEYFFRVMAENEYGIGEPTETTEPVKASEAPSPPDSLNIMDITKSTVSLAWPKPKHDGGSKITGYVIEAQRKGSDQWTHITTVKGLECVVRNLTEGEEYTFQVMAVNSAGRSAPRESRPVIVKEQTMLPELDLRGIYQKLVIAKAGDNIKVEIPVLGRPKPTVTWKKGDQILKQTQRVNFETTATSTILNINECVRSDSGPYPLTARNIVGEVGDVITIQVHDIPGPPTGPIKFDEVSSDFVTFSWDPPENDGGVPISNYVVEMRQTDSTTWVELATTVIRTTYKATRLTTGLEYQFRVKAQNRYGVGPGITSACIVANYPFKVPGPPGTPQVTAVTKDSMTISWHEPLSDGGSPILGYHVERKERNGILWQTVSKALVPGNIFKSSGLTDGIAYEFRVIAENMAGKSKPSKPSEPMLALDPIDPPGKPVPLNITRHTVTLKWAKPEYTGGFKITSYIVEKRDLPNGRWLKANFSNILENEFTVSGLTEDAAYEFRVIAKNAAGAISPPSEPSDAITCRDDVEAPKIKVDVKFKDTVILKAGEAFRLEADVSGRPPPTMEWSKDGKELEGTAKLEIKIADFSTNLVNKDSTRRDSGAYTLTATNPGGFAKHIFNVKVLDRPGPPEGPLAVTEVTSEKCVLSWFPPLDDGGAKIDHYIVQKRETSRLAWTNVASEVQVTKLKVTKLLKGNEYIFRVMAVNKYGVGEPLESEPVLAVNPYGPPDPPKNPEVTTITKDSMVVCWGHPDSDGGSEIINYIVERRDKAGQRWIKCNKKTLTDLRYKVSGLTEGHEYEFRIMAENAAGISAPSPTSPFYKACDTVFKPGPPGNPRVLDTSRSSISIAWNKPIYDGGSEITGYMVEIALPEEDEWQIVTPPAGLKATSYTITGLTENQEYKIRIYAMNSEGLGEPALVPGTPKAEDRMLPPEIELDADLRKVVTIRACCTLRLFVPIKGRPAPEVKWARDHGESLDKASIESTSSYTLLIVGNVNRFDSGKYILTVENSSGSKSAFVNVRVLDTPGPPQDLKVKEVTKTSVTLTWDPPLLDGGSKIKNYIVEKRESTRKAYSTVATNCHKTSWKVDQLQEGCSYYFRVLAENEYGIGLPAETAESVKASERPLPPGKITLMDVTRNSVSLSWEKPEHDGGSRILGYIVEMQTKGSDKWATCATVKVTEATITGLIQGEEYSFRVSAQNEKGISDPRQLSVPVIAKDLVIPPAFKLLFNTFTVLAGEDLKVDVPFIGRPTPAVTWHKDNVPLKQTTRVNAESTENNSLLTIKDACREDVGHYVVKLTNSAGEAIETLNVIVLDKPGPPTGPVKMDEVTADSITLSWGPPKYDGGSSINNYIVEKRDTSTTTWQIVSATVARTTIKACRLKTGCEYQFRIAAENRYGKSTYLNSEPTVAQYPFKVPGPPGTPVVTLSSRDSMEVQWNEPISDGGSRVIGYHLERKERNSILWVKLNKTPIPQTKFKTTGLEEGVEYEFRVSAENIVGIGKPSKVSECYVARDPCDPPGRPEAIIVTRNSVTLQWKKPTYDGGSKITGYIVEKKELPEGRWMKASFTNIIDTHFEVTGLVEDHRYEFRVIARNAAGVFSEPSESTGAITARDEVDPPRISMDPKYKDTIVVHAGESFKVDADIYGKPIPTIQWIKGDQELSNTARLEIKSTDFATSLSVKDAVRVDSGNYILKAKNVAGERSVTVNVKVLDRPGPPEGPVVISGVTAEKCTLAWKPPLQDGGSDIINYIVERRETSRLVWTVVDANVQTLSCKVTKLLEGNEYTFRIMAVNKYGVGEPLESEPVVAKNPFVVPDAPKAPEVTTVTKDSMIVVWERPASDGGSEILGYVLEKRDKEGIRWTRCHKRLIGELRLRVTGLIENHDYEFRVSAENAAGLSEPSPPSAYQKACDPIYKPGPPNNPKVIDITRSSVFLSWSKPIYDGGCEIQGYIVEKCDVSVGEWTMCTPPTGINKTNIEVEKLLEKHEYNFRICAINKAGVGEHADVPGPIIVEEKLEAPDIDLDLELRKIINIRAGGSLRLFVPIKGRPTPEVKWGKVDGEIRDAAIIDVTSSFTSLVLDNVNRYDSGKYTLTLENSSGTKSAFVTVRVLDTPSPPVNLKVTEITKDSVSITWEPPLLDGGSKIKNYIVEKREATRKSYAAVVTNCHKNSWKIDQLQEGCSYYFRVTAENEYGIGLPAQTADPIKVAEVPQPPGKITVDDVTRNSVSLSWTKPEHDGGSKIIQYIVEMQAKHSEKWSECARVKSLQAVITNLTQGEEYLFRVVAVNEKGRSDPRSLAVPIVAKDLVIEPDVKPAFSSYSVQVGQDLKIEVPISGRPKPTITWTKDGLPLKQTTRINVTDSLDLTTLSIKETHKDDGGQYGITVANVVGQKTASIEIVTLDKPDPPKGPVKFDDVSAESITLSWNPPLYTGGCQITNYIVQKRDTTTTVWDVVSATVARTTLKVTKLKTGTEYQFRIFAENRYGQSFALESDPIVAQYPYKEPGPPGTPFATAISKDSMVIQWHEPVNNGGSPVIGYHLERKERNSILWTKVNKTIIHDTQFKAQNLEEGIEYEFRVYAENIVGVGKASKNSECYVARDPCDPPGTPEPIMVKRNEITLQWTKPVYDGGSMITGYIVEKRDLPDGRWMKASFTNVIETQFTVSGLTEDQRYEFRVIAKNAAGAISKPSDSTGPITAKDEVELPRISMDPKFRDTIVVNAGETFRLEADVHGKPLPTIEWLRGDKEIEESARCEIKNTDFKALLIVKDAIRIDGGQYILRASNVAGSKSFPVNVKVLDRPGPPEGPVQVTGVTSEKCSLTWSPPLQDGGSDISHYVVEKRETSRLAWTVVASEVVTNSLKVTKLLEGNEYVFRIMAVNKYGVGEPLESAPVLMKNPFVLPGPPKSLEVTNIAKDSMTVCWNRPDSDGGSEIIGYIVEKRDRSGIRWIKCNKRRITDLRLRVTGLTEDHEYEFRVSAENAAGVGEPSPATVYYKACDPVFKPGPPTNAHIVDTTKNSITLAWGKPIYDGGSEILGYVVEICKADEEEWQIVTPQTGLRVTRFEISKLTEHQEYKIRVCALNKVGLGEATSVPGTVKPEDKLEAPELDLDSELRKGIVVRAGGSARIHIPFKGRPTPEITWSREEGEFTDKVQIEKGVNYTQLSIDNCDRNDAGKYILKLENSSGSKSAFVTVKVLDTPGPPQNLAVKEVRKDSAFLVWEPPIIDGGAKVKNYVIDKRESTRKAYANVSSKCSKTSFKVENLTEGAIYYFRVMAENEFGVGVPVETVDAVKAAEPPSPPGKVTLTDVSQTSASLMWEKPEHDGGSRVLGYVVEMQPKGTEKWSIVAESKVCNAVVTGLSSGQEYQFRVKAYNEKGKSDPRVLGVPVIAKDLTIQPSLKLPFNTYSIQAGEDLKIEIPVIGRPRPNISWVKDGEPLKQTTRVNVEETATSTVLHIKEGNKDDFGKYTVTATNSAGTATENLSVIVLEKPGPPVGPVRFDEVSADFVVISWEPPAYTGGCQISNYIVEKRDTTTTTWHMVSATVARTTIKITKLKTGTEYQFRIFAENRYGKSAPLDSKAVIVQYPFKEPGPPGTPFVTSISKDQMLVQWHEPVNDGGTKIIGYHLEQKEKNSILWVKLNKTPIQDTKFKTTGLDEGLEYEFKVSAENIVGIGKPSKVSECFVARDPCDPPGRPEAIVITRNNVTLKWKKPAYDGGSKITGYIVEKKDLPDGRWMKASFTNVLETEFTVSGLVEDQRYEFRVIARNAAGNFSEPSDSSGAITARDEIDAPNASLDPKYKDVIVVHAGETFVLEADIRGKPIPDVVWSKDGKELEETAARMEIKSTIQKTTLVVKDCIRTDGGQYILKLSNVGGTKSIPITVKVLDRPGPPEGPLKVTGVTAEKCYLAWNPPLQDGGANISHYIIEKRETSRLSWTQVSTEVQALNYKVTKLLPGNEYIFRVMAVNKYGIGEPLESGPVTACNPYKPPGPPSTPEVSAITKDSMVVTWARPVDDGGTEIEGYILEKRDKEGVRWTKCNKKTLTDLRLRVTGLTEGHSYEFRVAAENAAGVGEPSEPSVFYRACDALYPPGPPSNPKVTDTSRSSVSLAWSKPIYDGGAPVKGYVVEVKEAAADEWTTCTPPTGLQGKQFTVTKLKENTEYNFRICAINSEGVGEPATLPGSVVAQERIEPPEIELDADLRKVVVLRASATLRLFVTIKGRPEPEVKWEKAEGILTDRAQIEVTSSFTMLVIDNVTRFDSGRYNLTLENNSGSKTAFVNVRVLDSPSAPVNLTIREVKKDSVTLSWEPPLIDGGAKITNYIVEKRETTRKAYATITNNCTKTTFRIENLQEGCSYYFRVLASNEYGIGLPAETTEPVKVSEPPLPPGRVTLVDVTRNTATIKWEKPESDGGSKITGYVVEMQTKGSEKWSTCTQVKTLEATISGLTAGEEYVFRVAAVNEKGRSDPRQLGVPVIARDIEIKPSVELPFHTFNVKAREQLKIDVPFKGRPQATVNWRKDGQTLKETTRVNVSSSKTVTSLSIKEASKEDVGTYELCVSNSAGSITVPITIIVLDRPGPPGPIRIDEVSCDSITISWNPPEYDGGCQISNYIVEKKETTSTTWHIVSQAVARTSIKIVRLTTGSEYQFRVCAENRYGKSSYSESSAVVAEYPFSPPGPPGTPKVVHATKSTMLVTWQVPVNDGGSRVIGYHLEYKERSSILWSKANKILIADTQMKVSGLDEGLMYEYRVYAENIAGIGKCSKSCEPVPARDPCDPPGQPEVTNITRKSVSLKWSKPHYDGGAKITGYIVERRELPDGRWLKCNYTNIQETYFEVTELTEDQRYEFRVFARNAADSVSEPSESTGPIIVKDDVEPPRVMMDVKFRDVIVVKAGEVLKINADIAGRPLPVISWAKDGIEIEERARTEIISTDNHTLLTVKDCIRRDTGQYVLTLKNVAGTRSVAVNCKVLDKPGPPAGPLEINGLTAEKCSLSWGRPQEDGGADIDYYIVEKRETSHLAWTICEGELQMTSCKVTKLLKGNEYIFRVTGVNKYGVGEPLESVAIKALDPFTVPSPPTSLEITSVTKESMTLCWSRPESDGGSEISGYIIERREKNSLRWVRVNKKPVYDLRVKSTGLREGCEYEYRVYAENAAGLSLPSETSPLIRAEDPVFLPSPPSKPKIVDSGKTTITIAWVKPLFDGGAPITGYTVEYKKSDDTDWKTSIQSLRGTEYTISGLTTGAEYVFRVKSVNKVGASDPSDSSDPQIAKEREEEPLFDIDSEMRKTLIVKAGASFTMTVPFRGRPVPNVLWSKPDTDLRTRAYVDTTDSRTSLTIENANRNDSGKYTLTIQNVLSAASLTLVVKVLDTPGPPTNITVQDVTKESAVLSWDVPENDGGAPVKNYHIEKREASKKAWVSVTNNCNRLSYKVTNLQEGAIYYFRVSGENEFGVGIPAETKEGVKIT

SEQ ID NO: 37320 - protein, 20 aa, Homo sapiens
  MAP TO AC010680.3; EXPRESSED IN BONE MARROW, SIGNAL =   1; EXPRESSED IN BRAIN, SIGNAL = 0.95; EXPRESSED IN HBL100, SIGNAL = 0.94; EXPRESSED IN HEART, SIGNAL = 3.8; EXPRESSED IN FETAL LIVER, SIGNAL =   1; EXPRESSED IN ADULT LIVER, SIGNAL =   1
FNTVHSRVPIFYLNYPKAKL

SEQ ID NO: 37321 - protein, 47 aa, Homo sapiens
  MAP TO AL049633.3; EXPRESSED IN BRAIN, SIGNAL = 3.2; EXPRESSED IN BONE MARROW, SIGNAL = 3.3; EXPRESSED IN LUNG, SIGNAL = 3.6; EXPRESSED IN HBL100, SIGNAL = 3.5; EXPRESSED IN PLACENTA, SIGNAL = 3.1; EXPRESSED IN FETAL LIVER, SIGNAL = 4.1; EXPRESSED IN ADULT LIVER, SIGNAL =   5; EXPRESSED IN HEART, SIGNAL = 2.9; EXPRESSED IN HELA, SIGNAL = 3.5; EXPRESSED IN BT474, SIGNAL = 3.3; EST_HUMAN HIT: AA115838.1, EVALUE 2.60e+00
SLACTLAQDRSSKPLSPQSLACKLAQNRSPKPLSKILNKHGMASDIH

SEQ ID NO: 37322 - protein, 32 aa, Homo sapiens
  MAP TO AL049633.3; EXPRESSED IN BRAIN, SIGNAL = 3.2; EXPRESSED IN BONE MARROW, SIGNAL = 3.3; EXPRESSED IN LUNG, SIGNAL = 3.6; EXPRESSED IN HBL100, SIGNAL = 3.5; EXPRESSED IN PLACENTA, SIGNAL = 3.1; EXPRESSED IN FETAL LIVER, SIGNAL = 4.1; EXPRESSED IN ADULT LIVER, SIGNAL =   5; EXPRESSED IN HEART, SIGNAL = 2.9; EXPRESSED IN HELA, SIGNAL = 3.5; EXPRESSED IN BT474, SIGNAL = 3.3
KGFGLLFCASLHARLWGDKGFELLSCASVHAR

SEQ ID NO: 37323 - protein, 58 aa, Homo sapiens
  MAP TO AC010930.2; EXPRESSED IN BT474, SIGNAL = 1.4; EXPRESSED IN ADULT LIVER, SIGNAL = 1.2; EXPRESSED IN BRAIN, SIGNAL = 1.3; EXPRESSED IN BONE MARROW, SIGNAL = 1.6; EXPRESSED IN LUNG, SIGNAL = 1.3; EXPRESSED IN HELA, SIGNAL = 1.3; EXPRESSED IN PLACENTA, SIGNAL = 1.3; EXPRESSED IN HBL100, SIGNAL = 1.5; EXPRESSED IN HEART, SIGNAL = 1.7; EXPRESSED IN FETAL LIVER, SIGNAL = 1.5; EST_HUMAN HIT: BE179276.1, EVALUE 1.20e-01
FPAHWHPWPGIPAHLALHPLWLHVPGSCAGEHNHPGSGKDGVQPASAHVLLPVHVGCH

SEQ ID NO: 37324 - protein, 61 aa, Homo sapiens
  MAP TO AF002223.1; EXPRESSED IN PLACENTA, SIGNAL = 1.7; EXPRESSED IN HELA, SIGNAL = 1.7; EXPRESSED IN ADULT LIVER, SIGNAL = 1.6; EXPRESSED IN FETAL LIVER, SIGNAL = 1.8; EXPRESSED IN BRAIN, SIGNAL = 1.5; EXPRESSED IN HEART, SIGNAL = 1.5; EXPRESSED IN BT474, SIGNAL = 1.3; EXPRESSED IN LUNG, SIGNAL =   2; EXPRESSED IN BONE MARROW, SIGNAL = 1.5; EXPRESSED IN HBL100, SIGNAL = 1.6; EST_HUMAN HIT: AW503613.1, EVALUE 1.00e-29; SWISSPROT HIT: Q13613, EVALUE 1.00e-30
IADKIESGKTSVVVHCSDGWDRTAQLTSLAMLMLDSYYRTIKGFETLVEKEWISFGHRFAL

SEQ ID NO: 37325 - protein, 259 aa, Homo sapiens
  MAP TO AC007228.1; EXPRESSED IN HEART, SIGNAL = 1.1; EXPRESSED IN BT474, SIGNAL = 1.3; EXPRESSED IN FETAL LIVER, SIGNAL = 0.98; SWISSPROT HIT: Q99676, EVALUE 4.00e-56; EST_HUMAN HIT: AW966605.1, EVALUE 3.00e-53
LECVWVTKSLSLNQDIYEEKLPPAIIMERLKSYDLECSTLGKNWKCEDLFERELVNQKTHFRQETITHIDTLIEKRDHSNKSGTVFHLNTLSYIKQIFPMEERIFNFHTDKKSLKTHSVVKKHKQDRGEKKLLKCNDCEKIFSKISTLTLHQRIHTGEKPYECIECGKAFSQSAHLAQHQRIHTGEKPFECTECGKAFSQNAHLVQHQRVHTGEKPYQCKQCNKAFSQLAHLAQHQRVHTGEKPYECIECGKAFSDCSS

SEQ ID NO: 37326 - protein, 26 aa, Homo sapiens
  MAP TO AL049691.17; EXPRESSED IN PLACENTA, SIGNAL = 1.8; EXPRESSED IN HEART, SIGNAL =   2; EXPRESSED IN LUNG, SIGNAL = 1.7; EXPRESSED IN BRAIN, SIGNAL = 1.8; EXPRESSED IN BONE MARROW, SIGNAL =   2; EXPRESSED IN HBL100, SIGNAL = 3.3; EXPRESSED IN HELA, SIGNAL = 1.8; EXPRESSED IN BT474, SIGNAL = 1.8; EXPRESSED IN ADULT LIVER, SIGNAL = 2.4; EXPRESSED IN FETAL LIVER, SIGNAL = 1.9
STAGEVVEMNKMEGLSGHSKRDRGRE

SEQ ID NO: 37327 - protein, 24 aa, Homo sapiens
  MAP TO AC010951.3; EXPRESSED IN HBL100, SIGNAL = 1.2; EXPRESSED IN HEART, SIGNAL = 1.3; EXPRESSED IN FETAL LIVER, SIGNAL = 1.3; EXPRESSED IN ADULT LIVER, SIGNAL = 1.2; EXPRESSED IN LUNG, SIGNAL = 1.5; EXPRESSED IN BRAIN, SIGNAL = 1.1; EXPRESSED IN PLACENTA, SIGNAL = 1.2; EXPRESSED IN BT474, SIGNAL = 1.1; EXPRESSED IN BONE MARROW, SIGNAL = 1.3; EXPRESSED IN HELA, SIGNAL =  11
SPLPHPSTAICSGMGLSLKLVQSD

SEQ ID NO: 37328 - protein, 38 aa, Homo sapiens
  MAP TO AC011281.2; EXPRESSED IN BT474, SIGNAL = 5.3; EXPRESSED IN ADULT LIVER, SIGNAL = 6.1; EXPRESSED IN BRAIN, SIGNAL = 6.4; EXPRESSED IN BONE MARROW, SIGNAL = 5.9; EXPRESSED IN LUNG, SIGNAL = 7.8; EXPRESSED IN HELA, SIGNAL = 6.4; EXPRESSED IN PLACENTA, SIGNAL = 6.6; EXPRESSED IN HBL100, SIGNAL = 6.3; EXPRESSED IN HEART, SIGNAL = 5.1; EXPRESSED IN FETAL LIVER, SIGNAL =   7; SWISSPROT HIT: Q09376, EVALUE 4.70e+00
HRHIIGRLQKTKNKKFYLNEQDKKHYLQNSNNKRDEFQ

SEQ ID NO: 37329 - protein, 178 aa, Homo sapiens
  MAP TO AL035660.11; EXPRESSED IN HEART, SIGNAL = 0.87; SWISSPROT HIT: P04279, EVALUE 2.00e-87; EST_HUMAN HIT: BE973809.1, EVALUE 9.00e-86
ELLVYNKNQHQTKNLNQDQQHGRKANKISYQSSSTEERRLHYGENGVQKDVSQSSIYSQTEEKAQGKSQKQITIPSQEQEHSQKANKISYQSSSTEERRLHYGENGVQKDVSQRSIYSQTEKLVAGKSQIQAPNPKQEPWHGENAKGESGQSTNREQTYSVMNKKADTNMDLMGDWIL

SEQ ID NO: 37330 - protein, 82 aa, Homo sapiens
  MAP TO AL035534.1; EXPRESSED IN BONE MARROW, SIGNAL = 0.64; EXPRESSED IN FETAL LIVER, SIGNAL = 0.61; EXPRESSED IN ADULT LIVER, SIGNAL = 0.75; EXPRESSED IN HEART, SIGNAL = 0.86; SWISSPROT HIT: P75575, EVALUE 8.60e-01; EST_HUMAN HIT: BF061862.1, EVALUE 3.00e-24
DRCLDIKMKGLGIKNILRNLDNGAKYLSRKVEICILTEDESVKTTVPRRQNSSEHYLKQLCRHLGKMPHNPNRGLTEVRTLI

SEQ ID NO: 37331 - protein, 453 aa, Homo sapiens
  MAP TO AL031058.1; EXPRESSED IN LUNG, SIGNAL = 1.1; EXPRESSED IN HELA, SIGNAL =   5; EXPRESSED IN HBL100, SIGNAL = 1.3; EXPRESSED IN PLACENTA, SIGNAL = 8.1; EXPRESSED IN HEART, SIGNAL = 8.2; EXPRESSED IN ADULT LIVER, SIGNAL = 1.1; EXPRESSED IN BT474, SIGNAL =  14; EXPRESSED IN FETAL LIVER, SIGNAL = 1.6; EST_HUMAN HIT: BE931734.1, EVALUE 1.00e-75; SWISSPROT HIT: P15924, EVALUE 0.00e+00
ASNRIQESKNQCTQVVQERESLLVKIKVLEQDKARLQRLEDELNRAKSTLEAETRVKQRLECEKQQIQNDLNQWKTQYSRKEEAIRKIESEREKSEREKNSLRSEIERLQAEIKRIEERCRRKLEDSTRETQSQLETERSRYQREIDKLRQRPYGSHRETQTECEWTVDTSKLVFDGLRKKVTAMQLYECQLIDKTTLDKLLKGKKSVEEVASEIQPFLRGAGSIAGASASPKEKYSLVEAKRKKLISPESTVMLLEAQAATGGIIDPHRNEKLTVDSAIARDLIDFDDRQQIYAAEKAITGFDDPFSGKTVSVSEAIKKNLIDRETGMRLLEAQIASGGVVDPVNSVFLPKDVALARGLIDRDLYRSLNDPRDSQKNFVDPVTKKKVSYVQLKERCRIEPHTGLLLLSVQKRSMSFQGIRQPVTVTELVDSGILRPSTVNELESGQISYDEV

SEQ ID NO: 37332 - protein, 31 aa, Homo sapiens
  MAP TO AL031058.1; EXPRESSED IN LUNG, SIGNAL = 1.1; EXPRESSED IN HELA, SIGNAL =   5; EXPRESSED IN HBL100, SIGNAL = 1.3; EXPRESSED IN PLACENTA, SIGNAL = 8.1; EXPRESSED IN HEART, SIGNAL = 8.2; EXPRESSED IN ADULT LIVER, SIGNAL = 1.1; EXPRESSED IN BT474, SIGNAL =  14; EXPRESSED IN FETAL LIVER, SIGNAL = 1.6; EST_HUMAN HIT: BE837009.1, EVALUE 6.00e-11
SVYSGGTGKREPSGENQSPGARQGKAAEAGG

SEQ ID NO: 37333 - protein, 64 aa, Homo sapiens
  MAP TO AC011330.4; EXPRESSED IN BT474, SIGNAL = 6.4; EXPRESSED IN ADULT LIVER, SIGNAL = 9.4; EXPRESSED IN BRAIN, SIGNAL = 6.2; EXPRESSED IN BONE MARROW, SIGNAL = 6.9; EXPRESSED IN LUNG, SIGNAL =  13; EXPRESSED IN HELA, SIGNAL = 8.4; EXPRESSED IN PLACENTA, SIGNAL = 9.9; EXPRESSED IN HBL100, SIGNAL = 5.2; EXPRESSED IN HEART, SIGNAL = 6.7; EXPRESSED IN FETAL LIVER, SIGNAL = 8.7; EST_HUMAN HIT: AL121497.1, EVALUE 5.80e+00; SWISSPROT HIT: Q91049, EVALUE 1.50e+00
FPTAEWSACEPPGLRSSDSAGLYSLWTAARGAPAHQQLGVQVICEGAEGGGAEVKVDLLGKEGS

SEQ ID NO: 37334 - protein, 46 aa, Homo sapiens
  MAP TO AC011330.4; EXPRESSED IN BT474, SIGNAL = 6.4; EXPRESSED IN ADULT LIVER, SIGNAL = 9.4; EXPRESSED IN BRAIN, SIGNAL = 6.2; EXPRESSED IN BONE MARROW, SIGNAL = 6.9; EXPRESSED IN LUNG, SIGNAL =  13; EXPRESSED IN HELA, SIGNAL = 8.4; EXPRESSED IN PLACENTA, SIGNAL = 9.9; EXPRESSED IN HBL100, SIGNAL = 5.2; EXPRESSED IN HEART, SIGNAL = 6.7; EXPRESSED IN FETAL LIVER, SIGNAL = 8.7; SWISSPROT HIT: Q9ZEY9, EVALUE 6.00e+00
HVSHLDFVHLTALGYTLCGLRPEELQHISSWEFRSFVKGLRVVVLR

SEQ ID NO: 37335 - protein, 43 aa, Homo sapiens
  MAP TO AC012073.1; EXPRESSED IN FETAL LIVER, SIGNAL = 4.8; EXPRESSED IN BT474, SIGNAL = 3.4; EXPRESSED IN ADULT LIVER, SIGNAL = 4.6; EXPRESSED IN BRAIN, SIGNAL = 3.7; EXPRESSED IN BONE MARROW, SIGNAL = 4.3; EXPRESSED IN LUNG, SIGNAL = 5.3; EXPRESSED IN HELA, SIGNAL = 4.3; EXPRESSED IN PLACENTA, SIGNAL = 4.3; EXPRESSED IN HBL100, SIGNAL = 3.5; EXPRESSED IN HEART, SIGNAL = 3.9; EST_HUMAN HIT: AA323254.1, EVALUE 6.00e-17; SWISSPROT HIT: P21932, EVALUE 1.00e-19
ENLMLSILPKHVADEMLKDMKKDESQKDQQQFNTMYMYRHENV

SEQ ID NO: 37336 - protein, 29 aa, Homo sapiens
  MAP TO AC007460.1; EXPRESSED IN BONE MARROW, SIGNAL = 1.3; EXPRESSED IN LUNG, SIGNAL = 1.6; EXPRESSED IN PLACENTA, SIGNAL = 1.4; EXPRESSED IN HBL100, SIGNAL = 1.5; EXPRESSED IN HELA, SIGNAL = 1.5; EXPRESSED IN HEART, SIGNAL = 1.3; EXPRESSED IN ADULT LIVER, SIGNAL = 1.5; EXPRESSED IN BT474, SIGNAL = 1.7; EXPRESSED IN FETAL LIVER, SIGNAL = 1.4; EXPRESSED IN BRAIN, SIGNAL = 1.2; EST_HUMAN HIT: AA487859.1, EVALUE 1.00e-04; SWISSPROT HIT: P08547, EVALUE 3.00e-05
ENCRQISLMNTDANILNKVLANQIQQGIQ

SEQ ID NO: 37337 - protein, 55 aa, Homo sapiens
  MAP TO AC009721.9; EXPRESSED IN FETAL LIVER, SIGNAL = 8.7; EXPRESSED IN LUNG, SIGNAL = 8.9; EXPRESSED IN BONE MARROW, SIGNAL = 9.8; EXPRESSED IN PLACENTA, SIGNAL =  11; EXPRESSED IN HELA, SIGNAL = 8.7; EXPRESSED IN BT474, SIGNAL = 7.5; EXPRESSED IN ADULT LIVER, SIGNAL = 8.6; EXPRESSED IN BRAIN, SIGNAL = 9.1; EXPRESSED IN HEART, SIGNAL = 7.3; EXPRESSED IN HBL100, SIGNAL = 9.6; EST_HUMAN HIT: BE541441.1, EVALUE 3.00e-26; SWISSPROT HIT: P25167, EVALUE 2.00e-18
VGKLIELLAGKAGVLDGRFHYGTAFGGSKVKDVCEDLVRHGYNYLGKDYVTSGIT

SEQ ID NO: 37338 - protein, 49 aa, Homo sapiens
  MAP TO AC009721.9; EXPRESSED IN FETAL LIVER, SIGNAL = 8.7; EXPRESSED IN LUNG, SIGNAL = 8.9; EXPRESSED IN BONE MARROW, SIGNAL = 9.8; EXPRESSED IN PLACENTA, SIGNAL =  11; EXPRESSED IN HELA, SIGNAL = 8.7; EXPRESSED IN BT474, SIGNAL = 7.5; EXPRESSED IN ADULT LIVER, SIGNAL = 8.6; EXPRESSED IN BRAIN, SIGNAL = 9.1; EXPRESSED IN HEART, SIGNAL = 7.3; EXPRESSED IN HBL100, SIGNAL = 9.6; EST_HUMAN HIT: BE541441.1, EVALUE 1.00e-11; SWISSPROT HIT: P36616, EVALUE 7.80e+00
SRESACATGRCSLNLFTSCRWGSSLSCWLARPVCWTADSTTALRLEAVK

SEQ ID NO: 37339 - protein, 41 aa, Homo sapiens
  MAP TO AC007163.2; EXPRESSED IN BONE MARROW, SIGNAL = 1.5; EXPRESSED IN ADULT LIVER, SIGNAL =   2; EXPRESSED IN BT474, SIGNAL = 1.3; EXPRESSED IN BRAIN, SIGNAL = 1.4; EXPRESSED IN HEART, SIGNAL = 1.5; EXPRESSED IN HELA, SIGNAL = 1.5; EXPRESSED IN HBL100, SIGNAL = 1.5; EXPRESSED IN FETAL LIVER, SIGNAL =   1; SWISSPROT HIT: P48034, EVALUE 8.00e-11
VVCVGQIICAVVAETDVQAKRAAEKIKLTYEDLEPVIFTIK

SEQ ID NO: 37340 - protein, 53 aa, Homo sapiens
  MAP TO AC007489.2; EXPRESSED IN PLACENTA, SIGNAL = 9.1; EXPRESSED IN HELA, SIGNAL = 8.6; EXPRESSED IN HBL100, SIGNAL = 7.6; EXPRESSED IN HEART, SIGNAL = 6.6; EXPRESSED IN ADULT LIVER, SIGNAL =  12; EXPRESSED IN BT474, SIGNAL = 6.9; EXPRESSED IN FETAL LIVER, SIGNAL = 9.2; EXPRESSED IN BRAIN, SIGNAL = 7.4; EXPRESSED IN BONE MARROW, SIGNAL = 6.9; EXPRESSED IN LUNG, SIGNAL =  11
KSHVNTSTTKPLRTLILTTLLPSSGNLTNPRLHFNLFISMEASNGKLFASHLD

SEQ ID NO: 37341 - protein, 77 aa, Homo sapiens
  MAP TO AC012111.1; EXPRESSED IN FETAL LIVER, SIGNAL = 1.2; EXPRESSED IN BT474, SIGNAL =   1; EXPRESSED IN ADULT LIVER, SIGNAL = 1.1; EXPRESSED IN BRAIN, SIGNAL = 1.1; EXPRESSED IN BONE MARROW, SIGNAL = 1.2; EXPRESSED IN LUNG, SIGNAL = 1.1; EXPRESSED IN HELA, SIGNAL =   1; EXPRESSED IN PLACENTA, SIGNAL = 0.89; EXPRESSED IN HBL100, SIGNAL =   1; EXPRESSED IN HEART, SIGNAL = 1.1; EST_HUMAN HIT: BE778621.1, EVALUE 9.60e-01; SWISSPROT HIT: Q92212, EVALUE 2.60e+00
FPPLCPRLPFTGSRAWENKAPPTGVELSVNSVHWRASHCLWHVAVLNKMLLESLQKKIPLGVGVTFNVSQSGDKPAF

SEQ ID NO: 37342 - protein, 47 aa, Homo sapiens
  MAP TO AF127936.1; EXPRESSED IN PLACENTA, SIGNAL = 1.7; EXPRESSED IN HELA, SIGNAL = 1.8; EXPRESSED IN HEART, SIGNAL = 1.5; EXPRESSED IN ADULT LIVER, SIGNAL = 1.8; EXPRESSED IN FETAL LIVER, SIGNAL = 1.8; EXPRESSED IN HBL100, SIGNAL = 1.6; EXPRESSED IN BT474, SIGNAL = 1.5; EXPRESSED IN BRAIN, SIGNAL = 1.6; EXPRESSED IN LUNG, SIGNAL = 1.8; EXPRESSED IN BONE MARROW, SIGNAL = 1.8; SWISSPROT HIT: Q28554, EVALUE 2.00e-05; EST_HUMAN HIT: AA167649.1, EVALUE 8.00e-06
GTVEAENKKLVHNGKAISIFQKPYAAYIKWVDAVLNMLWSPLVLGLT

SEQ ID NO: 37343 - protein, 51 aa, Homo sapiens
  MAP TO AP000199.1; EXPRESSED IN HELA, SIGNAL = 0.99; EXPRESSED IN BRAIN, SIGNAL = 1.2; EXPRESSED IN HEART, SIGNAL = 1.1; EXPRESSED IN PLACENTA, SIGNAL = 0.9; EXPRESSED IN BONE MARROW, SIGNAL = 1.1; EXPRESSED IN BT474, SIGNAL = 0.88; EXPRESSED IN ADULT LIVER, SIGNAL = 1.3; EXPRESSED IN LUNG, SIGNAL = 1.3; EXPRESSED IN FETAL LIVER, SIGNAL = 0.66; EXPRESSED IN HBL100, SIGNAL = 0.83; EST_HUMAN HIT: W26913.1, EVALUE 7.00e-17; SWISSPROT HIT: P39086, EVALUE 7.00e-26
DRFEGYCLDLLKELSNILGFIYDVKLVPDGKYGAQNDKGEWNGMVKELIDH

SEQ ID NO: 37344 - protein, 61 aa, Homo sapiens
  MAP TO AC007189.6; EXPRESSED IN PLACENTA, SIGNAL = 2.3; EXPRESSED IN ADULT LIVER, SIGNAL = 2.5; EXPRESSED IN BT474, SIGNAL =   2; EXPRESSED IN FETAL LIVER, SIGNAL = 2.7; EXPRESSED IN BONE MARROW, SIGNAL = 1.9; EXPRESSED IN LUNG, SIGNAL = 2.4; EXPRESSED IN BRAIN, SIGNAL = 2.1; EXPRESSED IN HELA, SIGNAL = 2.1; EXPRESSED IN HBL100, SIGNAL = 2.3; EXPRESSED IN HEART, SIGNAL = 1.9; EST_HUMAN HIT: AW873461.1, EVALUE 2.00e-04; SWISSPROT HIT: P23945, EVALUE 1.00e-30
DISRTRIHSLPSYGLENLKKLRARSTYNLKKLPTLEKLVALMEASLTYPSHCCAFANWRRQ

SEQ ID NO: 37345 - protein, 89 aa, Homo sapiens; identical to SEQ ID NO: 35015
  MAP TO AC010885.2; EXPRESSED IN HELA, SIGNAL = 3.5; EXPRESSED IN BRAIN, SIGNAL = 3.7; EXPRESSED IN HBL100, SIGNAL = 3.6; EXPRESSED IN HEART, SIGNAL = 3.2; EXPRESSED IN FETAL LIVER, SIGNAL = 3.7; EXPRESSED IN ADULT LIVER, SIGNAL = 4.5; EXPRESSED IN BONE MARROW, SIGNAL =   4; EXPRESSED IN LUNG, SIGNAL = 4.3; EXPRESSED IN PLACENTA, SIGNAL = 4.3; EXPRESSED IN BT474, SIGNAL = 3.2; EST_HUMAN HIT: BF331317.1, EVALUE 1.10e+00; SWISSPROT HIT: P53719, EVALUE 3.00e+00

SEQ ID NO: 37346 - protein, 17 aa, Homo sapiens
  MAP TO AC008069.2; EXPRESSED IN BT474, SIGNAL =   1; EXPRESSED IN BONE MARROW, SIGNAL = 0.77; EXPRESSED IN HBL100, SIGNAL = 2.3; EXPRESSED IN FETAL LIVER, SIGNAL = 0.69; EXPRESSED IN BRAIN, SIGNAL = 0.74; EXPRESSED IN HEART, SIGNAL = 0.83; EXPRESSED IN PLACENTA, SIGNAL = 0.77
RLLKTSILTVLLNSSLK

SEQ ID NO: 37347 - protein, 58 aa, Homo sapiens
  MAP TO AC009225.1; EXPRESSED IN BT474, SIGNAL = 0.66; EXPRESSED IN FETAL LIVER, SIGNAL = 0.64; EXPRESSED IN HELA, SIGNAL = 0.91; EXPRESSED IN BRAIN, SIGNAL = 1.2; EXPRESSED IN HEART, SIGNAL = 1.2; EXPRESSED IN PLACENTA, SIGNAL = 0.81; EXPRESSED IN BONE MARROW, SIGNAL = 0.93; EXPRESSED IN HBL100, SIGNAL = 0.69; EXPRESSED IN LUNG, SIGNAL = 0.88; EXPRESSED IN ADULT LIVER, SIGNAL = 0.93; EST_HUMAN HIT: AA566127.1, EVALUE 3.00e-07; SWISSPROT HIT: O43184, EVALUE 5.00e-04
IYKEQLNTRVVLVAVETWTEKDQIDITTNPVQMLHEFSKYRQRIKQHADAVHLISYVL

SEQ ID NO: 37348 - protein, 22 aa, Homo sapiens
  MAP TO AC009225.1; EXPRESSED IN BT474, SIGNAL = 0.66; EXPRESSED IN FETAL LIVER, SIGNAL = 0.64; EXPRESSED IN HELA, SIGNAL = 0.91; EXPRESSED IN BRAIN, SIGNAL = 1.2; EXPRESSED IN HEART, SIGNAL = 1.2; EXPRESSED IN PLACENTA, SIGNAL = 0.81; EXPRESSED IN BONE MARROW, SIGNAL = 0.93; EXPRESSED IN HBL100, SIGNAL = 0.69; EXPRESSED IN LUNG, SIGNAL = 0.88; EXPRESSED IN ADULT LIVER, SIGNAL = 0.93
PVLLYTLRFTRSSSTPGLSWWL

SEQ ID NO: 37349 - protein, 46 aa, Homo sapiens
  MAP TO AP000179.1; EXPRESSED IN LUNG, SIGNAL =   1; EXPRESSED IN HELA, SIGNAL = 1.3; EXPRESSED IN HEART, SIGNAL = 1.2; EXPRESSED IN BT474, SIGNAL = 0.99; EXPRESSED IN FETAL LIVER, SIGNAL = 0.96; EXPRESSED IN ADULT LIVER, SIGNAL =   1; EXPRESSED IN BRAIN, SIGNAL = 1.1; EXPRESSED IN PLACENTA, SIGNAL = 0.85; EXPRESSED IN BONE MARROW, SIGNAL = 1.1; EXPRESSED IN HBL100, SIGNAL = 1.2; SWISSPROT HIT: P14266, EVALUE 9.10e-01; EST_HUMAN HIT: BF367309.1, EVALUE 2.00e-08
LEAFVSAAKKLPREDVYDVVEGYIKISVECVEIFQLLSGEKRPESE

SEQ ID NO: 37350 - protein, 17 aa, Homo sapiens
  MAP TO AP000179.1; EXPRESSED IN LUNG, SIGNAL =   1; EXPRESSED IN HELA, SIGNAL = 1.3; EXPRESSED IN HEART, SIGNAL = 1.2; EXPRESSED IN BT474, SIGNAL = 0.99; EXPRESSED IN FETAL LIVER, SIGNAL = 0.96; EXPRESSED IN ADULT LIVER, SIGNAL =   1; EXPRESSED IN BRAIN, SIGNAL = 1.1; EXPRESSED IN PLACENTA, SIGNAL = 0.85; EXPRESSED IN BONE MARROW, SIGNAL = 1.1; EXPRESSED IN HBL100, SIGNAL = 1.2
LGSVCVCCQEATTRRCV

SEQ ID NO: 37351 - protein, 78 aa, Homo sapiens
  MAP TO AF045448.1; EXPRESSED IN BT474, SIGNAL = 4.5; EXPRESSED IN BONE MARROW, SIGNAL = 4.2; EXPRESSED IN LUNG, SIGNAL = 4.5; EXPRESSED IN HBL100, SIGNAL = 3.3; EXPRESSED IN HELA, SIGNAL = 2.7; EXPRESSED IN ADULT LIVER, SIGNAL = 5.3; EXPRESSED IN FETAL LIVER, SIGNAL = 3.9; EXPRESSED IN BRAIN, SIGNAL = 4.7; EXPRESSED IN PLACENTA, SIGNAL = 4.2; EXPRESSED IN HEART, SIGNAL =   3
NTGSQIYLPLSITPTSTTITTTNTNITTTTITTTITHLTTTTTITTITVTTTTITTTIISTITTTITTSTTPPPPSPP

SEQ ID NO: 37352 - protein, 78 aa, Homo sapiens
  MAP TO AF045448.1; EXPRESSED IN BT474, SIGNAL = 4.5; EXPRESSED IN BONE MARROW, SIGNAL = 4.2; EXPRESSED IN LUNG, SIGNAL = 4.5; EXPRESSED IN HBL100, SIGNAL = 3.3; EXPRESSED IN HELA, SIGNAL = 2.7; EXPRESSED IN ADULT LIVER, SIGNAL = 5.3; EXPRESSED IN FETAL LIVER, SIGNAL = 3.9; EXPRESSED IN BRAIN, SIGNAL = 4.7; EXPRESSED IN PLACENTA, SIGNAL = 4.2; EXPRESSED IN HEART, SIGNAL =   3
LSPTFHHPHLHYHHHHQHQHHHHYHHHHHHPPHHHYHHHHHHCHHHHHHHHHHLHHHHHNHHLYHSTTTITTMTITTT

SEQ ID NO: 37353 - protein, 239 aa, Homo sapiens
  MAP TO AP000114.1; EXPRESSED IN LUNG, SIGNAL = 1.6; EXPRESSED IN HELA, SIGNAL = 0.76; EXPRESSED IN BRAIN, SIGNAL = 0.9; EXPRESSED IN HEART, SIGNAL = 0.81; EXPRESSED IN PLACENTA, SIGNAL = 0.83; EXPRESSED IN BONE MARROW, SIGNAL = 0.75; EXPRESSED IN BT474, SIGNAL = 0.71; EXPRESSED IN ADULT LIVER, SIGNAL = 0.96; EXPRESSED IN FETAL LIVER, SIGNAL = 0.77; EXPRESSED IN HBL100, SIGNAL = 0.84; EST_HUMAN HIT: AI678113.1, EVALUE 1.00e-100; SWISSPROT HIT: P36677, EVALUE 5.00e-03
RHYLSFEGIGFGTPTQREKHYRQFRADRAAEQVMEYQKQKLQSQYFPDSVIVKNIRQSKQQKITQAIERLVEDLIQESMAKGDFDNLSGKGKPLKKFSDCSYIDPMTHNLNRILIDNGYQPEWILKQKEISDTIEQLREAILVSRKKLGNPMTPTEKKQWNHVCEQFQENIRKLNKRINDFNLIVPILTRQKVHFDAQKEIVRAQKIYETLIKTKEVTDRNPNNLDQGEGEKTPEIKKG

SEQ ID NO: 37354 - protein, 39 aa, Homo sapiens
  MAP TO AC007111.1; EXPRESSED IN HBL100, SIGNAL = 3.7; EXPRESSED IN HELA, SIGNAL = 3.1; EXPRESSED IN PLACENTA, SIGNAL = 2.2; EXPRESSED IN HEART, SIGNAL = 2.2; EXPRESSED IN ADULT LIVER, SIGNAL = 2.3; EXPRESSED IN BT474, SIGNAL = 2.3; EXPRESSED IN FETAL LIVER, SIGNAL = 2.4; EXPRESSED IN BONE MARROW, SIGNAL = 2.3; EXPRESSED IN BRAIN, SIGNAL =   2; EXPRESSED IN LUNG, SIGNAL = 1.7; EST_HUMAN HIT: BE409256.1, EVALUE 1.00e-14; SWISSPROT HIT: P42126, EVALUE 2.00e-15
MKFKNPPVNSLSLEFLTELVISLEKLENDKSFRGVILTS

SEQ ID NO: 37355 - protein, 29 aa, Homo sapiens
  MAP TO AF121782.1; EXPRESSED IN HEART, SIGNAL = 1.7; EXPRESSED IN BT474, SIGNAL = 1.9; EXPRESSED IN BONE MARROW, SIGNAL = 1.8; EXPRESSED IN PLACENTA, SIGNAL = 3.5; EXPRESSED IN HBL100, SIGNAL = 1.9; EXPRESSED IN HELA, SIGNAL = 2.2; EXPRESSED IN ADULT LIVER, SIGNAL = 2.1; EXPRESSED IN FETAL LIVER, SIGNAL = 1.9; EXPRESSED IN BRAIN, SIGNAL = 1.9; EXPRESSED IN LUNG, SIGNAL = 3.6; EST_HUMAN HIT: AA781468.1, EVALUE 5.00e-07
SGAQQILCRIWRNGSQRRVCDGGKQQWWT

SEQ ID NO: 37356 - protein, 50 aa, Homo sapiens
  MAP TO AC009305.1; EXPRESSED IN FETAL LIVER, SIGNAL = 0.78; EXPRESSED IN ADULT LIVER, SIGNAL =   1; EXPRESSED IN HEART, SIGNAL = 0.8
SQYECRSMGSQALPTTNACTSLTSSSLLIRTSSCTMRDSHDETFTLPLQP

SEQ ID NO: 37357 - protein, 53 aa, Homo sapiens; identical to SEQ ID NO: 34097
  MAP TO AP000108.1; EXPRESSED IN PLACENTA, SIGNAL = 1.1; EXPRESSED IN BT474, SIGNAL =   1; EXPRESSED IN BONE MARROW, SIGNAL = 1.3; EXPRESSED IN HBL100, SIGNAL = 0.92; EXPRESSED IN FETAL LIVER, SIGNAL = 1.1; EXPRESSED IN LUNG, SIGNAL = 1.1; EXPRESSED IN HELA, SIGNAL = 1.2; EXPRESSED IN ADULT LIVER, SIGNAL = 1.1; EXPRESSED IN BRAIN, SIGNAL = 0.98; EXPRESSED IN HEART, SIGNAL = 0.99; EST_HUMAN HIT: AA253293.1, EVALUE 5.70e-02; SWISSPROT HIT: O64459, EVALUE 5.90e+00

SEQ ID NO: 37358 - protein, 40 aa, Homo sapiens
  MAP TO AC009721.9; EXPRESSED IN BT474, SIGNAL = 4.5; EXPRESSED IN FETAL LIVER, SIGNAL = 5.3; EXPRESSED IN BRAIN, SIGNAL = 4.1; EXPRESSED IN BONE MARROW, SIGNAL = 4.3; EXPRESSED IN LUNG, SIGNAL = 5.9; EXPRESSED IN PLACENTA, SIGNAL = 4.7; EXPRESSED IN HBL100, SIGNAL = 4.2; EXPRESSED IN HELA, SIGNAL = 5.5; EXPRESSED IN HEART, SIGNAL = 4.5; EXPRESSED IN ADULT LIVER, SIGNAL = 5.8
WRRTMRLQRGSASLAVPSICITWISARRMIPNLSMLPALE

SEQ ID NO: 37359 - protein, 33 aa, Homo sapiens
  MAP TO AC008940.2; EXPRESSED IN BRAIN, SIGNAL = 2.8; EXPRESSED IN BONE MARROW, SIGNAL = 2.5; EXPRESSED IN LUNG, SIGNAL = 4.8; EXPRESSED IN PLACENTA, SIGNAL = 4.2; EXPRESSED IN HELA, SIGNAL = 3.5; EXPRESSED IN HBL100, SIGNAL = 3.5; EXPRESSED IN HEART, SIGNAL = 3.4; EXPRESSED IN BT474, SIGNAL = 4.3; EXPRESSED IN ADULT LIVER, SIGNAL =   2; EXPRESSED IN FETAL LIVER, SIGNAL = 3.3; EST_HUMAN HIT: AI918860.1, EVALUE 6.80e+00; SWISSPROT HIT: P41935, EVALUE 3.70e+00
HFINLVMRPVLQGTKQENHSRASVWLKISRPKW

SEQ ID NO: 37360 - protein, 20 aa, Homo sapiens
  MAP TO AF064860.1; EXPRESSED IN PLACENTA, SIGNAL = 0.92; EXPRESSED IN HEART, SIGNAL = 0.94; EXPRESSED IN FETAL LIVER, SIGNAL = 0.97; EXPRESSED IN ADULT LIVER, SIGNAL = 1.2; EXPRESSED IN BONE MARROW, SIGNAL = 1.1; EXPRESSED IN BRAIN, SIGNAL = 0.96; EXPRESSED IN LUNG, SIGNAL = 1.2; EXPRESSED IN HBL100, SIGNAL = 1.1; EXPRESSED IN HELA, SIGNAL =   1
MEAGVQWVEVNYVMDEVVRV

SEQ ID NO: 37361 - protein, 76 aa, Homo sapiens
  MAP TO AC007738.2; EXPRESSED IN FETAL LIVER, SIGNAL =  21; EXPRESSED IN ADULT LIVER, SIGNAL =  32; EXPRESSED IN BT474, SIGNAL =  20; EXPRESSED IN BRAIN, SIGNAL =  24; EXPRESSED IN BONE MARROW, SIGNAL =  20; EXPRESSED IN LUNG, SIGNAL =  24; EXPRESSED IN HELA, SIGNAL =  22; EXPRESSED IN PLACENTA, SIGNAL =  25; EXPRESSED IN HBL100, SIGNAL =  22; EXPRESSED IN HEART, SIGNAL =  21; EST_HUMAN HIT: AW500892.1, EVALUE 2.00e-39; SWISSPROT HIT: Q28689, EVALUE 1.20e+00
IFTESLLCSSRLENIHLAGQMMHCSACSENPPAGIAHKGKPHYRVSYEKSIDLVLAASREYFNSSTNLTDSCMDLA

SEQ ID NO: 37362 - protein, 20 aa, Homo sapiens
  MAP TO AC007738.2; EXPRESSED IN FETAL LIVER, SIGNAL =  21; EXPRESSED IN ADULT LIVER, SIGNAL =  32; EXPRESSED IN BT474, SIGNAL =  20; EXPRESSED IN BRAIN, SIGNAL =  24; EXPRESSED IN BONE MARROW, SIGNAL =  20; EXPRESSED IN LUNG, SIGNAL =  24; EXPRESSED IN HELA, SIGNAL =  22; EXPRESSED IN PLACENTA, SIGNAL =  25; EXPRESSED IN HBL100, SIGNAL =  22; EXPRESSED IN HEART, SIGNAL =  21; EST_HUMAN HIT: AW500892.1, EVALUE 2.00e-04
YLQKAFCALVALKTSTWLDR

SEQ ID NO: 37363 - protein, 39 aa, Homo sapiens
  MAP TO AF153342.2; EXPRESSED IN FETAL LIVER, SIGNAL = 1.1; EXPRESSED IN LUNG, SIGNAL = 1.1; EXPRESSED IN BONE MARROW, SIGNAL = 1.4; EXPRESSED IN HEART, SIGNAL = 1.1; EXPRESSED IN HELA, SIGNAL = 1.7; EXPRESSED IN PLACENTA, SIGNAL = 1.1; EXPRESSED IN ADULT LIVER, SIGNAL = 1.5; EST_HUMAN HIT: AW370567.1, EVALUE 6.40e+00
VDPGVRDVMAVNQIGPALAVRTGLISLYPLDHVGPPVVY

SEQ ID NO: 37364 - protein, 47 aa, Homo sapiens [sequence omitted]

SEQ ID NO: 37365 - protein, 152 aa, Homo sapiens
  MAP TO AF091512.1; EXPRESSED IN ADULT LIVER, SIGNAL = 1.5; EXPRESSED IN FETAL LIVER, SIGNAL = 1.2; EXPRESSED IN BONE MARROW, SIGNAL = 1.3; EXPRESSED IN HEART, SIGNAL = 1.1; EXPRESSED IN HBL100, SIGNAL =   2; EST_HUMAN HIT: BE543056.1, EVALUE 8.00e-30; SWISSPROT HIT: O43749, EVALUE 2.00e-69
MYLATVLGNLLIILAISIDSRLHTPMYFFLSNMSFVDNCFSTTVPKMLANHILRTQTISFSGCLMQMYFISELADMDNFLLAVMAYDRFVAVCRPLHYTAKMTHQLCALLVTGSWVVANSSALLHTLLMARLSFCADNTIPHIFCDVTPLLK

SEQ ID NO: 37366 - protein, 38 aa, Homo sapiens
  MAP TO AC007335.2; EXPRESSED IN PLACENTA, SIGNAL = 6.9; EXPRESSED IN HBL100, SIGNAL = 6.1; EXPRESSED IN HEART, SIGNAL = 5.9; EXPRESSED IN FETAL LIVER, SIGNAL = 8.4; EXPRESSED IN ADULT LIVER, SIGNAL =  12; EXPRESSED IN BT474, SIGNAL = 6.1; EXPRESSED IN BRAIN, SIGNAL = 6.4; EXPRESSED IN BONE MARROW, SIGNAL = 6.2; EXPRESSED IN LUNG, SIGNAL =   7; EXPRESSED IN HELA, SIGNAL = 7.6
RKRRRRMRWMRTWRRRRRRKTRRRRKRRKRRSREKTRR

SEQ ID NO: 37367 - protein, 58 aa, Homo sapiens
  MAP TO AC009646.2; EXPRESSED IN FETAL LIVER, SIGNAL = 2.3; EXPRESSED IN BONE MARROW, SIGNAL = 2.2; EXPRESSED IN BT474, SIGNAL = 1.8; EXPRESSED IN BRAIN, SIGNAL = 1.7; EXPRESSED IN LUNG, SIGNAL = 2.4; EXPRESSED IN PLACENTA, SIGNAL = 2.6; EXPRESSED IN HEART, SIGNAL = 1.9; EXPRESSED IN HELA, SIGNAL = 2.3; EXPRESSED IN HBL100, SIGNAL = 2.1; EXPRESSED IN ADULT LIVER, SIGNAL = 2.6; SWISSPROT HIT: Q01293, EVALUE 1.20e+00
YFPLSASQRATPSNFSTTSKSPFPLEFVCSPTKEIPGMQASLMSKLSSKATSLEIDRK

SEQ ID NO: 37368 - protein, 109 aa, Homo sapiens; identical to SEQ ID NO: 34766
  MAP TO AC008015.5; EXPRESSED IN HELA, SIGNAL = 2.8; EXPRESSED IN PLACENTA, SIGNAL = 2.7; EXPRESSED IN HBL100, SIGNAL = 2.2; EXPRESSED IN HEART, SIGNAL =   2; EXPRESSED IN BT474, SIGNAL = 2.8; EXPRESSED IN BRAIN, SIGNAL = 2.1; EXPRESSED IN ADULT LIVER, SIGNAL = 2.9; EXPRESSED IN FETAL LIVER, SIGNAL = 2.6; EXPRESSED IN LUNG, SIGNAL = 2.2; EXPRESSED IN BONE MARROW, SIGNAL = 2.3; SWISSPROT HIT: P24665, EVALUE 3.00e+00

SEQ ID NO: 37369 - protein, 38 aa, Homo sapiens
  MAP TO AC008015.5; EXPRESSED IN HELA, SIGNAL = 2.8; EXPRESSED IN PLACENTA, SIGNAL = 2.7; EXPRESSED IN HBL100, SIGNAL = 2.2; EXPRESSED IN HEART, SIGNAL =   2; EXPRESSED IN BT474, SIGNAL = 2.8; EXPRESSED IN BRAIN, SIGNAL = 2.1; EXPRESSED IN ADULT LIVER, SIGNAL = 2.9; EXPRESSED IN FETAL LIVER, SIGNAL = 2.6; EXPRESSED IN LUNG, SIGNAL = 2.2; EXPRESSED IN BONE MARROW, SIGNAL = 2.3; SWISSPROT HIT: P51839, EVALUE 8.10e+00
AAVMYGVVKWLGNTTAIPASQMRAQTTGPIGPWVSGSN

SEQ ID NO: 37370 - protein, 54 aa, Homo sapiens
  MAP TO AJ011930.1; EXPRESSED IN BT474, SIGNAL = 4.7; EXPRESSED IN FETAL LIVER, SIGNAL =   6; EXPRESSED IN BONE MARROW, SIGNAL = 5.6; EXPRESSED IN LUNG, SIGNAL = 6.2; EXPRESSED IN HELA, SIGNAL = 6.3; EXPRESSED IN HEART, SIGNAL = 5.8; EXPRESSED IN ADULT LIVER, SIGNAL = 6.6; EXPRESSED IN BRAIN, SIGNAL = 5.2; EXPRESSED IN PLACENTA, SIGNAL = 5.4; EXPRESSED IN HBL100, SIGNAL = 5.4
LSSRLKDTVKNMNKDSVCNGFHGRKDLTATGKTDRASEVALKWGATQTPECQLE

SEQ ID NO: 37371 - protein, 75 aa, Homo sapiens
  MAP TO AJ229041.1; EXPRESSED IN PLACENTA, SIGNAL = 4.4; EXPRESSED IN HEART, SIGNAL = 3.4; EXPRESSED IN BT474, SIGNAL = 4.2; EXPRESSED IN BONE MARROW, SIGNAL = 3.8; EXPRESSED IN BRAIN, SIGNAL = 3.3; EXPRESSED IN LUNG, SIGNAL = 3.3; EXPRESSED IN HELA, SIGNAL =   4; EXPRESSED IN HBL100, SIGNAL = 3.3; EXPRESSED IN ADULT LIVER, SIGNAL = 3.8; EXPRESSED IN FETAL LIVER, SIGNAL = 3.6; SWISSPROT HIT: Q9XD36, EVALUE 1.40e-01; EST_HUMAN HIT: BF527229.1, EVALUE 4.60e-01
INLRMMINMVETGSLGAPNIVSQNKGTGHPRVMADSGPETGYVEEGPSMHRHTGKQGSHQRQPECFKGLRNQLMR

SEQ ID NO: 37372 - protein, 72 aa, Homo sapiens
  MAP TO Z83826.12; EXPRESSED IN LUNG, SIGNAL = 0.68; EXPRESSED IN BT474, SIGNAL = 0.73; EXPRESSED IN BONE MARROW, SIGNAL = 0.86; EXPRESSED IN HBL100, SIGNAL = 0.96; EXPRESSED IN FETAL LIVER, SIGNAL = 1.3; EXPRESSED IN HELA, SIGNAL = 1.3; EXPRESSED IN ADULT LIVER, SIGNAL = 3.1; EXPRESSED IN HEART, SIGNAL = 1.1; EST_HUMAN HIT: BE883279.1, EVALUE 8.00e-22
VIRHRDVRSCHYGVIDKFRLQVSEQSQRKALGRKEVVATLLPSAKEQQKEEEEKRLKEHLTESLFFEQSFQP

SEQ ID NO: 37373 - protein, 50 aa, Homo sapiens
  MAP TO AC007939.1; EXPRESSED IN FETAL LIVER, SIGNAL = 0.75; EXPRESSED IN LUNG, SIGNAL = 0.68; EXPRESSED IN PLACENTA, SIGNAL = 0.87; EXPRESSED IN BT474, SIGNAL = 0.72; EXPRESSED IN BONE MARROW, SIGNAL = 0.71; EXPRESSED IN HBL100, SIGNAL = 1.1; EXPRESSED IN HEART, SIGNAL = 0.9; EST_HUMAN HIT: W17300.1, EVALUE 2.00e-16; SWISSPROT HIT: P81406, EVALUE 2.70e+00
  unsure 38
DKASLGPIEDFRELIKYLEEYERDWYIGLVSDEKWKEXNFTRKAILVFSG

SEQ ID NO: 37374 - protein, 33 aa, Homo sapiens
  MAP TO AL049837.3; EXPRESSED IN BONE MARROW, SIGNAL = 1.1; EXPRESSED IN LUNG, SIGNAL =   1; EXPRESSED IN ADULT LIVER, SIGNAL = 0.91; EXPRESSED IN PLACENTA, SIGNAL = 1.1; EXPRESSED IN BT474, SIGNAL = 1.1; EXPRESSED IN HBL100, SIGNAL =   1; EXPRESSED IN FETAL LIVER, SIGNAL = 1.1; EXPRESSED IN HELA, SIGNAL = 1.1; EXPRESSED IN BRAIN, SIGNAL = 1.4; EXPRESSED IN HEART, SIGNAL = 3.1; EST_HUMAN HIT: AA012854.1, EVALUE 4.00e-09
IKNICDSWEKVKMSTITGVWKKLILSLMEDFEG

SEQ ID NO: 37375 - protein, 47 aa, Homo sapiens
  MAP TO AL031005.1; EXPRESSED IN HBL100, SIGNAL =   3; EXPRESSED IN BT474, SIGNAL =   3; EXPRESSED IN BRAIN, SIGNAL = 2.7; EXPRESSED IN HELA, SIGNAL = 3.4; EXPRESSED IN HEART, SIGNAL = 2.6; EXPRESSED IN PLACENTA, SIGNAL =   3; EXPRESSED IN ADULT LIVER, SIGNAL = 3.4; EXPRESSED IN FETAL LIVER, SIGNAL = 3.1; EXPRESSED IN LUNG, SIGNAL = 3.5; EXPRESSED IN BONE MARROW, SIGNAL = 3.3; SWISSPROT HIT: P42892, EVALUE 5.00e-22; EST_HUMAN HIT: BE812130.1, EVALUE 7.00e-21
TLAPAINWLPFLNTIFYPVEINESEPIVVYDKEYLEQISTLINTTDR

SEQ ID NO: 37376 - protein, 23 aa, Homo sapiens
  MAP TO AL031005.1; EXPRESSED IN HBL100, SIGNAL =   3; EXPRESSED IN BT474, SIGNAL =   3; EXPRESSED IN BRAIN, SIGNAL = 2.7; EXPRESSED IN HELA, SIGNAL = 3.4; EXPRESSED IN HEART, SIGNAL = 2.6; EXPRESSED IN PLACENTA, SIGNAL =   3; EXPRESSED IN ADULT LIVER, SIGNAL = 3.4; EXPRESSED IN FETAL LIVER, SIGNAL = 3.1; EXPRESSED IN LUNG, SIGNAL = 3.5; EXPRESSED IN BONE MARROW, SIGNAL = 3.3; EST_HUMAN HIT: BE812130.1, EVALUE 4.00e-03
LSFSLADLGTRHQLVAFSQHHLL

SEQ ID NO: 37377 - protein, 19 aa, Homo sapiens
  MAP TO AC010092.2; EXPRESSED IN HELA, SIGNAL = 1.3; EXPRESSED IN ADULT LIVER, SIGNAL = 1.5; EXPRESSED IN BRAIN, SIGNAL = 1.1; EXPRESSED IN LUNG, SIGNAL = 1.7; EXPRESSED IN BONE MARROW, SIGNAL = 1.1; EXPRESSED IN PLACENTA, SIGNAL = 1.5; EXPRESSED IN HEART, SIGNAL = 1.3; EXPRESSED IN HBL100, SIGNAL = 1.3; EXPRESSED IN BT474, SIGNAL = 1.3; EXPRESSED IN FETAL LIVER, SIGNAL = 1.6; EST_HUMAN HIT: BE154970.1, EVALUE 2.00e-03
IYDRGSQGNHERDCGYGKE

SEQ ID NO: 37378 - protein, 58 aa, Homo sapiens
  MAP TO AC007353.1; EXPRESSED IN BRAIN, SIGNAL = 3.3; EXPRESSED IN LUNG, SIGNAL = 3.6; EXPRESSED IN HELA, SIGNAL = 3.4; EXPRESSED IN PLACENTA, SIGNAL = 4.6; EXPRESSED IN ADULT LIVER, SIGNAL = 4.8; EXPRESSED IN FETAL LIVER, SIGNAL =   4; EXPRESSED IN BT474, SIGNAL = 2.9; EXPRESSED IN BONE MARROW, SIGNAL =   3; EXPRESSED IN HEART, SIGNAL = 2.5; EXPRESSED IN HBL100, SIGNAL = 2.9; SWISSPROT HIT: Q05935, EVALUE 7.60e+00; EST_HUMAN HIT: BE891880.1, EVALUE 8.00e-09
VEKETKSPPLLCKAVKSRRPVMPTIEVLSWLALGAASGTSLRPLEFNSHHFGKLSELP

SEQ ID NO: 37379 - protein, 143 aa, Homo sapiens
  MAP TO AC010872.3; EXPRESSED IN FETAL LIVER, SIGNAL =  18; EXPRESSED IN BT474, SIGNAL =   4; EXPRESSED IN ADULT LIVER, SIGNAL =  12; EXPRESSED IN BRAIN, SIGNAL = 4.1; EXPRESSED IN LUNG, SIGNAL = 4.7; EXPRESSED IN BONE MARROW, SIGNAL = 2.2; EXPRESSED IN PLACENTA, SIGNAL =   5; EXPRESSED IN HEART, SIGNAL = 7.8; EXPRESSED IN HELA, SIGNAL = 2.8; EXPRESSED IN HBL100, SIGNAL = 2.2; EST_HUMAN HIT: AI114592.1, EVALUE 4.00e-63; SWISSPROT HIT: P04114, EVALUE 5.00e-65
KFIIPGLKLNDLNSVLVMPTFHVPFTDLQVPSCKLDFREIQIYKKLRTSSFALNLPTLPEVKFPEVDVLTKYSQPEDSLIPFFEITVPESQLTVSQFTLPKSVSDGIAALDLNAVANKIADFELPPSSCLSRPLRSSIKFSVL

SEQ ID NO: 37380 - protein, 172 aa, Homo sapiens
  MAP TO AC008132.26; EXPRESSED IN HELA, SIGNAL =   3; EXPRESSED IN PLACENTA, SIGNAL = 3.8; EXPRESSED IN HBL100, SIGNAL = 2.8; EXPRESSED IN HEART, SIGNAL = 2.6; EXPRESSED IN FETAL LIVER, SIGNAL = 2.8; EXPRESSED IN ADULT LIVER, SIGNAL = 3.5; EXPRESSED IN BT474, SIGNAL = 3.9; EXPRESSED IN BRAIN, SIGNAL = 2.9; EXPRESSED IN BONE MARROW, SIGNAL = 2.5; EXPRESSED IN LUNG, SIGNAL = 3.1; EST_HUMAN HIT: BF337873.1, EVALUE 1.60e-02; SWISSPROT HIT: P34687, EVALUE 2.00e-01
AEGGQPMLGTRAPSQTRRRPAHPADDTGGEAEGPRNGDWATGWRKTSRSEPCPWGVPKSKPRVKPKLVILSRGRPGSQGTANGKMSPDPRDQGLDQPGTQPRGSGSGRKQLDTAAFTIGSPSRPPSGPAPSSVHSSNTWSRVLGRAGGGGLVGGGDHSPAPGYHQGHWGQGP

SEQ ID NO: 37381 - protein, 29 aa, Homo sapiens
  MAP TO AL031116.1; EXPRESSED IN BONE MARROW, SIGNAL = 1.8; EXPRESSED IN PLACENTA, SIGNAL = 2.1; EXPRESSED IN HBL100, SIGNAL = 1.8; EXPRESSED IN BT474, SIGNAL = 1.9; EXPRESSED IN LUNG, SIGNAL = 1.9; EXPRESSED IN BRAIN, SIGNAL = 2.5; EXPRESSED IN HEART, SIGNAL =   2; EXPRESSED IN HELA, SIGNAL = 1.6; EXPRESSED IN ADULT LIVER, SIGNAL = 2.2; EXPRESSED IN FETAL LIVER, SIGNAL = 1.9; EST_HUMAN HIT: AW452877.1, EVALUE 9.00e-01
KTSRFKIKEELMYQFESTDRNKRPISQLK

SEQ ID NO: 37382 - protein, 36 aa, Homo sapiens
  MAP TO AC010136.2; EXPRESSED IN LUNG, SIGNAL =   4; EXPRESSED IN PLACENTA, SIGNAL = 3.3; EXPRESSED IN HELA, SIGNAL =   3; EXPRESSED IN ADULT LIVER, SIGNAL = 3.7; EXPRESSED IN BRAIN, SIGNAL =   3; EXPRESSED IN BONE MARROW, SIGNAL = 3.4; EXPRESSED IN HEART, SIGNAL = 3.3; EXPRESSED IN HBL100, SIGNAL = 3.1; EXPRESSED IN BT474, SIGNAL = 3.6; EXPRESSED IN FETAL LIVER, SIGNAL = 3.6; EST_HUMAN HIT: W56036.1, EVALUE 2.90e+00; SWISSPROT HIT: Q09746, EVALUE 2.40e-01
DLEAPKTHRFKVKTFKKVKPCGICRQVITQEGCTCK

SEQ ID NO: 37383 - protein, 42 aa, Homo sapiens
  MAP TO AC010888.2; EXPRESSED IN HELA, SIGNAL = 1.9; EXPRESSED IN ADULT LIVER, SIGNAL = 2.7; EXPRESSED IN BRAIN, SIGNAL = 1.6; EXPRESSED IN LUNG, SIGNAL = 2.6; EXPRESSED IN BONE MARROW, SIGNAL = 2.4; EXPRESSED IN PLACENTA, SIGNAL = 2.5; EXPRESSED IN HEART, SIGNAL =   2; EXPRESSED IN HBL100, SIGNAL = 2.1; EXPRESSED IN BT474, SIGNAL =   2; EXPRESSED IN FETAL LIVER, SIGNAL =   2; SWISSPROT HIT: P04196, EVALUE 1.60e+00; EST_HUMAN HIT: AW939485.1, EVALUE 2.00e-07
LEANRAVVVGPEENQHCLAWQLPQGRPSLLPQAVHGCSPQRK

SEQ ID NO: 37384 - protein, 77 aa, Homo sapiens
  MAP TO AC008496.2; EXPRESSED IN HEART, SIGNAL = 9.7; EXPRESSED IN BT474, SIGNAL = 2.2; EXPRESSED IN BRAIN, SIGNAL = 2.3; EXPRESSED IN LUNG, SIGNAL =   2; EXPRESSED IN HBL100, SIGNAL = 2.2; EXPRESSED IN HELA, SIGNAL = 2.2; EXPRESSED IN PLACENTA, SIGNAL = 2.3; EXPRESSED IN ADULT LIVER, SIGNAL = 2.3; EXPRESSED IN FETAL LIVER, SIGNAL = 2.6; EXPRESSED IN BONE MARROW, SIGNAL = 1.9; EST_HUMAN HIT: AW755254.1, EVALUE 6.00e-40; SWISSPROT HIT: Q02084, EVALUE 2.50e-02
YTFFYSGIVSDVHVTERPARVGILLDYNNQRLIFINAESEQLLFIIRHRFNEGVHPAFALEKPGKCTLHLGIEPPDS

SEQ ID NO: 37385 - protein, 20 aa, Homo sapiens
  MAP TO AC008496.2; EXPRESSED IN HEART, SIGNAL = 9.7; EXPRESSED IN BT474, SIGNAL = 2.2; EXPRESSED IN BRAIN, SIGNAL = 2.3; EXPRESSED IN LUNG, SIGNAL =   2; EXPRESSED IN HBL100, SIGNAL = 2.2; EXPRESSED IN HELA, SIGNAL = 2.2; EXPRESSED IN PLACENTA, SIGNAL = 2.3; EXPRESSED IN ADULT LIVER, SIGNAL = 2.3; EXPRESSED IN FETAL LIVER, SIGNAL = 2.6; EXPRESSED IN BONE MARROW, SIGNAL = 1.9
RVLCFPFAFISDTHFSTVVL

SEQ ID NO: 37386 - protein, 41 aa, Homo sapiens
  MAP TO AC007857.1; EXPRESSED IN HELA, SIGNAL = 0.64; EXPRESSED IN BT474, SIGNAL = 0.87; EXPRESSED IN BONE MARROW, SIGNAL = 0.83; EXPRESSED IN FETAL LIVER, SIGNAL = 0.74; EXPRESSED IN LUNG, SIGNAL = 0.85; EXPRESSED IN BRAIN, SIGNAL = 0.97; EXPRESSED IN PLACENTA, SIGNAL = 0.87; EXPRESSED IN HEART, SIGNAL = 0.89
HHHHCHHHRRHHRCRHHQCHHHHCHHHHCCCHNHQGHHHHQ

SEQ ID NO: 37387 - protein, 37 aa, Homo sapiens
  MAP TO AC007857.1; EXPRESSED IN HELA, SIGNAL = 0.64; EXPRESSED IN BT474, SIGNAL = 0.87; EXPRESSED IN BONE MARROW, SIGNAL = 0.83; EXPRESSED IN FETAL LIVER, SIGNAL = 0.74; EXPRESSED IN LUNG, SIGNAL = 0.85; EXPRESSED IN BRAIN, SIGNAL = 0.97; EXPRESSED IN PLACENTA, SIGNAL = 0.87; EXPRESSED IN HEART, SIGNAL = 0.89
LIIITVIIIVVIIVVVIINVITTIVIIIIVVVIIIKV

SEQ ID NO: 37388 - protein, 122 aa, Homo sapiens
  MAP TO AL031132.1; EXPRESSED IN ADULT LIVER, SIGNAL = 4.8; EXPRESSED IN BT474, SIGNAL = 4.7; EXPRESSED IN FETAL LIVER, SIGNAL = 3.3; EXPRESSED IN BONE MARROW, SIGNAL = 4.3; EXPRESSED IN LUNG, SIGNAL = 4.7; EXPRESSED IN BRAIN, SIGNAL = 4.2; EXPRESSED IN HELA, SIGNAL = 4.6; EXPRESSED IN HEART, SIGNAL = 4.2; EXPRESSED IN PLACENTA, SIGNAL = 7.7; EXPRESSED IN HBL100, SIGNAL = 5.2; EST_HUMAN HIT: R87099.1, EVALUE 8.30e+00; SWISSPROT HIT: P25805, EVALUE 3.50e+00
TIDQTIYHERALLTLHISISQYKKERGKIARESSTHIVTESVGIIQTDCPKLDNTVMSSKRASYLNRLVFLSSQGKSLINKNELQICPPSEKQETYKYPEHNSGGKMAEDRRACITEPSAPA

SEQ ID NO: 37389 - protein, 70 aa, Homo sapiens
  MAP TO AC010175.4; EXPRESSED IN FETAL LIVER, SIGNAL = 2.5; EXPRESSED IN BT474, SIGNAL = 1.9; EXPRESSED IN ADULT LIVER, SIGNAL = 3.4; EXPRESSED IN BRAIN, SIGNAL = 2.2; EXPRESSED IN LUNG, SIGNAL = 2.9; EXPRESSED IN BONE MARROW, SIGNAL = 2.4; EXPRESSED IN PLACENTA, SIGNAL = 3.3; EXPRESSED IN HEART, SIGNAL = 2.3; EXPRESSED IN HELA, SIGNAL = 2.3; EXPRESSED IN HBL100, SIGNAL = 2.1; EST_HUMAN HIT: AL048610.1, EVALUE 1.00e-12; SWISSPROT HIT: Q61838, EVALUE 4.00e-22
VKYKESNNCSDNWWLDEFHTQTSHTAKHFFSPSKSYIHLKPIIGTLTCGQTQEIQAHYILNKQILRDEKE

SEQ ID NO: 37390 - protein, 163 aa, Homo sapiens
  MAP TO AC010896.2; EXPRESSED IN PLACENTA, SIGNAL = 6.6; EXPRESSED IN HBL100, SIGNAL = 5.7; EXPRESSED IN HELA, SIGNAL = 6.6; EXPRESSED IN HEART, SIGNAL = 5.4; EXPRESSED IN ADULT LIVER, SIGNAL = 7.9; EXPRESSED IN FETAL LIVER, SIGNAL = 7.8; EXPRESSED IN BONE MARROW, SIGNAL = 5.8; EXPRESSED IN BT474, SIGNAL = 5.8; EXPRESSED IN BRAIN, SIGNAL =   5; EXPRESSED IN LUNG, SIGNAL = 7.5; SWISSPROT HIT: Q02280, EVALUE 5.80e-01; EST_HUMAN HIT: AV725650.1, EVALUE 4.00e-06
ISSTWPPFSGCGAGPGVGPPAALCLSPAGKAPSSPPHGAPGLPVPTGVGRCHPGALPTSRAIPEGGGMLVGWEGRGVIHLRGPVLAIIGVNGLVLAMAMLKLLRPSLSEGPPAEKRQALLGVIKALLILTPIFGLTWGWPGHSVRGSLHGPSLHLHHSQHPPG

SEQ ID NO: 37391 - protein, 23 aa, Homo sapiens
  MAP TO AC010896.2; EXPRESSED IN PLACENTA, SIGNAL = 6.6; EXPRESSED IN HBL100, SIGNAL = 5.7; EXPRESSED IN HELA, SIGNAL = 6.6; EXPRESSED IN HEART, SIGNAL = 5.4; EXPRESSED IN ADULT LIVER, SIGNAL = 7.9; EXPRESSED IN FETAL LIVER, SIGNAL = 7.8; EXPRESSED IN BONE MARROW, SIGNAL = 5.8; EXPRESSED IN BT474, SIGNAL = 5.8; EXPRESSED IN BRAIN, SIGNAL =   5; EXPRESSED IN LUNG, SIGNAL = 7.5
SLASPGAGLATLLEEVSTVPHYI

SEQ ID NO: 37392 - protein, 36 aa, Homo sapiens
  MAP TO AC010896.2; EXPRESSED IN PLACENTA, SIGNAL = 6.6; EXPRESSED IN HBL100, SIGNAL = 5.7; EXPRESSED IN HELA, SIGNAL = 6.6; EXPRESSED IN HEART, SIGNAL = 5.4; EXPRESSED IN ADULT LIVER, SIGNAL = 7.9; EXPRESSED IN FETAL LIVER, SIGNAL = 7.8; EXPRESSED IN BONE MARROW, SIGNAL = 5.8; EXPRESSED IN BT474, SIGNAL = 5.8; EXPRESSED IN BRAIN, SIGNAL =   5; EXPRESSED IN LUNG, SIGNAL = 7.5
FPLPGHLFLDVAQALVLAHQLLFVFHQLAKHRVLPL

SEQ ID NO: 37393 - protein, 51 aa, Homo sapiens
  MAP TO AC007881.2; EXPRESSED IN BRAIN, SIGNAL = 1.1; EXPRESSED IN BONE MARROW, SIGNAL = 1.1; EXPRESSED IN HELA, SIGNAL = 2.1; EXPRESSED IN HBL100, SIGNAL = 1.3; EXPRESSED IN HEART, SIGNAL = 1.1; EXPRESSED IN BT474, SIGNAL = 1.1; EXPRESSED IN FETAL LIVER, SIGNAL = 0.98; EXPRESSED IN ADULT LIVER, SIGNAL = 1.1; SWISSPROT HIT: P32578, EVALUE 1.50e+00; EST_HUMAN HIT: AI656142.1, EVALUE 3.00e-21
VEEELQEQDFLDRCFQEMLDEEDQDWFIPSRDLPQAMGQLQQQLNGLSVSE

SEQ ID NO: 37394 - protein, 51 aa, Homo sapiens
  MAP TO AC007881.2; EXPRESSED IN BRAIN, SIGNAL = 1.1; EXPRESSED IN BONE MARROW, SIGNAL = 1.1; EXPRESSED IN HELA, SIGNAL = 2.1; EXPRESSED IN HBL100, SIGNAL = 1.3; EXPRESSED IN HEART, SIGNAL = 1.1; EXPRESSED IN BT474, SIGNAL = 1.1; EXPRESSED IN FETAL LIVER, SIGNAL = 0.98; EXPRESSED IN ADULT LIVER, SIGNAL = 1.1; SWISSPROT HIT: Q58908, EVALUE 4.70e+00; EST_HUMAN HIT: AI656142.1, EVALUE 3.00e-18
SCSPLLARWRRNCRSKTSWTAASKRCWMKKTKTGLFPHETCLRPWDSCNSS

SEQ ID NO: 37395 - protein, 66 aa, Homo sapiens
  MAP TO AC006928.13; EXPRESSED IN HELA, SIGNAL = 0.63; EXPRESSED IN BT474, SIGNAL = 0.65; EXPRESSED IN BONE MARROW, SIGNAL = 0.69; EXPRESSED IN FETAL LIVER, SIGNAL = 0.63; EXPRESSED IN LUNG, SIGNAL = 0.72; EXPRESSED IN ADULT LIVER, SIGNAL = 0.69; EXPRESSED IN BRAIN, SIGNAL = 0.77; EXPRESSED IN PLACENTA, SIGNAL = 0.76; EXPRESSED IN HEART, SIGNAL = 0.8; EST_HUMAN HIT: BE250146.1, EVALUE 4.80e+00
DKDQVAADQSRFTTGNNGRRQIQPRRLIWPMISCNMALPVDYCWLYNEIKQLRAAVISADRQTTSN

SEQ ID NO: 37396 - protein, 69 aa, Homo sapiens
  MAP TO AL031297.4; EXPRESSED IN PLACENTA, SIGNAL = 0.81; EXPRESSED IN LUNG, SIGNAL = 0.94; EXPRESSED IN HELA, SIGNAL = 0.84; EXPRESSED IN BT474, SIGNAL = 1.1; EXPRESSED IN BONE MARROW, SIGNAL = 0.87; EXPRESSED IN HBL100, SIGNAL = 0.86; EXPRESSED IN FETAL LIVER, SIGNAL = 0.84; EXPRESSED IN ADULT LIVER, SIGNAL = 0.72; EXPRESSED IN BRAIN, SIGNAL = 0.83; EXPRESSED IN HEART, SIGNAL = 0.95; EST_HUMAN HIT: AW936689.1, EVALUE 3.00e-31; SWISSPROT HIT: P19965, EVALUE 4.30e+00
INQGIIVTFKSYCLRNTFYKAIAAMDSDSSDEPGQSKLETFWEGVIISDAMKNIHDSFGGGQNININRN

SEQ ID NO: 37397 - protein, 106 aa, Homo sapiens
  MAP TO AL023280.1; EXPRESSED IN HBL100, SIGNAL = 1.2; EXPRESSED IN HEART, SIGNAL =   1; EXPRESSED IN BT474, SIGNAL = 1.7; EXPRESSED IN FETAL LIVER, SIGNAL = 1.5; EXPRESSED IN BRAIN, SIGNAL = 1.2; EXPRESSED IN HELA, SIGNAL = 1.4; EXPRESSED IN PLACENTA, SIGNAL = 1.2; EXPRESSED IN ADULT LIVER, SIGNAL = 1.3; EXPRESSED IN LUNG, SIGNAL = 1.5; EXPRESSED IN BONE MARROW, SIGNAL = 1.4; EST_HUMAN HIT: AL043643.1, EVALUE 1.00e-45; SWISSPROT HIT: P31792, EVALUE 7.00e-30
LAPESQKLFAFQWEDPESGVTTQYTWIRLPKGFKNSPTIFGEALAQDLQKFPTRDLGCMLLQYVDDLFLGHPTAVRCAKGTDALLRHLEDCGYKVFKKKVQICRQQ

SEQ ID NO: 37398 - protein, 51 aa, Homo sapiens
  MAP TO AC009598.2; EXPRESSED IN HEART, SIGNAL = 0.85; EXPRESSED IN BRAIN, SIGNAL = 0.99; EXPRESSED IN ADULT LIVER, SIGNAL =   1; EXPRESSED IN BT474, SIGNAL = 1.1; EXPRESSED IN HELA, SIGNAL = 0.94; EST_HUMAN HIT: AI094610.1, EVALUE 5.00e-01; SWISSPROT HIT: Q01815, EVALUE 3.50e+00
GTMRSSAIPPQRSCPQSGIRMDVLLLQRSRFPSTAPRPCKGKTRQLPHTEQ

SEQ ID NO: 37399 - protein, 51 aa, Homo sapiens
  MAP TO AC009598.2; EXPRESSED IN HEART, SIGNAL = 0.85; EXPRESSED IN BRAIN, SIGNAL = 0.99; EXPRESSED IN ADULT LIVER, SIGNAL =   1; EXPRESSED IN BT474, SIGNAL = 1.1; EXPRESSED IN HELA, SIGNAL = 0.94; SWISSPROT HIT: O77784, EVALUE 2.00e+00; EST_HUMAN HIT: AA984582.1, EVALUE 1.90e+00
ELCGHQLFLHRGAVHSLGSGWMCFCCREAASLQPHHVPAKGRQDSCLTQSS

SEQ ID NO: 37400 - protein, 30 aa, Homo sapiens
  MAP TO AC005534.2; EXPRESSED IN PLACENTA, SIGNAL = 0.9; EXPRESSED IN BONE MARROW, SIGNAL =   1; EXPRESSED IN HBL100, SIGNAL = 0.69; EXPRESSED IN LUNG, SIGNAL = 0.94; EXPRESSED IN HELA, SIGNAL = 1.1; EXPRESSED IN ADULT LIVER, SIGNAL = 0.96; EXPRESSED IN BRAIN, SIGNAL =   1; EXPRESSED IN BT474, SIGNAL = 0.77; EXPRESSED IN FETAL LIVER, SIGNAL = 0.9; EXPRESSED IN HEART, SIGNAL = 0.95; EST_HUMAN HIT: AA548154.1, EVALUE 1.00e-11
VTTVCFAYDTGKIDEIKACFVLSFQGFCFY

SEQ ID NO: 37401 - protein, 55 aa, Homo sapiens
  MAP TO AC007750.2; EXPRESSED IN PLACENTA, SIGNAL =   1; EXPRESSED IN LUNG, SIGNAL = 0.98; EXPRESSED IN HELA, SIGNAL = 2.2; EXPRESSED IN BT474, SIGNAL = 0.95; EXPRESSED IN BONE MARROW, SIGNAL = 0.96; EXPRESSED IN HBL100, SIGNAL = 0.8; EXPRESSED IN FETAL LIVER, SIGNAL = 0.9; EXPRESSED IN ADULT LIVER, SIGNAL =   1; EXPRESSED IN BRAIN, SIGNAL =   1; EXPRESSED IN HEART, SIGNAL =   1; EST_HUMAN HIT: AI887621.1, EVALUE 1.00e-11; SWISSPROT HIT: P08547, EVALUE 3.00e-10
DLKRHLSKENIQMSNKHMKRCSASLVMRIIPIKTTMRYNFMPTKMAITIPEKNKK

SEQ ID NO: 37402 - protein, 49 aa, Homo sapiens
  MAP TO AL031003.1; EXPRESSED IN HBL100, SIGNAL = 2.9; EXPRESSED IN HEART, SIGNAL = 2.4; EXPRESSED IN BT474, SIGNAL = 2.6; EXPRESSED IN FETAL LIVER, SIGNAL = 2.7; EXPRESSED IN BRAIN, SIGNAL = 2.8; EXPRESSED IN HELA, SIGNAL = 3.2; EXPRESSED IN PLACENTA, SIGNAL = 2.9; EXPRESSED IN ADULT LIVER, SIGNAL =   4; EXPRESSED IN LUNG, SIGNAL =   3; EXPRESSED IN BONE MARROW, SIGNAL =   3; EST_HUMAN HIT: BE564066.1, EVALUE 1.70e+00; SWISSPROT HIT: P15325, EVALUE 7.80e+00
IGLLEIILTKARGPSVNGTPRVFNSQSFQQFINYSSGFLPPAGSWRFLL

SEQ ID NO: 37403 - protein, 20 aa, Homo sapiens
  MAP TO AL031003.1; EXPRESSED IN HBL100, SIGNAL = 2.9; EXPRESSED IN HEART, SIGNAL = 2.4; EXPRESSED IN BT474, SIGNAL = 2.6; EXPRESSED IN FETAL LIVER, SIGNAL = 2.7; EXPRESSED IN BRAIN, SIGNAL = 2.8; EXPRESSED IN HELA, SIGNAL = 3.2; EXPRESSED IN PLACENTA, SIGNAL = 2.9; EXPRESSED IN ADULT LIVER, SIGNAL =   4; EXPRESSED IN LUNG, SIGNAL =   3; EXPRESSED IN BONE MARROW, SIGNAL =   3; EST_HUMAN HIT: AA234083.1, EVALUE 5.70e+00
NRAPGDNTHKSAGALREWHP

SEQ ID NO: 37404 - protein, 112 aa, Homo sapiens
  MAP TO AC000054.10; EXPRESSED IN HELA, SIGNAL = 0.83; EXPRESSED IN BRAIN, SIGNAL = 0.74; EXPRESSED IN BONE MARROW, SIGNAL = 0.74; EXPRESSED IN FETAL LIVER, SIGNAL = 0.59; EXPRESSED IN LUNG, SIGNAL = 1.1; EXPRESSED IN HEART, SIGNAL = 0.88; EST_HUMAN HIT: AI095702.1, EVALUE 1.90e-02; SWISSPROT HIT: P54842, EVALUE 4.50e+00
NECVYGNYPEIPLEEMPDADGVASTPSLNIQEPCSPATSSEAFTPKEGSPYKAPIYIPDDIPIPAEFELRESNMPGAGLGIWTKRKIEVGEKFGPYVGEQRSNLKDPSYGWE

SEQ ID NO: 37405 - protein, 22 aa, Homo sapiens
  MAP TO AC000054.10; EXPRESSED IN HELA, SIGNAL = 0.83; EXPRESSED IN BRAIN, SIGNAL = 0.74; EXPRESSED IN BONE MARROW, SIGNAL = 0.74; EXPRESSED IN FETAL LIVER, SIGNAL = 0.59; EXPRESSED IN LUNG, SIGNAL = 1.1; EXPRESSED IN HEART, SIGNAL = 0.88
IMSVYMATTLKYLWKKCQMQME

SEQ ID NO: 37406 - protein, 36 aa, Homo sapiens
  MAP TO AJ010597.1; EXPRESSED IN HEART, SIGNAL =   1; EXPRESSED IN ADULT LIVER, SIGNAL = 0.98; EXPRESSED IN PLACENTA, SIGNAL = 1.1; EXPRESSED IN BONE MARROW, SIGNAL = 1.1; EXPRESSED IN LUNG, SIGNAL = 1.3; EXPRESSED IN HELA, SIGNAL = 1.1; EXPRESSED IN BT474, SIGNAL = 1.2; EXPRESSED IN HBL100, SIGNAL = 1.6; EXPRESSED IN FETAL LIVER, SIGNAL = 1.2; EXPRESSED IN BRAIN, SIGNAL = 1.3; EST_HUMAN HIT: R00573.1, EVALUE 1.00e-12; SWISSPROT HIT: Q9YB39, EVALUE 3.60e+00
FFICLKTGKKRNLNWKTPTISVGFLLLLFSLEMGGV

SEQ ID NO: 37407 - protein, 139 aa, Homo sapiens
  MAP TO AL022395.2; EXPRESSED IN BONE MARROW, SIGNAL = 3.6; EXPRESSED IN LUNG, SIGNAL = 3.7; EXPRESSED IN HBL100, SIGNAL = 4.9; EXPRESSED IN BT474, SIGNAL = 4.8; EXPRESSED IN BRAIN, SIGNAL = 4.7; EXPRESSED IN HEART, SIGNAL = 5.7; EXPRESSED IN HELA, SIGNAL = 3.6; EXPRESSED IN PLACENTA, SIGNAL =   5; EXPRESSED IN ADULT LIVER, SIGNAL = 5.5; EXPRESSED IN FETAL LIVER, SIGNAL = 4.4; EST_HUMAN HIT: AW837529.1, EVALUE 5.00e-80; SWISSPROT HIT: Q99593, EVALUE 7.20e-01
MNTHRAIESNSQTSPLNAEVVQYAKEVVDFSSHYGSENSMSYTMWNLAGVPNVFPSSGDFTQTAVFRTYGTWWDQCPSASLPFKRTPPNFQSQDYVELTFEQQVYPTAVHVLETYHPGAVIRILACSANPYSPNPPAEV

SEQ ID NO: 37408 - protein, 60 aa, Homo sapiens
  MAP TO AC007740.1; EXPRESSED IN PLACENTA, SIGNAL = 0.82; EXPRESSED IN BONE MARROW, SIGNAL = 0.75; EXPRESSED IN FETAL LIVER, SIGNAL = 0.74; EXPRESSED IN LUNG, SIGNAL = 0.83; EXPRESSED IN HELA, SIGNAL = 0.64; EXPRESSED IN BT474, SIGNAL = 0.69; EXPRESSED IN HBL100, SIGNAL = 0.68; EXPRESSED IN BRAIN, SIGNAL = 0.8; EXPRESSED IN HEART, SIGNAL = 0.96; EXPRESSED IN ADULT LIVER, SIGNAL = 0.86; EST_HUMAN HIT: AW886063.1, EVALUE 1.00e-21; SWISSPROT HIT: Q12809, EVALUE 2.00e-22
VHLYAKPGKSNADVRALTYCDLHKIQREDLLEVLDMYPEFSDHFLTNLELTFNLRHESAK

SEQ ID NO: 37409 - protein, 108 aa, Homo sapiens
  MAP TO AC010684.2; EXPRESSED IN BONE MARROW, SIGNAL = 3.4; EXPRESSED IN LUNG, SIGNAL = 6.5; EXPRESSED IN HELA, SIGNAL = 4.6; EXPRESSED IN FETAL LIVER, SIGNAL = 4.2; EXPRESSED IN ADULT LIVER, SIGNAL =   2; EXPRESSED IN BRAIN, SIGNAL = 2.4; EXPRESSED IN PLACENTA, SIGNAL = 2.5; EXPRESSED IN HEART, SIGNAL = 2.2; EXPRESSED IN HBL100, SIGNAL = 5.8; EXPRESSED IN BT474, SIGNAL = 4.9; SWISSPROT HIT: P72297, EVALUE 9.20e+00; EST_HUMAN HIT: AW088574.1, EVALUE 1.00e-21
RGDKKEVQGSQGTQEASFSLFFYSVLSIAQNILACPLVMLRRDWERCGMTLLQVTSSLRRRRLQSRRKNAKRVLLHIELKESLMQQKRELSRLKKSKKKRRKLRKMKR

SEQ ID NO: 37410 - protein, 59 aa, Homo sapiens
  MAP TO AC010684.2; EXPRESSED IN BONE MARROW, SIGNAL = 3.4; EXPRESSED IN LUNG, SIGNAL = 6.5; EXPRESSED IN HELA, SIGNAL = 4.6; EXPRESSED IN FETAL LIVER, SIGNAL = 4.2; EXPRESSED IN ADULT LIVER, SIGNAL =   2; EXPRESSED IN BRAIN, SIGNAL = 2.4; EXPRESSED IN PLACENTA, SIGNAL = 2.5; EXPRESSED IN HEART, SIGNAL = 2.2; EXPRESSED IN HBL100, SIGNAL = 5.8; EXPRESSED IN BT474, SIGNAL = 4.9; EST_HUMAN HIT: BE972578.1, EVALUE 3.00e-05; SWISSPROT HIT: P07155, EVALUE 9.00e-03
AAKPKEKCEKGLAAYRAKGKPDAAKKGVVKAEKKQEKEEEAEENEEGEEGEDKEMKMKK

SEQ ID NO: 37411 - protein, 59 aa, Homo sapiens
  MAP TO AC007395.2; EXPRESSED IN PLACENTA, SIGNAL = 0.6; EXPRESSED IN BT474, SIGNAL = 0.61; EXPRESSED IN LUNG, SIGNAL = 0.61; EXPRESSED IN BONE MARROW, SIGNAL = 0.83; EXPRESSED IN HBL100, SIGNAL = 0.87; EXPRESSED IN FETAL LIVER, SIGNAL = 0.59; EXPRESSED IN HEART, SIGNAL = 0.8
ISLLKPISLCIFLVSSSQLHKPKILELSLVSLSFTFSSSLSANSAGSVLQNISQIFLLG

SEQ ID NO: 37412 - protein, 25 aa, Homo sapiens
  MAP TO AC007395.2; EXPRESSED IN PLACENTA, SIGNAL = 0.6; EXPRESSED IN BT474, SIGNAL = 0.61; EXPRESSED IN LUNG, SIGNAL = 0.61; EXPRESSED IN BONE MARROW, SIGNAL = 0.83; EXPRESSED IN HBL100, SIGNAL = 0.87; EXPRESSED IN FETAL LIVER, SIGNAL = 0.59; EXPRESSED IN HEART, SIGNAL = 0.8
SQVERFGICFGGLSQQNLLIDWMKK

SEQ ID NO: 37413 - protein, 37 aa, Homo sapiens
  MAP TO AC010873.2; EXPRESSED IN PLACENTA, SIGNAL =   2; EXPRESSED IN HEART, SIGNAL = 0.94; EXPRESSED IN ADULT LIVER, SIGNAL = 1.1; EXPRESSED IN BT474, SIGNAL =   1; EXPRESSED IN FETAL LIVER, SIGNAL = 1.3; EXPRESSED IN BONE MARROW, SIGNAL = 0.96; EXPRESSED IN BRAIN, SIGNAL = 0.97
MPLFLPGLLHEATKSFQVHKEQSEPVDRNILTAHHGR

SEQ ID NO: 37414 - protein, 55 aa, Homo sapiens
  MAP TO AC007870.3; EXPRESSED IN BT474, SIGNAL = 0.65; EXPRESSED IN HELA, SIGNAL = 0.64; EXPRESSED IN ADULT LIVER, SIGNAL = 0.84; EXPRESSED IN PLACENTA, SIGNAL = 0.71; EXPRESSED IN BONE MARROW, SIGNAL = 0.69; EXPRESSED IN FETAL LIVER, SIGNAL = 0.88; EXPRESSED IN LUNG, SIGNAL = 0.74; EXPRESSED IN HEART, SIGNAL = 0.93
QLREPKRKSKLLNKNKISNSRPIAKGNMRLTEDAKMTDESSSQSKFCLQNEFIIS

SEQ ID NO: 37415 - protein, 34 aa, Homo sapiens
  MAP TO AC005674.9; EXPRESSED IN HELA, SIGNAL = 0.65; EXPRESSED IN FETAL LIVER, SIGNAL = 1.1; EXPRESSED IN LUNG, SIGNAL = 0.77; EXPRESSED IN HEART, SIGNAL = 0.78; EXPRESSED IN PLACENTA, SIGNAL = 0.66; EXPRESSED IN ADULT LIVER, SIGNAL = 1.1; EXPRESSED IN BONE MARROW, SIGNAL = 0.69
GLVIEHLGRRPLLIGGFGLMGLFFGTLTITLTLQ

SEQ ID NO: 37416 - protein, 23 aa, Homo sapiens
  MAP TO AC005674.9; EXPRESSED IN HELA, SIGNAL = 0.65; EXPRESSED IN FETAL LIVER, SIGNAL = 1.1; EXPRESSED IN LUNG, SIGNAL = 0.77; EXPRESSED IN HEART, SIGNAL = 0.78; EXPRESSED IN PLACENTA, SIGNAL = 0.66; EXPRESSED IN ADULT LIVER, SIGNAL = 1.1; EXPRESSED IN BONE MARROW, SIGNAL = 0.69
DGDPSSLVALGSWASSLGPSPSR

SEQ ID NO: 37417 - protein, 34 aa, Homo sapiens
  MAP TO AL023284.1; EXPRESSED IN BONE MARROW, SIGNAL =   7; EXPRESSED IN HEART, SIGNAL = 4.4; EXPRESSED IN ADULT LIVER, SIGNAL = 4.9; EXPRESSED IN BRAIN, SIGNAL = 4.7; EXPRESSED IN LUNG, SIGNAL = 7.1; EXPRESSED IN HELA, SIGNAL = 6.8; EXPRESSED IN HBL100, SIGNAL = 8.6; EXPRESSED IN PLACENTA, SIGNAL = 8.1; EXPRESSED IN BT474, SIGNAL = 7.3; EXPRESSED IN FETAL LIVER, SIGNAL = 7.7
LTPRRTRTAAFYSMIVVTLCSSKDQVSHSGRDCA

SEQ ID NO: 37418 - protein, 30 aa, Homo sapiens
  MAP TO AL023656.8; EXPRESSED IN HELA, SIGNAL = 0.97; EXPRESSED IN LUNG, SIGNAL = 0.9; EXPRESSED IN BRAIN, SIGNAL = 0.78; EXPRESSED IN HEART, SIGNAL = 0.86; SWISSPROT HIT: P41361, EVALUE 8.30e+00
ICAFMKNQHADTQFYQHTDTQQNKYDNTYV

SEQ ID NO: 37419 - protein, 44 aa, Homo sapiens
  MAP TO AL031406.1; EXPRESSED IN HBL100, SIGNAL = 4.1; EXPRESSED IN FETAL LIVER, SIGNAL = 4.5; EXPRESSED IN LUNG, SIGNAL =   4; EXPRESSED IN BONE MARROW, SIGNAL = 3.8; EXPRESSED IN HELA, SIGNAL = 3.9; EXPRESSED IN HEART, SIGNAL = 3.8; EXPRESSED IN PLACENTA, SIGNAL = 4.1; EXPRESSED IN BT474, SIGNAL = 3.8; EXPRESSED IN ADULT LIVER, SIGNAL = 5.4; EXPRESSED IN BRAIN, SIGNAL =   5
  unsure 9
YNGRCEQRXRTAHTNSTSPTVHSALMGFVTPVMDLWLARSQGLL

SEQ ID NO: 37420 - protein, 24 aa, Homo sapiens
  MAP TO AL031406.1; EXPRESSED IN HBL100, SIGNAL = 4.1; EXPRESSED IN FETAL LIVER, SIGNAL = 4.5; EXPRESSED IN LUNG, SIGNAL =   4; EXPRESSED IN BONE MARROW, SIGNAL = 3.8; EXPRESSED IN HELA, SIGNAL = 3.9; EXPRESSED IN HEART, SIGNAL = 3.8; EXPRESSED IN PLACENTA, SIGNAL = 4.1; EXPRESSED IN BT474, SIGNAL = 3.8; EXPRESSED IN ADULT LIVER, SIGNAL = 5.4; EXPRESSED IN BRAIN, SIGNAL =   5
  unsure 12
TMAGVNSAHAPXTLTARRLQCTLH

SEQ ID NO: 37421 - protein, 38 aa, Homo sapiens
  MAP TO AC007776.1; EXPRESSED IN HELA, SIGNAL = 1.3; EXPRESSED IN PLACENTA, SIGNAL = 0.59; EXPRESSED IN LUNG, SIGNAL = 0.73; EXPRESSED IN HEART, SIGNAL = 0.92
  unsure 25
  unsure 30
  unsure 37
LSEAQQKLLVKSMEKKILPVQLKLXEGKTXRCWGESXE

SEQ ID NO: 37422 - protein, 53 aa, Homo sapiens
  MAP TO AL109657.7; EXPRESSED IN BRAIN, SIGNAL = 6.5; EXPRESSED IN FETAL LIVER, SIGNAL = 0.93; EXPRESSED IN BT474, SIGNAL =   1; EXPRESSED IN HBL100, SIGNAL = 1.3; EXPRESSED IN HELA, SIGNAL = 1.2; EXPRESSED IN HEART, SIGNAL = 0.94; SWISSPROT HIT: O80543, EVALUE 1.00e-09; EST_HUMAN HIT: BE208434.1, EVALUE 9.00e-25
AMFGGDTLYELRCSLQLAETEREGGFSPHISPFTAVNDLGHLLGRAGFNTLTV

SEQ ID NO: 37423 - protein, 100 aa, Homo sapiens
  MAP TO AC007746.1; EXPRESSED IN BONE MARROW, SIGNAL = 3.7; EXPRESSED IN ADULT LIVER, SIGNAL = 1.1; EXPRESSED IN PLACENTA, SIGNAL = 1.1; EXPRESSED IN BT474, SIGNAL = 1.1; EXPRESSED IN LUNG, SIGNAL = 1.5; EXPRESSED IN HELA, SIGNAL = 1.3; EXPRESSED IN BRAIN, SIGNAL = 1.3; EXPRESSED IN HBL100, SIGNAL = 1.1; EXPRESSED IN FETAL LIVER, SIGNAL = 1.2; EXPRESSED IN HEART, SIGNAL = 1.4; EST_HUMAN HIT: R88663.1, EVALUE 7.80e-01; SWISSPROT HIT: P53780, EVALUE 4.00e-02
IGAKHQELREKQARGLLDYATGAIGSVYDMDDDEMDPNYARVNHFREPCTSANVFRSPSPPRAGPFGYPRDGHPLSPERDHLEGLYAKVNKPYHPLVPAD

SEQ ID NO: 37424 - protein, 44 aa, Homo sapiens
  MAP TO AC007537.3; EXPRESSED IN HBL100, SIGNAL = 0.72; EXPRESSED IN HELA, SIGNAL = 0.67; EXPRESSED IN PLACENTA, SIGNAL = 0.6; EXPRESSED IN FETAL LIVER, SIGNAL = 0.61; EXPRESSED IN LUNG, SIGNAL = 0.7; EXPRESSED IN HEART, SIGNAL = 0.83; EST_HUMAN HIT: AL043705.1, EVALUE 3.00e-13; SWISSPROT HIT: Q04833, EVALUE 6.00e-08
ATNPCGIDNGGCSHLCLMSPVKPFYQCACPTGVKLLENGKTCKD

SEQ ID NO: 37425 - protein, 130 aa, Homo sapiens
  MAP TO AL031664.1; EXPRESSED IN BONE MARROW, SIGNAL = 0.92; EXPRESSED IN HEART, SIGNAL = 0.98; EXPRESSED IN BT474, SIGNAL = 0.91; EXPRESSED IN ADULT LIVER, SIGNAL = 1.2; EXPRESSED IN BRAIN, SIGNAL = 1.3; EST_HUMAN HIT: D53040.1, EVALUE 3.00e-44
LLFLGHGQLGLVIPHHLVDVRGTLSAMQHQGPLLQHPLLRGAADKSQLQGPGASGVFPPRVSGHERPLVKAHLGVVIPWTPAQQNGLGAHRGSHVDVQVSSSGCVDRDDSLDMLQVADKIFLPLTGVGCE

SEQ ID NO: 37426 - protein, 52 aa, Homo sapiens
  MAP TO AL034399.6; EXPRESSED IN BONE MARROW, SIGNAL = 1.6; EXPRESSED IN BRAIN, SIGNAL = 1.3; EXPRESSED IN HBL100, SIGNAL = 1.6; EXPRESSED IN ADULT LIVER, SIGNAL = 1.6; EXPRESSED IN FETAL LIVER, SIGNAL = 1.2; EXPRESSED IN LUNG, SIGNAL = 1.3; EXPRESSED IN HEART, SIGNAL = 1.5; EXPRESSED IN HELA, SIGNAL = 1.2; EXPRESSED IN PLACENTA, SIGNAL = 1.3; EXPRESSED IN BT474, SIGNAL = 1.3; EST_HUMAN HIT: BE002893.1, EVALUE 1.10e+00; SWISSPROT HIT: P34688, EVALUE 4.50e+00
LGQPGLGCALCPQAGAVTKPQGAVAARLCQTAQISCAGLGLKPDGTQGTAGD

SEQ ID NO: 37427 - protein, 65 aa, Homo sapiens
  MAP TO AL034410.8; EXPRESSED IN PLACENTA, SIGNAL = 6.2; EXPRESSED IN BT474, SIGNAL = 1.5; EXPRESSED IN FETAL LIVER, SIGNAL = 1.2; EXPRESSED IN BONE MARROW, SIGNAL = 1.5; EXPRESSED IN HEART, SIGNAL = 1.4; EXPRESSED IN ADULT LIVER, SIGNAL = 2.2; EXPRESSED IN BRAIN, SIGNAL = 1.7; EXPRESSED IN LUNG, SIGNAL = 1.7; EXPRESSED IN HELA, SIGNAL = 1.6; EXPRESSED IN HBL100, SIGNAL = 1.9; SWISSPROT HIT: P03360, EVALUE 2.00e-06; EST_HUMAN HIT: N76991.1, EVALUE 2.00e-21
TSWEGPYPVILSTPTVVKVAGVESWIHHTQVKPWILPNETENPGDNTSYSCEPLEDLRLLFKRQP

SEQ ID NO: 37428 - protein, 59 aa, Homo sapiens
  MAP TO AL031679.1; EXPRESSED IN HBL100, SIGNAL = 2.8; EXPRESSED IN HELA, SIGNAL = 3.3; EXPRESSED IN BT474, SIGNAL = 3.1; EXPRESSED IN FETAL LIVER, SIGNAL = 3.2; EXPRESSED IN LUNG, SIGNAL = 3.4; EXPRESSED IN BONE MARROW, SIGNAL = 3.2; EXPRESSED IN HEART, SIGNAL = 2.8; EXPRESSED IN ADULT LIVER, SIGNAL =   4; EXPRESSED IN BRAIN, SIGNAL = 3.2; EXPRESSED IN PLACENTA, SIGNAL = 3.2; EST_HUMAN HIT: AI479666.1, EVALUE 5.00e-04; SWISSPROT HIT: O84007, EVALUE 8.80e-01
STIDPVTKARSLRVILDFSLSVIPHIQFISRPCQFSLQNIPHAHLFFSILRTPCLYKPS

SEQ ID NO: 37429 - protein, 30 aa, Homo sapiens
  MAP TO AL031679.1; EXPRESSED IN HBL100, SIGNAL = 2.8; EXPRESSED IN HELA, SIGNAL = 3.3; EXPRESSED IN BT474, SIGNAL = 3.1; EXPRESSED IN FETAL LIVER, SIGNAL = 3.2; EXPRESSED IN LUNG, SIGNAL = 3.4; EXPRESSED IN BONE MARROW, SIGNAL = 3.2; EXPRESSED IN HEART, SIGNAL = 2.8; EXPRESSED IN ADULT LIVER, SIGNAL =   4; EXPRESSED IN BRAIN, SIGNAL = 3.2; EXPRESSED IN PLACENTA, SIGNAL = 3.2
MMVYIDREFSRLRKIDEHEVYFGERIDRAC

SEQ ID NO: 37430 - protein, 26 aa, Homo sapiens
  MAP TO AL049911.2; EXPRESSED IN BONE MARROW, SIGNAL =  10; EXPRESSED IN LUNG, SIGNAL = 2.8; EXPRESSED IN PLACENTA, SIGNAL = 2.2; EXPRESSED IN BT474, SIGNAL = 1.4; EXPRESSED IN BRAIN, SIGNAL = 1.2; EXPRESSED IN HEART, SIGNAL = 1.3; EXPRESSED IN HELA, SIGNAL = 1.6; EXPRESSED IN HBL100, SIGNAL = 1.3; EXPRESSED IN ADULT LIVER, SIGNAL =   3; EXPRESSED IN FETAL LIVER, SIGNAL = 1.5; EST_HUMAN HIT: AA001786.1, EVALUE 4.00e-03
TELKLWKNRYKLLSCEWQNCDESACA

SEQ ID NO: 37431 - protein, 20 aa, Homo sapiens
  MAP TO AL049911.2; EXPRESSED IN BONE MARROW, SIGNAL =  10; EXPRESSED IN LUNG, SIGNAL = 2.8; EXPRESSED IN PLACENTA, SIGNAL = 2.2; EXPRESSED IN BT474, SIGNAL = 1.4; EXPRESSED IN BRAIN, SIGNAL = 1.2; EXPRESSED IN HEART, SIGNAL = 1.3; EXPRESSED IN HELA, SIGNAL = 1.6; EXPRESSED IN HBL100, SIGNAL = 1.3; EXPRESSED IN ADULT LIVER, SIGNAL =   3; EXPRESSED IN FETAL LIVER, SIGNAL = 1.5; EST_HUMAN HIT: AA055018.1, EVALUE 8.60e-01
DRAEIVEKQIQALIMRVAEL

SEQ ID NO: 37432 - protein, 92 aa, Homo sapiens
  MAP TO AC007390.2; EXPRESSED IN BONE MARROW, SIGNAL = 0.77; EXPRESSED IN HBL100, SIGNAL = 1.2; EXPRESSED IN ADULT LIVER, SIGNAL = 0.67; EXPRESSED IN PLACENTA, SIGNAL = 0.72; EXPRESSED IN BT474, SIGNAL =   1; EXPRESSED IN FETAL LIVER, SIGNAL = 0.9; EXPRESSED IN LUNG, SIGNAL = 1.1; EXPRESSED IN HELA, SIGNAL = 1.4; EXPRESSED IN BRAIN, SIGNAL = 0.76; EXPRESSED IN HEART, SIGNAL = 0.87; SWISSPROT HIT: Q15139, EVALUE 2.00e-16; EST_HUMAN HIT: AW402940.1, EVALUE 2.00e-42
EIPLSEILRISSPRDFTNISQGSNPHCFEIITDTMVYFVGENNGDSSHNPVLAATGVGLDVAQSWEKAIRQALMPVTPQASVCTSPGQGKDH

SEQ ID NO: 37433 - protein, 60 aa, Homo sapiens
  MAP TO AC007390.2; EXPRESSED IN BONE MARROW, SIGNAL = 0.77; EXPRESSED IN HBL100, SIGNAL = 1.2; EXPRESSED IN ADULT LIVER, SIGNAL = 0.67; EXPRESSED IN PLACENTA, SIGNAL = 0.72; EXPRESSED IN BT474, SIGNAL =   1; EXPRESSED IN FETAL LIVER, SIGNAL = 0.9; EXPRESSED IN LUNG, SIGNAL = 1.1; EXPRESSED IN HELA, SIGNAL = 1.4; EXPRESSED IN BRAIN, SIGNAL = 0.76; EXPRESSED IN HEART, SIGNAL = 0.87; EST_HUMAN HIT: AW402940.1, EVALUE 1.00e-20; SWISSPROT HIT: P25482, EVALUE 4.40e+00
KFHFQKFSAYLHHEISQTFHKAAIHTVLKSLLILWYTSLVRTMGTALIILFLLPLELDLM

SEQ ID NO: 37434 - protein, 34 aa, Homo sapiens
  MAP TO AL033543.6; EXPRESSED IN BT474, SIGNAL =   2; EXPRESSED IN BRAIN, SIGNAL =   2; EXPRESSED IN PLACENTA, SIGNAL = 1.9; EXPRESSED IN HELA, SIGNAL =   2; EXPRESSED IN HBL100, SIGNAL =   2; EXPRESSED IN FETAL LIVER, SIGNAL =   2; EXPRESSED IN ADULT LIVER, SIGNAL = 2.7; EXPRESSED IN LUNG, SIGNAL = 1.9; EXPRESSED IN BONE MARROW, SIGNAL = 2.2; EXPRESSED IN HEART, SIGNAL = 2.1; EST_HUMAN HIT: H55609.1, EVALUE 6.00e-12; SWISSPROT HIT: P26725, EVALUE 2.10e+00
VLLDWINDVLVEERIIVKQLEEDLYDGQVLQKLL

SEQ ID NO: 37435 - protein, 30 aa, Homo sapiens
  MAP TO AL050343.17; EXPRESSED IN PLACENTA, SIGNAL = 1.7; EXPRESSED IN HBL100, SIGNAL = 1.8; EXPRESSED IN HEART, SIGNAL = 1.6; EXPRESSED IN BT474, SIGNAL = 1.7; EXPRESSED IN FETAL LIVER, SIGNAL = 2.2; EXPRESSED IN ADULT LIVER, SIGNAL = 2.2; EXPRESSED IN LUNG, SIGNAL =   2; EXPRESSED IN BONE MARROW, SIGNAL = 1.9; EXPRESSED IN HELA, SIGNAL =   2; EXPRESSED IN BRAIN, SIGNAL = 2.6; EST_HUMAN HIT: BE929908.1, EVALUE 2.00e-05
PIHLLPKVGILTLLQLDESCDLFPPKRKML

SEQ ID NO: 37436 - protein, 29 aa, Homo sapiens
  MAP TO AC011198.2; EXPRESSED IN FETAL LIVER, SIGNAL =  11; EXPRESSED IN LUNG, SIGNAL =  11; EXPRESSED IN BONE MARROW, SIGNAL =  10; EXPRESSED IN HELA, SIGNAL =  11; EXPRESSED IN HEART, SIGNAL = 7.9; EXPRESSED IN PLACENTA, SIGNAL =  11; EXPRESSED IN BT474, SIGNAL =  11; EXPRESSED IN ADULT LIVER, SIGNAL =  15; EXPRESSED IN BRAIN, SIGNAL = 9.4; EXPRESSED IN HBL100, SIGNAL =  11
KRYACIFSYNGLHPEAVTLAEACRYGPFT

SEQ ID NO: 37437 - protein, 67 aa, Homo sapiens
  MAP TO AL034562.2; EXPRESSED IN FETAL LIVER, SIGNAL = 4.8; EXPRESSED IN BONE MARROW, SIGNAL = 4.6; EXPRESSED IN HEART, SIGNAL = 4.5; EXPRESSED IN PLACENTA, SIGNAL = 4.6; EXPRESSED IN BT474, SIGNAL = 4.6; EXPRESSED IN ADULT LIVER, SIGNAL = 5.6; EXPRESSED IN BRAIN, SIGNAL = 4.4; EXPRESSED IN LUNG, SIGNAL = 5.9; EXPRESSED IN HELA, SIGNAL = 4.5; EXPRESSED IN HBL100, SIGNAL = 4.6; EST_HUMAN HIT: AA442566.1, EVALUE 1.00e-17; SWISSPROT HIT: P01213, EVALUE 1.00e-35
EVAGEGDGDSMGHEDLYKRYGGFLRRIRPKLKWDNQKRYGGFLRRQFKVVTRSQEDPNAYSGELFDA

SEQ ID NO: 37438 - protein, 73 aa, Homo sapiens
  MAP TO AC011232.3; EXPRESSED IN ADULT LIVER, SIGNAL =   2; EXPRESSED IN FETAL LIVER, SIGNAL = 1.4; EXPRESSED IN LUNG, SIGNAL = 1.2; EXPRESSED IN BRAIN, SIGNAL =   2; EXPRESSED IN HEART, SIGNAL = 1.2; EXPRESSED IN HELA, SIGNAL =  16; EXPRESSED IN HBL100, SIGNAL = 1.3; EXPRESSED IN PLACENTA, SIGNAL = 1.8; EXPRESSED IN BT474, SIGNAL = 1.5; EXPRESSED IN BONE MARROW, SIGNAL = 1.4; EST_HUMAN HIT: AI263294.1, EVALUE 6.00e-36; SWISSPROT HIT: P56372, EVALUE 2.00e+00
LAGNRVSSDGWLAFMGVFENLKQLVFFDFSTKEFLPDPALVRKLSQVLSKLTFLQEARLVGWQFDDDDLSVIT

SEQ ID NO: 37439 - protein, 93 aa, Homo sapiens
  MAP TO AL049629.14; EXPRESSED IN FETAL LIVER, SIGNAL = 1.2; EXPRESSED IN LUNG, SIGNAL = 0.97; EXPRESSED IN BONE MARROW, SIGNAL = 1.2; EXPRESSED IN HEART, SIGNAL = 1.2; EXPRESSED IN BT474, SIGNAL = 1.1; EXPRESSED IN ADULT LIVER, SIGNAL = 1.1; EXPRESSED IN BRAIN, SIGNAL = 1.6; EXPRESSED IN PLACENTA, SIGNAL = 1.1; EXPRESSED IN HELA, SIGNAL = 1.2; EXPRESSED IN HBL100, SIGNAL = 1.3
VPLPGYIEAYPRSRYPQSSPSRLPRQYSQPANLHPSLEQAPAPSTAASQQSLAENDPSDAPLTNISTAALVKAIREEVAKLAKKQTDMFEFQV

SEQ ID NO: 37440 - protein, 61 aa, Homo sapiens
  MAP TO AL049629.14; EXPRESSED IN FETAL LIVER, SIGNAL = 1.2; EXPRESSED IN LUNG, SIGNAL = 0.97; EXPRESSED IN BONE MARROW, SIGNAL = 1.2; EXPRESSED IN HEART, SIGNAL = 1.2; EXPRESSED IN BT474, SIGNAL = 1.1; EXPRESSED IN ADULT LIVER, SIGNAL = 1.1; EXPRESSED IN BRAIN, SIGNAL = 1.6; EXPRESSED IN PLACENTA, SIGNAL = 1.1; EXPRESSED IN HELA, SIGNAL = 1.2; EXPRESSED IN HBL100, SIGNAL = 1.3; EST_HUMAN HIT: AW881517.1, EVALUE 4.50e-01; SWISSPROT HIT: P98088, EVALUE 1.50e+00
CPSQGTSRPTPDHGTPRALPPGFLVSTASQPTCTPAWSRPRRPPQRPRSRAWQKTTRLTLP

SEQ ID NO: 37441 - protein, 52 aa, Homo sapiens
  MAP TO AL109933.8; EXPRESSED IN BT474, SIGNAL = 4.6; EXPRESSED IN FETAL LIVER, SIGNAL =   8; EXPRESSED IN BONE MARROW, SIGNAL = 4.8; EXPRESSED IN LUNG, SIGNAL = 6.3; EXPRESSED IN BRAIN, SIGNAL = 4.5; EXPRESSED IN HEART, SIGNAL = 5.4; EXPRESSED IN ADULT LIVER, SIGNAL = 5.9; EXPRESSED IN PLACENTA, SIGNAL = 4.7; EXPRESSED IN HELA, SIGNAL = 6.5; EXPRESSED IN HBL100, SIGNAL = 5.8; SWISSPROT HIT: P00747, EVALUE 2.00e-21; EST_HUMAN HIT: T77573.1, EVALUE 2.00e-20
PPELTPVVQDCYHGDGQSYRGTSSTTTTGKKCQSWSSMTPHRHQKTPENYPN

SEQ ID NO: 37442 - protein, 63 aa, Homo sapiens
  MAP TO AL121572.6; EXPRESSED IN BT474, SIGNAL = 2.5; EXPRESSED IN FETAL LIVER, SIGNAL = 2.7; EXPRESSED IN BONE MARROW, SIGNAL = 2.6; EXPRESSED IN LUNG, SIGNAL = 2.9; EXPRESSED IN HBL100, SIGNAL =   3; EXPRESSED IN HEART, SIGNAL = 3.1; EXPRESSED IN ADULT LIVER, SIGNAL = 2.6; EXPRESSED IN BRAIN, SIGNAL = 2.4; EXPRESSED IN PLACENTA, SIGNAL =   4; EXPRESSED IN HELA, SIGNAL = 3.7; SWISSPROT HIT: P77689, EVALUE 3.30e+00; EST_HUMAN HIT: AU121481.1, EVALUE 5.00e-16
IEAVKLQMLLKIEPQMQSMAKIYHGPLDRPASPCSDVDDIEGTASEEISTARPLLHPNLAGSN

SEQ ID NO: 37443 - protein, 69 aa, Homo sapiens
  MAP TO AL035091.2; EXPRESSED IN BONE MARROW, SIGNAL = 9.8; EXPRESSED IN PLACENTA, SIGNAL =   5; EXPRESSED IN BT474, SIGNAL = 4.1; EXPRESSED IN ADULT LIVER, SIGNAL = 5.7; EXPRESSED IN FETAL LIVER, SIGNAL =   4; EXPRESSED IN BRAIN, SIGNAL = 4.1; EXPRESSED IN LUNG, SIGNAL = 8.4; EXPRESSED IN HEART, SIGNAL = 4.5; EXPRESSED IN HELA, SIGNAL = 4.3; EXPRESSED IN HBL100, SIGNAL = 4.2; EST_HUMAN HIT: C18678.1, EVALUE 1.00e-22; SWISSPROT HIT: P28906, EVALUE 2.00e-24
GRAVISSLALHVSLSSQAEFKKDRGEGLARVLCGEEQADADAGAQVCSLLLAQSEVRPQCLLLVLANRT

SEQ ID NO: 37444 - protein, 59 aa, Homo sapiens
  MAP TO AL118496.10; EXPRESSED IN PLACENTA, SIGNAL = 4.2; EXPRESSED IN HEART, SIGNAL = 4.9; EXPRESSED IN FETAL LIVER, SIGNAL = 4.7; EXPRESSED IN BT474, SIGNAL = 3.1; EXPRESSED IN BONE MARROW, SIGNAL = 2.9; EXPRESSED IN BRAIN, SIGNAL = 3.2; EXPRESSED IN LUNG, SIGNAL =   4; EXPRESSED IN HELA, SIGNAL = 3.9; EXPRESSED IN HBL100, SIGNAL = 3.3; EXPRESSED IN ADULT LIVER, SIGNAL = 4.1; EST_HUMAN HIT: AW402273.1, EVALUE 9.00e-32; SWISSPROT HIT: O60488, EVALUE 1.00e-32
GYTINDKPNPRGEIVIGGQNISMGYFKNEEKTAEDYSVDENGQRWFCTGDIGEFHPDGC

SEQ ID NO: 37445 - protein, 102 aa, Homo sapiens
  MAP TO AL118508.9; EXPRESSED IN BT474, SIGNAL = 8.6; EXPRESSED IN ADULT LIVER, SIGNAL =  11; EXPRESSED IN BONE MARROW, SIGNAL = 9.5; EXPRESSED IN BRAIN, SIGNAL = 8.3; EXPRESSED IN LUNG, SIGNAL =  14; EXPRESSED IN HELA, SIGNAL =   9; EXPRESSED IN PLACENTA, SIGNAL =  10; EXPRESSED IN HBL100, SIGNAL =  10; EXPRESSED IN HEART, SIGNAL =  10; EXPRESSED IN FETAL LIVER, SIGNAL =  11; EST_HUMAN HIT: AW575211.1, EVALUE 2.00e-05; SWISSPROT HIT: P05997, EVALUE 5.00e-04
LGPPSGPPDEEDKGEKEGSTVPRAATASPTRGPEGTPKATPTTSRPSLSSDAPITSAPLKMLAPSGSPGVWREPSIHHATAASGPQEPAGGDSSVATQNNDG

SEQ ID NO: 37446 - protein, 79 aa, Homo sapiens
  MAP TO AL050342.36; EXPRESSED IN PLACENTA, SIGNAL = 3.3; EXPRESSED IN HBL100, SIGNAL = 3.3; EXPRESSED IN HELA, SIGNAL = 2.9; EXPRESSED IN FETAL LIVER, SIGNAL = 3.5; EXPRESSED IN LUNG, SIGNAL = 2.5; EXPRESSED IN BONE MARROW, SIGNAL = 3.4; EXPRESSED IN HEART, SIGNAL = 2.9; EXPRESSED IN BT474, SIGNAL = 2.8; EXPRESSED IN ADULT LIVER, SIGNAL = 3.6; EXPRESSED IN BRAIN, SIGNAL = 2.9; EST_HUMAN HIT: BF364721.1, EVALUE 2.00e-10
MGAVLLLGFLPASCQCPGERGDQGRLSTHVWLSLCSVAGDGWWHHQAKDLHLRRHVLHQLLTHGELPQARGPGVPVHCE

SEQ ID NO: 37447 - protein, 28 aa, Homo sapiens
  MAP TO AL050342.36; EXPRESSED IN PLACENTA, SIGNAL = 3.3; EXPRESSED IN HBL100, SIGNAL = 3.3; EXPRESSED IN HELA, SIGNAL = 2.9; EXPRESSED IN FETAL LIVER, SIGNAL = 3.5; EXPRESSED IN LUNG, SIGNAL = 2.5; EXPRESSED IN BONE MARROW, SIGNAL = 3.4; EXPRESSED IN HEART, SIGNAL = 2.9; EXPRESSED IN BT474, SIGNAL = 2.8; EXPRESSED IN ADULT LIVER, SIGNAL = 3.6; EXPRESSED IN BRAIN, SIGNAL = 2.9; EST_HUMAN HIT: F08485.1, EVALUE 2.00e-09
FDAMFSTNYSHMENYRKREDLVYQSTVR

SEQ ID NO: 37448 - protein, 70 aa, Homo sapiens
  MAP TO AL035425.11; EXPRESSED IN BRAIN, SIGNAL =   2; EXPRESSED IN PLACENTA, SIGNAL = 2.2; EXPRESSED IN HBL100, SIGNAL = 2.6; EXPRESSED IN BT474, SIGNAL = 1.8; EXPRESSED IN FETAL LIVER, SIGNAL = 2.3; EXPRESSED IN LUNG, SIGNAL = 2.6; EXPRESSED IN BONE MARROW, SIGNAL = 2.1; EXPRESSED IN HEART, SIGNAL = 1.9; EXPRESSED IN HELA, SIGNAL = 3.1; EXPRESSED IN ADULT LIVER, SIGNAL =   2; SWISSPROT HIT: P29400, EVALUE 9.00e-24; EST_HUMAN HIT: W07655.1, EVALUE 6.00e-23
TRGLDGPPGPDGLQGPPGPPGTSSVAHGFLITRHSQTTDAPQCPQGTLQVYEGFSLLYVQGNKRAHGQDL

SEQ ID NO: 37449 - protein, 63 aa, Homo sapiens
  MAP TO AC011174.2; EXPRESSED IN BT474, SIGNAL = 3.4; EXPRESSED IN FETAL LIVER, SIGNAL = 7.5; EXPRESSED IN LUNG, SIGNAL = 6.9; EXPRESSED IN BONE MARROW, SIGNAL = 6.7; EXPRESSED IN HEART, SIGNAL =   6; EXPRESSED IN ADULT LIVER, SIGNAL = 8.8; EXPRESSED IN BRAIN, SIGNAL = 5.8; EXPRESSED IN PLACENTA, SIGNAL = 6.7; EXPRESSED IN HELA, SIGNAL = 7.9; EXPRESSED IN HBL100, SIGNAL = 5.5; EST_HUMAN HIT: AW754440.1, EVALUE 1.70e+00; SWISSPROT HIT: P46506, EVALUE 6.60e-01
PVIINCLVFGRHDVSAVRVFCHLIFNKNPIQLSPFFIKVNHTFLLFHLSLQSLAPCSVSSAIS

SEQ ID NO: 37450 - protein, 30 aa, Homo sapiens
  MAP TO AL050344.11; EXPRESSED IN FETAL LIVER, SIGNAL = 3.6; EXPRESSED IN LUNG, SIGNAL = 3.9; EXPRESSED IN BONE MARROW, SIGNAL = 4.6; EXPRESSED IN BRAIN, SIGNAL = 4.7; EXPRESSED IN HELA, SIGNAL = 4.2; EXPRESSED IN HEART, SIGNAL =   4; EXPRESSED IN PLACENTA, SIGNAL = 3.1; EXPRESSED IN HBL100, SIGNAL = 5.2; EXPRESSED IN BT474, SIGNAL = 5.2; EXPRESSED IN ADULT LIVER, SIGNAL = 3.4
IVMVVMVVVVVMMVVLMLVMVLIVVVMVVL

SEQ ID NO: 37451 - protein, 27 aa, Homo sapiens
  MAP TO AC007653.1; EXPRESSED IN PLACENTA, SIGNAL = 5.6; EXPRESSED IN ADULT LIVER, SIGNAL = 0.72; EXPRESSED IN HBL100, SIGNAL = 0.88; EXPRESSED IN HELA, SIGNAL = 0.6; EXPRESSED IN BONE MARROW, SIGNAL = 0.78; EXPRESSED IN HEART, SIGNAL = 0.82; EST_HUMAN HIT: BE544376.1, EVALUE 9.00e-10; SWISSPROT HIT: P70074, EVALUE 2.80e+00
MSQGCVLHWKYGRRGGLQLDHCSHGRA

SEQ ID NO: 37452 - protein, 31 aa, Homo sapiens
  MAP TO AL096712.17; EXPRESSED IN BONE MARROW, SIGNAL = 1.8; EXPRESSED IN PLACENTA, SIGNAL = 1.6; EXPRESSED IN BT474, SIGNAL = 1.8; EXPRESSED IN ADULT LIVER, SIGNAL = 2.1; EXPRESSED IN FETAL LIVER, SIGNAL = 1.9; EXPRESSED IN BRAIN, SIGNAL =   2; EXPRESSED IN LUNG, SIGNAL = 2.2; EXPRESSED IN HEART, SIGNAL = 1.7; EXPRESSED IN HELA, SIGNAL = 2.1; EXPRESSED IN HBL100, SIGNAL = 1.6; EST_HUMAN HIT: R14375.1, EVALUE 2.00e-12; SWISSPROT HIT: P13908, EVALUE 6.30e+00
YIQAFVCDQGNNDRYNYLEMKKPKPRHKEAE

SEQ ID NO: 37453 - protein, 48 aa, Homo sapiens [sequence omitted]

SEQ ID NO: 37454 - protein, 34 aa, Homo sapiens
  MAP TO AP000134.1; EXPRESSED IN PLACENTA, SIGNAL = 0.86; EXPRESSED IN FETAL LIVER, SIGNAL = 0.83; EXPRESSED IN LUNG, SIGNAL = 1.1; EXPRESSED IN BRAIN, SIGNAL = 1.1; EXPRESSED IN BT474, SIGNAL = 0.7; EXPRESSED IN HEART, SIGNAL = 0.85; EXPRESSED IN ADULT LIVER, SIGNAL = 0.91; EXPRESSED IN HELA, SIGNAL = 1.1; EXPRESSED IN HBL100, SIGNAL = 6.4; EXPRESSED IN BONE MARROW, SIGNAL = 0.94
HINTPYNPFCKMLEVDGLEVPGARKGISSHPQQP

SEQ ID NO: 37455 - protein, 36 aa, Homo sapiens
  MAP TO AL118524.7; EXPRESSED IN PLACENTA, SIGNAL = 1.4; EXPRESSED IN HBL100, SIGNAL = 2.5; EXPRESSED IN BT474, SIGNAL = 1.3; EXPRESSED IN BONE MARROW, SIGNAL = 1.5; EXPRESSED IN LUNG, SIGNAL = 2.7; EXPRESSED IN HELA, SIGNAL = 2.7; EXPRESSED IN HEART, SIGNAL = 2.4; EXPRESSED IN ADULT LIVER, SIGNAL = 1.2; EXPRESSED IN FETAL LIVER, SIGNAL = 1.7; EXPRESSED IN BRAIN, SIGNAL = 2.7; EST_HUMAN HIT: AW295603.1, EVALUE 6.00e-09; SWISSPROT HIT: P51825, EVALUE 2.10e+00
LSHSEGSKIGSERESGEHSRHPEAPPPSVEVGSRRS

SEQ ID NO: 37456 - protein, 63 aa, Homo sapiens
  MAP TO AL121580.6; EXPRESSED IN PLACENTA, SIGNAL = 1.3; EXPRESSED IN HEART, SIGNAL = 1.4; EXPRESSED IN FETAL LIVER, SIGNAL = 1.1; EXPRESSED IN BT474, SIGNAL = 1.5; EXPRESSED IN BRAIN, SIGNAL = 1.9; EXPRESSED IN BONE MARROW, SIGNAL = 1.3; EXPRESSED IN LUNG, SIGNAL = 1.6; EXPRESSED IN HELA, SIGNAL = 1.9; EXPRESSED IN HBL100, SIGNAL = 1.7; EXPRESSED IN ADULT LIVER, SIGNAL = 0.97
GWMWTMKMMKVMKMKMKMKKKKMIKMKMKKMKIKMKMKMKIKMKKKKMKMKMLKLKLCMLRPP

SEQ ID NO: 37457 - protein, 50 aa, Homo sapiens
  MAP TO AL121580.6; EXPRESSED IN PLACENTA, SIGNAL = 1.3; EXPRESSED IN HEART, SIGNAL = 1.4; EXPRESSED IN FETAL LIVER, SIGNAL = 1.1; EXPRESSED IN BT474, SIGNAL = 1.5; EXPRESSED IN BRAIN, SIGNAL = 1.9; EXPRESSED IN BONE MARROW, SIGNAL = 1.3; EXPRESSED IN LUNG, SIGNAL = 1.6; EXPRESSED IN HELA, SIGNAL = 1.9; EXPRESSED IN HBL100, SIGNAL = 1.7; EXPRESSED IN ADULT LIVER, SIGNAL = 0.97
FFFIFIFIFIFIFIFIFFIFILIIFFFFIFIFIFITFIIFMVHIQPPGLP

SEQ ID NO: 37458 - protein, 62 aa, Homo sapiens; identical to SEQ ID NO: 35670
  MAP TO AC011242.2; EXPRESSED IN HEART, SIGNAL =   3; EXPRESSED IN PLACENTA, SIGNAL = 4.2; EXPRESSED IN HBL100, SIGNAL = 4.1; EXPRESSED IN BT474, SIGNAL = 3.2; EXPRESSED IN FETAL LIVER, SIGNAL =   4; EXPRESSED IN ADULT LIVER, SIGNAL = 4.1; EXPRESSED IN LUNG, SIGNAL = 3.8; EXPRESSED IN BONE MARROW, SIGNAL = 3.9; EXPRESSED IN BRAIN, SIGNAL = 3.4; EXPRESSED IN HELA, SIGNAL = 3.8; EST_HUMAN HIT: BF031024.1, EVALUE 3.00e-30; SWISSPROT HIT: Q45358, EVALUE 1.20e+00

SEQ ID NO: 37459 - protein, 35 aa, Homo sapiens
  MAP TO AC012002.2; EXPRESSED IN BRAIN, SIGNAL = 4.9; EXPRESSED IN HELA, SIGNAL = 5.3; EXPRESSED IN HEART, SIGNAL = 4.4; EXPRESSED IN PLACENTA, SIGNAL = 6.8; EXPRESSED IN HBL100, SIGNAL = 5.5; EXPRESSED IN ADULT LIVER, SIGNAL = 7.9; EXPRESSED IN BT474, SIGNAL = 4.1; EXPRESSED IN FETAL LIVER, SIGNAL = 5.3; EXPRESSED IN BONE MARROW, SIGNAL = 5.3; EXPRESSED IN LUNG, SIGNAL = 4.5; SWISSPROT HIT: P57072, EVALUE 6.40e+00; EST_HUMAN HIT: BE019472.1, EVALUE 1.70e+00
FGVFACCAPSGTLTDQGPDPGHRSNVTVRALRWPT

SEQ ID NO: 37460 - protein, 25 aa, Homo sapiens
  MAP TO AC012002.2; EXPRESSED IN BRAIN, SIGNAL = 4.9; EXPRESSED IN HELA, SIGNAL = 5.3; EXPRESSED IN HEART, SIGNAL = 4.4; EXPRESSED IN PLACENTA, SIGNAL = 6.8; EXPRESSED IN HBL100, SIGNAL = 5.5; EXPRESSED IN ADULT LIVER, SIGNAL = 7.9; EXPRESSED IN BT474, SIGNAL = 4.1; EXPRESSED IN FETAL LIVER, SIGNAL = 5.3; EXPRESSED IN BONE MARROW, SIGNAL = 5.3; EXPRESSED IN LUNG, SIGNAL = 4.5
LGSSPVVPPLGPSQIRDQTLGTGPT

SEQ ID NO: 37461 - protein, 77 aa, Homo sapiens
  MAP TO AL121590.7; EXPRESSED IN HEART, SIGNAL = 1.2; EXPRESSED IN FETAL LIVER, SIGNAL = 1.4; EXPRESSED IN BT474, SIGNAL =   1; EXPRESSED IN ADULT LIVER, SIGNAL = 1.2; EXPRESSED IN BONE MARROW, SIGNAL = 1.2; EXPRESSED IN BRAIN, SIGNAL = 1.2; EXPRESSED IN LUNG, SIGNAL =   1; EXPRESSED IN HELA, SIGNAL = 1.2; EXPRESSED IN PLACENTA, SIGNAL = 1.1; EXPRESSED IN HBL100, SIGNAL = 1.2; SWISSPROT HIT: P49222, EVALUE 4.50e+00; EST_HUMAN HIT: BE745531.1, EVALUE 7.70e-01
TPERTLSRSPDWKVKTDCSILGARSGKRAEARQHPAVPHRTAAVHSPGVQRPCLTLSSQSLLREVGSGLAAHSGVKT

SEQ ID NO: 37462 - protein, 39 aa, Homo sapiens
  MAP TO AL121590.7; EXPRESSED IN HEART, SIGNAL = 1.2; EXPRESSED IN FETAL LIVER, SIGNAL = 1.4; EXPRESSED IN BT474, SIGNAL =   1; EXPRESSED IN ADULT LIVER, SIGNAL = 1.2; EXPRESSED IN BONE MARROW, SIGNAL = 1.2; EXPRESSED IN BRAIN, SIGNAL = 1.2; EXPRESSED IN LUNG, SIGNAL =   1; EXPRESSED IN HELA, SIGNAL = 1.2; EXPRESSED IN PLACENTA, SIGNAL = 1.1; EXPRESSED IN HBL100, SIGNAL = 1.2
DEGQLDADEPRPAFLTWLPGCCSQSSPSSQETWRVFSRE

SEQ ID NO: 37463 - protein, 86 aa, Homo sapiens
  MAP TO AC011259.2; EXPRESSED IN BRAIN, SIGNAL = 1.2; EXPRESSED IN HELA, SIGNAL = 1.1; EXPRESSED IN PLACENTA, SIGNAL = 1.7; EXPRESSED IN ADULT LIVER, SIGNAL = 1.4; EXPRESSED IN LUNG, SIGNAL = 1.1; EXPRESSED IN BONE MARROW, SIGNAL = 1.4; EXPRESSED IN HEART, SIGNAL = 0.95; EXPRESSED IN HBL100, SIGNAL = 1.2; EXPRESSED IN FETAL LIVER, SIGNAL = 1.6; EXPRESSED IN BT474, SIGNAL = 1.1; SWISSPROT HIT: P34586, EVALUE 6.80e+00
IKKTTAQGGYEMQKNLINFIFSISKYFDMGWTEYLQLKDLLSLAALEIPEGKFRNNQGKNSIFLFKSTYLLISDQCVNYICFKPIH

SEQ ID NO: 37464 - protein, 72 aa, Homo sapiens
  MAP TO AC012064.1; EXPRESSED IN BT474, SIGNAL = 1.7; EXPRESSED IN BRAIN, SIGNAL =   2; EXPRESSED IN HELA, SIGNAL = 1.8; EXPRESSED IN HEART, SIGNAL = 1.2; EXPRESSED IN PLACENTA, SIGNAL =   2; EXPRESSED IN ADULT LIVER, SIGNAL = 2.4; EXPRESSED IN FETAL LIVER, SIGNAL = 1.7; EXPRESSED IN LUNG, SIGNAL = 1.6; EXPRESSED IN BONE MARROW, SIGNAL = 1.8; EXPRESSED IN HBL100, SIGNAL = 1.4; SWISSPROT HIT: O60658, EVALUE 3.00e-37; EST_HUMAN HIT: AW366164.1, EVALUE 3.00e-36
ETLDPIDEVAALIAATIHDVDHPGRTNSFLCNAGSELAILYNDTAVLESHHAALAFQLTTGDDKCNIFKNME

SEQ ID NO: 37465 - protein, 49 aa, Homo sapiens
  MAP TO AC012064.1; EXPRESSED IN BT474, SIGNAL = 1.7; EXPRESSED IN BRAIN, SIGNAL =   2; EXPRESSED IN HELA, SIGNAL = 1.8; EXPRESSED IN HEART, SIGNAL = 1.2; EXPRESSED IN PLACENTA, SIGNAL =   2; EXPRESSED IN ADULT LIVER, SIGNAL = 2.4; EXPRESSED IN FETAL LIVER, SIGNAL = 1.7; EXPRESSED IN LUNG, SIGNAL = 1.6; EXPRESSED IN BONE MARROW, SIGNAL = 1.8; EXPRESSED IN HBL100, SIGNAL = 1.4; SWISSPROT HIT: P10563, EVALUE 6.00e+00; EST_HUMAN HIT: BE788721.1, EVALUE 1.00e-25
SLHSSQPPFMMWITLGEPTPSCVMLEVSWPFCTMTLLCWRATMRPWPSS

SEQ ID NO: 37466 - protein, 60 aa, Homo sapiens
  MAP TO AL121675.8; EXPRESSED IN PLACENTA, SIGNAL = 1.1; EXPRESSED IN BT474, SIGNAL = 0.99; EXPRESSED IN BONE MARROW, SIGNAL = 1.2; EXPRESSED IN BRAIN, SIGNAL = 1.7; EXPRESSED IN LUNG, SIGNAL = 0.94; EXPRESSED IN HELA, SIGNAL = 1.5; EXPRESSED IN HBL100, SIGNAL = 1.7; EXPRESSED IN HEART, SIGNAL = 1.1; EXPRESSED IN FETAL LIVER, SIGNAL = 1.1; EST_HUMAN HIT: BE562591.1, EVALUE 7.00e-28; SWISSPROT HIT: P20351, EVALUE 2.60e+00
VYNLTQEFFRHDKPVNAESQNSVGVFTREEVRNRIRNDPDDPEATKRLKLAMIQQYLKVS

SEQ ID NO: 37467 - protein, 42 aa, Homo sapiens
  MAP TO AC006482.2; EXPRESSED IN PLACENTA, SIGNAL = 0.61; EXPRESSED IN HBL100, SIGNAL = 0.99; EXPRESSED IN LUNG, SIGNAL = 1.2; EXPRESSED IN HELA, SIGNAL = 0.89; EXPRESSED IN HEART, SIGNAL = 0.8; EXPRESSED IN BT474, SIGNAL = 0.6; SWISSPROT HIT: Q28756, EVALUE 9.20e-01; EST_HUMAN HIT: BE182696.1, EVALUE 3.00e-05
PLLLAMKEERHWRSKAFFYLFNASFSDMKLKPDTVSAHLIFD

SEQ ID NO: 37468 - protein, 59 aa, Homo sapiens; identical to SEQ ID NO: 35719
  MAP TO AP000351.3; EXPRESSED IN ADULT LIVER, SIGNAL = 1.2; EXPRESSED IN BONE MARROW, SIGNAL = 1.7; EXPRESSED IN BRAIN, SIGNAL = 1.3; EXPRESSED IN HBL100, SIGNAL = 1.6; EXPRESSED IN LUNG, SIGNAL = 1.5; EXPRESSED IN HELA, SIGNAL = 1.8; EXPRESSED IN PLACENTA, SIGNAL = 1.4; EXPRESSED IN HEART, SIGNAL = 2.3; EXPRESSED IN BT474, SIGNAL = 1.6; EXPRESSED IN FETAL LIVER, SIGNAL = 1.4; EST_HUMAN HIT: H55341.1, EVALUE 2.00e-25; SWISSPROT HIT: P20135, EVALUE 1.00e-12

SEQ ID NO: 37469 - protein, 26 aa, Homo sapiens
  MAP TO AE000659.1; EXPRESSED IN BONE MARROW, SIGNAL = 0.98; EXPRESSED IN BRAIN, SIGNAL = 1.3; EXPRESSED IN HELA, SIGNAL = 1.7; EXPRESSED IN HEART, SIGNAL = 0.97; EXPRESSED IN PLACENTA, SIGNAL = 1.1; EXPRESSED IN HBL100, SIGNAL = 1.3; EXPRESSED IN BT474, SIGNAL = 1.3; EST_HUMAN HIT: AA311102.1, EVALUE 1.10e-02
FCPLCSGPSSVATAQPCSCCSSQCSR

SEQ ID NO: 37470 - protein, 25 aa, Homo sapiens
  MAP TO AC012299.1; EXPRESSED IN BT474, SIGNAL =   3; EXPRESSED IN FETAL LIVER, SIGNAL = 3.1; EXPRESSED IN BRAIN, SIGNAL = 2.9; EXPRESSED IN HELA, SIGNAL = 3.5; EXPRESSED IN PLACENTA, SIGNAL = 3.2; EXPRESSED IN ADULT LIVER, SIGNAL = 3.7; EXPRESSED IN LUNG, SIGNAL = 2.9; EXPRESSED IN BONE MARROW, SIGNAL = 3.2; EXPRESSED IN HEART, SIGNAL = 2.7; EXPRESSED IN HBL100, SIGNAL = 3.3; EST_HUMAN HIT: AA682358.1, EVALUE 1.00e-04
SFGEIMFSWMILMLVDVGQCLGIEE

SEQ ID NO: 37471 - protein, 119 aa, Homo sapiens
  MAP TO D87009.1; EXPRESSED IN LUNG, SIGNAL =  12; EXPRESSED IN BONE MARROW, SIGNAL =  11; EXPRESSED IN BT474, SIGNAL = 1.3; EXPRESSED IN HEART, SIGNAL = 1.6; EST_HUMAN HIT: AW405449.1, EVALUE 9.00e-43; SWISSPROT HIT: P04208, EVALUE 2.00e-32
QSVLTQPPSVSEAPRQRVTISCSGSSSNIGNNAVNWYQQLPGKAPKLLIYYDDLLPSGVSDRFSGSKSGTSASLAISGLQSEDEADYYCAAWDDSLNGPTVLQAQGEQRQEPPSFSARR

SEQ ID NO: 37472 - protein, 76 aa, Homo sapiens
  MAP TO AL049553.15; EXPRESSED IN PLACENTA, SIGNAL = 1.2; EXPRESSED IN ADULT LIVER, SIGNAL = 1.4; EXPRESSED IN LUNG, SIGNAL =   1; EXPRESSED IN BRAIN, SIGNAL = 1.2; EXPRESSED IN BONE MARROW, SIGNAL =   1; EXPRESSED IN HEART, SIGNAL = 1.2; EXPRESSED IN HELA, SIGNAL = 1.1; EXPRESSED IN HBL100, SIGNAL =   1; EXPRESSED IN BT474, SIGNAL = 1.2; EXPRESSED IN FETAL LIVER, SIGNAL = 1.1; EST_HUMAN HIT: AI924653.1, EVALUE 6.00e-12; SWISSPROT HIT: P25033, EVALUE 2.00e-05
PPALKLSVNETLVVNPGENVTVQCLLTGGDPLPQLQWSHGPGPLPLGALAQGGTLSIPSVQARDSGYYNCTATNNV

SEQ ID NO: 37473 - protein, 38 aa, Homo sapiens
  MAP TO AL049553.15; EXPRESSED IN PLACENTA, SIGNAL = 1.2; EXPRESSED IN ADULT LIVER, SIGNAL = 1.4; EXPRESSED IN LUNG, SIGNAL =   1; EXPRESSED IN BRAIN, SIGNAL = 1.2; EXPRESSED IN BONE MARROW, SIGNAL =   1; EXPRESSED IN HEART, SIGNAL = 1.2; EXPRESSED IN HELA, SIGNAL = 1.1; EXPRESSED IN HBL100, SIGNAL =   1; EXPRESSED IN BT474, SIGNAL = 1.2; EXPRESSED IN FETAL LIVER, SIGNAL = 1.1; EST_HUMAN HIT: AI924653.1, EVALUE 1.00e-18; SWISSPROT HIT: O60610, EVALUE 8.10e+00
WAWPTAPGCSGPGWHPQHPFSAGPGLWLLQLHSHQQCG

SEQ ID NO: 37474 - protein, 24 aa, Homo sapiens
  MAP TO AL049553.15; EXPRESSED IN PLACENTA, SIGNAL = 1.2; EXPRESSED IN ADULT LIVER, SIGNAL = 1.4; EXPRESSED IN LUNG, SIGNAL =   1; EXPRESSED IN BRAIN, SIGNAL = 1.2; EXPRESSED IN BONE MARROW, SIGNAL =   1; EXPRESSED IN HEART, SIGNAL = 1.2; EXPRESSED IN HELA, SIGNAL = 1.1; EXPRESSED IN HBL100, SIGNAL =   1; EXPRESSED IN BT474, SIGNAL = 1.2; EXPRESSED IN FETAL LIVER, SIGNAL = 1.1
DPPPCPLSTTSPEAVCERNSGGEP

SEQ ID NO: 37475 - protein, 58 aa, Homo sapiens
  MAP TO AL049629.14; EXPRESSED IN BT474, SIGNAL = 4.6; EXPRESSED IN FETAL LIVER, SIGNAL = 5.6; EXPRESSED IN BRAIN, SIGNAL = 5.2; EXPRESSED IN BONE MARROW, SIGNAL = 4.6; EXPRESSED IN HBL100, SIGNAL = 5.7; EXPRESSED IN PLACENTA, SIGNAL =  16; EXPRESSED IN LUNG, SIGNAL = 6.6; EXPRESSED IN HEART, SIGNAL = 5.9; EXPRESSED IN HELA, SIGNAL = 7.9; EXPRESSED IN ADULT LIVER, SIGNAL = 5.6; EST_HUMAN HIT: AU139072.1, EVALUE 7.00e-29; SWISSPROT HIT: P13987, EVALUE 6.00e-30
NFNDVTTRLRENELTYYCCKKDLCNFNEQLENGGTSLSEKTVLLLVTPFLAAAWSLHP

SEQ ID NO: 37476 - protein, 62 aa, Homo sapiens
  MAP TO AF001549.1; EXPRESSED IN BT474, SIGNAL = 1.6; EXPRESSED IN FETAL LIVER, SIGNAL = 1.9; EXPRESSED IN BRAIN, SIGNAL = 1.6; EXPRESSED IN HELA, SIGNAL = 1.7; EXPRESSED IN PLACENTA, SIGNAL = 1.7; EXPRESSED IN ADULT LIVER, SIGNAL = 2.5; EXPRESSED IN LUNG, SIGNAL = 1.1; EXPRESSED IN BONE MARROW, SIGNAL = 1.4; EXPRESSED IN HEART, SIGNAL = 1.4; EXPRESSED IN HBL100, SIGNAL = 1.5
CHGVVAPSSDDIFKLAEANACWALEDLRCMEEDTFIRTVELLGAVQGFSRPQLMTLKEKAIQ

SEQ ID NO: 37477 - protein, 56 aa, Homo sapiens
  MAP TO AL035072.13; EXPRESSED IN ADULT LIVER, SIGNAL =  16; EXPRESSED IN BT474, SIGNAL =  12; EXPRESSED IN BRAIN, SIGNAL =  13; EXPRESSED IN BONE MARROW, SIGNAL =  13; EXPRESSED IN HBL100, SIGNAL =  14; EXPRESSED IN HEART, SIGNAL =  11; EXPRESSED IN PLACENTA, SIGNAL =  16; EXPRESSED IN FETAL LIVER, SIGNAL =  15; EXPRESSED IN LUNG, SIGNAL =  15; EXPRESSED IN HELA, SIGNAL =  13; EST_HUMAN HIT: AW196383.1, EVALUE 2.10e-01; SWISSPROT HIT: P47927, EVALUE 2.00e+00
EEIKADRVRDLAQDHTASERQSQDLNPGSSESRGQDLTYCAVWPWKAALGNLLGKN

SEQ ID NO: 37478 - protein, 84 aa, Homo sapiens
  MAP TO L14561.1; EXPRESSED IN BRAIN, SIGNAL = 4.2; EXPRESSED IN PLACENTA, SIGNAL = 3.6; EXPRESSED IN BT474, SIGNAL = 4.6; EXPRESSED IN ADULT LIVER, SIGNAL = 5.3; EXPRESSED IN BONE MARROW, SIGNAL = 4.5; EXPRESSED IN HEART, SIGNAL = 5.2; EXPRESSED IN HELA, SIGNAL = 4.8; EXPRESSED IN HBL100, SIGNAL = 5.1; EXPRESSED IN FETAL LIVER, SIGNAL = 4.6; EXPRESSED IN LUNG, SIGNAL = 4.7; EST_HUMAN HIT: AW611841.1, EVALUE 3.00e-29; SWISSPROT HIT: P20020, EVALUE 4.00e-30
CGEVSVGEEEGEGETGWIEGAAILLSVVCVVLVTAFNDWSKEKQFRGLQSRIEQEQKFTVIRGGQVIQIPVADITVGDIAQVKY

SEQ ID NO: 37479 - protein, 62 aa, Homo sapiens
  MAP TO AC012366.2; EXPRESSED IN HBL100, SIGNAL =   5; EXPRESSED IN BT474, SIGNAL = 4.7; EXPRESSED IN BRAIN, SIGNAL = 4.7; EXPRESSED IN HEART, SIGNAL = 4.3; EXPRESSED IN HELA, SIGNAL = 6.5; EXPRESSED IN PLACENTA, SIGNAL = 5.5; EXPRESSED IN ADULT LIVER, SIGNAL = 6.2; EXPRESSED IN FETAL LIVER, SIGNAL = 6.3; EXPRESSED IN LUNG, SIGNAL = 3.8; EXPRESSED IN BONE MARROW, SIGNAL = 4.5; EST_HUMAN HIT: BE395859.1, EVALUE 2.00e-29; SWISSPROT HIT: P35270, EVALUE 3.00e-30
PLDTDMQQLARETSVDPDMRKGLQELKAKGKLVDCKVSAQKLLSLLEKDEFKSGAHVDFYDK

SEQ ID NO: 37480 - protein, 47 aa, Homo sapiens
  MAP TO AC012366.2; EXPRESSED IN HBL100, SIGNAL =   5; EXPRESSED IN BT474, SIGNAL = 4.7; EXPRESSED IN BRAIN, SIGNAL = 4.7; EXPRESSED IN HEART, SIGNAL = 4.3; EXPRESSED IN HELA, SIGNAL = 6.5; EXPRESSED IN PLACENTA, SIGNAL = 5.5; EXPRESSED IN ADULT LIVER, SIGNAL = 6.2; EXPRESSED IN FETAL LIVER, SIGNAL = 6.3; EXPRESSED IN LUNG, SIGNAL = 3.8; EXPRESSED IN BONE MARROW, SIGNAL = 4.5; EST_HUMAN HIT: BE395859.1, EVALUE 5.00e-11
SSGHRHAAVGPGDLRGPRHAKRAAGAEGKGEAGGLQGVSPETAELTG

SEQ ID NO: 37481 - protein, 46 aa, Homo sapiens
  MAP TO AF001905.1; EXPRESSED IN BONE MARROW, SIGNAL = 1.5; EXPRESSED IN PLACENTA, SIGNAL = 1.9; EXPRESSED IN HBL100, SIGNAL = 1.6; EXPRESSED IN BT474, SIGNAL = 1.6; EXPRESSED IN LUNG, SIGNAL = 1.2; EXPRESSED IN BRAIN, SIGNAL = 1.7; EXPRESSED IN HEART, SIGNAL = 1.3; EXPRESSED IN HELA, SIGNAL = 1.5; EXPRESSED IN ADULT LIVER, SIGNAL = 2.1; EXPRESSED IN FETAL LIVER, SIGNAL = 1.7; EST_HUMAN HIT: AA081870.1, EVALUE 1.60e-02
NAVLVSDLMRGSSTGGENKSAWVNHPQIQVAQHRERGFICLGESKG

SEQ ID NO: 37482 - protein, 29 aa, Homo sapiens
  MAP TO L77570.1; EXPRESSED IN LUNG, SIGNAL = 1.9; EXPRESSED IN HBL100, SIGNAL =   2; EXPRESSED IN HEART, SIGNAL = 2.2; EXPRESSED IN PLACENTA, SIGNAL = 1.6; EXPRESSED IN ADULT LIVER, SIGNAL = 1.9; EXPRESSED IN FETAL LIVER, SIGNAL = 1.8; EXPRESSED IN BT474, SIGNAL = 1.7; EXPRESSED IN BRAIN, SIGNAL = 1.9; EXPRESSED IN BONE MARROW, SIGNAL = 2.1; EXPRESSED IN HELA, SIGNAL =   2; EST_HUMAN HIT: F05516.1, EVALUE 7.80e+00
PQPLSRRGWRGGGEGAAAQPRCLPEPLHE

SEQ ID NO: 37483 - protein, 126 aa, Homo sapiens
  MAP TO AC012140.1; EXPRESSED IN BONE MARROW, SIGNAL = 6.8; EXPRESSED IN HELA, SIGNAL = 6.5; EXPRESSED IN PLACENTA, SIGNAL = 6.3; EXPRESSED IN HBL100, SIGNAL = 4.7; EXPRESSED IN BT474, SIGNAL = 4.8; EXPRESSED IN BRAIN, SIGNAL = 2.9; EXPRESSED IN LUNG, SIGNAL = 4.3; EXPRESSED IN HEART, SIGNAL = 2.8; EXPRESSED IN ADULT LIVER, SIGNAL = 3.6; EXPRESSED IN FETAL LIVER, SIGNAL = 5.8; EST_HUMAN HIT: BF344622.1, EVALUE 2.00e-45; SWISSPROT HIT: P57053, EVALUE 2.00e-47
MPEPAKSAPAPKKGSKKAVTKAQKKDGRKRKRSRKESYSVYVYKVLKQVHPDTGISSKAMGIMNSFVNDIFERIAGEASRLPHYNKRSTITSREIQTAVRLLLPGELAKHAVSEGTKAVTKYTSAK

SEQ ID NO: 37484 - protein, 135 aa, Homo sapiens
  MAP TO AC012140.1; EXPRESSED IN BONE MARROW, SIGNAL = 6.8; EXPRESSED IN HELA, SIGNAL = 6.5; EXPRESSED IN PLACENTA, SIGNAL = 6.3; EXPRESSED IN HBL100, SIGNAL = 4.7; EXPRESSED IN BT474, SIGNAL = 4.8; EXPRESSED IN BRAIN, SIGNAL = 2.9; EXPRESSED IN LUNG, SIGNAL = 4.3; EXPRESSED IN HEART, SIGNAL = 2.8; EXPRESSED IN ADULT LIVER, SIGNAL = 3.6; EXPRESSED IN FETAL LIVER, SIGNAL = 5.8; EST_HUMAN HIT: BE622317.1, EVALUE 2.00e-30; SWISSPROT HIT: O88022, EVALUE 7.20e-01
SLLSAGVLGDGLGALGHGVLGQLPGQQQAHGRLDLPGGDGRALVVMRQAGSLTCDAFEDVVDEGVHDSHGLRGDAGVGVDLLQHLVHVYGVALLAAALALPAVLLLRLSHGFLRALLGRGSGLRWLRHVEGELRA

SEQ ID NO: 37485 - protein, 64 aa, Homo sapiens
  MAP TO AC012668.1; EXPRESSED IN BT474, SIGNAL = 3.8; EXPRESSED IN ADULT LIVER, SIGNAL =   9; EXPRESSED IN FETAL LIVER, SIGNAL = 6.7; EXPRESSED IN BONE MARROW, SIGNAL = 4.1; EXPRESSED IN LUNG, SIGNAL = 8.3; EXPRESSED IN BRAIN, SIGNAL = 3.9; EXPRESSED IN HELA, SIGNAL = 4.3; EXPRESSED IN HEART, SIGNAL = 4.3; EXPRESSED IN PLACENTA, SIGNAL =  34; EXPRESSED IN HBL100, SIGNAL =   5; EST_HUMAN HIT: AU140975.1, EVALUE 7.00e-30; SWISSPROT HIT: P02751, EVALUE 6.00e-31
YRIVYSPSVEGSSTELNLPETANSVTLSDLQPGVQYNITIYAVEENQESTPVVIQQETTGTPRS

SEQ ID NO: 37486 - protein, 70 aa, Homo sapiens
  MAP TO AC012145.1; EXPRESSED IN HEART, SIGNAL =   2; EXPRESSED IN FETAL LIVER, SIGNAL = 2.1; EXPRESSED IN BRAIN, SIGNAL = 2.4; EXPRESSED IN HBL100, SIGNAL = 2.1; EXPRESSED IN HELA, SIGNAL = 2.2; EXPRESSED IN PLACENTA, SIGNAL = 2.1; EXPRESSED IN ADULT LIVER, SIGNAL = 2.5; EXPRESSED IN BT474, SIGNAL = 2.2; EXPRESSED IN LUNG, SIGNAL = 2.3; EXPRESSED IN BONE MARROW, SIGNAL = 2.4; EST_HUMAN HIT: AW662505.1, EVALUE 9.00e-10; SWISSPROT HIT: O00624, EVALUE 3.00e-34
PDFCSLRYGLALIMHFSNFTMITQRVSLSIAIIAMVNTTQQQGLSNASTEGPVADAFNNSSISIKEFDTK

SEQ ID NO: 37487 - protein, 28 aa, Homo sapiens
  MAP TO AC012132.1; EXPRESSED IN PLACENTA, SIGNAL = 1.4; EXPRESSED IN HEART, SIGNAL = 2.4; EXPRESSED IN FETAL LIVER, SIGNAL = 1.4; EXPRESSED IN ADULT LIVER, SIGNAL = 1.3; EXPRESSED IN BRAIN, SIGNAL = 2.1; EXPRESSED IN HELA, SIGNAL =   2; EXPRESSED IN HBL100, SIGNAL =   1; EXPRESSED IN BT474, SIGNAL = 1.8; EXPRESSED IN LUNG, SIGNAL = 1.8; EXPRESSED IN BONE MARROW, SIGNAL = 1.8
HFPPPPAAPSPPPPPTSTTTVVQQGILY

SEQ ID NO: 37488 - protein, 32 aa, Homo sapiens
  MAP TO AL122001.5; EXPRESSED IN LUNG, SIGNAL = 2.6; EXPRESSED IN BRAIN, SIGNAL = 2.8; EXPRESSED IN PLACENTA, SIGNAL = 2.6; EXPRESSED IN BT474, SIGNAL = 2.2; EXPRESSED IN ADULT LIVER, SIGNAL = 2.8; EXPRESSED IN BONE MARROW, SIGNAL = 2.3; EXPRESSED IN HEART, SIGNAL = 2.7; EXPRESSED IN HELA, SIGNAL = 2.5; EXPRESSED IN HBL100, SIGNAL = 2.5; EXPRESSED IN FETAL LIVER, SIGNAL =   3; EST_HUMAN HIT: AW001207.1, EVALUE 2.00e-12; SWISSPROT HIT: O00519, EVALUE 2.00e-13
VVPVTTVTAEDEAQMEHYRGYFGDIWDKMLQK

SEQ ID NO: 37489 - protein, 38 aa, Homo sapiens
  MAP TO AL122001.5; EXPRESSED IN LUNG, SIGNAL = 2.6; EXPRESSED IN BRAIN, SIGNAL = 2.8; EXPRESSED IN PLACENTA, SIGNAL = 2.6; EXPRESSED IN BT474, SIGNAL = 2.2; EXPRESSED IN ADULT LIVER, SIGNAL = 2.8; EXPRESSED IN BONE MARROW, SIGNAL = 2.3; EXPRESSED IN HEART, SIGNAL = 2.7; EXPRESSED IN HELA, SIGNAL = 2.5; EXPRESSED IN HBL100, SIGNAL = 2.5; EXPRESSED IN FETAL LIVER, SIGNAL =   3; SWISSPROT HIT: P78325, EVALUE 4.70e+00; EST_HUMAN HIT: AA877606.1, EVALUE 2.00e-12
SQGLLQLPVMCSRGRQLHYAVQLPGLPCRGGACHHGDC

SEQ ID NO: 37490 - protein, 99 aa, Homo sapiens
  MAP TO AL049822.19; EXPRESSED IN ADULT LIVER, SIGNAL = 0.95; EXPRESSED IN BRAIN, SIGNAL = 1.4; EXPRESSED IN LUNG, SIGNAL = 1.1; EXPRESSED IN BONE MARROW, SIGNAL = 1.3; EXPRESSED IN PLACENTA, SIGNAL = 1.6; EXPRESSED IN HEART, SIGNAL = 1.6; EXPRESSED IN HELA, SIGNAL = 1.5; EXPRESSED IN HBL100, SIGNAL = 2.1; EXPRESSED IN BT474, SIGNAL = 1.5; EXPRESSED IN FETAL LIVER, SIGNAL =   2; EST_HUMAN HIT: AI494175.1, EVALUE 3.00e-22
HGVPDHVLQEHLQHPASLLVDEAGDALHAAAASKAPDGRLGDALDIVAQYFTVALSAAFAKTLPAFAAARHDEQEESHPTLCEASGLRQRLYTTVGGPN

SEQ ID NO: 37491 - protein, 90 aa, Homo sapiens
  MAP TO AL049822.19; EXPRESSED IN ADULT LIVER, SIGNAL = 0.95; EXPRESSED IN BRAIN, SIGNAL = 1.4; EXPRESSED IN LUNG, SIGNAL = 1.1; EXPRESSED IN BONE MARROW, SIGNAL = 1.3; EXPRESSED IN PLACENTA, SIGNAL = 1.6; EXPRESSED IN HEART, SIGNAL = 1.6; EXPRESSED IN HELA, SIGNAL = 1.5; EXPRESSED IN HBL100, SIGNAL = 2.1; EXPRESSED IN BT474, SIGNAL = 1.5; EXPRESSED IN FETAL LIVER, SIGNAL =   2; SWISSPROT HIT: P02304, EVALUE 3.00e-46; EST_HUMAN HIT: AV756419.1, EVALUE 3.00e-45
GGAKRHRKVLRDNIQGITKPAIRRLARRGGVKRISGLIYEETRGVLKVFLENVIRDAVTYTEHAKRKTVTAMDVVYALKRQGRTLYGFGG

SEQ ID NO: 37492 - protein, 95 aa, Homo sapiens
  MAP TO AL050320.17; EXPRESSED IN ADULT LIVER, SIGNAL = 9.2; EXPRESSED IN BT474, SIGNAL =   6; EXPRESSED IN FETAL LIVER, SIGNAL = 7.2; EXPRESSED IN BRAIN, SIGNAL =   8; EXPRESSED IN BONE MARROW, SIGNAL = 8.2; EXPRESSED IN LUNG, SIGNAL = 7.6; EXPRESSED IN HBL100, SIGNAL = 9.4; EXPRESSED IN PLACENTA, SIGNAL = 7.9; EXPRESSED IN HELA, SIGNAL = 5.2; EXPRESSED IN HEART, SIGNAL = 6.9; EST_HUMAN HIT: M78330.1, EVALUE 2.40e-02; SWISSPROT HIT: P39428, EVALUE 2.60e+00
HDDGSARQKGESDYKVIIQQWFSKSGPWTTSSNVTWGLLELQQSISESAVLTIPPGDSGAGSNLITMFLRNRKETDLCSGRSKVNRGWNSGRCKQ

SEQ ID NO: 37493 - protein, 20 aa, Homo sapiens
  MAP TO AL050320.17; EXPRESSED IN ADULT LIVER, SIGNAL = 9.2; EXPRESSED IN BT474, SIGNAL =   6; EXPRESSED IN FETAL LIVER, SIGNAL = 7.2; EXPRESSED IN BRAIN, SIGNAL =   8; EXPRESSED IN BONE MARROW, SIGNAL = 8.2; EXPRESSED IN LUNG, SIGNAL = 7.6; EXPRESSED IN HBL100, SIGNAL = 9.4; EXPRESSED IN PLACENTA, SIGNAL = 7.9; EXPRESSED IN HELA, SIGNAL = 5.2; EXPRESSED IN HEART, SIGNAL = 6.9
EEWLKQLIQKCFVAVLTSPR

SEQ ID NO: 37494 - protein, 46 aa, Homo sapiens
  MAP TO AL122020.1; EXPRESSED IN BONE MARROW, SIGNAL = 5.3; EXPRESSED IN BRAIN, SIGNAL = 4.9; EXPRESSED IN PLACENTA, SIGNAL = 5.7; EXPRESSED IN BT474, SIGNAL = 4.2; EXPRESSED IN HEART, SIGNAL = 5.1; EXPRESSED IN HELA, SIGNAL = 6.1; EXPRESSED IN HBL100, SIGNAL =   6; EXPRESSED IN ADULT LIVER, SIGNAL = 5.7; EXPRESSED IN FETAL LIVER, SIGNAL = 6.4; EXPRESSED IN LUNG, SIGNAL = 5.2; EST_HUMAN HIT: BF346741.1, EVALUE 1.80e+00; SWISSPROT HIT: P32957, EVALUE 2.10e+00
YTEENCRRAKGVRQLGASTSQGSVGSCWCLGTAVTSILSPLAVGIQ

SEQ ID NO: 37495 - protein, 32 aa, Homo sapiens
  MAP TO AC011422.2; EXPRESSED IN PLACENTA, SIGNAL = 1.7; EXPRESSED IN FETAL LIVER, SIGNAL = 1.9; EXPRESSED IN LUNG, SIGNAL = 1.7; EXPRESSED IN BRAIN, SIGNAL = 1.5; EXPRESSED IN HEART, SIGNAL = 1.8; EXPRESSED IN HELA, SIGNAL =   2; EXPRESSED IN HBL100, SIGNAL = 1.8; EXPRESSED IN BT474, SIGNAL = 1.6; EXPRESSED IN ADULT LIVER, SIGNAL =   2; EXPRESSED IN BONE MARROW, SIGNAL = 1.5; EST_HUMAN HIT: AA569592.1, EVALUE 3.00e-11
LSDVASFATKLKNTLIQYHSIEEDKWRVAKKT

SEQ ID NO: 37496 - protein, 31 aa, Homo sapiens
  MAP TO AC011422.2; EXPRESSED IN PLACENTA, SIGNAL = 1.7; EXPRESSED IN FETAL LIVER, SIGNAL = 1.9; EXPRESSED IN LUNG, SIGNAL = 1.7; EXPRESSED IN BRAIN, SIGNAL = 1.5; EXPRESSED IN HEART, SIGNAL = 1.8; EXPRESSED IN HELA, SIGNAL =   2; EXPRESSED IN HBL100, SIGNAL = 1.8; EXPRESSED IN BT474, SIGNAL = 1.6; EXPRESSED IN ADULT LIVER, SIGNAL =   2; EXPRESSED IN BONE MARROW, SIGNAL = 1.5
CLMLLLLQLNLKTLSSSTIALKKISGELLRK

SEQ ID NO: 37497 - protein, 124 aa, Homo sapiens
  MAP TO AC011504.2; EXPRESSED IN PLACENTA, SIGNAL =  10; EXPRESSED IN HEART, SIGNAL =   9; EXPRESSED IN LUNG, SIGNAL =  10; EXPRESSED IN BRAIN, SIGNAL = 8.6; EXPRESSED IN HELA, SIGNAL = 9.1; EXPRESSED IN HBL100, SIGNAL =  11; EXPRESSED IN BT474, SIGNAL = 8.9; EXPRESSED IN ADULT LIVER, SIGNAL =  10; EXPRESSED IN FETAL LIVER, SIGNAL =  10; EXPRESSED IN BONE MARROW, SIGNAL = 9.5; SWISSPROT HIT: Q29076, EVALUE 1.20e+00; EST_HUMAN HIT: BE872978.1, EVALUE 5.80e-01
DMDSSKGENNDEEDVETEPEMMTKPLSALSKDSSSDGGDSLQPTGTSQPVQGLVSPLSQAPEKQWHSQGLLQAQDPLAGLPKPERGPQSLDKPMNMLSVLRAYSSDGLAAFNGLASSTANSGCI

SEQ ID NO: 37498 - protein, 25 aa, Homo sapiens
  MAP TO AC011504.2; EXPRESSED IN PLACENTA, SIGNAL =  10; EXPRESSED IN HEART, SIGNAL =   9; EXPRESSED IN LUNG, SIGNAL =  10; EXPRESSED IN BRAIN, SIGNAL = 8.6; EXPRESSED IN HELA, SIGNAL = 9.1; EXPRESSED IN HBL100, SIGNAL =  11; EXPRESSED IN BT474, SIGNAL = 8.9; EXPRESSED IN ADULT LIVER, SIGNAL =  10; EXPRESSED IN FETAL LIVER, SIGNAL =  10; EXPRESSED IN BONE MARROW, SIGNAL = 9.5; SWISSPROT HIT: P22857, EVALUE 1.70e+00
VFSKPRTPWRACQSRSGGPRAWTSR

SEQ ID NO: 37499 - protein, 48 aa, Homo sapiens
  MAP TO AC012122.1; EXPRESSED IN ADULT LIVER, SIGNAL = 3.7; EXPRESSED IN LUNG, SIGNAL = 4.9; EXPRESSED IN BONE MARROW, SIGNAL =   5; EXPRESSED IN HELA, SIGNAL = 5.1; EXPRESSED IN BT474, SIGNAL = 5.1; EXPRESSED IN FETAL LIVER, SIGNAL = 4.9; EXPRESSED IN BRAIN, SIGNAL = 5.3; EXPRESSED IN PLACENTA, SIGNAL = 3.7; EXPRESSED IN HEART, SIGNAL = 4.8; EXPRESSED IN HBL100, SIGNAL = 6.6; EST_HUMAN HIT: BE256829.1, EVALUE 2.00e-15; SWISSPROT HIT: O53657, EVALUE 2.70e+00
SSIPASKPQRGTAPMTAAASPWPGGASVHTGLEKCSSTRPPAEIEPGK

SEQ ID NO: 37500 - protein, 18 aa, Homo sapiens
  MAP TO AC012122.1; EXPRESSED IN ADULT LIVER, SIGNAL = 3.7; EXPRESSED IN LUNG, SIGNAL = 4.9; EXPRESSED IN BONE MARROW, SIGNAL =   5; EXPRESSED IN HELA, SIGNAL = 5.1; EXPRESSED IN BT474, SIGNAL = 5.1; EXPRESSED IN FETAL LIVER, SIGNAL = 4.9; EXPRESSED IN BRAIN, SIGNAL = 5.3; EXPRESSED IN PLACENTA, SIGNAL = 3.7; EXPRESSED IN HEART, SIGNAL = 4.8; EXPRESSED IN HBL100, SIGNAL = 6.6; EST_HUMAN HIT: BE871655.1, EVALUE 2.00e-03
WCLCSHRSGEVQQHQAPC

SEQ ID NO: 37501 - protein, 40 aa, Homo sapiens
  MAP TO AL096829.12; EXPRESSED IN ADULT LIVER, SIGNAL =  13; EXPRESSED IN BT474, SIGNAL = 8.7; EXPRESSED IN BRAIN, SIGNAL = 9.1; EXPRESSED IN HELA, SIGNAL = 9.1; EXPRESSED IN FETAL LIVER, SIGNAL = 9.3; EXPRESSED IN LUNG, SIGNAL = 9.7; EXPRESSED IN BONE MARROW, SIGNAL = 8.6; EXPRESSED IN PLACENTA, SIGNAL = 7.2; EXPRESSED IN HEART, SIGNAL = 7.8; EXPRESSED IN HBL100, SIGNAL = 8.9; EST_HUMAN HIT: H51699.1, EVALUE 7.00e-04
SRMKGGNLDLNGLDHLTAAHVMTIFVAGKKIAVSTQESSS

SEQ ID NO: 37502 - protein, 61 aa, Homo sapiens
  MAP TO AC012130.1; EXPRESSED IN PLACENTA, SIGNAL = 2.9; EXPRESSED IN HEART, SIGNAL = 3.3; EXPRESSED IN LUNG, SIGNAL = 3.2; EXPRESSED IN BRAIN, SIGNAL = 2.5; EXPRESSED IN HELA, SIGNAL = 2.8; EXPRESSED IN HBL100, SIGNAL = 3.4; EXPRESSED IN BT474, SIGNAL = 3.1; EXPRESSED IN ADULT LIVER, SIGNAL = 2.6; EXPRESSED IN FETAL LIVER, SIGNAL = 3.1; EXPRESSED IN BONE MARROW, SIGNAL =   3; SWISSPROT HIT: P39768, EVALUE 4.40e+00
QFRAEKERQPCWSFPMGQKTKGSSNIASSYLLQQLMHRYQELDSDGDEDQGEGEAGSEESS

SEQ ID NO: 37503 - protein, 34 aa, Homo sapiens
  MAP TO AL096865.7; EXPRESSED IN BONE MARROW, SIGNAL = 0.91; EXPRESSED IN LUNG, SIGNAL =   1; EXPRESSED IN PLACENTA, SIGNAL = 3.3; EXPRESSED IN ADULT LIVER, SIGNAL = 1.6; EXPRESSED IN BT474, SIGNAL = 0.93; EXPRESSED IN HEART, SIGNAL =   1; EXPRESSED IN HBL100, SIGNAL = 1.2; EXPRESSED IN BRAIN, SIGNAL =   2; EST_HUMAN HIT: AA858175.1, EVALUE 6.00e-13; SWISSPROT HIT: Q01196, EVALUE 5.00e-14
KSFTLTITVFTNPPQVATYHRAIKVTVDGPREPR

SEQ ID NO: 37504 - protein, 38 aa, Homo sapiens
  MAP TO AC007684.2; EXPRESSED IN PLACENTA, SIGNAL = 1.2; EXPRESSED IN HBL100, SIGNAL = 0.72; EXPRESSED IN BRAIN, SIGNAL = 0.79; EXPRESSED IN BT474, SIGNAL = 0.81; EXPRESSED IN BONE MARROW, SIGNAL = 1.2; EXPRESSED IN FETAL LIVER, SIGNAL = 0.81; EXPRESSED IN HEART, SIGNAL = 0.8; EST_HUMAN HIT: AL044050.1, EVALUE 1.00e-15
KASQLYSHNLPGLFDYARQMQKLPVAIPAHKLPDRILP

SEQ ID NO: 37505 - protein, 17 aa, Homo sapiens
  MAP TO AC012134.1; EXPRESSED IN BT474, SIGNAL = 1.4; EXPRESSED IN ADULT LIVER, SIGNAL = 1.8; EXPRESSED IN LUNG, SIGNAL = 1.5; EXPRESSED IN BONE MARROW, SIGNAL = 1.6; EXPRESSED IN FETAL LIVER, SIGNAL = 1.6; EXPRESSED IN BRAIN, SIGNAL = 1.5; EXPRESSED IN PLACENTA, SIGNAL = 1.4; EXPRESSED IN HEART, SIGNAL = 1.4; EXPRESSED IN HELA, SIGNAL = 1.4; EXPRESSED IN HBL100, SIGNAL = 1.7
SPAMWHGSSCLIGSRTS

SEQ ID NO: 37506 - protein, 33 aa, Homo sapiens
  MAP TO AL109614.15; EXPRESSED IN BT474, SIGNAL =  13; EXPRESSED IN BRAIN, SIGNAL = 5.6; EXPRESSED IN BONE MARROW, SIGNAL = 3.8; EXPRESSED IN HELA, SIGNAL =   3; EXPRESSED IN ADULT LIVER, SIGNAL =  10; EXPRESSED IN FETAL LIVER, SIGNAL = 6.2; EXPRESSED IN LUNG, SIGNAL = 4.2; EXPRESSED IN PLACENTA, SIGNAL = 5.5; EXPRESSED IN HEART, SIGNAL =  12; EXPRESSED IN HBL100, SIGNAL = 4.3
MDPDPLLCPVEIMVTKKDVISALKRSQPGASHS

SEQ ID NO: 37507 - protein, 35 aa, Homo sapiens
  MAP TO AC012441.1; EXPRESSED IN ADULT LIVER, SIGNAL = 2.5; EXPRESSED IN LUNG, SIGNAL = 3.4; EXPRESSED IN BONE MARROW, SIGNAL =   3; EXPRESSED IN HELA, SIGNAL = 3.2; EXPRESSED IN BT474, SIGNAL = 3.1; EXPRESSED IN FETAL LIVER, SIGNAL = 3.2; EXPRESSED IN BRAIN, SIGNAL = 3.4; EXPRESSED IN PLACENTA, SIGNAL = 3.4; EXPRESSED IN HEART, SIGNAL = 2.9; EXPRESSED IN HBL100, SIGNAL = 3.9
HFTHEYNEPQTAFLRHLGSGDRMQTQACRSRQLLL

SEQ ID NO: 37508 - protein, 34 aa, Homo sapiens
  MAP TO AC012441.1; EXPRESSED IN ADULT LIVER, SIGNAL = 2.5; EXPRESSED IN LUNG, SIGNAL = 3.4; EXPRESSED IN BONE MARROW, SIGNAL =   3; EXPRESSED IN HELA, SIGNAL = 3.2; EXPRESSED IN BT474, SIGNAL = 3.1; EXPRESSED IN FETAL LIVER, SIGNAL = 3.2; EXPRESSED IN BRAIN, SIGNAL = 3.4; EXPRESSED IN PLACENTA, SIGNAL = 3.4; EXPRESSED IN HEART, SIGNAL = 2.9; EXPRESSED IN HBL100, SIGNAL = 3.9; EST_HUMAN HIT: BF306781.1, EVALUE 7.50e+00
ILPTSTMSPRPRSCVTWAVVTGCRPRPVGAGSSF

SEQ ID NO: 37509 - protein, 52 aa, Homo sapiens
  MAP TO AL109653.13; EXPRESSED IN HBL100, SIGNAL =   1; EXPRESSED IN HEART, SIGNAL = 1.4; EST_HUMAN HIT: BF032314.1, EVALUE 3.80e+00
SASHKAPLPNSSQITLKPEECCPVFNTTTTPGLPELRCIPQQDLKSTRESNT

SEQ ID NO: 37510 - protein, 93 aa, Homo sapiens
  MAP TO AF003530.1; EXPRESSED IN BONE MARROW, SIGNAL =  15; EXPRESSED IN PLACENTA, SIGNAL =  14; EXPRESSED IN FETAL LIVER, SIGNAL =  16; EXPRESSED IN BRAIN, SIGNAL =  13; EXPRESSED IN LUNG, SIGNAL =  16; EXPRESSED IN HEART, SIGNAL =  11; EXPRESSED IN HELA, SIGNAL =  16; EXPRESSED IN HBL100, SIGNAL =  12; EXPRESSED IN BT474, SIGNAL =  15; EXPRESSED IN ADULT LIVER, SIGNAL =  14; EST_HUMAN HIT: AI033240.1, EVALUE 3.30e-01; SWISSPROT HIT: O14627, EVALUE 2.00e-51
PYSPPREDWSVYPGPSSTMGTVPVNDVTSSPAAFCSTDYSNLGPVGGGTSGSSLPGQAGGSLVPTDAGAAKASSPSRSRHSPYAWMRKTVQVT

SEQ ID NO: 37511 - protein, 92 aa, Homo sapiens [sequence omitted]

SEQ ID NO: 37512 - protein, 29 aa, Homo sapiens
  MAP TO AC007256.1; EXPRESSED IN HEART, SIGNAL = 0.98; EXPRESSED IN PLACENTA, SIGNAL = 1.2; EXPRESSED IN HELA, SIGNAL = 4.8; EXPRESSED IN ADULT LIVER, SIGNAL = 1.2; EXPRESSED IN BT474, SIGNAL = 1.1; EXPRESSED IN FETAL LIVER, SIGNAL = 1.1; EXPRESSED IN LUNG, SIGNAL = 1.1; EXPRESSED IN BONE MARROW, SIGNAL =   1; EST_HUMAN HIT: AU130508.1, EVALUE 2.00e-08
TWISGWYLMVSYPSYNKFHPKSLQSSWVF

SEQ ID NO: 37513 - protein, 26 aa, Homo sapiens
  MAP TO AL096774.8; EXPRESSED IN BRAIN, SIGNAL = 1.5; EXPRESSED IN BONE MARROW, SIGNAL = 1.6; EXPRESSED IN LUNG, SIGNAL = 1.6; EXPRESSED IN PLACENTA, SIGNAL = 1.7; EXPRESSED IN FETAL LIVER, SIGNAL = 1.7; EXPRESSED IN ADULT LIVER, SIGNAL = 1.8; EXPRESSED IN BT474, SIGNAL =   2; EXPRESSED IN HEART, SIGNAL = 1.4; EXPRESSED IN HELA, SIGNAL = 1.6; EXPRESSED IN HBL100, SIGNAL = 1.8; EST_HUMAN HIT: BF370207.1, EVALUE 1.00e-08
HCLKQVHHAVSNEEHRAKAPVPSDVA

SEQ ID NO: 37514 - protein, 67 aa, Homo sapiens; identical to SEQ ID NO: 35874
  MAP TO AL096814.11; EXPRESSED IN PLACENTA, SIGNAL = 2.6; EXPRESSED IN HBL100, SIGNAL = 2.9; EXPRESSED IN HEART, SIGNAL = 2.2; EXPRESSED IN BRAIN, SIGNAL = 2.5; EXPRESSED IN BONE MARROW, SIGNAL = 2.4; EXPRESSED IN HELA, SIGNAL = 2.6; EXPRESSED IN BT474, SIGNAL = 2.8; EXPRESSED IN ADULT LIVER, SIGNAL = 2.6; EXPRESSED IN FETAL LIVER, SIGNAL = 2.7; EXPRESSED IN LUNG, SIGNAL = 2.3; EST_HUMAN HIT: AW960713.1, EVALUE 2.00e-34; SWISSPROT HIT: P43080, EVALUE 1.00e-35

SEQ ID NO: 37515 - protein, 67 aa, Homo sapiens
  MAP TO AC007251.1; EXPRESSED IN FETAL LIVER, SIGNAL = 1.6; EXPRESSED IN ADULT LIVER, SIGNAL = 1.1; EXPRESSED IN LUNG, SIGNAL = 1.3; EXPRESSED IN HELA, SIGNAL =   2; EXPRESSED IN PLACENTA, SIGNAL = 1.4; EXPRESSED IN HBL100, SIGNAL = 1.9; EXPRESSED IN HEART, SIGNAL = 1.5; EST_HUMAN HIT: AI452907.1, EVALUE 1.00e-03; SWISSPROT HIT: P08071, EVALUE 1.10e+00
MCPPCLLSLSAMTWPLIIWKSFPHIIRELILKVVSSMAIPGLQKRAIANLFKTASASLTNTFLSALV

SEQ ID NO: 37516 - protein, 40 aa, Homo sapiens
  MAP TO AL008632.1; EXPRESSED IN BONE MARROW, SIGNAL = 1.1; EXPRESSED IN LUNG, SIGNAL = 1.2; EXPRESSED IN BRAIN, SIGNAL = 1.3; EXPRESSED IN HBL100, SIGNAL = 0.98; EXPRESSED IN PLACENTA, SIGNAL = 1.2; EXPRESSED IN HELA, SIGNAL =   1; EXPRESSED IN HEART, SIGNAL = 1.2; EXPRESSED IN BT474, SIGNAL = 1.1; EXPRESSED IN FETAL LIVER, SIGNAL =   2; EXPRESSED IN ADULT LIVER, SIGNAL = 1.2
TYPKCVNLISQTGQVYSKAEDSQRSTVCTLWIRKRVTDLQ

SEQ ID NO: 37517 - protein, 33 aa, Homo sapiens
  MAP TO AF088219.1; EXPRESSED IN FETAL LIVER, SIGNAL =   1; EXPRESSED IN ADULT LIVER, SIGNAL = 1.8; EXPRESSED IN BONE MARROW, SIGNAL = 0.99; EXPRESSED IN LUNG, SIGNAL =   1; EXPRESSED IN HEART, SIGNAL = 0.96; EST_HUMAN HIT: AW117461.1, EVALUE 3.00e-14; SWISSPROT HIT: Q16627, EVALUE 2.00e-15
PSECCFTYTTYKIPRQRIMDYYETNSQCSKPGI

SEQ ID NO: 37518 - protein, 34 aa, Homo sapiens
  MAP TO AF088219.1; EXPRESSED IN FETAL LIVER, SIGNAL =   1; EXPRESSED IN ADULT LIVER, SIGNAL = 1.8; EXPRESSED IN BONE MARROW, SIGNAL = 0.99; EXPRESSED IN LUNG, SIGNAL =   1; EXPRESSED IN HEART, SIGNAL = 0.96; EST_HUMAN HIT: AW117461.1, EVALUE 2.00e-12; SWISSPROT HIT: P45816, EVALUE 2.80e+00
TPQSAASPTLPTRSRVSGLWITMRPTASAPSPEL

SEQ ID NO: 37519 - protein, 40 aa, Homo sapiens
  MAP TO AL049697.8; EXPRESSED IN HEART, SIGNAL = 0.86
TFLTLSKKDKERQLKELTMIVTGIRLFNRDCGKGGEGIDD

SEQ ID NO: 37520 - protein, 24 aa, Homo sapiens
  MAP TO AF023268.1; EXPRESSED IN BT474, SIGNAL = 1.9; EXPRESSED IN ADULT LIVER, SIGNAL = 1.6; EXPRESSED IN BRAIN, SIGNAL = 1.7; EXPRESSED IN BONE MARROW, SIGNAL =   2; EXPRESSED IN LUNG, SIGNAL = 1.9; EXPRESSED IN HELA, SIGNAL = 1.7; EXPRESSED IN PLACENTA, SIGNAL = 1.7; EXPRESSED IN HBL100, SIGNAL = 1.3; EXPRESSED IN HEART, SIGNAL = 2.2; EXPRESSED IN FETAL LIVER, SIGNAL = 1.8
TSSGSSLVRAKYSKSGRQKPRAQD

SEQ ID NO: 37521 - protein, 29 aa, Homo sapiens
  MAP TO AC012593.1; EXPRESSED IN HBL100, SIGNAL = 1.1; EXPRESSED IN HEART, SIGNAL = 2.5; EXPRESSED IN FETAL LIVER, SIGNAL = 2.8; EXPRESSED IN BT474, SIGNAL = 2.2; EXPRESSED IN ADULT LIVER, SIGNAL = 1.9; EXPRESSED IN LUNG, SIGNAL =   3; EXPRESSED IN BRAIN, SIGNAL = 5.6; EXPRESSED IN PLACENTA, SIGNAL = 2.4; EXPRESSED IN HELA, SIGNAL = 6.1; EXPRESSED IN BONE MARROW, SIGNAL =   2
RLKTDAASSPQKPPKPSRTPSFGYLSQQK

SEQ ID NO: 37522 - protein, 63 aa, Homo sapiens
  MAP TO AC007327.1; EXPRESSED IN ADULT LIVER, SIGNAL = 3.3; EXPRESSED IN BT474, SIGNAL = 1.9; EXPRESSED IN BRAIN, SIGNAL = 2.2; EXPRESSED IN HEART, SIGNAL = 2.1; EXPRESSED IN HELA, SIGNAL =   2; EXPRESSED IN HBL100, SIGNAL = 2.1; EXPRESSED IN PLACENTA, SIGNAL = 2.6; EXPRESSED IN FETAL LIVER, SIGNAL = 2.6; EXPRESSED IN LUNG, SIGNAL = 2.6; EXPRESSED IN BONE MARROW, SIGNAL =   2; EST_HUMAN HIT: AI694131.1, EVALUE 1.00e-33; SWISSPROT HIT: P29392, EVALUE 1.10e+00
AVVREGLTNPWIPDNWSWGGVASEHCPVLAEFYTEKDWSKKDAPRNGSGVALERSEANIKHER

SEQ ID NO: 37523 - protein, 47 aa, Homo sapiens
  MAP TO AC007722.1; EXPRESSED IN BONE MARROW, SIGNAL = 0.68; EXPRESSED IN HBL100, SIGNAL = 0.82; EXPRESSED IN FETAL LIVER, SIGNAL = 0.85; EXPRESSED IN PLACENTA, SIGNAL = 0.67; EXPRESSED IN BT474, SIGNAL = 0.8; EXPRESSED IN LUNG, SIGNAL = 0.71; EXPRESSED IN BRAIN, SIGNAL = 0.74; EXPRESSED IN HEART, SIGNAL = 0.89; EST_HUMAN HIT: AI613519.1, EVALUE 6.00e-21
IMLTKRRQLPKPWKTSEPTFIVNCVISNIRNIRNLITISTPMIMHTS

SEQ ID NO: 37524 - protein, 74 aa, Homo sapiens
  MAP TO AC007722.1; EXPRESSED IN BONE MARROW, SIGNAL = 0.68; EXPRESSED IN HBL100, SIGNAL = 0.82; EXPRESSED IN FETAL LIVER, SIGNAL = 0.85; EXPRESSED IN PLACENTA, SIGNAL = 0.67; EXPRESSED IN BT474, SIGNAL = 0.8; EXPRESSED IN LUNG, SIGNAL = 0.71; EXPRESSED IN BRAIN, SIGNAL = 0.74; EXPRESSED IN HEART, SIGNAL = 0.89; EST_HUMAN HIT: AI613519.1, EVALUE 3.00e-24; SWISSPROT HIT: P39959, EVALUE 2.50e-01
QVHFLFLCISWVLKDYVDKEKAIAKALEDLRANFYCELCDKQYQKHQEFDNHINSYDHAHKQVSCSYLLTEEGT

SEQ ID NO: 37525 - protein, 62 aa, Homo sapiens
  MAP TO AL020997.1; EXPRESSED IN BT474, SIGNAL = 1.3; EXPRESSED IN FETAL LIVER, SIGNAL = 1.6; EXPRESSED IN BONE MARROW, SIGNAL = 1.6; EXPRESSED IN LUNG, SIGNAL = 1.6; EXPRESSED IN BRAIN, SIGNAL = 1.4; EXPRESSED IN HBL100, SIGNAL = 1.3; EXPRESSED IN PLACENTA, SIGNAL = 1.3; EXPRESSED IN HELA, SIGNAL = 1.7; EXPRESSED IN HEART, SIGNAL = 1.5; EXPRESSED IN ADULT LIVER, SIGNAL = 1.8; EST_HUMAN HIT: AA810127.1, EVALUE 8.80e-02
ANVPGLLVAVVHVVIQVAVRIKERGKKHKKVAFQSRQIYFRENKPERRLLAELGQRHTLLQT

SEQ ID NO: 37526 - protein, 93 aa, Homo sapiens
  MAP TO AL021069.1; EXPRESSED IN PLACENTA, SIGNAL = 5.9; EXPRESSED IN HEART, SIGNAL = 5.6; EXPRESSED IN ADULT LIVER, SIGNAL = 6.7; EXPRESSED IN FETAL LIVER, SIGNAL = 6.1; EXPRESSED IN BONE MARROW, SIGNAL = 3.9; EXPRESSED IN HELA, SIGNAL = 5.6; EXPRESSED IN HBL100, SIGNAL = 4.3; EXPRESSED IN BT474, SIGNAL = 4.5; EXPRESSED IN BRAIN, SIGNAL =   5; EXPRESSED IN LUNG, SIGNAL =   8; EST_HUMAN HIT: AW965070.1, EVALUE 8.00e-24
VCFHAADKDIPKTGKKKRFNWTYSSTWLRRPQNHGGRRKALLIWQQQEKMRKKQKQKPLINPADLVRLIHYTRIARERPSPMIQSPPPGSLPQ

SEQ ID NO: 37527 - protein, 50 aa, Homo sapiens
  MAP TO AC012447.2; EXPRESSED IN ADULT LIVER, SIGNAL = 1.2; EXPRESSED IN BRAIN, SIGNAL =   1; EXPRESSED IN BONE MARROW, SIGNAL = 0.95; EXPRESSED IN LUNG, SIGNAL = 0.95; EXPRESSED IN HBL100, SIGNAL = 0.97; EXPRESSED IN HEART, SIGNAL = 1.1; EST_HUMAN HIT: H49239.1, EVALUE 4.40e+00
KNFDDEDSVDGNRPSSASSTSSKAPPSSRRNVGMGTTRRLGSSTLGSKSS

SEQ ID NO: 37528 - protein, 43 aa, Homo sapiens
  MAP TO AC012447.2; EXPRESSED IN ADULT LIVER, SIGNAL = 1.2; EXPRESSED IN BRAIN, SIGNAL =   1; EXPRESSED IN BONE MARROW, SIGNAL = 0.95; EXPRESSED IN LUNG, SIGNAL = 0.95; EXPRESSED IN HBL100, SIGNAL = 0.97; EXPRESSED IN HEART, SIGNAL = 1.1; EST_HUMAN HIT: H49239.1, EVALUE 1.20e+00
IKISTMKILWMVTDLPLLVLHHPRLHQVLGETLEWEPPAGLVH

SEQ ID NO: 37529 - protein, 98 aa, Homo sapiens
  MAP TO AF003627.1; EXPRESSED IN HBL100, SIGNAL = 0.91; EXPRESSED IN HEART, SIGNAL = 1.2; EXPRESSED IN BT474, SIGNAL = 0.97; EXPRESSED IN BONE MARROW, SIGNAL = 1.2; SWISSPROT HIT: P34675, EVALUE 8.40e+00; EST_HUMAN HIT: AU143159.1, EVALUE 4.20e+00
PLPLELELLPREATADSGTSAQPMRQPCPPAPDTRAGNAAGTMGGSARPLLLESELPSREATSLLSSSMRQWTRELTRQTHLCTLPHWNQSFCPGKPL

SEQ ID NO: 37530 - protein, 52 aa, Homo sapiens
  MAP TO AC007001.2; EXPRESSED IN HBL100, SIGNAL = 1.1; EXPRESSED IN LUNG, SIGNAL =   1; EXPRESSED IN PLACENTA, SIGNAL = 1.1; EXPRESSED IN BT474, SIGNAL =   1; EXPRESSED IN BONE MARROW, SIGNAL = 1.5; EXPRESSED IN FETAL LIVER, SIGNAL = 1.2; EXPRESSED IN HELA, SIGNAL = 1.2; EXPRESSED IN ADULT LIVER, SIGNAL = 1.1; EXPRESSED IN BRAIN, SIGNAL = 0.93; EXPRESSED IN HEART, SIGNAL = 1.3
SIPFLQHLNPILAAMKTQGKLSTSMNRQSSIYLRVRPTIFLTSQWWESNTHS

SEQ ID NO: 37531 - protein, 26 aa, Homo sapiens
  MAP TO AC007361.1; EXPRESSED IN BONE MARROW, SIGNAL =   4; EXPRESSED IN PLACENTA, SIGNAL = 4.8; EXPRESSED IN ADULT LIVER, SIGNAL = 5.7; EXPRESSED IN BT474, SIGNAL = 3.8; EXPRESSED IN BRAIN, SIGNAL = 3.9; EXPRESSED IN LUNG, SIGNAL =   5; EXPRESSED IN HEART, SIGNAL = 4.7; EXPRESSED IN HELA, SIGNAL = 4.8; EXPRESSED IN HBL100, SIGNAL = 4.7; EXPRESSED IN FETAL LIVER, SIGNAL = 5.2; SWISSPROT HIT: P46934, EVALUE 7.40e-01; EST_HUMAN HIT: BE835921.1, EVALUE 2.10e+00
HNTKTTSWLDPRLAKKAKPPEECKEN

SEQ ID NO: 37532 - protein, 26 aa, Homo sapiens
  MAP TO AC007361.1; EXPRESSED IN BONE MARROW, SIGNAL =   4; EXPRESSED IN PLACENTA, SIGNAL = 4.8; EXPRESSED IN ADULT LIVER, SIGNAL = 5.7; EXPRESSED IN BT474, SIGNAL = 3.8; EXPRESSED IN BRAIN, SIGNAL = 3.9; EXPRESSED IN LUNG, SIGNAL =   5; EXPRESSED IN HEART, SIGNAL = 4.7; EXPRESSED IN HELA, SIGNAL = 4.8; EXPRESSED IN HBL100, SIGNAL = 4.7; EXPRESSED IN FETAL LIVER, SIGNAL = 5.2; EST_HUMAN HIT: AW163674.1, EVALUE 1.00e-04
ITQRQHHGWIHDLRKRLNLQKSAKKM

SEQ ID NO: 37533 - protein, 55 aa, Homo sapiens
  MAP TO AC008249.14; EXPRESSED IN BT474, SIGNAL = 1.3; EXPRESSED IN FETAL LIVER, SIGNAL = 1.6; EXPRESSED IN BONE MARROW, SIGNAL = 1.2; EXPRESSED IN HELA, SIGNAL = 1.8; EXPRESSED IN PLACENTA, SIGNAL = 1.7; EXPRESSED IN ADULT LIVER, SIGNAL = 1.4; EXPRESSED IN BRAIN, SIGNAL = 1.3; EXPRESSED IN LUNG, SIGNAL = 1.2; EXPRESSED IN HEART, SIGNAL =   1; EXPRESSED IN HBL100, SIGNAL = 1.6; EST_HUMAN HIT: AV656295.1, EVALUE 5.00e-15; SWISSPROT HIT: Q13634, EVALUE 7.70e+00
ISHSRTEDETRTQILSIKKVTSEDLKRSYVCHARSAKGEVAKAAKVKQKGNRCGQ

SEQ ID NO: 37534 - protein, 44 aa, Homo sapiens
  MAP TO AJ229042.1; EXPRESSED IN ADULT LIVER, SIGNAL = 5.4; EXPRESSED IN BT474, SIGNAL =   4; EXPRESSED IN FETAL LIVER, SIGNAL = 5.2; EXPRESSED IN BONE MARROW, SIGNAL = 4.8; EXPRESSED IN LUNG, SIGNAL = 4.7; EXPRESSED IN BRAIN, SIGNAL = 4.3; EXPRESSED IN HBL100, SIGNAL = 4.8; EXPRESSED IN PLACENTA, SIGNAL = 4.4; EXPRESSED IN HELA, SIGNAL = 5.1; EXPRESSED IN HEART, SIGNAL =   4; EST_HUMAN HIT: BF339300.1, EVALUE 1.80e+00; SWISSPROT HIT: O08875, EVALUE 4.10e-01
MVETFAVSASPCSVLSMGQPPRAPSPSPRDTGSTTKVEKQLVFG

SEQ ID NO: 37535 - protein, 54 aa, Homo sapiens
  MAP TO AL008583.1; EXPRESSED IN PLACENTA, SIGNAL = 1.9; EXPRESSED IN HEART, SIGNAL = 1.9; EXPRESSED IN ADULT LIVER, SIGNAL = 2.1; EXPRESSED IN FETAL LIVER, SIGNAL = 2.1; EXPRESSED IN BONE MARROW, SIGNAL = 1.9; EXPRESSED IN HELA, SIGNAL = 2.1; EXPRESSED IN HBL100, SIGNAL = 2.4; EXPRESSED IN BT474, SIGNAL =   2; EXPRESSED IN BRAIN, SIGNAL = 2.1; EXPRESSED IN LUNG, SIGNAL = 2.8; EST_HUMAN HIT: BE250870.1, EVALUE 2.00e-26; SWISSPROT HIT: O02414, EVALUE 3.00e-07
SAAKMIKETMDKKFGSSWHVVIGEGFGFEITHEVKNLLYLYFGGTLAVCVWKCS

SEQ ID NO: 37536 - protein, 94 aa, Homo sapiens
  MAP TO AC010130.3; EXPRESSED IN BONE MARROW, SIGNAL = 3.8; EXPRESSED IN LUNG, SIGNAL = 4.1; EXPRESSED IN PLACENTA, SIGNAL = 3.5; EXPRESSED IN HBL100, SIGNAL = 4.4; EXPRESSED IN HELA, SIGNAL =  11; EXPRESSED IN HEART, SIGNAL = 3.2; EXPRESSED IN ADULT LIVER, SIGNAL =   4; EXPRESSED IN BT474, SIGNAL = 3.7; EXPRESSED IN FETAL LIVER, SIGNAL = 5.2; EXPRESSED IN BRAIN, SIGNAL = 3.4; EST_HUMAN HIT: AI633677.1, EVALUE 1.00e-06
YKLEVPTSTFLGSAHRTQGNTFTSLLKKDMIKDTNERPDQPDEEMCRVRSGRVLGAATSFPLDWGCATLSTWMYSPTQKLSEPLSSGIFLEASS

SEQ ID NO: 37537 - protein, 48 aa, Homo sapiens
  MAP TO AC010149.2; EXPRESSED IN BT474, SIGNAL = 5.2; EXPRESSED IN BRAIN, SIGNAL = 3.4; EXPRESSED IN BONE MARROW, SIGNAL = 4.8; EXPRESSED IN PLACENTA, SIGNAL =   2; EXPRESSED IN ADULT LIVER, SIGNAL = 2.8; EXPRESSED IN FETAL LIVER, SIGNAL = 5.2; EXPRESSED IN LUNG, SIGNAL = 7.3; EXPRESSED IN HEART, SIGNAL = 3.3; EXPRESSED IN HELA, SIGNAL = 5.6; EXPRESSED IN HBL100, SIGNAL =   8; EST_HUMAN HIT: AL047944.1, EVALUE 7.00e-18; SWISSPROT HIT: P07155, EVALUE 3.00e-17
EEHKKKNPDASVKFSEFLKKCSETWKTIFAKEKGKFEDMAKADKAIMK

SEQ ID NO: 37538 - protein, 72 aa, Homo sapiens
  MAP TO AC007450.1; EXPRESSED IN BONE MARROW, SIGNAL =   2; EXPRESSED IN LUNG, SIGNAL = 1.7; EXPRESSED IN ADULT LIVER, SIGNAL = 1.9; EXPRESSED IN BT474, SIGNAL =   2; EXPRESSED IN BRAIN, SIGNAL = 2.6; EXPRESSED IN HEART, SIGNAL = 1.4; EXPRESSED IN HELA, SIGNAL = 3.5; EXPRESSED IN HBL100, SIGNAL = 2.4; EXPRESSED IN PLACENTA, SIGNAL = 3.3; EXPRESSED IN FETAL LIVER, SIGNAL = 1.8; SWISSPROT HIT: O15534, EVALUE 3.30e-02; EST_HUMAN HIT: N66951.1, EVALUE 1.00e-27
PSDLFPSPQAAPHQAELGPNSCSASAPPPYNPFITSPPHTRSGLQFRSMTSPPPPAQQFTLKKVAGAKGIVK

SEQ ID NO: 37539 - protein, 27 aa, Homo sapiens
  MAP TO AC010892.2; EXPRESSED IN HBL100, SIGNAL = 1.6; EXPRESSED IN HEART, SIGNAL = 1.4; EXPRESSED IN BRAIN, SIGNAL = 1.2; EXPRESSED IN BONE MARROW, SIGNAL = 1.5; EXPRESSED IN PLACENTA, SIGNAL = 1.5; EXPRESSED IN HELA, SIGNAL = 1.4; EXPRESSED IN BT474, SIGNAL = 1.2; EXPRESSED IN ADULT LIVER, SIGNAL = 1.5; EXPRESSED IN FETAL LIVER, SIGNAL = 1.7; EXPRESSED IN LUNG, SIGNAL = 1.7
EEIGLKEVQELALGHTVSNHRIKISTQ

SEQ ID NO: 37540 - protein, 149 aa, Homo sapiens
  MAP TO AL021407.1; EXPRESSED IN LUNG, SIGNAL = 3.4; EXPRESSED IN BRAIN, SIGNAL = 0.98; EXPRESSED IN PLACENTA, SIGNAL = 1.9; EXPRESSED IN HEART, SIGNAL = 1.1; EXPRESSED IN FETAL LIVER, SIGNAL = 1.4; EXPRESSED IN BONE MARROW, SIGNAL = 1.2; EXPRESSED IN HELA, SIGNAL = 1.2; EXPRESSED IN HBL100, SIGNAL = 1.1; EXPRESSED IN BT474, SIGNAL = 1.2; EST_HUMAN HIT: AW371349.1, EVALUE 3.00e-55; SWISSPROT HIT: O08863, EVALUE 2.00e-07
SRCSILPCRCDTVTSAVMMQYSRDLKGHLASLFLNENINLGKKYVFDIKRTSKEVYDHARRALYNAGVVDLVSRNNQSPSHSPLKSSESSMNCSSCEGLSCQQTRVLQEKLRKLKEAMLCMVCCEEEINSTFCPCGHTVCCESCAAQLQ

SEQ ID NO: 37541 - protein, 44 aa, Homo sapiens
  MAP TO AF030453.1; EXPRESSED IN ADULT LIVER, SIGNAL = 1.5; EXPRESSED IN HELA, SIGNAL = 3.5; EXPRESSED IN HBL100, SIGNAL = 5.3; EXPRESSED IN HEART, SIGNAL = 3.5; EXPRESSED IN FETAL LIVER, SIGNAL = 4.3; EXPRESSED IN BT474, SIGNAL = 2.5; EXPRESSED IN BRAIN, SIGNAL = 1.3; EXPRESSED IN LUNG, SIGNAL = 2.7; EXPRESSED IN BONE MARROW, SIGNAL = 2.3; EXPRESSED IN PLACENTA, SIGNAL = 2.3; EST_HUMAN HIT: BE781837.1, EVALUE 1.00e-05
KIHSTKQRALTKFNVEEIDPTWWLRSSSSGMAVGVKRSPSCGLL

SEQ ID NO: 37542 - protein, 70 aa, Homo sapiens
  MAP TO AC010899.2; EXPRESSED IN BRAIN, SIGNAL = 3.6; EXPRESSED IN BONE MARROW, SIGNAL = 3.7; EXPRESSED IN LUNG, SIGNAL = 4.5; EXPRESSED IN PLACENTA, SIGNAL = 4.3; EXPRESSED IN HBL100, SIGNAL = 3.8; EXPRESSED IN HELA, SIGNAL = 4.3; EXPRESSED IN HEART, SIGNAL = 3.8; EXPRESSED IN ADULT LIVER, SIGNAL = 3.2; EXPRESSED IN BT474, SIGNAL = 3.2; EXPRESSED IN FETAL LIVER, SIGNAL = 4.4; SWISSPROT HIT: Q91694, EVALUE 5.00e-35; EST_HUMAN HIT: H12187.1, EVALUE 1.00e-31
KNDGRFTVIQLVGMLRGIGSGMKYLSDMSYVHRDLAARNILVNSNLVCKVSDFGMSRVLEDDPEAAYTTR

SEQ ID NO: 37543 - protein, 47 aa, Homo sapiens
  MAP TO AC008269.1; EXPRESSED IN FETAL LIVER, SIGNAL = 0.67; EXPRESSED IN BONE MARROW, SIGNAL = 0.71; EXPRESSED IN HBL100, SIGNAL = 0.82; EXPRESSED IN ADULT LIVER, SIGNAL = 0.74; EXPRESSED IN BRAIN, SIGNAL = 0.73; EXPRESSED IN BT474, SIGNAL = 1.2; EXPRESSED IN HELA, SIGNAL = 0.77; EXPRESSED IN HEART, SIGNAL = 0.96; SWISSPROT HIT: Q08662, EVALUE 2.00e+00; EST_HUMAN HIT: AU126490.1, EVALUE 4.00e-20
ALTGYLHTISSENLLDAVYSFCLMNYFPLAPFNQLLQKDIISELLTS

SEQ ID NO: 37544 - protein, 41 aa, Homo sapiens
  MAP TO AL049642.5; EXPRESSED IN HBL100, SIGNAL = 0.68; EXPRESSED IN HELA, SIGNAL =   1; EXPRESSED IN BT474, SIGNAL = 0.66; EXPRESSED IN FETAL LIVER, SIGNAL = 0.58; EXPRESSED IN LUNG, SIGNAL = 0.63; EXPRESSED IN ADULT LIVER, SIGNAL = 0.71; EXPRESSED IN PLACENTA, SIGNAL = 0.74; EXPRESSED IN HEART, SIGNAL = 6.8; EST_HUMAN HIT: AU140866.1, EVALUE 9.50e-02
TLTPDKKQCIWLASQAHTNILHQQDVVHNPVAANAVPGADP

SEQ ID NO: 37545 - protein, 20 aa, Homo sapiens
  MAP TO AL049642.5; EXPRESSED IN HBL100, SIGNAL = 0.68; EXPRESSED IN HELA, SIGNAL =   1; EXPRESSED IN BT474, SIGNAL = 0.66; EXPRESSED IN FETAL LIVER, SIGNAL = 0.58; EXPRESSED IN LUNG, SIGNAL = 0.63; EXPRESSED IN ADULT LIVER, SIGNAL = 0.71; EXPRESSED IN PLACENTA, SIGNAL = 0.74; EXPRESSED IN HEART, SIGNAL = 6.8
RGLLREQHWLQQDYGLHLAG

SEQ ID NO: 37546 - protein, 67 aa, Homo sapiens [sequence omitted]

SEQ ID NO: 37547 - protein, 39 aa, Homo sapiens
  MAP TO AC009313.1; EXPRESSED IN BT474, SIGNAL = 0.88; EXPRESSED IN BRAIN, SIGNAL = 0.81; EXPRESSED IN HEART, SIGNAL = 0.95; EXPRESSED IN PLACENTA, SIGNAL = 0.95; EXPRESSED IN BONE MARROW, SIGNAL =   1; EXPRESSED IN HBL100, SIGNAL = 0.75; EXPRESSED IN FETAL LIVER, SIGNAL = 1.5; EXPRESSED IN LUNG, SIGNAL = 0.83; EXPRESSED IN HELA, SIGNAL = 0.74; EXPRESSED IN ADULT LIVER, SIGNAL = 0.87; EST_HUMAN HIT: AU139286.1, EVALUE 1.00e-15
DATGRRGMDKNIGEQLNKAYEAFRQACMDRDSAVKELQQ

SEQ ID NO: 37548 - protein, 39 aa, Homo sapiens
  MAP TO AC009313.1; EXPRESSED IN BT474, SIGNAL = 0.88; EXPRESSED IN BRAIN, SIGNAL = 0.81; EXPRESSED IN HEART, SIGNAL = 0.95; EXPRESSED IN PLACENTA, SIGNAL = 0.95; EXPRESSED IN BONE MARROW, SIGNAL =   1; EXPRESSED IN HBL100, SIGNAL = 0.75; EXPRESSED IN FETAL LIVER, SIGNAL = 1.5; EXPRESSED IN LUNG, SIGNAL = 0.83; EXPRESSED IN HELA, SIGNAL = 0.74; EXPRESSED IN ADULT LIVER, SIGNAL = 0.87; SWISSPROT HIT: P20888, EVALUE 8.10e+00; EST_HUMAN HIT: AU139286.1, EVALUE 4.00e-16
CCNSFTAESLSMHACRKASYALLSCSPMFLSIPLRPVAS

SEQ ID NO: 37549 - protein, 42 aa, Homo sapiens
  MAP TO AC009650.2; EXPRESSED IN BONE MARROW, SIGNAL = 1.6; EXPRESSED IN PLACENTA, SIGNAL = 2.3; EXPRESSED IN HEART, SIGNAL = 2.1; EXPRESSED IN HELA, SIGNAL = 1.9; EXPRESSED IN HBL100, SIGNAL = 2.8; EXPRESSED IN FETAL LIVER, SIGNAL = 1.8; EXPRESSED IN BT474, SIGNAL = 1.7; EXPRESSED IN LUNG, SIGNAL = 2.3; EST_HUMAN HIT: AA338569.1, EVALUE 2.10e-02
  unsure 19
  unsure 23
  unsure 32
  unsure 35
WILIHFCFLLSQVKNANLXHQGXPLQKPDFGXCFXFYNISNT

SEQ ID NO: 37550 - protein, 17 aa, Homo sapiens
  MAP TO AC010681.3; EXPRESSED IN BT474, SIGNAL = 1.8; EXPRESSED IN FETAL LIVER, SIGNAL = 1.6; EXPRESSED IN BRAIN, SIGNAL = 1.5; EXPRESSED IN BONE MARROW, SIGNAL = 2.1; EXPRESSED IN LUNG, SIGNAL = 1.8; EXPRESSED IN PLACENTA, SIGNAL = 2.1; EXPRESSED IN HBL100, SIGNAL = 1.9; EXPRESSED IN HELA, SIGNAL = 1.8; EXPRESSED IN HEART, SIGNAL = 1.6; EXPRESSED IN ADULT LIVER, SIGNAL =   2
KQTQLFIPDLQCKWYTK

SEQ ID NO: 37551 - protein, 48 aa, Homo sapiens
  MAP TO AC008008.2; EXPRESSED IN FETAL LIVER, SIGNAL = 0.58; EXPRESSED IN HELA, SIGNAL = 0.61; EXPRESSED IN BRAIN, SIGNAL = 0.95; EXPRESSED IN ADULT LIVER, SIGNAL = 0.66; EXPRESSED IN HEART, SIGNAL = 0.82; EST_HUMAN HIT: BE543579.1, EVALUE 7.80e-01
IVIFLRSMTSRIWRINIFNFKKYIMLTALIFLIVEMEMNLGKKDILKR

SEQ ID NO: 37552 - protein, 56 aa, Homo sapiens
  MAP TO AC010960.2; EXPRESSED IN LUNG, SIGNAL = 1.4; EXPRESSED IN HBL100, SIGNAL = 1.2; EXPRESSED IN HEART, SIGNAL = 1.2; EXPRESSED IN BRAIN, SIGNAL = 1.1; EXPRESSED IN BONE MARROW, SIGNAL = 1.8; EXPRESSED IN PLACENTA, SIGNAL = 1.4; EXPRESSED IN HELA, SIGNAL = 1.4; EXPRESSED IN BT474, SIGNAL = 1.1; EXPRESSED IN ADULT LIVER, SIGNAL = 1.5; EXPRESSED IN FETAL LIVER, SIGNAL = 1.3; SWISSPROT HIT: O88410, EVALUE 6.00e+00
VCSREEGHSCESANRENRIRTQTNCLRFKEVGRSSLRMAELPANICSHCYFSKGSH

SEQ ID NO: 37553 - protein, 76 aa, Homo sapiens
  MAP TO AC010807.2; EXPRESSED IN ADULT LIVER, SIGNAL = 1.2; EXPRESSED IN FETAL LIVER, SIGNAL = 1.3; EXPRESSED IN BT474, SIGNAL = 2.3; EXPRESSED IN BRAIN, SIGNAL = 1.2; EXPRESSED IN LUNG, SIGNAL = 1.5; EXPRESSED IN BONE MARROW, SIGNAL = 1.5; EXPRESSED IN PLACENTA, SIGNAL = 2.8; EXPRESSED IN HEART, SIGNAL = 8.1; EXPRESSED IN HELA, SIGNAL =  27; EXPRESSED IN HBL100, SIGNAL =   3; EST_HUMAN HIT: AL040376.1, EVALUE 3.00e-29; SWISSPROT HIT: P33485, EVALUE 1.30e+00
FGMDSSHDPLAGEPDSREDHASHAEEAGGLPGLPPEAQATQGAGEMPAGDQLQHAADQAADQQPSCLHALRGQDGV

SEQ ID NO: 37554 - protein, 78 aa, Homo sapiens
  MAP TO AC010807.2; EXPRESSED IN ADULT LIVER, SIGNAL = 1.2; EXPRESSED IN FETAL LIVER, SIGNAL = 1.3; EXPRESSED IN BT474, SIGNAL = 2.3; EXPRESSED IN BRAIN, SIGNAL = 1.2; EXPRESSED IN LUNG, SIGNAL = 1.5; EXPRESSED IN BONE MARROW, SIGNAL = 1.5; EXPRESSED IN PLACENTA, SIGNAL = 2.8; EXPRESSED IN HEART, SIGNAL = 8.1; EXPRESSED IN HELA, SIGNAL =  27; EXPRESSED IN HBL100, SIGNAL =   3; EST_HUMAN HIT: AL040376.1, EVALUE 1.00e-45; SWISSPROT HIT: O33367, EVALUE 1.60e-01
SFWNGFVARSPGWRTGLPRRPCKPCRRSWRTSGITAGSTSHPRCRRNASWRSTSTRCRPSCGSATVLPSCPPRARWCR

SEQ ID NO: 37555 - protein, 85 aa, Homo sapiens
  MAP TO AC008278.1; EXPRESSED IN LUNG, SIGNAL = 0.76; EXPRESSED IN BRAIN, SIGNAL = 0.88; EXPRESSED IN HEART, SIGNAL = 0.81; EXPRESSED IN PLACENTA, SIGNAL = 0.6; EXPRESSED IN HELA, SIGNAL = 1.2; EXPRESSED IN ADULT LIVER, SIGNAL = 1.1; EXPRESSED IN FETAL LIVER, SIGNAL = 0.91; EXPRESSED IN HBL100, SIGNAL = 0.85; EXPRESSED IN BONE MARROW, SIGNAL = 0.78; EXPRESSED IN BT474, SIGNAL = 0.9; SWISSPROT HIT: P56502, EVALUE 3.60e+00; EST_HUMAN HIT: BF245661.1, EVALUE 1.50e-01
STPSMHTRAAGAKGLQEVGIPKLLKLQSLPKFSTGHNCLNMGSSRWLTLGQPGECDPLRTQGALKSQTSPAPPPELPCLTFQMTS

SEQ ID NO: 37556 - protein, 23 aa, Homo sapiens
  MAP TO AC008278.1; EXPRESSED IN LUNG, SIGNAL = 0.76; EXPRESSED IN BRAIN, SIGNAL = 0.88; EXPRESSED IN HEART, SIGNAL = 0.81; EXPRESSED IN PLACENTA, SIGNAL = 0.6; EXPRESSED IN HELA, SIGNAL = 1.2; EXPRESSED IN ADULT LIVER, SIGNAL = 1.1; EXPRESSED IN FETAL LIVER, SIGNAL = 0.91; EXPRESSED IN HBL100, SIGNAL = 0.85; EXPRESSED IN BONE MARROW, SIGNAL = 0.78; EXPRESSED IN BT474, SIGNAL = 0.9
LLLPCTPEQQEPRGCRKWVSPSC

SEQ ID NO: 37557 - protein, 18 aa, Homo sapiens
  MAP TO AC005674.9; EXPRESSED IN HELA, SIGNAL =   1; EXPRESSED IN HEART, SIGNAL = 0.94; EXPRESSED IN PLACENTA, SIGNAL = 1.2; EXPRESSED IN BT474, SIGNAL = 0.75; EXPRESSED IN FETAL LIVER, SIGNAL =   1; EXPRESSED IN LUNG, SIGNAL = 0.98; EXPRESSED IN BRAIN, SIGNAL = 1.1; EXPRESSED IN BONE MARROW, SIGNAL = 1.2; EXPRESSED IN HBL100, SIGNAL = 0.82; EXPRESSED IN ADULT LIVER, SIGNAL = 1.1
QRPGVDSALEAGAADHSP

SEQ ID NO: 37558 - protein, 27 aa, Homo sapiens
  MAP TO AC005674.9; EXPRESSED IN HELA, SIGNAL =   1; EXPRESSED IN HEART, SIGNAL = 0.94; EXPRESSED IN PLACENTA, SIGNAL = 1.2; EXPRESSED IN BT474, SIGNAL = 0.75; EXPRESSED IN FETAL LIVER, SIGNAL =   1; EXPRESSED IN LUNG, SIGNAL = 0.98; EXPRESSED IN BRAIN, SIGNAL = 1.1; EXPRESSED IN BONE MARROW, SIGNAL = 1.2; EXPRESSED IN HBL100, SIGNAL = 0.82; EXPRESSED IN ADULT LIVER, SIGNAL = 1.1; EST_HUMAN HIT: AA281953.1, EVALUE 4.80e-01
SPTPSPALFSCCWALSPALCYRSRWSG

SEQ ID NO: 37559 - protein, 40 aa, Homo sapiens
  MAP TO AC007465.2; EXPRESSED IN FETAL LIVER, SIGNAL = 0.87; EXPRESSED IN ADULT LIVER, SIGNAL =   1; EXPRESSED IN PLACENTA, SIGNAL = 1.1; EXPRESSED IN BONE MARROW, SIGNAL = 1.1; EXPRESSED IN HBL100, SIGNAL = 0.87; EXPRESSED IN LUNG, SIGNAL = 1.1; EXPRESSED IN HELA, SIGNAL = 1.2; EXPRESSED IN BRAIN, SIGNAL =   1; EXPRESSED IN BT474, SIGNAL = 0.7; EXPRESSED IN HEART, SIGNAL =   1; SWISSPROT HIT: P39702, EVALUE 2.70e+00
QVVAQAGHSNELKTSVDKFPKDVSLDKSLLDCLEKTYCFE

SEQ ID NO: 37560 - protein, 17 aa, Homo sapiens
  MAP TO AC007949.1; EXPRESSED IN BT474, SIGNAL = 0.64; EXPRESSED IN FETAL LIVER, SIGNAL = 0.64; EXPRESSED IN HELA, SIGNAL = 0.8; EXPRESSED IN ADULT LIVER, SIGNAL = 0.67; EXPRESSED IN PLACENTA, SIGNAL = 0.62; EXPRESSED IN BONE MARROW, SIGNAL = 0.78; EXPRESSED IN HBL100, SIGNAL = 0.7; EXPRESSED IN LUNG, SIGNAL = 0.64; EXPRESSED IN BRAIN, SIGNAL = 0.79; EXPRESSED IN HEART, SIGNAL = 0.96
PNFFLGTTSSSSQQRIM

SEQ ID NO: 37561 - protein, 47 aa, Homo sapiens
  MAP TO AC010825.2; EXPRESSED IN BRAIN, SIGNAL = 1.5; EXPRESSED IN HELA, SIGNAL = 1.7; EXPRESSED IN PLACENTA, SIGNAL = 1.6; EXPRESSED IN FETAL LIVER, SIGNAL = 1.3; EXPRESSED IN ADULT LIVER, SIGNAL = 1.6; EXPRESSED IN BT474, SIGNAL = 1.3; EXPRESSED IN BONE MARROW, SIGNAL = 1.1; EXPRESSED IN HEART, SIGNAL =   1; EXPRESSED IN HBL100, SIGNAL = 1.3; SWISSPROT HIT: P57297, EVALUE 8.10e+00
LFDKPNTYTTSQIIVQYAIDDFAKVYMNKNKMLHLSSRNMRILETIQ

SEQ ID NO: 37562 - protein, 47 aa, Homo sapiens
  MAP TO AC011330.4; EXPRESSED IN BRAIN, SIGNAL = 0.99; EXPRESSED IN LUNG, SIGNAL =   1; EXPRESSED IN HEART, SIGNAL = 0.98; EXPRESSED IN BT474, SIGNAL = 0.94; EXPRESSED IN FETAL LIVER, SIGNAL = 1.3; EXPRESSED IN ADULT LIVER, SIGNAL = 1.2
MTSYSQAYLHMPPENLQQLVLSAEREAAQGFLTLMLQGKLQGKLQVS

SEQ ID NO: 37563 - protein, 68 aa, Homo sapiens
  MAP TO AC011440.4; EXPRESSED IN HEART, SIGNAL = 2.1; EXPRESSED IN BT474, SIGNAL = 1.9; EXPRESSED IN ADULT LIVER, SIGNAL = 3.1; EXPRESSED IN FETAL LIVER, SIGNAL = 1.9; EXPRESSED IN BRAIN, SIGNAL = 1.9; EXPRESSED IN BONE MARROW, SIGNAL = 2.3; EXPRESSED IN LUNG, SIGNAL = 2.4; EXPRESSED IN HBL100, SIGNAL = 1.7; EXPRESSED IN PLACENTA, SIGNAL = 2.7; EXPRESSED IN HELA, SIGNAL = 1.7; SWISSPROT HIT: P35201, EVALUE 1.50e+00; EST_HUMAN HIT: AW898344.1, EVALUE 1.00e-19
QFGGLRRREEDGESLELPGYLLNGFDQNADTDMDNEVQTEVVSDGDEELVGNWSKGDSCYALKKRLVA

SEQ ID NO: 37564 - protein, 36 aa, Homo sapiens
  MAP TO AC012079.2; EXPRESSED IN HBL100, SIGNAL = 1.3; EXPRESSED IN PLACENTA, SIGNAL = 1.3; EXPRESSED IN HELA, SIGNAL = 1.5; EXPRESSED IN HEART, SIGNAL = 1.3; EXPRESSED IN BT474, SIGNAL = 1.5; EXPRESSED IN FETAL LIVER, SIGNAL = 1.7; EXPRESSED IN ADULT LIVER, SIGNAL = 1.7; EXPRESSED IN BRAIN, SIGNAL = 1.5; EXPRESSED IN BONE MARROW, SIGNAL = 1.7; EXPRESSED IN LUNG, SIGNAL = 1.6
ASEDEFRATSSRTNVSNTSGNSEVDEYFQAVLAVQM

SEQ ID NO: 37565 - protein, 83 aa, Homo sapiens; identical to SEQ ID NO: 34377
  MAP TO AC007404.2; EXPRESSED IN BT474, SIGNAL = 0.76; EXPRESSED IN FETAL LIVER, SIGNAL = 0.74; EXPRESSED IN ADULT LIVER, SIGNAL = 1.9; EXPRESSED IN PLACENTA, SIGNAL = 0.98; EXPRESSED IN BONE MARROW, SIGNAL = 0.9; EXPRESSED IN LUNG, SIGNAL = 0.79; EXPRESSED IN BRAIN, SIGNAL = 0.81; EXPRESSED IN HEART, SIGNAL = 0.84; EST_HUMAN HIT: AA314462.1, EVALUE 6.00e-09; SWISSPROT HIT: P31574, EVALUE 2.40e+00

SEQ ID NO: 37566 - protein, 84 aa, Homo sapiens
  MAP TO AC011456.2; EXPRESSED IN HELA, SIGNAL = 2.8; EXPRESSED IN HEART, SIGNAL = 2.2; EXPRESSED IN LUNG, SIGNAL = 2.2; EXPRESSED IN BRAIN, SIGNAL = 2.3; EXPRESSED IN BONE MARROW, SIGNAL = 2.6; EXPRESSED IN PLACENTA, SIGNAL =   2; EXPRESSED IN HBL100, SIGNAL = 2.1; EXPRESSED IN BT474, SIGNAL = 2.8; EXPRESSED IN ADULT LIVER, SIGNAL =   3; EXPRESSED IN FETAL LIVER, SIGNAL = 2.5; EST_HUMAN HIT: BF698187.1, EVALUE 9.30e-01; SWISSPROT HIT: P13615, EVALUE 3.50e-01
MTCLVVAEPDASLFIDIVSIGAEAFSCVNTELQWQHPKCLADRSGIKYRPRNWSWKTSWQHSFPAIPVIPFWMEGVELSTFTSA

SEQ ID NO: 37567 - protein, 50 aa, Homo sapiens
  MAP TO AC007721.10; EXPRESSED IN BT474, SIGNAL =   1; EXPRESSED IN PLACENTA, SIGNAL = 0.95; EXPRESSED IN HELA, SIGNAL = 1.4; EXPRESSED IN HEART, SIGNAL = 0.96; EST_HUMAN HIT: BF086807.1, EVALUE 3.00e-22; SWISSPROT HIT: Q13619, EVALUE 3.00e-23
LQSLACGKARVLIKSPKGKEVEDGDKFIFNGEFKHKLFRIKINQIQMKET

SEQ ID NO: 37568 - protein, 67 aa, Homo sapiens
  MAP TO AC005105.2; EXPRESSED IN BONE MARROW, SIGNAL = 0.78; EXPRESSED IN FETAL LIVER, SIGNAL = 0.88; EXPRESSED IN PLACENTA, SIGNAL = 1.1; EXPRESSED IN BT474, SIGNAL = 1.1; EXPRESSED IN LUNG, SIGNAL = 0.95; EXPRESSED IN HELA, SIGNAL = 0.75; EXPRESSED IN ADULT LIVER, SIGNAL =   1; EXPRESSED IN BRAIN, SIGNAL = 0.86; EXPRESSED IN HEART, SIGNAL = 1.2; EST_HUMAN HIT: AV754746.1, EVALUE 9.00e-03
CSTHSGLCARTKTLIEVKRNASSGKKRSGGAGERGEGRRGETKTGRKGEGGENEEEEEEDEGSKTEG

SEQ ID NO: 37569 - protein, 198 aa, Homo sapiens
  MAP TO AC010766.2; EXPRESSED IN LUNG, SIGNAL = 1.6; EXPRESSED IN HELA, SIGNAL = 1.5; EXPRESSED IN PLACENTA, SIGNAL = 1.6; EXPRESSED IN HBL100, SIGNAL = 1.4; EXPRESSED IN HEART, SIGNAL = 1.4; EXPRESSED IN ADULT LIVER, SIGNAL = 1.4; EXPRESSED IN BT474, SIGNAL = 1.4; EXPRESSED IN BRAIN, SIGNAL = 1.4; EXPRESSED IN BONE MARROW, SIGNAL = 1.4; EXPRESSED IN FETAL LIVER, SIGNAL = 1.4; SWISSPROT HIT: P23267, EVALUE 2.00e-42; EST_HUMAN HIT: AI962273.1, EVALUE 5.00e-19
EFLLLAVMSADRYLAICHPLRYPLLMSGAVCFRVALACWVGGLVPVLGPTVAVALLPFCKQGAVVQHFFCDSGPLLRLACTNTKKLEETDFVLASLVIVSSLLITAVSYGLIVLAVLSIPSASGRQKAFSTCTSHLIVVTLFYGSAIFLYVRPSQSGSVDTNWAVTVITTFVTPLLNPFIYALRNEQVKEALKDMFRK

SEQ ID NO: 37570 - protein, 31 aa, Homo sapiens
  MAP TO AC010766.2; EXPRESSED IN LUNG, SIGNAL = 1.6; EXPRESSED IN HELA, SIGNAL = 1.5; EXPRESSED IN PLACENTA, SIGNAL = 1.6; EXPRESSED IN HBL100, SIGNAL = 1.4; EXPRESSED IN HEART, SIGNAL = 1.4; EXPRESSED IN ADULT LIVER, SIGNAL = 1.4; EXPRESSED IN BT474, SIGNAL = 1.4; EXPRESSED IN BRAIN, SIGNAL = 1.4; EXPRESSED IN BONE MARROW, SIGNAL = 1.4; EXPRESSED IN FETAL LIVER, SIGNAL = 1.4
RVLTVGCHVCGSLPGHLSSSALPLAHEWGCV

SEQ ID NO: 37571 - protein, 23 aa, Homo sapiens
  MAP TO AC010896.1; EXPRESSED IN ADULT LIVER, SIGNAL =   1; EXPRESSED IN HELA, SIGNAL = 1.1; EXPRESSED IN HEART, SIGNAL = 0.85; EST_HUMAN HIT: T07141.1, EVALUE 2.50e+00
KNMKRLMYKTIHCSNLYNSKNWN

SEQ ID NO: 37572 - protein, 57 aa, Homo sapiens
  MAP TO AC009189.1; EXPRESSED IN BRAIN, SIGNAL = 0.91; EXPRESSED IN LUNG, SIGNAL = 1.5; EXPRESSED IN HEART, SIGNAL = 0.94; EST_HUMAN HIT: BE893061.1, EVALUE 1.00e-15; SWISSPROT HIT: Q10364, EVALUE 2.00e-07
DLLLGGDLRYHLQQNVHFKEETVKLFICELVMALDYLQNQRIIHRSVKSKEMAMNVT

SEQ ID NO: 37573 - protein, 72 aa, Homo sapiens
  MAP TO AC004985.2; EXPRESSED IN BONE MARROW, SIGNAL = 2.4; EXPRESSED IN LUNG, SIGNAL = 1.1; EXPRESSED IN PLACENTA, SIGNAL = 1.1; EXPRESSED IN BT474, SIGNAL = 1.1; EXPRESSED IN HBL100, SIGNAL = 0.94; EXPRESSED IN FETAL LIVER, SIGNAL = 1.1; EXPRESSED IN HELA, SIGNAL = 0.9; EXPRESSED IN ADULT LIVER, SIGNAL = 0.86; EXPRESSED IN BRAIN, SIGNAL = 0.94; EXPRESSED IN HEART, SIGNAL = 1.2; EST_HUMAN HIT: AA247518.1, EVALUE 4.20e-01
NITGVWKSAMSGAFTPQKLADGFPAPILESQLLHTDTHTAFVGPAGLVAWAGFPLLLPFCSLQDRAWTNENP

SEQ ID NO: 37574 - protein, 41 aa, Homo sapiens
  MAP TO AC004985.2; EXPRESSED IN BONE MARROW, SIGNAL = 2.4; EXPRESSED IN LUNG, SIGNAL = 1.1; EXPRESSED IN PLACENTA, SIGNAL = 1.1; EXPRESSED IN BT474, SIGNAL = 1.1; EXPRESSED IN HBL100, SIGNAL = 0.94; EXPRESSED IN FETAL LIVER, SIGNAL = 1.1; EXPRESSED IN HELA, SIGNAL = 0.9; EXPRESSED IN ADULT LIVER, SIGNAL = 0.86; EXPRESSED IN BRAIN, SIGNAL = 0.94; EXPRESSED IN HEART, SIGNAL = 1.2; EST_HUMAN HIT: AW849933.1, EVALUE 1.70e-02; SWISSPROT HIT: P37707, EVALUE 4.70e+00
TSLVSGNQPCQEHLHHRNWQMASLPPSWRASCYTLTPTLPS

SEQ ID NO: 37575 - protein, 85 aa, Homo sapiens
  MAP TO AC009966.3; EXPRESSED IN HELA, SIGNAL = 2.1; EXPRESSED IN PLACENTA, SIGNAL = 2.2; EXPRESSED IN HBL100, SIGNAL = 2.1; EXPRESSED IN HEART, SIGNAL = 1.9; EXPRESSED IN FETAL LIVER, SIGNAL = 2.1; EXPRESSED IN ADULT LIVER, SIGNAL = 2.7; EXPRESSED IN BT474, SIGNAL = 2.2; EXPRESSED IN BRAIN, SIGNAL = 1.8; EXPRESSED IN BONE MARROW, SIGNAL = 1.8; EXPRESSED IN LUNG, SIGNAL =   2; EST_HUMAN HIT: BE741466.1, EVALUE 2.90e-01
RETEREPNHHVVNKCCDRSTAELLLHRIKKVTASPLTLEPWKWAATSPPTQKAPMLCHQQRPNTHSDVRKRRWHGVVVRTWTLNS

SEQ ID NO: 37576 - protein, 35 aa, Homo sapiens
  MAP TO AC006333.3; EXPRESSED IN HEART, SIGNAL = 0.91; EXPRESSED IN PLACENTA, SIGNAL = 0.72; SWISSPROT HIT: P78363, EVALUE 6.20e+00
FRAGTKESKVVVQVFLDLIWLREAEDVELHRESHR

SEQ ID NO: 37577 - protein, 35 aa, Homo sapiens
  MAP TO AC004909.2; EXPRESSED IN BT474, SIGNAL = 0.99; EXPRESSED IN BONE MARROW, SIGNAL = 0.83; EXPRESSED IN FETAL LIVER, SIGNAL = 0.69; EXPRESSED IN LUNG, SIGNAL = 0.87; EXPRESSED IN HELA, SIGNAL = 0.59; EXPRESSED IN PLACENTA, SIGNAL = 0.8; EXPRESSED IN ADULT LIVER, SIGNAL = 0.76; EXPRESSED IN HEART, SIGNAL = 0.89; SWISSPROT HIT: P16311, EVALUE 3.60e+00
EPPDVKLNKELKATHFLVHVVHIIMDVKEIQHFIK

SEQ ID NO: 37578 - protein, 45 aa, Homo sapiens
  MAP TO AC009973.3; EXPRESSED IN LUNG, SIGNAL = 1.8; EXPRESSED IN HELA, SIGNAL = 2.6; EXPRESSED IN PLACENTA, SIGNAL = 2.1; EXPRESSED IN HBL100, SIGNAL =   2; EXPRESSED IN HEART, SIGNAL = 1.9; EXPRESSED IN ADULT LIVER, SIGNAL = 2.7; EXPRESSED IN BT474, SIGNAL = 1.8; EXPRESSED IN BRAIN, SIGNAL = 1.9; EXPRESSED IN BONE MARROW, SIGNAL = 2.2; EXPRESSED IN FETAL LIVER, SIGNAL = 2.2; EST_HUMAN HIT: AL044724.1, EVALUE 2.00e-18; SWISSPROT HIT: Q14669, EVALUE 3.00e-19
RRGSGLGKRGAAEARRQEKMADPESNQEAVNSSAARTDEAPQGAA

SEQ ID NO: 37579 - protein, 29 aa, Homo sapiens
  MAP TO AL022326.1; EXPRESSED IN HBL100, SIGNAL =   2; EXPRESSED IN PLACENTA, SIGNAL =   2; EXPRESSED IN FETAL LIVER, SIGNAL = 1.7; EXPRESSED IN BONE MARROW, SIGNAL = 2.1; EXPRESSED IN BRAIN, SIGNAL = 1.9; EXPRESSED IN LUNG, SIGNAL = 1.9; EXPRESSED IN HELA, SIGNAL =   2; EXPRESSED IN HEART, SIGNAL = 1.7; EXPRESSED IN ADULT LIVER, SIGNAL = 1.8; EXPRESSED IN BT474, SIGNAL = 1.8; EST_HUMAN HIT: AL048181.1, EVALUE 4.70e-01
TESRGAFQGLEEGNREWLLMGVAFLCGMM

SEQ ID NO: 37580 - protein, 27 aa, Homo sapiens
  MAP TO AC007437.16; EXPRESSED IN LUNG, SIGNAL = 0.72; EXPRESSED IN ADULT LIVER, SIGNAL = 0.74; EXPRESSED IN HEART, SIGNAL = 0.81
VSIFHEDNFVASWWKVLSVSPKTLSAV

SEQ ID NO: 37581 - protein, 30 aa, Homo sapiens
  MAP TO AC006374.2; EXPRESSED IN BT474, SIGNAL = 0.86; EXPRESSED IN BONE MARROW, SIGNAL = 0.67; EXPRESSED IN FETAL LIVER, SIGNAL = 0.68; EXPRESSED IN LUNG, SIGNAL = 0.69; EXPRESSED IN PLACENTA, SIGNAL = 0.8; EXPRESSED IN ADULT LIVER, SIGNAL = 0.71; EXPRESSED IN HEART, SIGNAL = 0.9; EST_HUMAN HIT: T50266.1, EVALUE 4.70e-01
VLINEDEIKTFPGKPKLREFITTNLIEMKF

SEQ ID NO: 37582 - protein, 40 aa, Homo sapiens
  MAP TO AC011451.2; EXPRESSED IN LUNG, SIGNAL = 5.3; EXPRESSED IN PLACENTA, SIGNAL = 4.9; EXPRESSED IN HELA, SIGNAL = 5.3; EXPRESSED IN ADULT LIVER, SIGNAL = 5.9; EXPRESSED IN BRAIN, SIGNAL =   4; EXPRESSED IN BONE MARROW, SIGNAL = 4.4; EXPRESSED IN HEART, SIGNAL = 3.8; EXPRESSED IN HBL100, SIGNAL = 4.9; EXPRESSED IN BT474, SIGNAL = 3.9; EXPRESSED IN FETAL LIVER, SIGNAL = 5.8; EST_HUMAN HIT: BF315119.1, EVALUE 9.40e+00
VSKVNTGCAKRKTNSQIKQEEEAPETNFHPSTHRDELDSP

SEQ ID NO: 37583 - protein, 39 aa, Homo sapiens
  MAP TO AC010970.2; EXPRESSED IN FETAL LIVER, SIGNAL = 5.7; EXPRESSED IN BRAIN, SIGNAL =   5; EXPRESSED IN LUNG, SIGNAL = 5.9; EXPRESSED IN HBL100, SIGNAL = 4.5; EXPRESSED IN HELA, SIGNAL =   6; EXPRESSED IN PLACENTA, SIGNAL = 6.4; EXPRESSED IN HEART, SIGNAL = 4.1; EXPRESSED IN BT474, SIGNAL = 4.7; EXPRESSED IN ADULT LIVER, SIGNAL = 7.6; EXPRESSED IN BONE MARROW, SIGNAL = 4.1; SWISSPROT HIT: P34036, EVALUE 8.10e+00; EST_HUMAN HIT: AW957925.1, EVALUE 5.00e-15
SQRTKQSTVLAPVIDLKRGGSSDDRQIVDTPPHVAAGLK

SEQ ID NO: 37584 - protein, 63 aa, Homo sapiens
  MAP TO AC007430.11; EXPRESSED IN LUNG, SIGNAL = 0.75; EXPRESSED IN BRAIN, SIGNAL = 0.94; EXPRESSED IN HEART, SIGNAL = 1.3
MKTSEVGPARRSYFRIPNHVYLQPNACSTTQLVYGDVFKRPEQLQFLRNTEDPGGLCFPHGQM

SEQ ID NO: 37585 - protein, 26 aa, Homo sapiens
  MAP TO AC012122.1; EXPRESSED IN LUNG, SIGNAL = 2.1; EXPRESSED IN PLACENTA, SIGNAL = 2.4; EXPRESSED IN HELA, SIGNAL = 1.6; EXPRESSED IN ADULT LIVER, SIGNAL = 1.8; EXPRESSED IN BRAIN, SIGNAL = 2.1; EXPRESSED IN BONE MARROW, SIGNAL = 1.6; EXPRESSED IN HEART, SIGNAL = 1.6; EXPRESSED IN HBL100, SIGNAL = 1.5; EXPRESSED IN BT474, SIGNAL = 1.7; EXPRESSED IN FETAL LIVER, SIGNAL = 1.4; EST_HUMAN HIT: BF509703.1, EVALUE 1.00e-06; SWISSPROT HIT: P25163, EVALUE 8.40e+00
LLLYLPEEDTFWALDQLMAEERHSLQ

SEQ ID NO: 37586 - protein, 60 aa, Homo sapiens
  MAP TO AC011592.2; EXPRESSED IN BT474, SIGNAL = 1.3; EXPRESSED IN FETAL LIVER, SIGNAL = 1.6; EXPRESSED IN PLACENTA, SIGNAL = 1.8; EXPRESSED IN HELA, SIGNAL = 1.8; EXPRESSED IN ADULT LIVER, SIGNAL = 2.1; EXPRESSED IN BRAIN, SIGNAL = 1.3; EXPRESSED IN LUNG, SIGNAL = 1.8; EXPRESSED IN BONE MARROW, SIGNAL = 1.5; EXPRESSED IN HEART, SIGNAL = 1.8; EXPRESSED IN HBL100, SIGNAL = 1.8; EST_HUMAN HIT: BE262518.1, EVALUE 1.00e+00
IDDPGIMRALACAVYECQWHCIRAACRPLFLVDASADPVQVLRGGLPAVVSQLAGCAIAL

SEQ ID NO: 37587 - protein, 27 aa, Homo sapiens
  MAP TO AC011700.3; EXPRESSED IN HBL100, SIGNAL =   1; EXPRESSED IN HELA, SIGNAL = 1.2; EXPRESSED IN HEART, SIGNAL =   1; EXPRESSED IN ADULT LIVER, SIGNAL = 1.2; EXPRESSED IN FETAL LIVER, SIGNAL = 1.2; EXPRESSED IN PLACENTA, SIGNAL = 0.98; EXPRESSED IN BT474, SIGNAL = 0.94; EXPRESSED IN BONE MARROW, SIGNAL = 1.2; EXPRESSED IN BRAIN, SIGNAL = 1.1; EXPRESSED IN LUNG, SIGNAL = 0.99
SGHNHSAHSMEWRQRTGDRRYLCIRQG

SEQ ID NO: 37588 - protein, 40 aa, Homo sapiens
  MAP TO AC007603.1; EXPRESSED IN BONE MARROW, SIGNAL = 0.67; EXPRESSED IN FETAL LIVER, SIGNAL = 0.59; EXPRESSED IN PLACENTA, SIGNAL = 0.66; EXPRESSED IN HEART, SIGNAL = 0.87
ISDSWSSSWQGAVQRNLQGLLERGRASSQVRNSILVELAG

SEQ ID NO: 37589 - protein, 37 aa, Homo sapiens
  MAP TO AF002992.1; EXPRESSED IN BT474, SIGNAL = 2.1; EXPRESSED IN BONE MARROW, SIGNAL = 1.9; EXPRESSED IN PLACENTA, SIGNAL = 2.8; EXPRESSED IN HELA, SIGNAL = 2.2; EXPRESSED IN ADULT LIVER, SIGNAL =   2; EXPRESSED IN FETAL LIVER, SIGNAL = 2.2; EXPRESSED IN BRAIN, SIGNAL = 2.5; EXPRESSED IN LUNG, SIGNAL = 2.6; EXPRESSED IN HEART, SIGNAL = 2.1; EXPRESSED IN HBL100, SIGNAL = 2.1
SSRVWVPSMKKLVLGIGLDTQEPLRAFKGTTVGHNGK

SEQ ID NO: 37590 - protein, 32 aa, Homo sapiens
  MAP TO AC012444.1; EXPRESSED IN HBL100, SIGNAL = 7.1; EXPRESSED IN HEART, SIGNAL = 7.3; EXPRESSED IN BONE MARROW, SIGNAL = 6.1; EXPRESSED IN PLACENTA, SIGNAL =  10; EXPRESSED IN BT474, SIGNAL = 6.9; EXPRESSED IN ADULT LIVER, SIGNAL =  11; EXPRESSED IN FETAL LIVER, SIGNAL = 8.9; EXPRESSED IN BRAIN, SIGNAL = 7.8; EXPRESSED IN LUNG, SIGNAL = 9.9; EXPRESSED IN HELA, SIGNAL =   9; SWISSPROT HIT: Q12815, EVALUE 8.30e+00
SALLKVEMEHSRKGSEALNMSSPASCSVPVPG

SEQ ID NO: 37591 - protein, 18 aa, Homo sapiens
  MAP TO AC012444.1; EXPRESSED IN HBL100, SIGNAL = 7.1; EXPRESSED IN HEART, SIGNAL = 7.3; EXPRESSED IN BONE MARROW, SIGNAL = 6.1; EXPRESSED IN PLACENTA, SIGNAL =  10; EXPRESSED IN BT474, SIGNAL = 6.9; EXPRESSED IN ADULT LIVER, SIGNAL =  11; EXPRESSED IN FETAL LIVER, SIGNAL = 8.9; EXPRESSED IN BRAIN, SIGNAL = 7.8; EXPRESSED IN LUNG, SIGNAL = 9.9; EXPRESSED IN HELA, SIGNAL =   9
CLPCSRLRWNTVGRAQRR

SEQ ID NO: 37592 - protein, 51 aa, Homo sapiens
  MAP TO AC007462.2; EXPRESSED IN HEART, SIGNAL = 0.78; EXPRESSED IN ADULT LIVER, SIGNAL = 0.79; SWISSPROT HIT: P01574, EVALUE 6.00e+00
MASYTQYCLLVFGFTVLQMSHRIYALIMNQANFKKQRCLYSNYVSAYRTFL

SEQ ID NO: 37593 - protein, 18 aa, Homo sapiens
  MAP TO AC007462.2; EXPRESSED IN HEART, SIGNAL = 0.78; EXPRESSED IN ADULT LIVER, SIGNAL = 0.79
WRHILNIVYLSLDLQSCR

SEQ ID NO: 37594 - protein, 102 aa, Homo sapiens
  MAP TO AC007952.1; EXPRESSED IN ADULT LIVER, SIGNAL = 0.75; EXPRESSED IN HEART, SIGNAL = 0.84; EXPRESSED IN PLACENTA, SIGNAL = 0.74; EXPRESSED IN BONE MARROW, SIGNAL = 0.89; EXPRESSED IN HBL100, SIGNAL = 0.74; EXPRESSED IN FETAL LIVER, SIGNAL = 0.66; EXPRESSED IN LUNG, SIGNAL = 0.77; EXPRESSED IN HELA, SIGNAL = 0.73; EST_HUMAN HIT: BE539693.1, EVALUE 1.30e+00
  unsure 5
  unsure 13
  unsure 14
  unsure 19
  unsure 20
  unsure 40
  unsure 54
  unsure 57
  unsure 87
EPKSXPMTGLGIXXGTAHXXTRPWKLGLCSSNRISAWASXHLGLGTDATWMQSXPWXVEGMPRLAQESRVLSGSTPICCVILGPGRXPLWALLLEKRQMAGT

SEQ ID NO: 37595 - protein, 101 aa, Homo sapiens
  MAP TO AC007952.1; EXPRESSED IN ADULT LIVER, SIGNAL = 0.75; EXPRESSED IN HEART, SIGNAL = 0.84; EXPRESSED IN PLACENTA, SIGNAL = 0.74; EXPRESSED IN BONE MARROW, SIGNAL = 0.89; EXPRESSED IN HBL100, SIGNAL = 0.74; EXPRESSED IN FETAL LIVER, SIGNAL = 0.66; EXPRESSED IN LUNG, SIGNAL = 0.77; EXPRESSED IN HELA, SIGNAL = 0.73
  unsure 16
  unsure 46
  unsure 49
  unsure 63
  unsure 83
  unsure 89
  unsure 90
  unsure 98
VPAICLFSSNRAQRGXLPGPKITQQIGVEPERTRDSCASLGIPSTXQGXDCIQVASVPRPRCXEAQAEIRLLLQRPSFQGLVXKWAVPXXIPRPVIGXLFG

SEQ ID NO: 37596 - protein, 34 aa, Homo sapiens
  MAP TO AC011299.1; EXPRESSED IN ADULT LIVER, SIGNAL = 0.92; EXPRESSED IN HBL100, SIGNAL = 0.92; EXPRESSED IN HEART, SIGNAL = 1.1; EXPRESSED IN BONE MARROW, SIGNAL = 1.2; EST_HUMAN HIT: AA361064.1, EVALUE 5.00e-11; SWISSPROT HIT: Q9ZD92, EVALUE 6.30e+00
VETFVADILKGENLSKKAKEKRESLIKKIKDVKS

SEQ ID NO: 37597 - protein, 49 aa, Homo sapiens
  MAP TO AC009973.2; EXPRESSED IN ADULT LIVER, SIGNAL = 0.97; EXPRESSED IN BT474, SIGNAL = 1.4; EXPRESSED IN HELA, SIGNAL = 1.4; EXPRESSED IN HBL100, SIGNAL = 1.6; EXPRESSED IN HEART, SIGNAL = 0.94; EXPRESSED IN LUNG, SIGNAL = 5.6; SWISSPROT HIT: Q14669, EVALUE 4.00e-21
SKAQQLLQGLQASDESQQLQAVIEMCQLLVMGNEETLGGFPVKSVVPAL

SEQ ID NO: 37598 - protein, 42 aa, Homo sapiens
  MAP TO AC009973.2; EXPRESSED IN ADULT LIVER, SIGNAL = 0.97; EXPRESSED IN BT474, SIGNAL = 1.4; EXPRESSED IN HELA, SIGNAL = 1.4; EXPRESSED IN HBL100, SIGNAL = 1.6; EXPRESSED IN HEART, SIGNAL = 0.94; EXPRESSED IN LUNG, SIGNAL = 5.6
KDCKPVMKVNSFRQLLRCVSYWSWEMRRHWEGFLSRVLFQLW

SEQ ID NO: 37599 - protein, 53 aa, Homo sapiens
  MAP TO AP000275.1; EXPRESSED IN BRAIN, SIGNAL = 0.76; EXPRESSED IN PLACENTA, SIGNAL = 1.2; EXPRESSED IN BT474, SIGNAL = 0.67; EXPRESSED IN BONE MARROW, SIGNAL = 0.69; EXPRESSED IN LUNG, SIGNAL = 0.85; EXPRESSED IN HELA, SIGNAL = 0.62; EXPRESSED IN ADULT LIVER, SIGNAL = 0.74; EXPRESSED IN FETAL LIVER, SIGNAL = 1.7; EXPRESSED IN HEART, SIGNAL =   1; EST_HUMAN HIT: AA579666.1, EVALUE 2.00e-24
IFATFQVVVLCPPELGPRSLGPLDQNPNQLRNRLLADEPGGSGARDAVSNVAP

SEQ ID NO: 37600 - protein, 44 aa, Homo sapiens [sequence omitted]

SEQ ID NO: 37601 - protein, 25 aa, Homo sapiens
  MAP TO AC004887.2; EXPRESSED IN BT474, SIGNAL = 0.67; EXPRESSED IN BONE MARROW, SIGNAL = 0.82; EXPRESSED IN HELA, SIGNAL = 0.83; EXPRESSED IN ADULT LIVER, SIGNAL = 0.72; EXPRESSED IN BRAIN, SIGNAL = 0.8; EXPRESSED IN PLACENTA, SIGNAL = 0.69; EXPRESSED IN FETAL LIVER, SIGNAL = 0.76; EXPRESSED IN LUNG, SIGNAL =   1; EXPRESSED IN HEART, SIGNAL = 0.84
SVKMRDEECLYSTSCSATFSHLALE

SEQ ID NO: 37602 - protein, 56 aa, Homo sapiens
  MAP TO AC008163.1; EXPRESSED IN HEART, SIGNAL = 0.78; EXPRESSED IN BRAIN, SIGNAL = 0.82; EXPRESSED IN FETAL LIVER, SIGNAL = 0.7; EXPRESSED IN HELA, SIGNAL = 0.68; EXPRESSED IN ADULT LIVER, SIGNAL = 1.1; SWISSPROT HIT: Q14517, EVALUE 3.90e-01
TGTITLLQPLNLDNPSNSKIYSLETEATDNGNNTSSYTFTVFVENVDDPISCDPSF

SEQ ID NO: 37603 - protein, 126 aa, Homo sapiens
  MAP TO AC007002.2; EXPRESSED IN BT474, SIGNAL = 0.73; EXPRESSED IN ADULT LIVER, SIGNAL = 0.94; EXPRESSED IN BRAIN, SIGNAL = 0.94; EXPRESSED IN HEART, SIGNAL = 0.92; EXPRESSED IN PLACENTA, SIGNAL = 0.83; EXPRESSED IN FETAL LIVER, SIGNAL = 0.68; EXPRESSED IN LUNG, SIGNAL = 0.83; EXPRESSED IN HELA, SIGNAL = 0.82; EXPRESSED IN BONE MARROW, SIGNAL = 1.4; EST_HUMAN HIT: AW513600.1, EVALUE 1.00e-16; SWISSPROT HIT: P79739, EVALUE 1.00e-19
MKNKTCVLVCVSVFGGERGQVTVPRVGVRRPSLAGPLQKCTLRETRVWLPQGSGFQSSRREKYGNVFKTHLLGRPLIRVTGAENVRKILMGEHHLVSTEWPRSTRMLLGPNTVSNSIGDIHRNKRK

SEQ ID NO: 37604 - protein, 26 aa, Homo sapiens
  MAP TO AC012330.5; EXPRESSED IN FETAL LIVER, SIGNAL = 1.5; EXPRESSED IN LUNG, SIGNAL = 0.98; EXPRESSED IN BONE MARROW, SIGNAL = 1.1; EXPRESSED IN HELA, SIGNAL = 1.1; EXPRESSED IN HEART, SIGNAL = 1.1; EXPRESSED IN PLACENTA, SIGNAL =   1; EXPRESSED IN BT474, SIGNAL = 1.2; EXPRESSED IN ADULT LIVER, SIGNAL = 1.3; EXPRESSED IN BRAIN, SIGNAL = 1.1; EXPRESSED IN HBL100, SIGNAL =   1; EST_HUMAN HIT: H72018.1, EVALUE 1.00e-04; SWISSPROT HIT: P19440, EVALUE 2.00e-06
MLAIEGAQAFYNGSLMAQIVKDIQAA

SEQ ID NO: 37605 - protein, 82 aa, Homo sapiens
  MAP TO AL132708.1; EXPRESSED IN BT474, SIGNAL = 1.3; EXPRESSED IN ADULT LIVER, SIGNAL = 1.7; EXPRESSED IN FETAL LIVER, SIGNAL = 1.6; EXPRESSED IN BONE MARROW, SIGNAL = 1.3; EXPRESSED IN LUNG, SIGNAL = 1.1; EXPRESSED IN BRAIN, SIGNAL = 1.2; EXPRESSED IN PLACENTA, SIGNAL = 1.3; EXPRESSED IN HBL100, SIGNAL = 1.4; EXPRESSED IN HELA, SIGNAL = 1.3; EXPRESSED IN HEART, SIGNAL = 1.3; SWISSPROT HIT: Q10268, EVALUE 3.00e-01; EST_HUMAN HIT: BE563127.1, EVALUE 4.10e-01
IEAGSINSLVHGESEAKQPVQCISAELPSPLMHTATTISSFVHSGPHFPLYGTDSPEVNDLSAFPTHIPLLLECSHGRGGGP

SEQ ID NO: 37606 - protein, 37 aa, Homo sapiens
  MAP TO AL121759.5; EXPRESSED IN HEART, SIGNAL = 1.1; EXPRESSED IN BT474, SIGNAL = 0.95
NVENEAERSTALATAEPGSADTSRQITRQDVVGAAGE

SEQ ID NO: 37607 - protein, 28 aa, Homo sapiens
  MAP TO AC007632.4; EXPRESSED IN PLACENTA, SIGNAL = 0.8; EXPRESSED IN BONE MARROW, SIGNAL = 0.72; EXPRESSED IN LUNG, SIGNAL =   1; EXPRESSED IN HEART, SIGNAL = 1.1; EXPRESSED IN HBL100, SIGNAL = 0.69; EXPRESSED IN FETAL LIVER, SIGNAL = 0.69; EXPRESSED IN HELA, SIGNAL = 0.94; EXPRESSED IN ADULT LIVER, SIGNAL = 0.99; EXPRESSED IN BRAIN, SIGNAL =   1
ADLIPHESCQGLWLVPSGVVVSAVPGAF

SEQ ID NO: 37608 - protein, 257 aa, Homo sapiens
  MAP TO AC004230.1; EXPRESSED IN BT474, SIGNAL =  31; EXPRESSED IN FETAL LIVER, SIGNAL = 6.5; EXPRESSED IN ADULT LIVER, SIGNAL = 3.2; EXPRESSED IN BONE MARROW, SIGNAL = 3.5; EXPRESSED IN LUNG, SIGNAL = 1.2e+02; EXPRESSED IN BRAIN, SIGNAL = 5.7; EXPRESSED IN HELA, SIGNAL =  13; EXPRESSED IN PLACENTA, SIGNAL =  27; EXPRESSED IN HBL100, SIGNAL = 2.6; EXPRESSED IN HEART, SIGNAL =  40; EST_HUMAN HIT: BF094607.1, EVALUE 9.00e-75; SWISSPROT HIT: gi1351901, EVALUE 1.00e-114
EGDLKGPEVDIKGPKVDIDAPDVDVHGPDWHLKMPKIKMPKISMPGFKGEGPDVDVNLPKADIDVSGPKVDVECPDVNIEGPEGKWKSPKFKMPEMHFKTPKISMPDIDLNLTGPKIKGDVDVTGPKVEGDLKGPEVDLKGPKVDIDVPDVNVQGPDWHLKMPKMKMPKFSMPGFKAEGPEVDVNLPKADVDVSGPKVDVEGPDVNIEGPEGKLKGPKFKMPEMNIKAPKIPMPDFDLHLKGPKVKGDVDISLPKVE

SEQ ID NO: 37609 - protein, 60 aa, Homo sapiens
  MAP TO AF110324.1; EXPRESSED IN BT474, SIGNAL = 7.2; EXPRESSED IN FETAL LIVER, SIGNAL = 7.4; EXPRESSED IN LUNG, SIGNAL = 8.6; EXPRESSED IN BONE MARROW, SIGNAL = 6.8; EXPRESSED IN HEART, SIGNAL = 5.1; EXPRESSED IN PLACENTA, SIGNAL = 7.5; EXPRESSED IN ADULT LIVER, SIGNAL = 8.3; EXPRESSED IN BRAIN, SIGNAL = 5.9; EXPRESSED IN HELA, SIGNAL =   8; EXPRESSED IN HBL100, SIGNAL = 6.4
KGSPMLTRPFVPRVGLHMPERRPMPPTRPRWPLARSATSRELWPGSCHLISTNQVKQCSF

SEQ ID NO: 37610 - protein, 36 aa, Homo sapiens
  MAP TO AF047825.1; EXPRESSED IN BONE MARROW, SIGNAL = 1.1; EXPRESSED IN ADULT LIVER, SIGNAL = 1.3; EXPRESSED IN FETAL LIVER, SIGNAL = 1.1; EXPRESSED IN BRAIN, SIGNAL = 0.98; EXPRESSED IN LUNG, SIGNAL =   1; EXPRESSED IN HEART, SIGNAL =   1; EXPRESSED IN HELA, SIGNAL = 1.2; EXPRESSED IN PLACENTA, SIGNAL = 0.93; EXPRESSED IN BT474, SIGNAL =   1
MFPFFLLLKWLLPDLRLLLQDLRKQVAPLLKSFQGE

SEQ ID NO: 37611 - protein, 80 aa, Homo sapiens
  MAP TO AL121748.2; EXPRESSED IN LUNG, SIGNAL = 1.5; EXPRESSED IN PLACENTA, SIGNAL = 1.5; EXPRESSED IN HEART, SIGNAL = 1.4; EXPRESSED IN HBL100, SIGNAL = 0.91; EXPRESSED IN BT474, SIGNAL = 0.91; EXPRESSED IN ADULT LIVER, SIGNAL = 1.1; SWISSPROT HIT: O14786, EVALUE 1.00e-23; EST_HUMAN HIT: BF096148.1, EVALUE 4.00e-23
KNISRKPGNVLKTLDPILITIIAMSALGVLLGAVCGVVLYCACWHNGMSERNLSALENYNFELVDGVKLKKDKLNTQSTY

SEQ ID NO: 37612 - protein, 30 aa, Homo sapiens
  MAP TO AF053356.1; EXPRESSED IN BRAIN, SIGNAL = 1.7; EXPRESSED IN PLACENTA, SIGNAL = 2.1; EXPRESSED IN HBL100, SIGNAL = 2.2; EXPRESSED IN ADULT LIVER, SIGNAL = 3.4; EXPRESSED IN FETAL LIVER, SIGNAL = 2.9; EXPRESSED IN BONE MARROW, SIGNAL = 1.7; EXPRESSED IN LUNG, SIGNAL = 2.4; EXPRESSED IN HEART, SIGNAL = 2.1; EXPRESSED IN HELA, SIGNAL = 2.3; EXPRESSED IN BT474, SIGNAL = 1.7; SWISSPROT HIT: Q10647, EVALUE 2.20e+00; EST_HUMAN HIT: BE743609.1, EVALUE 4.00e-12
PVLTCWLTSVETPLLHPRWHQLLLHSLPLG

SEQ ID NO: 37613 - protein, 50 aa, Homo sapiens
  MAP TO AC009269.1; EXPRESSED IN PLACENTA, SIGNAL = 0.74; EXPRESSED IN FETAL LIVER, SIGNAL = 0.57; EXPRESSED IN LUNG, SIGNAL = 0.7; EXPRESSED IN HELA, SIGNAL = 0.73; EXPRESSED IN BRAIN, SIGNAL = 1.2; EXPRESSED IN BONE MARROW, SIGNAL = 0.63; EXPRESSED IN HBL100, SIGNAL = 0.92; EXPRESSED IN ADULT LIVER, SIGNAL = 0.84; EXPRESSED IN HEART, SIGNAL = 0.84
  unsure 1
XQVSTERAPHGSRPTGAIYTTHITTTPPNFTTSRVTTLWGFVFTTKPIPS

SEQ ID NO: 37614 - protein, 37 aa, Homo sapiens
  MAP TO AF043945.1; EXPRESSED IN BONE MARROW, SIGNAL = 6.7; EXPRESSED IN LUNG, SIGNAL = 6.9; EXPRESSED IN BRAIN, SIGNAL = 6.7; EXPRESSED IN HELA, SIGNAL = 6.5; EXPRESSED IN HEART, SIGNAL = 6.9; EXPRESSED IN PLACENTA, SIGNAL = 7.4; EXPRESSED IN HBL100, SIGNAL = 8.1; EXPRESSED IN ADULT LIVER, SIGNAL =  11; EXPRESSED IN BT474, SIGNAL =   6; EXPRESSED IN FETAL LIVER, SIGNAL =   8; EST_HUMAN HIT: AI207980.1, EVALUE 2.20e+00; SWISSPROT HIT: P11101, EVALUE 8.10e+00
CDTTDHTSLPETPSPGPCTPHSLGFPLPHWLLLLSVF

SEQ ID NO: 37615 - protein, 348 aa, Homo sapiens
  MAP TO AC004702.1; EXPRESSED IN HBL100, SIGNAL = 1.2; EXPRESSED IN PLACENTA, SIGNAL = 0.97; EXPRESSED IN FETAL LIVER, SIGNAL = 2.4; EXPRESSED IN BRAIN, SIGNAL = 3.2; EXPRESSED IN LUNG, SIGNAL = 1.5; EXPRESSED IN BONE MARROW, SIGNAL =   2; EXPRESSED IN HEART, SIGNAL = 1.3; EXPRESSED IN HELA, SIGNAL = 3.7; EST_HUMAN HIT: AW381570.1, EVALUE 1.00e-89; SWISSPROT HIT: P30622, EVALUE 1.00e-10
PTGNQMSSDIDEYKKNIHGNALRTSGSSSSDVTKASLSPDASDFEHITAETPSRPLSSTSNPFKSSKCSTAGSSPNSVSELSLASLTEKIQKMEENHHSTAEELQATLQELSDQQQMVQELTAENEKLVDEKTILETSFHQHRERAEQLSQENEKLMNLLQERVKNEEPTTQEGKIIELEQKCTGILEQGRFEREKLLNIQQQLTCSLRKVEEENQGALEMIKRLKEENEKLNEFLELERHNNNMMAKTLEECRVTLEGLKMENGSLKSHLQGEKQKATEASAVEQTAESCEVQEMLKVARAEKDLLELSCNELRQELLKANGEIKHVSSLLAKVRRDSSLLVFAHPC

SEQ ID NO: 37616 - protein, 107 aa, Homo sapiens
  MAP TO AL121716.2; EXPRESSED IN BT474, SIGNAL = 1.5; EXPRESSED IN FETAL LIVER, SIGNAL = 1.5; EXPRESSED IN BRAIN, SIGNAL = 1.7; EXPRESSED IN BONE MARROW, SIGNAL = 3.4; EXPRESSED IN HBL100, SIGNAL = 1.6; EXPRESSED IN PLACENTA, SIGNAL = 1.2; EXPRESSED IN LUNG, SIGNAL = 2.7; EXPRESSED IN HEART, SIGNAL = 1.5; EXPRESSED IN HELA, SIGNAL = 1.5; EXPRESSED IN ADULT LIVER, SIGNAL = 2.4; EST_HUMAN HIT: BE707627.1, EVALUE 9.00e-07; SWISSPROT HIT: Q9Y3R5, EVALUE 2.00e-09
CEHVQPPQWLQTLMNACSQASDFSVQSVAISLVMDLVGLTQSVAMVTGENINSVEPAQPLSPNQGRVAVVIRPPLTQGNLRYIAEKTEFFKVNSKKCIYDYDDYSHV

SEQ ID NO: 37617 - protein, 50 aa, Homo sapiens; identical to SEQ ID NO: 34784
  MAP TO AL121749.7; EXPRESSED IN PLACENTA, SIGNAL = 1.8; EXPRESSED IN HELA, SIGNAL = 1.9; EXPRESSED IN ADULT LIVER, SIGNAL = 2.9; EXPRESSED IN BT474, SIGNAL = 1.8; EXPRESSED IN LUNG, SIGNAL = 2.2; EXPRESSED IN BRAIN, SIGNAL =   2; EXPRESSED IN BONE MARROW, SIGNAL = 2.2; EXPRESSED IN HEART, SIGNAL = 1.9; EXPRESSED IN HBL100, SIGNAL = 2.3; EXPRESSED IN FETAL LIVER, SIGNAL = 1.8; SWISSPROT HIT: Q99186, EVALUE 1.50e+00

SEQ ID NO: 37618 - protein, 19 aa, Homo sapiens
  MAP TO AL132778.2; EXPRESSED IN BT474, SIGNAL = 4.5; EXPRESSED IN FETAL LIVER, SIGNAL = 3.7; EXPRESSED IN BRAIN, SIGNAL = 4.4; EXPRESSED IN BONE MARROW, SIGNAL = 4.2; EXPRESSED IN HBL100, SIGNAL = 4.1; EXPRESSED IN PLACENTA, SIGNAL = 3.6; EXPRESSED IN LUNG, SIGNAL = 3.5; EXPRESSED IN HEART, SIGNAL = 2.8; EXPRESSED IN HELA, SIGNAL = 2.8; EXPRESSED IN ADULT LIVER, SIGNAL = 5.3
MDKEIFEIRKNTDQKKKTK

SEQ ID NO: 37619 - protein, 58 aa, Homo sapiens
  MAP TO AL121755.4; EXPRESSED IN HELA, SIGNAL = 2.9; EXPRESSED IN ADULT LIVER, SIGNAL =   3; EXPRESSED IN BT474, SIGNAL = 3.1; EXPRESSED IN BRAIN, SIGNAL = 3.6; EXPRESSED IN BONE MARROW, SIGNAL = 3.1; EXPRESSED IN HBL100, SIGNAL = 2.1; EXPRESSED IN HEART, SIGNAL = 3.1; EXPRESSED IN PLACENTA, SIGNAL = 2.9; EXPRESSED IN FETAL LIVER, SIGNAL = 1.8; EXPRESSED IN LUNG, SIGNAL = 3.7; SWISSPROT HIT: O95674, EVALUE 2.00e-26; EST_HUMAN HIT: BE018883.1, EVALUE 1.00e-25
LSYVMSGYRCFVCPVEYNNDTNSFTVDCEPSDLFRLQEYNIPGVIQSVIGWVCATHRG

SEQ ID NO: 37620 - protein, 65 aa, Homo sapiens
  MAP TO AP000008.1; EXPRESSED IN PLACENTA, SIGNAL = 1.1; EXPRESSED IN ADULT LIVER, SIGNAL = 1.1; EXPRESSED IN BT474, SIGNAL = 1.1; EXPRESSED IN LUNG, SIGNAL = 1.1; EXPRESSED IN BRAIN, SIGNAL =  12; EXPRESSED IN BONE MARROW, SIGNAL = 1.1; EXPRESSED IN HEART, SIGNAL =   1; EXPRESSED IN HBL100, SIGNAL = 1.2; EXPRESSED IN FETAL LIVER, SIGNAL = 1.2; SWISSPROT HIT: Q14807, EVALUE 2.50e+00; EST_HUMAN HIT: AU143539.1, EVALUE 6.00e-33
MLITLCYLYLWARWGRRPAELVRATVRRLRASRCSFTFCGAAAEPPGARVCLSRGGRVFCVSDSQ

SEQ ID NO: 37621 - protein, 51 aa, Homo sapiens
  MAP TO AP000008.1; EXPRESSED IN PLACENTA, SIGNAL = 1.1; EXPRESSED IN ADULT LIVER, SIGNAL = 1.1; EXPRESSED IN BT474, SIGNAL = 1.1; EXPRESSED IN LUNG, SIGNAL = 1.1; EXPRESSED IN BRAIN, SIGNAL =  12; EXPRESSED IN BONE MARROW, SIGNAL = 1.1; EXPRESSED IN HEART, SIGNAL =   1; EXPRESSED IN HBL100, SIGNAL = 1.2; EXPRESSED IN FETAL LIVER, SIGNAL = 1.2; EST_HUMAN HIT: AW136725.1, EVALUE 3.00e-11; SWISSPROT HIT: P47926, EVALUE 2.60e+00
CSSRCATCTCGRAGVAGRLSSCAPRCGGCVPRAVPSPSAARPRSPRAPACA

SEQ ID NO: 37622 - protein, 401 aa, Homo sapiens
  MAP TO AC005828.1; EXPRESSED IN FETAL LIVER, SIGNAL = 1.4; EXPRESSED IN LUNG, SIGNAL = 2.4; EXPRESSED IN HBL100, SIGNAL = 1.2; EXPRESSED IN PLACENTA, SIGNAL = 1.3; EXPRESSED IN BT474, SIGNAL = 1.3; EXPRESSED IN BRAIN, SIGNAL =   2; EXPRESSED IN BONE MARROW, SIGNAL = 1.2; EXPRESSED IN HEART, SIGNAL = 1.8; EXPRESSED IN HELA, SIGNAL = 1.9; EST_HUMAN HIT: BF355618.1, EVALUE 1.00e-35; SWISSPROT HIT: P18616, EVALUE 8.10e-02
QMPQLPVAVPQQGLRLQPAKAQIVRSNQPSPAVHSSTVIPTGAYGQVAHSMASKYQSSQGDIGVSQSRLVYQGSIGGIVGDGRPVQHVQASLSAGAICQHGGLTKEDLPQRPSSAYRGGVRYSQTPQIGRSQSASYYPVCHSKLDLERSSSQLGSPDVSHLIRRPISVNPNEIKPHPPTPRPLLHSQSVGLRFSPSSNSISSTSNLTPTFRPSSSIQQMEIPLKPAYERSCDELSPVSPTQGGYPSEPTRSRTTPFMGIIDKTARTQQYPHLHQQNRTWAVSSVDTVLSPTSPGNLPQPESFSPPSSISNIAFYNKTNNAQNGHLLEDDYYSPHGMLANGSRGDLLERVSQASSYPDVKVARTLPVAQAYQDNLYRQLSRDSRQGQTSPIKPKRPFVESNV

SEQ ID NO: 37623 - protein, 23 aa, Homo sapiens
  MAP TO AC005828.1; EXPRESSED IN FETAL LIVER, SIGNAL = 1.4; EXPRESSED IN LUNG, SIGNAL = 2.4; EXPRESSED IN HBL100, SIGNAL = 1.2; EXPRESSED IN PLACENTA, SIGNAL = 1.3; EXPRESSED IN BT474, SIGNAL = 1.3; EXPRESSED IN BRAIN, SIGNAL =   2; EXPRESSED IN BONE MARROW, SIGNAL = 1.2; EXPRESSED IN HEART, SIGNAL = 1.8; EXPRESSED IN HELA, SIGNAL = 1.9
RCLSSLWQFPSKGSGYSLPRPRL

SEQ ID NO: 37624 - protein, 30 aa, Homo sapiens
  MAP TO AL121758.5; EXPRESSED IN PLACENTA, SIGNAL = 4.6; EXPRESSED IN ADULT LIVER, SIGNAL = 6.2; EXPRESSED IN BRAIN, SIGNAL =   5; EXPRESSED IN LUNG, SIGNAL = 5.5; EXPRESSED IN BONE MARROW, SIGNAL = 5.6; EXPRESSED IN HEART, SIGNAL = 4.4; EXPRESSED IN HELA, SIGNAL = 3.3; EXPRESSED IN HBL100, SIGNAL = 5.1; EXPRESSED IN BT474, SIGNAL =   5; EXPRESSED IN FETAL LIVER, SIGNAL = 5.7
LLFYRNYPSHSFSYLSKHLRELSISVHKKW

SEQ ID NO: 37625 - protein, 554 aa, Homo sapiens
  MAP TO AF003625.1; EXPRESSED IN HELA, SIGNAL = 1.2; EXPRESSED IN HBL100, SIGNAL = 1.2; EXPRESSED IN HEART, SIGNAL = 3.9; EXPRESSED IN PLACENTA, SIGNAL = 1.1; EXPRESSED IN ADULT LIVER, SIGNAL = 0.97; EXPRESSED IN FETAL LIVER, SIGNAL =   2; EXPRESSED IN BT474, SIGNAL = 1.2; EXPRESSED IN BRAIN, SIGNAL = 1.3; EXPRESSED IN BONE MARROW, SIGNAL = 1.7; EST_HUMAN HIT: AU125231.1, EVALUE 8.00e-11; SWISSPROT HIT: Q13585, EVALUE 0.00e+00
NIFVVSLSVADMLVAIYPYPLMLHAMSIGGWDLSQLQCQMVGFITGLSVVGSIFNIVAIAINRYCYICHSLQYERIFSVRNTCIYLVITWIMTVLAVLPNMYIGTIEYDPRTYTCIFNYLNNPVFTVTIVCIHFVLPLLIVGFCYVRIWTKVLAARDPAGQNPDNQLAEVRNFLTMFVIFLLFAVCWCPINVLTVLVAVSPKEMAGKIPNWLYLAAYFIAYFNSCLNAVIYGLLNENFRREYWTIFHAMRHPIIFFSGLISDIREMQEARTLARARAHARDQAREQDRAHACPAVEETPMNVRNVPLPGDAAAGHPDRASGHPKPHSRSSSAYRKSASTHHKSVFSHSKAASGHLKPVSGHSKPASGHPKSATVYPKPASVHFKADSVHFKGDSVHFKPDSVHFKPASSNPKPITGHHVSAGSHSKSAFSAATSHPKPTTGHIKPATSHAEPTTADYPKPATTSHPKPTAADNPELSASHCPEIPAIAHPVSDDSDLPESASSPAAGPTKPAASQLESDTIADLPDPTVVTTSTNDYHDVVVIDVEDDPDEMAV

SEQ ID NO: 37626 - protein, 88 aa, Homo sapiens
  MAP TO AP000012.2; EXPRESSED IN BT474, SIGNAL = 2.9; EXPRESSED IN FETAL LIVER, SIGNAL = 3.3; EXPRESSED IN BONE MARROW, SIGNAL = 2.8; EXPRESSED IN PLACENTA, SIGNAL = 2.1; EXPRESSED IN BRAIN, SIGNAL = 2.9; EXPRESSED IN LUNG, SIGNAL = 2.7; EXPRESSED IN HEART, SIGNAL = 2.3; EXPRESSED IN HELA, SIGNAL = 1.7; EXPRESSED IN HBL100, SIGNAL = 3.1; EXPRESSED IN ADULT LIVER, SIGNAL = 2.8; SWISSPROT HIT: Q63470, EVALUE 5.00e-47; EST_HUMAN HIT: BE907273.1, EVALUE 5.00e-44
FRNHLCLVFEMLSYNLYDLLRNTNFRGVSLNLTRKFAQQMCTALLFLATPELSIIHCDLKPENILLCNPKRSAIKIVDFGSSCQLGQR

SEQ ID NO: 37627 - protein, 97 aa, Homo sapiens; identical to SEQ ID NO: 35312
  MAP TO AL121760.4; EXPRESSED IN ADULT LIVER, SIGNAL = 1.5; EXPRESSED IN BT474, SIGNAL = 1.3; EXPRESSED IN FETAL LIVER, SIGNAL = 1.6; EXPRESSED IN BRAIN, SIGNAL = 1.6; EXPRESSED IN BONE MARROW, SIGNAL = 1.4; EXPRESSED IN HBL100, SIGNAL = 1.6; EXPRESSED IN LUNG, SIGNAL =   1; EXPRESSED IN HEART, SIGNAL = 1.4; EXPRESSED IN HELA, SIGNAL = 1.2; SWISSPROT HIT: P14433, EVALUE 2.40e-02; EST_HUMAN HIT: AI363143.1, EVALUE 4.00e-03

SEQ ID NO: 37628 - protein, 44 aa, Homo sapiens; identical to SEQ ID NO: 35313
  MAP TO AL121760.4; EXPRESSED IN ADULT LIVER, SIGNAL = 1.5; EXPRESSED IN BT474, SIGNAL = 1.3; EXPRESSED IN FETAL LIVER, SIGNAL = 1.6; EXPRESSED IN BRAIN, SIGNAL = 1.6; EXPRESSED IN BONE MARROW, SIGNAL = 1.4; EXPRESSED IN HBL100, SIGNAL = 1.6; EXPRESSED IN LUNG, SIGNAL =   1; EXPRESSED IN HEART, SIGNAL = 1.4; EXPRESSED IN HELA, SIGNAL = 1.2; SWISSPROT HIT: P32127, EVALUE 1.20e+00

SEQ ID NO: 37629 - protein, 48 aa, Homo sapiens
  MAP TO AL021154.1; EXPRESSED IN FETAL LIVER, SIGNAL = 1.3; EXPRESSED IN ADULT LIVER, SIGNAL = 1.7; EXPRESSED IN LUNG, SIGNAL = 1.2; EXPRESSED IN BONE MARROW, SIGNAL = 1.2; EXPRESSED IN HELA, SIGNAL = 1.3; EXPRESSED IN PLACENTA, SIGNAL = 1.4; EXPRESSED IN BT474, SIGNAL = 1.3; EXPRESSED IN BRAIN, SIGNAL = 1.1; EXPRESSED IN HEART, SIGNAL = 1.6; EXPRESSED IN HBL100, SIGNAL = 1.2; SWISSPROT HIT: O68008, EVALUE 3.50e+00; EST_HUMAN HIT: BE882628.1, EVALUE 2.00e-20
HVENEEQYREAVESLGNSHLSQNSHELSTGFLNLAVFTREVAALFKNL

SEQ ID NO: 37630 - protein, 51 aa, Homo sapiens
  MAP TO AF067844.1; EXPRESSED IN HEART, SIGNAL = 1.3; EXPRESSED IN BT474, SIGNAL =   1; EXPRESSED IN FETAL LIVER, SIGNAL = 1.1; EXPRESSED IN LUNG, SIGNAL =   1; EXPRESSED IN BONE MARROW, SIGNAL = 1.3; EXPRESSED IN BRAIN, SIGNAL = 0.96; EXPRESSED IN PLACENTA, SIGNAL = 0.94; EXPRESSED IN HBL100, SIGNAL = 0.99; EST_HUMAN HIT: T71627.1, EVALUE 5.70e+00; SWISSPROT HIT: P46934, EVALUE 6.00e+00
ELECEFLGAGWECPELEDLGFTGRAEISSHSYSRGMTIFHHLKKVLTNAFK

SEQ ID NO: 37631 - protein, 49 aa, Homo sapiens
  MAP TO AJ229041.1; EXPRESSED IN HBL100, SIGNAL =  17; EXPRESSED IN HEART, SIGNAL =  15; EXPRESSED IN ADULT LIVER, SIGNAL =  25; EXPRESSED IN FETAL LIVER, SIGNAL =  20; EXPRESSED IN LUNG, SIGNAL =  19; EXPRESSED IN HELA, SIGNAL =  21; EXPRESSED IN PLACENTA, SIGNAL =  22; EXPRESSED IN BT474, SIGNAL =  18; EXPRESSED IN BRAIN, SIGNAL =  16; EXPRESSED IN BONE MARROW, SIGNAL =  17; EST_HUMAN HIT: AW468873.1, EVALUE 2.00e-01
YHHVLYVLVVTQASCFDVDRGYTGHEYHEKVRITEDHLGGWLPHLNFKM

SEQ ID NO: 37632 - protein, 86 aa, Homo sapiens
  MAP TO AC006184.1; EXPRESSED IN BONE MARROW, SIGNAL = 0.94; EXPRESSED IN HELA, SIGNAL = 1.4; EXPRESSED IN HEART, SIGNAL = 1.5; EST_HUMAN HIT: AW378515.1, EVALUE 1.00e-17
  unsure 4
  unsure 11
  unsure 13
  unsure 21
  unsure 28
  unsure 33
APVXACITDQXEXQWEAVLEXEQEGGVXGAVVXQWPGLGTDHLIRQELQSLGVVLVEDILQDAVGQEGQGEDTGNDPDEHNPQVGL

SEQ ID NO: 37633 - protein, 41 aa, Homo sapiens
  MAP TO AC007671.5; EXPRESSED IN BRAIN, SIGNAL =   1; EXPRESSED IN FETAL LIVER, SIGNAL = 1.2; EXPRESSED IN BT474, SIGNAL =   1; EXPRESSED IN LUNG, SIGNAL =   1; EXPRESSED IN HEART, SIGNAL = 1.1; EXPRESSED IN BONE MARROW, SIGNAL = 0.96; EST_HUMAN HIT: BE618085.1, EVALUE 5.00e-19
LHLHACLFYEDRNRAIFEGLLYTVRCWCQSNSAVCQPQLSA

SEQ ID NO: 37634 - protein, 57 aa, Homo sapiens
  MAP TO AL132772.1; EXPRESSED IN HELA, SIGNAL = 6.7; EXPRESSED IN FETAL LIVER, SIGNAL = 1.9; EXPRESSED IN BT474, SIGNAL = 5.1; EXPRESSED IN BRAIN, SIGNAL = 2.2; EXPRESSED IN LUNG, SIGNAL = 2.5; EXPRESSED IN BONE MARROW, SIGNAL = 1.7; EXPRESSED IN PLACENTA, SIGNAL = 2.6; EXPRESSED IN HEART, SIGNAL =   2; EXPRESSED IN HBL100, SIGNAL =   3; SWISSPROT HIT: P41235, EVALUE 3.00e-30; EST_HUMAN HIT: AU130255.1, EVALUE 6.00e-13
TSPSEGTNLNAPNSLGVSALCAICGDRATGKHYGASSCDGCKGFFRRSVRKNHMYSC

SEQ ID NO: 37635 - protein, 53 aa, Homo sapiens
  MAP TO AL132772.1; EXPRESSED IN HELA, SIGNAL = 6.7; EXPRESSED IN FETAL LIVER, SIGNAL = 1.9; EXPRESSED IN BT474, SIGNAL = 5.1; EXPRESSED IN BRAIN, SIGNAL = 2.2; EXPRESSED IN LUNG, SIGNAL = 2.5; EXPRESSED IN BONE MARROW, SIGNAL = 1.7; EXPRESSED IN PLACENTA, SIGNAL = 2.6; EXPRESSED IN HEART, SIGNAL =   2; EXPRESSED IN HBL100, SIGNAL =   3; EST_HUMAN HIT: BE714126.1, EVALUE 1.90e-01
SLPSLLAQTRPHQKAPTSTRPTAWVSAPCVPSAGTGPRANTTVPRAVTAARAS

SEQ ID NO: 37636 - protein, 40 aa, Homo sapiens
  MAP TO AL121754.8; EXPRESSED IN PLACENTA, SIGNAL = 1.8; EXPRESSED IN HEART, SIGNAL = 1.3; EXPRESSED IN ADULT LIVER, SIGNAL = 1.5; EXPRESSED IN BT474, SIGNAL = 1.7; EXPRESSED IN BONE MARROW, SIGNAL = 1.4; EXPRESSED IN HBL100, SIGNAL = 1.6; EXPRESSED IN FETAL LIVER, SIGNAL = 1.5; EXPRESSED IN BRAIN, SIGNAL = 1.6; EXPRESSED IN LUNG, SIGNAL = 1.7; EXPRESSED IN HELA, SIGNAL = 1.3; EST_HUMAN HIT: AV750391.1, EVALUE 3.00e-15; SWISSPROT HIT: P37595, EVALUE 4.00e-05
ENDSGTLDTVGAVVVDHEGNVAAAVSSGGLALKHPGRVGQ

SEQ ID NO: 37637 - protein, 39 aa, Homo sapiens
  MAP TO AL121757.7; EXPRESSED IN BT474, SIGNAL = 1.7; EXPRESSED IN BRAIN, SIGNAL = 1.8; EXPRESSED IN BONE MARROW, SIGNAL = 1.5; EXPRESSED IN LUNG, SIGNAL = 1.3; EXPRESSED IN PLACENTA, SIGNAL = 1.3; EXPRESSED IN HBL100, SIGNAL = 1.5; EXPRESSED IN HEART, SIGNAL = 1.2; EXPRESSED IN FETAL LIVER, SIGNAL = 1.4; EXPRESSED IN ADULT LIVER, SIGNAL = 1.6
CAGRLAGMGSWWQRIVSVFFLVAGELCDRGLRSLGTSGQ

SEQ ID NO: 37638 - protein, 30 aa, Homo sapiens
  MAP TO AF096876.1; EXPRESSED IN BT474, SIGNAL = 1.7; EXPRESSED IN LUNG, SIGNAL = 1.7; EXPRESSED IN BONE MARROW, SIGNAL = 1.4; EXPRESSED IN FETAL LIVER, SIGNAL = 1.7; EXPRESSED IN BRAIN, SIGNAL = 1.1; EXPRESSED IN PLACENTA, SIGNAL = 1.6; EXPRESSED IN HEART, SIGNAL = 1.6; EXPRESSED IN HELA, SIGNAL = 1.7; EXPRESSED IN HBL100, SIGNAL = 1.2
SEKEREGEREREGRARKRGSKPGRAVNAVM

SEQ ID NO: 37639 - protein, 55 aa, Homo sapiens
  MAP TO AP000014.2; EXPRESSED IN HBL100, SIGNAL = 1.1; EXPRESSED IN PLACENTA, SIGNAL =   1; EXPRESSED IN HEART, SIGNAL = 1.1; EXPRESSED IN BT474, SIGNAL = 1.1; EXPRESSED IN BRAIN, SIGNAL = 1.3; EXPRESSED IN BONE MARROW, SIGNAL = 0.93; SWISSPROT HIT: O09127, EVALUE 7.70e+00; EST_HUMAN HIT: BF308036.1, EVALUE 7.30e-01
FFSPNHQLTSWRATPWIRTSKAQWPFTSQSCLSRPGMTCQDTSAEIGPKGKSRGT

SEQ ID NO: 37640 - protein, 92 aa, Homo sapiens
  MAP TO AJ003147.1; EXPRESSED IN BONE MARROW, SIGNAL = 1.9; EXPRESSED IN PLACENTA, SIGNAL = 1.2; EXPRESSED IN HEART, SIGNAL = 1.9; EXPRESSED IN LUNG, SIGNAL = 1.2; EXPRESSED IN BRAIN, SIGNAL = 1.1; EXPRESSED IN HELA, SIGNAL = 1.1; EXPRESSED IN HBL100, SIGNAL = 1.1; EXPRESSED IN BT474, SIGNAL = 1.4; EXPRESSED IN ADULT LIVER, SIGNAL =   1; EXPRESSED IN FETAL LIVER, SIGNAL = 1.2; EST_HUMAN HIT: BE906296.1, EVALUE 2.00e-06; SWISSPROT HIT: O15553, EVALUE 1.00e-46
MAKTPSDHLLSTLEELVPYDFEKFKFKLQNTSVQKEHSRIPRSQIQRARPVKMATLLVTYYGEEYAVQLTLQVLRAINQRLLAEELHRAAIQ

SEQ ID NO: 37641 - protein, 40 aa, Homo sapiens
  MAP TO AJ003147.1; EXPRESSED IN BONE MARROW, SIGNAL = 1.9; EXPRESSED IN PLACENTA, SIGNAL = 1.2; EXPRESSED IN HEART, SIGNAL = 1.9; EXPRESSED IN LUNG, SIGNAL = 1.2; EXPRESSED IN BRAIN, SIGNAL = 1.1; EXPRESSED IN HELA, SIGNAL = 1.1; EXPRESSED IN HBL100, SIGNAL = 1.1; EXPRESSED IN BT474, SIGNAL = 1.4; EXPRESSED IN ADULT LIVER, SIGNAL =   1; EXPRESSED IN FETAL LIVER, SIGNAL = 1.2; EST_HUMAN HIT: BE880817.1, EVALUE 4.20e+00; SWISSPROT HIT: P44922, EVALUE 3.60e+00
FPVPFPLFHNLPFLAHQGQRLLFLPEARQLARASPAQHHG

SEQ ID NO: 37642 - protein, 18 aa, Homo sapiens
  MAP TO AC008169.1; EXPRESSED IN ADULT LIVER, SIGNAL = 1.3; EXPRESSED IN LUNG, SIGNAL = 1.2; EXPRESSED IN HELA, SIGNAL = 1.2; EXPRESSED IN HEART, SIGNAL = 1.4; EXPRESSED IN PLACENTA, SIGNAL = 0.99; EXPRESSED IN BONE MARROW, SIGNAL = 0.92; EXPRESSED IN FETAL LIVER, SIGNAL = 0.93; EXPRESSED IN BRAIN, SIGNAL = 1.4; EXPRESSED IN BT474, SIGNAL = 1.1; EXPRESSED IN HBL100, SIGNAL = 0.95; EST_HUMAN HIT: BE067087.1, EVALUE 2.90e-01
MSKESGLWRWNLLLGKML

SEQ ID NO: 37643 - protein, 50 aa, Homo sapiens
  MAP TO AP000018.2; EXPRESSED IN BT474, SIGNAL = 6.6; EXPRESSED IN BRAIN, SIGNAL = 6.1; EXPRESSED IN BONE MARROW, SIGNAL = 6.5; EXPRESSED IN LUNG, SIGNAL = 5.6; EXPRESSED IN HELA, SIGNAL = 5.6; EXPRESSED IN PLACENTA, SIGNAL = 6.8; EXPRESSED IN HBL100, SIGNAL =   7; EXPRESSED IN HEART, SIGNAL = 5.6; EXPRESSED IN FETAL LIVER, SIGNAL = 5.6; EXPRESSED IN ADULT LIVER, SIGNAL = 7.4
GMNPSLLCALSRGCVTTIPLPPPASSTPPMLPLPLPPSPPSPLAPPPPPP

SEQ ID NO: 37644 - protein, 30 aa, Homo sapiens
  MAP TO AP000022.2; EXPRESSED IN PLACENTA, SIGNAL = 2.5; EXPRESSED IN HBL100, SIGNAL = 2.8; EXPRESSED IN HEART, SIGNAL = 2.2; EXPRESSED IN ADULT LIVER, SIGNAL = 2.2; EXPRESSED IN BT474, SIGNAL = 2.3; EXPRESSED IN BONE MARROW, SIGNAL = 2.7; EXPRESSED IN BRAIN, SIGNAL = 2.7; EXPRESSED IN FETAL LIVER, SIGNAL = 2.3; EXPRESSED IN LUNG, SIGNAL = 2.6; EXPRESSED IN HELA, SIGNAL = 2.2
QICHDDIYEISEIKEKPDVSQELNEVAASQ

SEQ ID NO: 37645 - protein, 39 aa, Homo sapiens
  MAP TO AL121879.4; EXPRESSED IN PLACENTA, SIGNAL = 0.94; EXPRESSED IN HEART, SIGNAL = 1.1; EXPRESSED IN ADULT LIVER, SIGNAL = 1.1; EXPRESSED IN FETAL LIVER, SIGNAL = 1.1; EXPRESSED IN BRAIN, SIGNAL =   1; EXPRESSED IN BONE MARROW, SIGNAL =   1; EST_HUMAN HIT: AA135164.1, EVALUE 1.70e-01; SWISSPROT HIT: P51432, EVALUE 1.20e+00
PKATRMALPQLQWQMGCQLSLGTPPQRNTGPLPMGIFSF

SEQ ID NO: 37646 - protein, 54 aa, Homo sapiens
  MAP TO AL121879.4; EXPRESSED IN PLACENTA, SIGNAL = 0.94; EXPRESSED IN HEART, SIGNAL = 1.1; EXPRESSED IN ADULT LIVER, SIGNAL = 1.1; EXPRESSED IN FETAL LIVER, SIGNAL = 1.1; EXPRESSED IN BRAIN, SIGNAL =   1; EXPRESSED IN BONE MARROW, SIGNAL =   1; SWISSPROT HIT: P07984, EVALUE 5.90e+00; EST_HUMAN HIT: AA135164.1, EVALUE 3.00e-03
AFVVFCLFVFCQPKGNKNGTAAVAVADGLSVVSWNSTPEKYRATANGNFQLQVG

SEQ ID NO: 37647 - protein, 54 aa, Homo sapiens
  MAP TO AC007324.38; EXPRESSED IN BT474, SIGNAL = 1.8; EXPRESSED IN BRAIN, SIGNAL = 3.2; EXPRESSED IN BONE MARROW, SIGNAL = 1.8; EXPRESSED IN LUNG, SIGNAL =   1; EXPRESSED IN HELA, SIGNAL = 1.9; EXPRESSED IN HBL100, SIGNAL = 3.4; EXPRESSED IN PLACENTA, SIGNAL = 1.7; EXPRESSED IN HEART, SIGNAL = 1.6; EXPRESSED IN FETAL LIVER, SIGNAL = 1.9; SWISSPROT HIT: P52273, EVALUE 1.00e-26; EST_HUMAN HIT: BF344012.1, EVALUE 1.00e-25
VGINYQPPTVVPGGDLAKVQRAVCMLSNTTAIAEAWARLDHKFDLMYAKRAFVH

SEQ ID NO: 37648 - protein, 54 aa, Homo sapiens
  MAP TO AC007324.38; EXPRESSED IN BT474, SIGNAL = 1.8; EXPRESSED IN BRAIN, SIGNAL = 3.2; EXPRESSED IN BONE MARROW, SIGNAL = 1.8; EXPRESSED IN LUNG, SIGNAL =   1; EXPRESSED IN HELA, SIGNAL = 1.9; EXPRESSED IN HBL100, SIGNAL = 3.4; EXPRESSED IN PLACENTA, SIGNAL = 1.7; EXPRESSED IN HEART, SIGNAL = 1.6; EXPRESSED IN FETAL LIVER, SIGNAL = 1.9; EST_HUMAN HIT: AI700998.1, EVALUE 4.00e-21; SWISSPROT HIT: Q63003, EVALUE 6.80e-01
VSLRWASTTSPRPWSPGETWPRCSGPSACSATPRPLRRPGPASTTSSTSCTPSG

SEQ ID NO: 37649 - protein, 55 aa, Homo sapiens
  MAP TO AP000070.1; EXPRESSED IN BRAIN, SIGNAL = 1.8; EXPRESSED IN LUNG, SIGNAL = 1.7; EXPRESSED IN HELA, SIGNAL = 2.3; EXPRESSED IN PLACENTA, SIGNAL = 2.3; EXPRESSED IN FETAL LIVER, SIGNAL = 1.9; EXPRESSED IN ADULT LIVER, SIGNAL = 1.1; EXPRESSED IN BT474, SIGNAL = 2.1; EXPRESSED IN BONE MARROW, SIGNAL = 1.4; EXPRESSED IN HEART, SIGNAL = 1.3; EXPRESSED IN HBL100, SIGNAL = 2.4; EST_HUMAN HIT: AI859437.1, EVALUE 1.30e+00; SWISSPROT HIT: P29293, EVALUE 7.70e+00
SQDGCCSSRHRIHVQGENRGEKTAPAFIIPDIRKATVFTAPPPLLHQQQIRHLSH

SEQ ID NO: 37650 - protein, 78 aa, Homo sapiens
  MAP TO AF134726.1; EXPRESSED IN BT474, SIGNAL = 6.9; EXPRESSED IN ADULT LIVER, SIGNAL =  11; EXPRESSED IN BONE MARROW, SIGNAL = 8.2; EXPRESSED IN PLACENTA, SIGNAL = 9.8; EXPRESSED IN FETAL LIVER, SIGNAL =   9; EXPRESSED IN BRAIN, SIGNAL = 6.8; EXPRESSED IN LUNG, SIGNAL = 9.6; EXPRESSED IN HEART, SIGNAL = 7.5; EXPRESSED IN HELA, SIGNAL = 8.1; EXPRESSED IN HBL100, SIGNAL = 9.2; EST_HUMAN HIT: AW602142.1, EVALUE 8.00e-16
ALGVALVLSLLFILLLRLVAGPLVLVLILGVLGVLAYGIYYCWEEYRVLRDKGASISQLGFTTNLSAYQSVQETWLAA

SEQ ID NO: 37651 - protein, 481 aa, Homo sapiens [sequence omitted]

SEQ ID NO: 37652 - protein, 54 aa, Homo sapiens
  MAP TO AC010175.4; EXPRESSED IN HELA, SIGNAL = 2.5; EXPRESSED IN HEART, SIGNAL = 3.1; EXPRESSED IN FETAL LIVER, SIGNAL =  10; EXPRESSED IN ADULT LIVER, SIGNAL = 2.3; EXPRESSED IN BRAIN, SIGNAL =   2; EXPRESSED IN LUNG, SIGNAL =  12; EXPRESSED IN BONE MARROW, SIGNAL = 1.3; EXPRESSED IN PLACENTA, SIGNAL = 4.5; EXPRESSED IN BT474, SIGNAL = 0.96; SWISSPROT HIT: P20742, EVALUE 2.00e-26; EST_HUMAN HIT: AA372331.1, EVALUE 5.00e-22; EST_HUMAN HIT: AA372331.1, EVALUE 5.00e-22
NLVHWERPQRPKAPVGHLYQTQAPSAEVEMTSYVLLAYLTAQPAPTSGDLTSAT

SEQ ID NO: 37653 - protein, 43 aa, Homo sapiens
  MAP TO AC010892.2; EXPRESSED IN BT474, SIGNAL = 2.9; EXPRESSED IN BRAIN, SIGNAL = 3.2; EXPRESSED IN BONE MARROW, SIGNAL = 3.6; EXPRESSED IN LUNG, SIGNAL = 2.8; EXPRESSED IN HELA, SIGNAL = 3.1; EXPRESSED IN PLACENTA, SIGNAL = 2.8; EXPRESSED IN HBL100, SIGNAL = 2.8; EXPRESSED IN HEART, SIGNAL = 2.5; EXPRESSED IN FETAL LIVER, SIGNAL = 3.2; EXPRESSED IN ADULT LIVER, SIGNAL = 3.6; SWISSPROT HIT: P06274, EVALUE 2.70e+00; EST_HUMAN HIT: BE782805.1, EVALUE 7.00e+00
IFYSSYCFPHQYIMYKGLDFTPIRNGKLVTEDFLKKGNNTVKT

SEQ ID NO: 37654 - protein, 179 aa, Homo sapiens
  MAP TO AC002064.1; EXPRESSED IN BRAIN, SIGNAL = 3.8; EXPRESSED IN LUNG, SIGNAL = 3.2; EXPRESSED IN HELA, SIGNAL = 1.9; EXPRESSED IN PLACENTA, SIGNAL = 2.1; EXPRESSED IN FETAL LIVER, SIGNAL = 2.1; EXPRESSED IN ADULT LIVER, SIGNAL = 2.4; EXPRESSED IN BT474, SIGNAL = 1.7; EXPRESSED IN BONE MARROW, SIGNAL = 1.6; EXPRESSED IN HEART, SIGNAL = 3.3; EXPRESSED IN HBL100, SIGNAL = 2.2; SWISSPROT HIT: P23523, EVALUE 8.00e-01; EST_HUMAN HIT: BE783685.1, EVALUE 9.00e-37
DILGDLGSVRIMESISMMGSPKSLSETFLPNGINGIKDARKVTVGVIGSGDFAKSLTIRLIRCGYHVVIGSRNPKFASEFFPHVVDVTHHEDALTKTNIIFVAIHREHYTSLWDLRHLLVGKILIDVSNNMRINQYPESNAEYLASLFPDSLIVKGFNVVSAWALQLGPKDASRQVCIL

SEQ ID NO: 37655 - protein, 77 aa, Homo sapiens
  MAP TO AF095703.1; EXPRESSED IN BT474, SIGNAL =   1; EXPRESSED IN ADULT LIVER, SIGNAL =   1; EXPRESSED IN BONE MARROW, SIGNAL = 1.9; EXPRESSED IN LUNG, SIGNAL = 3.2; EXPRESSED IN BRAIN, SIGNAL =   1; EXPRESSED IN PLACENTA, SIGNAL = 1.8; EXPRESSED IN HBL100, SIGNAL = 2.7; EXPRESSED IN HELA, SIGNAL = 2.2; EXPRESSED IN HEART, SIGNAL = 3.2; EXPRESSED IN FETAL LIVER, SIGNAL = 1.7; SWISSPROT HIT: Q16836, EVALUE 2.00e-23; EST_HUMAN HIT: AV649955.1, EVALUE 2.00e-22
  unsure 74
  unsure 75
AGDEFVEKTLSTIATSTDAASVVHSTDLVVEAIVENLKVKNELFKRLDKFAAEYVTSGQSSLFFFFNPYFCFYXXFL

SEQ ID NO: 37656 - protein, 263 aa, Homo sapiens
  MAP TO AC002346.1; EXPRESSED IN PLACENTA, SIGNAL =  20; EXPRESSED IN HBL100, SIGNAL =   6; EXPRESSED IN HEART, SIGNAL = 5.4; EXPRESSED IN BT474, SIGNAL = 5.9; EXPRESSED IN FETAL LIVER, SIGNAL =   4; EXPRESSED IN ADULT LIVER, SIGNAL = 6.7; EXPRESSED IN BRAIN, SIGNAL = 6.2; EXPRESSED IN BONE MARROW, SIGNAL = 6.3; EXPRESSED IN LUNG, SIGNAL = 3.9; EXPRESSED IN HELA, SIGNAL = 7.2; EST_HUMAN HIT: AU138405.1, EVALUE 7.00e-90; SWISSPROT HIT: P10269, EVALUE 1.00e-16
EKHIKEVISQLTWVHSTPGPYKGLDLSKLHETLHTHTGLVSLFNTTLTGLHEVSAQNPTNCWMCLPLHFRPYISIPIPEQWNNFSTEINTTSVLVGPLSNLEITHTSNLTCVKFSNTIDTANSQCIRWVTPPTRIVCLPSGIFFVCGTSAYHCLNGSSESVCFLSFLVAPMPIYTEQDLYNHVIPKPRNKRVPILPFVIGAGVLGGVATGIGGITTSTQFYYKLSQELNGDMEWVADTLVTLQDQLNSLAAVVLQNRRALDLL

SEQ ID NO: 37657 - protein, 57 aa, Homo sapiens
  MAP TO AC010491.2; EXPRESSED IN HELA, SIGNAL = 3.5; EXPRESSED IN HBL100, SIGNAL = 3.6; EXPRESSED IN HEART, SIGNAL = 3.2; EXPRESSED IN FETAL LIVER, SIGNAL = 2.9; EXPRESSED IN ADULT LIVER, SIGNAL = 3.3; EXPRESSED IN BONE MARROW, SIGNAL = 3.8; EXPRESSED IN LUNG, SIGNAL = 3.5; EXPRESSED IN PLACENTA, SIGNAL = 3.2; EXPRESSED IN BT474, SIGNAL = 2.8; EXPRESSED IN BRAIN, SIGNAL = 3.1; EST_HUMAN HIT: AA133798.1, EVALUE 1.00e-22; SWISSPROT HIT: O00321, EVALUE 5.80e+00
IDMFILGYSLEVKIKVFRLFKFNSRDFEVCYPEEPLRDWPEISLLTENDRHYHIPVF

SEQ ID NO: 37658 - protein, 70 aa, Homo sapiens
  MAP TO AC010906.2; EXPRESSED IN BONE MARROW, SIGNAL =   2; EXPRESSED IN LUNG, SIGNAL = 1.9; EXPRESSED IN HELA, SIGNAL = 2.1; EXPRESSED IN PLACENTA, SIGNAL = 2.1; EXPRESSED IN HBL100, SIGNAL = 2.2; EXPRESSED IN HEART, SIGNAL = 1.9; EXPRESSED IN FETAL LIVER, SIGNAL = 1.8; EXPRESSED IN ADULT LIVER, SIGNAL = 1.9; EXPRESSED IN BT474, SIGNAL = 2.1; EXPRESSED IN BRAIN, SIGNAL = 2.2
ISEPTKFQEGSLAPYYDGDDVADDAVLVKNTAQLPVVEEGVELSGRKLEGASYLCSVLSWSWVHFHFCSF

SEQ ID NO: 37659 - protein, 18 aa, Homo sapiens
  MAP TO AC010906.2; EXPRESSED IN BONE MARROW, SIGNAL =   2; EXPRESSED IN LUNG, SIGNAL = 1.9; EXPRESSED IN HELA, SIGNAL = 2.1; EXPRESSED IN PLACENTA, SIGNAL = 2.1; EXPRESSED IN HBL100, SIGNAL = 2.2; EXPRESSED IN HEART, SIGNAL = 1.9; EXPRESSED IN FETAL LIVER, SIGNAL = 1.8; EXPRESSED IN ADULT LIVER, SIGNAL = 1.9; EXPRESSED IN BT474, SIGNAL = 2.1; EXPRESSED IN BRAIN, SIGNAL = 2.2
HHHHHSMEQGTLPETWWA

SEQ ID NO: 37660 - protein, 50 aa, Homo sapiens
  MAP TO AC010937.2; EXPRESSED IN HBL100, SIGNAL = 4.7; EXPRESSED IN HEART, SIGNAL = 4.2; EXPRESSED IN FETAL LIVER, SIGNAL =   5; EXPRESSED IN BT474, SIGNAL = 5.1; EXPRESSED IN LUNG, SIGNAL = 5.1; EXPRESSED IN PLACENTA, SIGNAL = 4.6; EXPRESSED IN HELA, SIGNAL = 5.2; EXPRESSED IN ADULT LIVER, SIGNAL = 5.6; EXPRESSED IN BRAIN, SIGNAL = 4.9; EXPRESSED IN BONE MARROW, SIGNAL = 4.7; EST_HUMAN HIT: AA601214.1, EVALUE 1.30e+00; SWISSPROT HIT: P97812, EVALUE 6.00e+00
GKKMARRLGRQGIHLVTWWCSPQLPFCVSLWGLLLTPSSRQFQVHQNLVK

SEQ ID NO: 37661 - protein, 21 aa, Homo sapiens
  MAP TO AC010937.2; EXPRESSED IN HBL100, SIGNAL = 4.7; EXPRESSED IN HEART, SIGNAL = 4.2; EXPRESSED IN FETAL LIVER, SIGNAL =   5; EXPRESSED IN BT474, SIGNAL = 5.1; EXPRESSED IN LUNG, SIGNAL = 5.1; EXPRESSED IN PLACENTA, SIGNAL = 4.6; EXPRESSED IN HELA, SIGNAL = 5.2; EXPRESSED IN ADULT LIVER, SIGNAL = 5.6; EXPRESSED IN BRAIN, SIGNAL = 4.9; EXPRESSED IN BONE MARROW, SIGNAL = 4.7
SKRPHKETQKGNCGEHHQVTR

SEQ ID NO: 37662 - protein, 39 aa, Homo sapiens
  MAP TO AC007859.1; EXPRESSED IN LUNG, SIGNAL = 1.3; EXPRESSED IN HELA, SIGNAL = 1.5; EXPRESSED IN ADULT LIVER, SIGNAL = 1.5; EXPRESSED IN BRAIN, SIGNAL = 1.5; EXPRESSED IN PLACENTA, SIGNAL = 1.1; EXPRESSED IN BT474, SIGNAL = 1.4; EXPRESSED IN BONE MARROW, SIGNAL = 1.5; EXPRESSED IN HEART, SIGNAL = 1.2; EXPRESSED IN HBL100, SIGNAL = 1.2; EXPRESSED IN FETAL LIVER, SIGNAL = 1.3; EST_HUMAN HIT: BE971809.1, EVALUE 4.90e-01
ETPFLFLQLANTLVPSVLIISIPFTYLNLPIISYCCYIY

SEQ ID NO: 37663 - protein, 794 aa, Homo sapiens
  MAP TO AC005366.1; EXPRESSED IN BT474, SIGNAL = 1.2; EXPRESSED IN BRAIN, SIGNAL = 4.3; EXPRESSED IN LUNG, SIGNAL = 3.5; EXPRESSED IN HBL100, SIGNAL = 1.8; EXPRESSED IN HELA, SIGNAL = 1.2; EXPRESSED IN PLACENTA, SIGNAL = 2.2; EXPRESSED IN ADULT LIVER, SIGNAL = 1.4; EXPRESSED IN FETAL LIVER, SIGNAL = 1.7; EXPRESSED IN HEART, SIGNAL = 1.9; SWISSPROT HIT: P33450, EVALUE 5.00e-61; EST_HUMAN HIT: BF529515.1, EVALUE 7.00e-78
ARRFRVVSGASRRFFEVNRETGEMFVNDRLDREELCGTLPSCTVTLELVVENPLELFSVEVVIQDINDNNPAFPTQEMKLEISEAVAPGTRFPLESAHDPDVGSNSLQTYELSRNEYFALRVQTREDSTKYAELVLERALDREREPSLQLVLTALDGGTPALSASLPIHIKVLDANDNAPVFNQSLYRARVLEDAPSGTRVVQVLATDLDEGPNGEIIYSFGSHNRAGVRQLFALDLVTGMLTIKGRLDFEDTKLHEIYIQAKDKGANPEGAHCKVLVEVVDVNDNAPEITVTSVYSPVPEDAPLGTVIALLSVTDLDAGENGLVTCEVPPGLPFSLTSSLKNYFTLKTSADLDRETVPEYNLSITARDAGTPSLSALTIVRVQVSDINDNPPQSSQSSYDVYIEENNLPGAPILNLSVWDPDAPQNARLSFFLLEQGAETGLVGRYFTINRDNGIVSSLVPLDYEDRREFELTAHISDGGTPVLATNISVNIFVTDRNDNAPQVLYPRPGGSSVEMLPRGTSAGHLVSRVVGWDADAGHNAWLSYSLLGSPNQSLFAIGLHTGQISTARPVQDTDSPRQTLTVLIKDNGEPSLSTTATLTVSVTEDSPEARAEFPSGSAPREQKKNLTFYLLLSLILVSVGFVVTVFGVIIFKVYKWKQSRDLYRAPVSSLYRTPGPSLHADAVRGGLMSPHLYHQVYLTTDSRRSDPLLKKPGAASPLASRQNTLRSCDPVFYRQVLGAESAPPGQVRFSKSCLTLLVLFYSYIILRKEWSCFFSDEDVFLVMHSHFQLALP

SEQ ID NO: 37664 - protein, 89 aa, Homo sapiens
  MAP TO AJ009612.1; EXPRESSED IN FETAL LIVER, SIGNAL = 2.8; EXPRESSED IN BT474, SIGNAL = 1.9; EXPRESSED IN ADULT LIVER, SIGNAL = 2.3; EXPRESSED IN BRAIN, SIGNAL = 2.1; EXPRESSED IN BONE MARROW, SIGNAL = 1.9; EXPRESSED IN LUNG, SIGNAL = 2.7; EXPRESSED IN HELA, SIGNAL = 2.2; EXPRESSED IN PLACENTA, SIGNAL = 1.8; EXPRESSED IN HBL100, SIGNAL = 2.4; EXPRESSED IN HEART, SIGNAL =   2; SWISSPROT HIT: P49910, EVALUE 3.00e-30; EST_HUMAN HIT: AW404800.1, EVALUE 8.00e-34
ETCRQNFRNFPYPDLAGPRKALSQLRELCLKWLRPEIHSKEQILELLVLEQFLTILPGEVRTWVKSQYPESSEEAVTLVEDLTQILEEE

SEQ ID NO: 37665 - protein, 22 aa, Homo sapiens
  MAP TO AJ009612.1; EXPRESSED IN FETAL LIVER, SIGNAL = 2.8; EXPRESSED IN BT474, SIGNAL = 1.9; EXPRESSED IN ADULT LIVER, SIGNAL = 2.3; EXPRESSED IN BRAIN, SIGNAL = 2.1; EXPRESSED IN BONE MARROW, SIGNAL = 1.9; EXPRESSED IN LUNG, SIGNAL = 2.7; EXPRESSED IN HELA, SIGNAL = 2.2; EXPRESSED IN PLACENTA, SIGNAL = 1.8; EXPRESSED IN HBL100, SIGNAL = 2.4; EXPRESSED IN HEART, SIGNAL =   2
LRPVDRILGIFHTQTWLVLERH

SEQ ID NO: 37666 - protein, 17 aa, Homo sapiens
  MAP TO AC007275.3; EXPRESSED IN BT474, SIGNAL = 1.6; EXPRESSED IN BONE MARROW, SIGNAL =   1; EXPRESSED IN LUNG, SIGNAL = 0.96; EXPRESSED IN BRAIN, SIGNAL = 1.1; EXPRESSED IN PLACENTA, SIGNAL = 0.85; EXPRESSED IN FETAL LIVER, SIGNAL =   1; EXPRESSED IN HBL100, SIGNAL = 0.92; EXPRESSED IN HELA, SIGNAL = 1.6; EXPRESSED IN ADULT LIVER, SIGNAL = 1.2; EXPRESSED IN HEART, SIGNAL = 0.79
ISKETHQEKSGKLTLLK

SEQ ID NO: 37667 - protein, 125 aa, Homo sapiens
  MAP TO AC003682.1; EXPRESSED IN BONE MARROW, SIGNAL = 1.3; EXPRESSED IN LUNG, SIGNAL = 1.3; EXPRESSED IN BRAIN, SIGNAL = 1.3; EXPRESSED IN HELA, SIGNAL = 1.3; EXPRESSED IN HBL100, SIGNAL = 1.1; EXPRESSED IN PLACENTA, SIGNAL = 2.2; EXPRESSED IN HEART, SIGNAL = 1.4; EXPRESSED IN BT474, SIGNAL =   2; EXPRESSED IN FETAL LIVER, SIGNAL = 1.5; EST_HUMAN HIT: AW173128.1, EVALUE 2.00e-25; SWISSPROT HIT: P52740, EVALUE 2.00e-17
CWCGVEHEETPSEQRISGERVPQFRTSKEGSSSQNADSCEICCLVLRDILHLAEHQGTNCGQKLHTCGKQFYISANLQQHQRQHITEAPFRSYVDTASFTQSCIVHVSEKPFTCREIRKDFLANM

SEQ ID NO: 37668 - protein, 40 aa, Homo sapiens
  MAP TO AC010683.2; EXPRESSED IN HELA, SIGNAL = 5.7; EXPRESSED IN HBL100, SIGNAL = 5.8; EXPRESSED IN HEART, SIGNAL = 5.1; EXPRESSED IN FETAL LIVER, SIGNAL = 6.1; EXPRESSED IN LUNG, SIGNAL = 5.3; EXPRESSED IN PLACENTA, SIGNAL = 5.7; EXPRESSED IN BT474, SIGNAL = 6.4; EXPRESSED IN ADULT LIVER, SIGNAL = 8.6; EXPRESSED IN BRAIN, SIGNAL = 6.2; EXPRESSED IN BONE MARROW, SIGNAL = 7.4; SWISSPROT HIT: O88700, EVALUE 2.10e+00
YWLQTLWLMFFNRSNSKRIYMPKKLKKTFVCSDWGLSVYL

SEQ ID NO: 37669 - protein, 32 aa, Homo sapiens
  MAP TO AC010099.3; EXPRESSED IN BT474, SIGNAL = 5.5; EXPRESSED IN BRAIN, SIGNAL = 5.9; EXPRESSED IN BONE MARROW, SIGNAL = 6.4; EXPRESSED IN LUNG, SIGNAL = 6.1; EXPRESSED IN HELA, SIGNAL = 5.7; EXPRESSED IN PLACENTA, SIGNAL = 5.6; EXPRESSED IN HBL100, SIGNAL = 5.3; EXPRESSED IN HEART, SIGNAL = 5.1; EXPRESSED IN FETAL LIVER, SIGNAL = 6.6; EXPRESSED IN ADULT LIVER, SIGNAL = 6.6
QNNHREKNGLFFNKNTTKQLVPLNTVPPSRKQ

SEQ ID NO: 37670 - protein, 46 aa, Homo sapiens
  MAP TO AC010130.3; EXPRESSED IN HBL100, SIGNAL =   2; EXPRESSED IN HEART, SIGNAL = 1.6; EXPRESSED IN FETAL LIVER, SIGNAL = 1.7; EXPRESSED IN BT474, SIGNAL = 1.7; EXPRESSED IN LUNG, SIGNAL = 1.7; EXPRESSED IN PLACENTA, SIGNAL = 1.9; EXPRESSED IN HELA, SIGNAL =   2; EXPRESSED IN ADULT LIVER, SIGNAL = 1.7; EXPRESSED IN BRAIN, SIGNAL = 2.2; EXPRESSED IN BONE MARROW, SIGNAL = 2.1; EST_HUMAN HIT: AW384974.1, EVALUE 3.00e-21; SWISSPROT HIT: P37275, EVALUE 7.00e-16
DDMTDSDSCLSRKKIKKTESGMYACDLCDKTFQKSSSLLRHKYEHT

SEQ ID NO: 37671 - protein, 51 aa, Homo sapiens
  MAP TO AL021579.1; EXPRESSED IN FETAL LIVER, SIGNAL = 1.4; EXPRESSED IN BT474, SIGNAL = 1.1; EXPRESSED IN ADULT LIVER, SIGNAL = 1.2; EXPRESSED IN BRAIN, SIGNAL =   1; EXPRESSED IN BONE MARROW, SIGNAL = 1.1; EXPRESSED IN LUNG, SIGNAL = 1.3; EXPRESSED IN HELA, SIGNAL = 1.6; EXPRESSED IN PLACENTA, SIGNAL = 1.5; EXPRESSED IN HBL100, SIGNAL = 1.1; EXPRESSED IN HEART, SIGNAL = 0.98; EST_HUMAN HIT: AU126907.1, EVALUE 7.00e-14
TVQHQELAKAQSGLAFQQTSNTQPIPILYEHQLGQASGLGGSQLIDTHLLQ

SEQ ID NO: 37672 - protein, 29 aa, Homo sapiens
  MAP TO AL021579.1; EXPRESSED IN FETAL LIVER, SIGNAL = 1.4; EXPRESSED IN BT474, SIGNAL = 1.1; EXPRESSED IN ADULT LIVER, SIGNAL = 1.2; EXPRESSED IN BRAIN, SIGNAL =   1; EXPRESSED IN BONE MARROW, SIGNAL = 1.1; EXPRESSED IN LUNG, SIGNAL = 1.3; EXPRESSED IN HELA, SIGNAL = 1.6; EXPRESSED IN PLACENTA, SIGNAL = 1.5; EXPRESSED IN HBL100, SIGNAL = 1.1; EXPRESSED IN HEART, SIGNAL = 0.98; EST_HUMAN HIT: BE813879.1, EVALUE 7.00e-11; SWISSPROT HIT: Q99445, EVALUE 3.70e+00
NCPTPRTCQGTIRSCLSANIKYSAHSYIV

SEQ ID NO: 37673 - protein, 67 aa, Homo sapiens
  MAP TO AC010149.2; EXPRESSED IN BRAIN, SIGNAL = 1.9; EXPRESSED IN HELA, SIGNAL = 1.8; EXPRESSED IN HBL100, SIGNAL = 1.9; EXPRESSED IN HEART, SIGNAL = 1.8; EXPRESSED IN FETAL LIVER, SIGNAL = 1.5; EXPRESSED IN ADULT LIVER, SIGNAL = 1.9; EXPRESSED IN LUNG, SIGNAL = 1.5; EXPRESSED IN BONE MARROW, SIGNAL = 2.1; EXPRESSED IN PLACENTA, SIGNAL =   2; EXPRESSED IN BT474, SIGNAL = 1.8; SWISSPROT HIT: P31635, EVALUE 5.70e+00; EST_HUMAN HIT: AV690438.1, EVALUE 1.90e+00
VLLEDTQPTAVPSVRVSLKNTQYSSHPQGLHQTMGIVLLHYSPAGSQLSPLAPLTPLAMTFTFTLLR

SEQ ID NO: 37674 - protein, 29 aa, Homo sapiens
  MAP TO AL009029.1; EXPRESSED IN BONE MARROW, SIGNAL =   4; EXPRESSED IN HBL100, SIGNAL = 2.5; EXPRESSED IN HEART, SIGNAL = 4.3; EXPRESSED IN FETAL LIVER, SIGNAL = 4.8; EXPRESSED IN BT474, SIGNAL = 3.8; EXPRESSED IN ADULT LIVER, SIGNAL = 4.4; EXPRESSED IN LUNG, SIGNAL = 4.6; EXPRESSED IN BRAIN, SIGNAL = 3.7; EXPRESSED IN PLACENTA, SIGNAL = 5.5; EXPRESSED IN HELA, SIGNAL = 3.9; EST_HUMAN HIT: BE880418.1, EVALUE 2.00e+00
AVLLFQEQPARSWRLCQHLELPTPPQPRC

SEQ ID NO: 37675 - protein, 117 aa, Homo sapiens
  MAP TO AC010491.2; EXPRESSED IN BONE MARROW, SIGNAL =  31; EXPRESSED IN HELA, SIGNAL =  34; EXPRESSED IN HBL100, SIGNAL =  51; EXPRESSED IN HEART, SIGNAL =  15; EXPRESSED IN BT474, SIGNAL =  44; EXPRESSED IN FETAL LIVER, SIGNAL =  33; EXPRESSED IN LUNG, SIGNAL =  45; EXPRESSED IN PLACENTA, SIGNAL =  60; EXPRESSED IN ADULT LIVER, SIGNAL =   5; EXPRESSED IN BRAIN, SIGNAL =  15; SWISSPROT HIT: Q09767, EVALUE 6.20e+00; EST_HUMAN HIT: AU120708.1, EVALUE 3.00e-54
TSFKFTNTSSNNRDSTVSLRCPCNHVFDEVSVSWSISDSHIVLAGLKFPQGDINGDTTFTLSFQFIQDPAILERALSHLSSLLLKFFNGSFVDATAFIDQMASSGGLARIYVSNDDN

SEQ ID NO: 37676 - protein, 60 aa, Homo sapiens
  MAP TO AF009660.1; EXPRESSED IN BT474, SIGNAL =   2; EXPRESSED IN BONE MARROW, SIGNAL = 1.5; EXPRESSED IN BRAIN, SIGNAL = 1.6; EXPRESSED IN LUNG, SIGNAL =   2; EXPRESSED IN HELA, SIGNAL = 1.4; EXPRESSED IN ADULT LIVER, SIGNAL = 1.7; EXPRESSED IN FETAL LIVER, SIGNAL = 1.4; EXPRESSED IN PLACENTA, SIGNAL = 1.8; EXPRESSED IN HEART, SIGNAL = 1.4; EXPRESSED IN HBL100, SIGNAL = 1.2; EST_HUMAN HIT: AA917779.1, EVALUE 2.00e-22; SWISSPROT HIT: P06321, EVALUE 2.00e-20
TQTPRHLVMGMTNKKSLKCEQHLGHNAMYWYKQSAKKPLELMFVYNFKEQTENNSVPSRF

SEQ ID NO: 37677 - protein, 38 aa, Homo sapiens
  MAP TO AC012458.2; EXPRESSED IN HBL100, SIGNAL =  15; EXPRESSED IN HEART, SIGNAL = 4.6; EXPRESSED IN BT474, SIGNAL =  12; EXPRESSED IN BONE MARROW, SIGNAL = 7.8; EXPRESSED IN BRAIN, SIGNAL =  14; EXPRESSED IN PLACENTA, SIGNAL = 9.5; EXPRESSED IN HELA, SIGNAL =  11; EXPRESSED IN ADULT LIVER, SIGNAL = 2.8; EXPRESSED IN FETAL LIVER, SIGNAL =  11; EXPRESSED IN LUNG, SIGNAL =  11
TSSAIEISILSTQPTLTLTALLARLCLPSLLPSDLMEP

SEQ ID NO: 37678 - protein, 18 aa, Homo sapiens
  MAP TO AC007402.3; EXPRESSED IN ADULT LIVER, SIGNAL = 0.8; EXPRESSED IN HEART, SIGNAL = 0.91
NNHSLLDPLPHLLTREWQ

SEQ ID NO: 37679 - protein, 41 aa, Homo sapiens
  MAP TO AL022097.1; EXPRESSED IN PLACENTA, SIGNAL = 5.4; EXPRESSED IN HBL100, SIGNAL =  12; EXPRESSED IN HEART, SIGNAL = 4.9; EXPRESSED IN FETAL LIVER, SIGNAL =  13; EXPRESSED IN BT474, SIGNAL = 6.3; EXPRESSED IN ADULT LIVER, SIGNAL = 1.9; EXPRESSED IN BRAIN, SIGNAL = 8.4; EXPRESSED IN BONE MARROW, SIGNAL = 6.5; EXPRESSED IN LUNG, SIGNAL = 8.3; EXPRESSED IN HELA, SIGNAL =  19; SWISSPROT HIT: Q19272, EVALUE 2.70e+00; EST_HUMAN HIT: AA610842.1, EVALUE 6.00e-17
YCCYWNCPSHLGFMVWQSIGLYHHRDQSFCLQSFLPSWVQN

SEQ ID NO: 37680 - protein, 30 aa, Homo sapiens
  MAP TO AF017104.1; EXPRESSED IN BT474, SIGNAL = 1.4; EXPRESSED IN FETAL LIVER, SIGNAL = 1.9; EXPRESSED IN BONE MARROW, SIGNAL = 1.6; EXPRESSED IN BRAIN, SIGNAL = 1.5; EXPRESSED IN LUNG, SIGNAL = 2.7; EXPRESSED IN HELA, SIGNAL = 1.9; EXPRESSED IN PLACENTA, SIGNAL = 1.7; EXPRESSED IN HBL100, SIGNAL = 1.6; EXPRESSED IN HEART, SIGNAL = 1.8; EXPRESSED IN ADULT LIVER, SIGNAL = 1.8; EST_HUMAN HIT: AW864379.1, EVALUE 9.00e-11
ETQHIHKHLKPTARHPSLSEKSRKVPIQMA

SEQ ID NO: 37681 - protein, 31 aa, Homo sapiens [sequence omitted]

SEQ ID NO: 37682 - protein, 37 aa, Homo sapiens
  MAP TO AF019413.1; EXPRESSED IN HBL100, SIGNAL = 2.2; EXPRESSED IN HEART, SIGNAL = 2.1; EXPRESSED IN BT474, SIGNAL = 2.3; EXPRESSED IN BONE MARROW, SIGNAL = 2.3; EXPRESSED IN BRAIN, SIGNAL = 2.3; EXPRESSED IN PLACENTA, SIGNAL = 2.4; EXPRESSED IN HELA, SIGNAL = 2.9; EXPRESSED IN ADULT LIVER, SIGNAL = 2.3; EXPRESSED IN FETAL LIVER, SIGNAL = 2.6; EXPRESSED IN LUNG, SIGNAL = 2.8; EST_HUMAN HIT: BE618069.1, EVALUE 1.00e-04; SWISSPROT HIT: Q15477, EVALUE 6.00e-06
YLKLRERMQIQKEMERLRFLLSDQSLLLLPEYHQRVE

SEQ ID NO: 37683 - protein, 51 aa, Homo sapiens
  MAP TO AC009941.2; EXPRESSED IN LUNG, SIGNAL = 0.99; EXPRESSED IN HEART, SIGNAL = 1.8
  unsure 1
  unsure 8
XLEYKILXSFSFQETIKIIAQIFHKAYIYNNKENKEEKATNKKRVFNRFLE

SEQ ID NO: 37684 - protein, 94 aa, Homo sapiens
  MAP TO AC012064.1; EXPRESSED IN BONE MARROW, SIGNAL = 1.6; EXPRESSED IN FETAL LIVER, SIGNAL =   1; EXPRESSED IN ADULT LIVER, SIGNAL = 1.3; EXPRESSED IN PLACENTA, SIGNAL = 1.8; EXPRESSED IN HEART, SIGNAL = 1.5; EXPRESSED IN HELA, SIGNAL = 1.1; EXPRESSED IN HBL100, SIGNAL = 1.5; EXPRESSED IN BT474, SIGNAL = 1.1; EXPRESSED IN BRAIN, SIGNAL = 1.6; EXPRESSED IN LUNG, SIGNAL = 1.3; SWISSPROT HIT: P55875, EVALUE 1.80e+00; EST_HUMAN HIT: AW474336.1, EVALUE 4.00e-03
PPISMRAVLKSFLPMMMWPWASLGPTLWLPCLPGALRMKEPWSLHSPHRAGRHPWPSRQQAGMGTSSMWTYLRATCGPWLRRARVLYCSSTVCL

SEQ ID NO: 37685 - protein, 37 aa, Homo sapiens
  MAP TO AC012593.1; EXPRESSED IN ADULT LIVER, SIGNAL = 2.6; EXPRESSED IN BT474, SIGNAL = 2.4; EXPRESSED IN FETAL LIVER, SIGNAL = 1.8; EXPRESSED IN BONE MARROW, SIGNAL = 1.7; EXPRESSED IN BRAIN, SIGNAL = 1.2; EXPRESSED IN LUNG, SIGNAL = 2.6; EXPRESSED IN HELA, SIGNAL =   2; EXPRESSED IN PLACENTA, SIGNAL = 1.8; EXPRESSED IN HBL100, SIGNAL = 1.7; EXPRESSED IN HEART, SIGNAL = 1.2; EST_HUMAN HIT: BF107697.1, EVALUE 3.30e+00
SKSLCEISHELVTQEVFISPCHTTCLLPSCIQIAKSK

SEQ ID NO: 37686 - protein, 104 aa, Homo sapiens
  MAP TO AC012443.1; EXPRESSED IN HBL100, SIGNAL = 2.4; EXPRESSED IN HEART, SIGNAL = 1.9; EXPRESSED IN BT474, SIGNAL = 3.1; EXPRESSED IN BONE MARROW, SIGNAL =   2; EXPRESSED IN BRAIN, SIGNAL = 2.9; EXPRESSED IN PLACENTA, SIGNAL = 1.2; EXPRESSED IN HELA, SIGNAL = 2.2; EXPRESSED IN ADULT LIVER, SIGNAL = 2.1; EXPRESSED IN FETAL LIVER, SIGNAL = 2.1; EXPRESSED IN LUNG, SIGNAL = 0.98; EST_HUMAN HIT: AL042120.1, EVALUE 1.00e-33; SWISSPROT HIT: O54786, EVALUE 1.30e+00
EIYKDANTQVHTLRKMVKEKEEAIQRQSTLEKKIHELEKQGTIKIQKKGDGDIAILPVVASGTLSMGSEVVAGNSVGPTMGAASSGPLPPPPPPLPPSSDTPET

SEQ ID NO: 37687 - protein, 30 aa, Homo sapiens
  MAP TO AC012072.1; EXPRESSED IN BONE MARROW, SIGNAL = 1.2; EXPRESSED IN PLACENTA, SIGNAL = 0.98; EXPRESSED IN FETAL LIVER, SIGNAL = 1.3; EXPRESSED IN HEART, SIGNAL = 1.7; EXPRESSED IN HELA, SIGNAL = 1.2; EXPRESSED IN HBL100, SIGNAL = 1.6; EXPRESSED IN BT474, SIGNAL =   2; EXPRESSED IN BRAIN, SIGNAL = 1.4; SWISSPROT HIT: P57072, EVALUE 3.00e-03; EST_HUMAN HIT: AL038060.2, EVALUE 2.00e-08
IVSEAGASIYSVSPEANKEMPGLDPNLRSA

SEQ ID NO: 37688 - protein, 18 aa, Homo sapiens
  MAP TO AC012072.1; EXPRESSED IN BONE MARROW, SIGNAL = 1.2; EXPRESSED IN PLACENTA, SIGNAL = 0.98; EXPRESSED IN FETAL LIVER, SIGNAL = 1.3; EXPRESSED IN HEART, SIGNAL = 1.7; EXPRESSED IN HELA, SIGNAL = 1.2; EXPRESSED IN HBL100, SIGNAL = 1.6; EXPRESSED IN BT474, SIGNAL =   2; EXPRESSED IN BRAIN, SIGNAL = 1.4; EST_HUMAN HIT: AL038060.2, EVALUE 7.60e-02
STVSALKLTKRCQGWTLI

SEQ ID NO: 37689 - protein, 146 aa, Homo sapiens
  MAP TO AC011422.2; EXPRESSED IN LUNG, SIGNAL = 1.1; EXPRESSED IN BRAIN, SIGNAL =   2; EXPRESSED IN BONE MARROW, SIGNAL = 1.4; EXPRESSED IN FETAL LIVER, SIGNAL = 1.1; EXPRESSED IN ADULT LIVER, SIGNAL = 1.2; EXPRESSED IN PLACENTA, SIGNAL =   1; EXPRESSED IN HEART, SIGNAL = 1.6; EXPRESSED IN HELA, SIGNAL = 1.1; EXPRESSED IN HBL100, SIGNAL = 1.1; EXPRESSED IN BT474, SIGNAL = 1.5; SWISSPROT HIT: Q16566, EVALUE 9.00e-58; EST_HUMAN HIT: AI656423.1, EVALUE 2.00e-56
AAVKAVVASSRLGSASSSHGSIQESHKASRDPSPIQDGNEDMKAIPEGEKIQGDGAQAAVKGAQAELMKVQALEKVKGADINAEEAPKMVPKAVEDGIKVADLELEEGLAEEKLKTVEEAAAPREGQGSSAVGFEVPQQDVILPEY

SEQ ID NO: 37690 - protein, 28 aa, Homo sapiens
  MAP TO AC011451.2; EXPRESSED IN PLACENTA, SIGNAL =  18; EXPRESSED IN HBL100, SIGNAL =  13; EXPRESSED IN HEART, SIGNAL =  10; EXPRESSED IN ADULT LIVER, SIGNAL =  13; EXPRESSED IN LUNG, SIGNAL =  15; EXPRESSED IN BRAIN, SIGNAL =  15; EXPRESSED IN HELA, SIGNAL =  17; EXPRESSED IN BT474, SIGNAL =  12; EXPRESSED IN FETAL LIVER, SIGNAL =  13; EXPRESSED IN BONE MARROW, SIGNAL =  11
LGISKQEEGLGEESDEQGEGSQGWSEIQ

SEQ ID NO: 37691 - protein, 135 aa, Homo sapiens
  MAP TO AC011504.2; EXPRESSED IN BONE MARROW, SIGNAL =  14; EXPRESSED IN PLACENTA, SIGNAL =  15; EXPRESSED IN FETAL LIVER, SIGNAL = 9.7; EXPRESSED IN ADULT LIVER, SIGNAL =  15; EXPRESSED IN LUNG, SIGNAL =  12; EXPRESSED IN HEART, SIGNAL = 9.8; EXPRESSED IN HELA, SIGNAL =  13; EXPRESSED IN HBL100, SIGNAL =  12; EXPRESSED IN BT474, SIGNAL =  11; EXPRESSED IN BRAIN, SIGNAL =  13; EST_HUMAN HIT: AL133822.1, EVALUE 2.00e-67; SWISSPROT HIT: P07900, EVALUE 1.10e+00
MDSFVLSSLKKEKDMKDKALADPPSMKVHGVDGGEEKPSGKSSQRKSEKSQYEPLDLSVRPDAASLPGSSVTVQDSIAWHGCLFCAFTTSSMELMALHLQANHLGKAKRKDNTIGVTVNCKDQAREASKMALLPS

SEQ ID NO: 37692 - protein, 41 aa, Homo sapiens
  MAP TO AC011504.2; EXPRESSED IN BONE MARROW, SIGNAL =  14; EXPRESSED IN PLACENTA, SIGNAL =  15; EXPRESSED IN FETAL LIVER, SIGNAL = 9.7; EXPRESSED IN ADULT LIVER, SIGNAL =  15; EXPRESSED IN LUNG, SIGNAL =  12; EXPRESSED IN HEART, SIGNAL = 9.8; EXPRESSED IN HELA, SIGNAL =  13; EXPRESSED IN HBL100, SIGNAL =  12; EXPRESSED IN BT474, SIGNAL =  11; EXPRESSED IN BRAIN, SIGNAL =  13; EST_HUMAN HIT: AL133822.1, EVALUE 6.00e-19
WPFISRPTTWAKRNAKITPSGSQSTAKTKPGRRVRWPCCPR

SEQ ID NO: 37693 - protein, 56 aa, Homo sapiens
  MAP TO AC012113.1; EXPRESSED IN BT474, SIGNAL = 1.2; EXPRESSED IN LUNG, SIGNAL = 1.2; EXPRESSED IN BRAIN, SIGNAL = 2.6; EXPRESSED IN BONE MARROW, SIGNAL = 1.4; EXPRESSED IN FETAL LIVER, SIGNAL = 1.1; EXPRESSED IN ADULT LIVER, SIGNAL = 1.7; EXPRESSED IN PLACENTA, SIGNAL = 1.2; EXPRESSED IN HEART, SIGNAL = 1.6; EXPRESSED IN HELA, SIGNAL = 1.3; EXPRESSED IN HBL100, SIGNAL = 1.2; EST_HUMAN HIT: AA984078.1, EVALUE 4.00e-28; SWISSPROT HIT: P13591, EVALUE 5.00e-29
TPSSPSIDQVEPYSSTAQVQFDEPEATGGVPILKYKAEWRAVGEEVWHSKWYDAKE

SEQ ID NO: 37694 - protein, 21 aa, Homo sapiens
  MAP TO AC012113.1; EXPRESSED IN BT474, SIGNAL = 1.2; EXPRESSED IN LUNG, SIGNAL = 1.2; EXPRESSED IN BRAIN, SIGNAL = 2.6; EXPRESSED IN BONE MARROW, SIGNAL = 1.4; EXPRESSED IN FETAL LIVER, SIGNAL = 1.1; EXPRESSED IN ADULT LIVER, SIGNAL = 1.7; EXPRESSED IN PLACENTA, SIGNAL = 1.2; EXPRESSED IN HEART, SIGNAL = 1.6; EXPRESSED IN HELA, SIGNAL = 1.3; EXPRESSED IN HBL100, SIGNAL = 1.2; EST_HUMAN HIT: AA984094.1, EVALUE 8.00e-06
HPLFTIHRPGGAILQHSPGAV

SEQ ID NO: 37695 - protein, 42 aa, Homo sapiens
  MAP TO AC007842.1; EXPRESSED IN BT474, SIGNAL = 1.2; EXPRESSED IN HBL100, SIGNAL = 0.73; EXPRESSED IN FETAL LIVER, SIGNAL = 0.85; EXPRESSED IN HELA, SIGNAL = 0.61; EXPRESSED IN BRAIN, SIGNAL = 0.74; EXPRESSED IN PLACENTA, SIGNAL = 0.75; EXPRESSED IN LUNG, SIGNAL = 0.62; EXPRESSED IN HEART, SIGNAL = 1.2; EST_HUMAN HIT: AA628082.1, EVALUE 4.00e-18; SWISSPROT HIT: P52738, EVALUE 3.00e-14
GSVTFRDVAIDFSQEEWECLQPDQRTLYRDVMLENYSHLISL

SEQ ID NO: 37696 - protein, 56 aa, Homo sapiens
  MAP TO AC012513.2; EXPRESSED IN BONE MARROW, SIGNAL = 4.4; EXPRESSED IN LUNG, SIGNAL = 4.8; EXPRESSED IN BRAIN, SIGNAL = 3.8; EXPRESSED IN PLACENTA, SIGNAL = 4.4; EXPRESSED IN HBL100, SIGNAL = 6.2; EXPRESSED IN HELA, SIGNAL = 5.5; EXPRESSED IN HEART, SIGNAL =   4; EXPRESSED IN BT474, SIGNAL = 3.8; EXPRESSED IN FETAL LIVER, SIGNAL = 4.4; EXPRESSED IN ADULT LIVER, SIGNAL = 4.4; EST_HUMAN HIT: BF130586.1, EVALUE 2.00e-26; SWISSPROT HIT: P13010, EVALUE 1.00e-27
PREPLPPIQQHIWNMLNPPAEVTTKSQIPLSKIKTLFPLIEAKKKDQVTAQEIFQD

SEQ ID NO: 37697 - protein, 54 aa, Homo sapiens
  MAP TO AC011632.2; EXPRESSED IN BONE MARROW, SIGNAL = 2.2; EXPRESSED IN PLACENTA, SIGNAL = 1.3; EXPRESSED IN HEART, SIGNAL = 1.5; EXPRESSED IN ADULT LIVER, SIGNAL = 1.9; EXPRESSED IN LUNG, SIGNAL = 1.4; EXPRESSED IN HELA, SIGNAL = 1.2; EXPRESSED IN HBL100, SIGNAL = 1.6; EXPRESSED IN BT474, SIGNAL = 1.6; EXPRESSED IN FETAL LIVER, SIGNAL = 1.5; EXPRESSED IN BRAIN, SIGNAL = 1.6; SWISSPROT HIT: P39188, EVALUE 4.00e-10; EST_HUMAN HIT: AW631100.1, EVALUE 3.00e-10
ATEKDNEDIHEEKYACEAEVGGSSEPGRSRLQWAVIMPLHSSLGNRVRHCLRKI

SEQ ID NO: 37698 - protein, 24 aa, Homo sapiens
  MAP TO AC008267.1; EXPRESSED IN BONE MARROW, SIGNAL = 0.77; EXPRESSED IN BRAIN, SIGNAL = 0.75; EXPRESSED IN PLACENTA, SIGNAL = 0.61; EXPRESSED IN BT474, SIGNAL = 0.99; EXPRESSED IN HBL100, SIGNAL = 0.75; EXPRESSED IN FETAL LIVER, SIGNAL = 0.86; EXPRESSED IN LUNG, SIGNAL = 0.63; EXPRESSED IN HEART, SIGNAL = 0.86; EST_HUMAN HIT: AW813617.1, EVALUE 2.00e-06
MLCVPVNEDIPEVSDTVLKAITGQ

SEQ ID NO: 37699 - protein, 43 aa, Homo sapiens
  MAP TO AC012130.1; EXPRESSED IN BRAIN, SIGNAL = 2.6; EXPRESSED IN BONE MARROW, SIGNAL = 2.9; EXPRESSED IN PLACENTA, SIGNAL =   3; EXPRESSED IN FETAL LIVER, SIGNAL =   3; EXPRESSED IN ADULT LIVER, SIGNAL =   3; EXPRESSED IN LUNG, SIGNAL = 2.3; EXPRESSED IN HEART, SIGNAL = 2.4; EXPRESSED IN HELA, SIGNAL = 2.5; EXPRESSED IN HBL100, SIGNAL = 2.8; EXPRESSED IN BT474, SIGNAL = 2.6; SWISSPROT HIT: O66392, EVALUE 8.00e+00; EST_HUMAN HIT: BF511280.1, EVALUE 5.40e+00
GGPSIPKSNKNEQPMAKHLYHIRYCSFGQSKFHGQAQIQGVEK

SEQ ID NO: 37700 - protein, 36 aa, Homo sapiens
  MAP TO AC012130.1; EXPRESSED IN BRAIN, SIGNAL = 2.6; EXPRESSED IN BONE MARROW, SIGNAL = 2.9; EXPRESSED IN PLACENTA, SIGNAL =   3; EXPRESSED IN FETAL LIVER, SIGNAL =   3; EXPRESSED IN ADULT LIVER, SIGNAL =   3; EXPRESSED IN LUNG, SIGNAL = 2.3; EXPRESSED IN HEART, SIGNAL = 2.4; EXPRESSED IN HELA, SIGNAL = 2.5; EXPRESSED IN HBL100, SIGNAL = 2.8; EXPRESSED IN BT474, SIGNAL = 2.6
VVPAFPRATRTSSQWPSICTTFATVLLAKASFTVKP

SEQ ID NO: 37701 - protein, 65 aa, Homo sapiens
  MAP TO AL049646.17; EXPRESSED IN BT474, SIGNAL = 1.1; EXPRESSED IN FETAL LIVER, SIGNAL = 1.2; EXPRESSED IN BONE MARROW, SIGNAL = 0.93; EXPRESSED IN LUNG, SIGNAL = 1.1; EXPRESSED IN HELA, SIGNAL =   1; EXPRESSED IN HEART, SIGNAL = 1.2; EXPRESSED IN ADULT LIVER, SIGNAL = 1.2; EXPRESSED IN BRAIN, SIGNAL =   1; EXPRESSED IN PLACENTA, SIGNAL = 1.1; EXPRESSED IN HBL100, SIGNAL = 1.1; EST_HUMAN HIT: BF212834.1, EVALUE 6.00e-08; SWISSPROT HIT: O88563, EVALUE 8.60e-01
PENRLLLKEVGPTGEGRVSVIEQLLDEVSVAKGASLSEEFSLAFHLCLLQMKVLFNTVKITLPFD

SEQ ID NO: 37702 - protein, 86 aa, Homo sapiens
  MAP TO AC012665.1; EXPRESSED IN LUNG, SIGNAL = 2.6; EXPRESSED IN PLACENTA, SIGNAL = 2.8; EXPRESSED IN ADULT LIVER, SIGNAL = 2.9; EXPRESSED IN BONE MARROW, SIGNAL = 3.1; EXPRESSED IN BRAIN, SIGNAL = 2.4; EXPRESSED IN HEART, SIGNAL = 2.4; EXPRESSED IN HELA, SIGNAL = 3.6; EXPRESSED IN HBL100, SIGNAL = 3.1; EXPRESSED IN FETAL LIVER, SIGNAL = 3.2; EXPRESSED IN BT474, SIGNAL = 2.5; EST_HUMAN HIT: BE965810.2, EVALUE 1.30e-01; SWISSPROT HIT: Q09457, EVALUE 4.00e+00
HPIQYEEGGGRGGGDRRVLAPLPRSQALETFRSLTAPPSVLNFFLPHLPAWALQRRPLLEPGAFLAPPREEGPKDARPLGNREARP

SEQ ID NO: 37703 - protein, 65 aa, Homo sapiens
  MAP TO AC011330.4; EXPRESSED IN BT474, SIGNAL = 1.6; EXPRESSED IN BRAIN, SIGNAL = 1.7; EXPRESSED IN ADULT LIVER, SIGNAL = 1.4; EXPRESSED IN LUNG, SIGNAL = 1.2; EXPRESSED IN BONE MARROW, SIGNAL = 1.4; EXPRESSED IN PLACENTA, SIGNAL = 1.7; EXPRESSED IN HEART, SIGNAL = 1.2; EXPRESSED IN HELA, SIGNAL = 1.3; EXPRESSED IN HBL100, SIGNAL = 1.1; EXPRESSED IN FETAL LIVER, SIGNAL = 1.2; EST_HUMAN HIT: AA020739.1, EVALUE 3.00e-31; SWISSPROT HIT: P21783, EVALUE 2.90e-01
LQLYHSETLELMLQRWSKLERDFRQKSGRYDISKIPDIYDCVKYDVQHNGSLGLQGTAELLRLSK

SEQ ID NO: 37704 - protein, 282 aa, Homo sapiens; identical to SEQ ID NO: 35386
  MAP TO AC000052.8; EXPRESSED IN BT474, SIGNAL = 1.1; EXPRESSED IN BONE MARROW, SIGNAL = 0.73; EXPRESSED IN FETAL LIVER, SIGNAL = 1.5; EXPRESSED IN LUNG, SIGNAL = 1.2; EXPRESSED IN HELA, SIGNAL = 0.73; EXPRESSED IN ADULT LIVER, SIGNAL = 1.6; EXPRESSED IN PLACENTA, SIGNAL = 2.3; EXPRESSED IN HBL100, SIGNAL = 0.67; EXPRESSED IN BRAIN, SIGNAL = 1.4; EXPRESSED IN HEART, SIGNAL = 1.2; EST_HUMAN HIT: BE144286.1, EVALUE 3.00e-40; SWISSPROT HIT: Q15427, EVALUE 2.00e-04

SEQ ID NO: 37705 - protein, 85 aa, Homo sapiens
  MAP TO AF067844.1; EXPRESSED IN BT474, SIGNAL = 2.5; EXPRESSED IN FETAL LIVER, SIGNAL = 3.2; EXPRESSED IN BONE MARROW, SIGNAL =   2; EXPRESSED IN LUNG, SIGNAL = 4.4; EXPRESSED IN BRAIN, SIGNAL = 0.96; EXPRESSED IN PLACENTA, SIGNAL = 2.9; EXPRESSED IN HBL100, SIGNAL = 2.9; EXPRESSED IN HELA, SIGNAL = 2.5; EXPRESSED IN HEART, SIGNAL =   2; EXPRESSED IN ADULT LIVER, SIGNAL = 1.2; SWISSPROT HIT: O08586, EVALUE 2.00e-44; EST_HUMAN HIT: AI222037.1, EVALUE 2.00e-43
YLFTTVAQYPFEDHNPPQLELIKPFCEDLDQWLSEDDNHVAAIHCKAGKGRTGVMICAYLLHRGKFLKAQEALDFYGEVRTRDKK

SEQ ID NO: 37706 - protein, 39 aa, Homo sapiens
  MAP TO AF134471.1; EXPRESSED IN BT474, SIGNAL = 4.8; EXPRESSED IN ADULT LIVER, SIGNAL = 5.7; EXPRESSED IN FETAL LIVER, SIGNAL =   5; EXPRESSED IN BONE MARROW, SIGNAL = 5.3; EXPRESSED IN LUNG, SIGNAL = 5.4; EXPRESSED IN BRAIN, SIGNAL = 4.3; EXPRESSED IN HELA, SIGNAL = 4.8; EXPRESSED IN PLACENTA, SIGNAL = 6.7; EXPRESSED IN HBL100, SIGNAL = 5.1; EXPRESSED IN HEART, SIGNAL = 4.2; EST_HUMAN HIT: BE866735.1, EVALUE 3.20e+00
PDPPAKVFRDLQEQAPGASLGAECAVGDAPPDPTDPRRA

SEQ ID NO: 37707 - protein, 120 aa, Homo sapiens
  MAP TO AF134726.1; EXPRESSED IN LUNG, SIGNAL =  14; EXPRESSED IN PLACENTA, SIGNAL =  12; EXPRESSED IN HEART, SIGNAL = 8.7; EXPRESSED IN ADULT LIVER, SIGNAL =  13; EXPRESSED IN FETAL LIVER, SIGNAL =  11; EXPRESSED IN BONE MARROW, SIGNAL =  11; EXPRESSED IN BRAIN, SIGNAL =  10; EXPRESSED IN HELA, SIGNAL =  12; EXPRESSED IN HBL100, SIGNAL =  10; EXPRESSED IN BT474, SIGNAL =  11; EST_HUMAN HIT: BF529177.1, EVALUE 6.70e-01; SWISSPROT HIT: P40223, EVALUE 5.10e+00
LQTQLLVEVTGLGSRANPGDPQPHFSHVILRGVPEGAELGQVPLEPVGPPERGLLAASLSPTLLSTPRPFSLELIGQDAAGRRLHRAAPQPSTVVPVLLEVRRQGKVRLGLERVRAAPSL

SEQ ID NO: 37708 - protein, 19 aa, Homo sapiens
  MAP TO AF134726.1; EXPRESSED IN LUNG, SIGNAL =  14; EXPRESSED IN PLACENTA, SIGNAL =  12; EXPRESSED IN HEART, SIGNAL = 8.7; EXPRESSED IN ADULT LIVER, SIGNAL =  13; EXPRESSED IN FETAL LIVER, SIGNAL =  11; EXPRESSED IN BONE MARROW, SIGNAL =  11; EXPRESSED IN BRAIN, SIGNAL =  10; EXPRESSED IN HELA, SIGNAL =  12; EXPRESSED IN HBL100, SIGNAL =  10; EXPRESSED IN BT474, SIGNAL =  11
ILSRISPTSSFEGSQRVPN

SEQ ID NO: 37709 - protein, 20 aa, Homo sapiens
  MAP TO AL034403.17; EXPRESSED IN PLACENTA, SIGNAL = 0.92; EXPRESSED IN FETAL LIVER, SIGNAL = 0.8; EXPRESSED IN BT474, SIGNAL = 1.3; EXPRESSED IN HEART, SIGNAL = 0.94; EXPRESSED IN BRAIN, SIGNAL = 0.73; EXPRESSED IN ADULT LIVER, SIGNAL = 0.92; EXPRESSED IN HELA, SIGNAL = 0.94; EXPRESSED IN LUNG, SIGNAL = 0.79; EXPRESSED IN HBL100, SIGNAL = 0.78; EXPRESSED IN BONE MARROW, SIGNAL = 1.1
PEGDPLSSLQFPEIPGAPVW

SEQ ID NO: 37710 - protein, 72 aa, Homo sapiens; identical to SEQ ID NO: 33611
  MAP TO AP000038.1; EXPRESSED IN HBL100, SIGNAL = 1.5; EXPRESSED IN HELA, SIGNAL = 0.94; EXPRESSED IN BRAIN, SIGNAL = 1.2; EXPRESSED IN PLACENTA, SIGNAL = 1.2; EXPRESSED IN BT474, SIGNAL = 2.2; EXPRESSED IN BONE MARROW, SIGNAL = 1.4; EXPRESSED IN FETAL LIVER, SIGNAL = 1.3; EXPRESSED IN LUNG, SIGNAL = 2.4e+02; EXPRESSED IN ADULT LIVER, SIGNAL = 0.93; EXPRESSED IN HEART, SIGNAL = 0.9; EST_HUMAN HIT: BF215569.1, EVALUE 3.00e-27

SEQ ID NO: 37711 - protein, 29 aa, Homo sapiens
  MAP TO AP000038.1; EXPRESSED IN HBL100, SIGNAL = 1.5; EXPRESSED IN HELA, SIGNAL = 0.94; EXPRESSED IN BRAIN, SIGNAL = 1.2; EXPRESSED IN PLACENTA, SIGNAL = 1.2; EXPRESSED IN BT474, SIGNAL = 2.2; EXPRESSED IN BONE MARROW, SIGNAL = 1.4; EXPRESSED IN FETAL LIVER, SIGNAL = 1.3; EXPRESSED IN LUNG, SIGNAL = 2.4e+02; EXPRESSED IN ADULT LIVER, SIGNAL = 0.93; EXPRESSED IN HEART, SIGNAL = 0.9; EST_HUMAN HIT: BF215569.1, EVALUE 8.00e-10
SSQSTRRSEYVLPEHLPDNALRLILWHSL

SEQ ID NO: 37712 - protein, 27 aa, Homo sapiens
  MAP TO AJ003147.1; EXPRESSED IN PLACENTA, SIGNAL = 3.7; EXPRESSED IN HELA, SIGNAL = 5.6; EXPRESSED IN HBL100, SIGNAL = 5.5; EXPRESSED IN HEART, SIGNAL = 6.3; EXPRESSED IN BT474, SIGNAL = 6.5; EXPRESSED IN ADULT LIVER, SIGNAL = 2.8; EXPRESSED IN FETAL LIVER, SIGNAL =   5; EXPRESSED IN BONE MARROW, SIGNAL = 4.2; EXPRESSED IN LUNG, SIGNAL = 3.5; EXPRESSED IN BRAIN, SIGNAL = 4.5; EST_HUMAN HIT: BE886797.1, EVALUE 6.00e-09; SWISSPROT HIT: P98182, EVALUE 4.00e-10
ELVVFEDLNVFHCQEECVSLDPTQQLT

SEQ ID NO: 37713 - protein, 67 aa, Homo sapiens
  MAP TO AL034547.11; EXPRESSED IN HEART, SIGNAL = 1.2; EXPRESSED IN BONE MARROW, SIGNAL = 0.9; EXPRESSED IN ADULT LIVER, SIGNAL = 1.1; SWISSPROT HIT: P45635, EVALUE 4.30e+00; EST_HUMAN HIT: BE711222.1, EVALUE 4.30e+00
IFVIGLNRSQHEILTFLTLNPNFQDAEEALVSLYFNFLGKLKIRHSRQLTVCEESCYSLRVFSSEWS

SEQ ID NO: 37714 - protein, 30 aa, Homo sapiens
  MAP TO AL034380.21; EXPRESSED IN HELA, SIGNAL = 1.1; EXPRESSED IN HEART, SIGNAL = 1.1; EXPRESSED IN LUNG, SIGNAL = 1.4; EST_HUMAN HIT: AA705222.1, EVALUE 2.00e-11
DHSGDYAEDRLGRKRGRKETEQSEVCGKTP

SEQ ID NO: 37715 - protein, 19 aa, Homo sapiens
  MAP TO AL034380.21; EXPRESSED IN HELA, SIGNAL = 1.1; EXPRESSED IN HEART, SIGNAL = 1.1; EXPRESSED IN LUNG, SIGNAL = 1.4; EST_HUMAN HIT: AA705222.1, EVALUE 6.00e-04
KEKRKKRNRTVRSLWQDTR

SEQ ID NO: 37716 - protein, 27 aa, Homo sapiens
  MAP TO AC007682.1; EXPRESSED IN PLACENTA, SIGNAL = 0.84; EXPRESSED IN BT474, SIGNAL = 0.91; EXPRESSED IN HBL100, SIGNAL = 1.3; EXPRESSED IN LUNG, SIGNAL = 1.1; EXPRESSED IN ADULT LIVER, SIGNAL = 0.82; EXPRESSED IN BONE MARROW, SIGNAL = 1.1; EXPRESSED IN FETAL LIVER, SIGNAL =   1; EXPRESSED IN HELA, SIGNAL =   1; EXPRESSED IN BRAIN, SIGNAL = 1.1; EXPRESSED IN HEART, SIGNAL =   1
KTEHSTSDKFNNYLKNQQNNMQMADWQ

SEQ ID NO: 37717 - protein, 30 aa, Homo sapiens
  MAP TO AC007682.1; EXPRESSED IN PLACENTA, SIGNAL = 0.84; EXPRESSED IN BT474, SIGNAL = 0.91; EXPRESSED IN HBL100, SIGNAL = 1.3; EXPRESSED IN LUNG, SIGNAL = 1.1; EXPRESSED IN ADULT LIVER, SIGNAL = 0.82; EXPRESSED IN BONE MARROW, SIGNAL = 1.1; EXPRESSED IN FETAL LIVER, SIGNAL =   1; EXPRESSED IN HELA, SIGNAL =   1; EXPRESSED IN BRAIN, SIGNAL = 1.1; EXPRESSED IN HEART, SIGNAL =   1
HRINSITILRISKTTCRWLIGNSFSRQILI

SEQ ID NO: 37718 - protein, 37 aa, Homo sapiens
  MAP TO AL109836.9; EXPRESSED IN ADULT LIVER, SIGNAL = 0.98; EXPRESSED IN HBL100, SIGNAL = 1.1; EXPRESSED IN HEART, SIGNAL = 1.1; EXPRESSED IN LUNG, SIGNAL = 1.1; EXPRESSED IN BONE MARROW, SIGNAL = 1.1
VSTIWKNCLFLQMHRHIGDEESGKHDNTKETHKVPVN

SEQ ID NO: 37719 - protein, 47 aa, Homo sapiens; identical to SEQ ID NO: 33570
  MAP TO AP000043.1; EXPRESSED IN BT474, SIGNAL = 0.63; EXPRESSED IN HEART, SIGNAL = 0.99; EST_HUMAN HIT: AA757099.1, EVALUE 6.00e-06; SWISSPROT HIT: Q10411, EVALUE 2.70e+00

SEQ ID NO: 37720 - protein, 47 aa, Homo sapiens
  MAP TO AP000044.1; EXPRESSED IN BT474, SIGNAL = 0.87; EXPRESSED IN BONE MARROW, SIGNAL = 0.99; EXPRESSED IN HELA, SIGNAL = 0.75; EXPRESSED IN ADULT LIVER, SIGNAL = 1.1; EXPRESSED IN BRAIN, SIGNAL = 0.88; EXPRESSED IN PLACENTA, SIGNAL = 1.1; EXPRESSED IN HBL100, SIGNAL = 1.2; EXPRESSED IN FETAL LIVER, SIGNAL = 0.79; EXPRESSED IN LUNG, SIGNAL = 0.97; EXPRESSED IN HEART, SIGNAL = 0.82; SWISSPROT HIT: Q08334, EVALUE 4.00e-24; EST_HUMAN HIT: BE272922.1, EVALUE 4.00e-23
VEVLADSLHMRFLAPKIENEYETWTMKNVYNSWTYNVQYWKNGTDEK

SEQ ID NO: 37721 - protein, 17 aa, Homo sapiens
  MAP TO AC007681.2; EXPRESSED IN HEART, SIGNAL = 0.96; EXPRESSED IN FETAL LIVER, SIGNAL = 0.59; EXPRESSED IN ADULT LIVER, SIGNAL = 0.77; EXPRESSED IN PLACENTA, SIGNAL = 0.7; EXPRESSED IN LUNG, SIGNAL = 0.65; EST_HUMAN HIT: AA374053.1, EVALUE 5.70e+00
PFPPWTPRPACSCSAWL

SEQ ID NO: 37722 - protein, 33 aa, Homo sapiens
  MAP TO AC006483.2; EXPRESSED IN LUNG, SIGNAL = 0.95; EXPRESSED IN BRAIN, SIGNAL = 0.7; EXPRESSED IN HEART, SIGNAL = 0.95; EXPRESSED IN PLACENTA, SIGNAL = 0.8; EXPRESSED IN BT474, SIGNAL = 0.75; EXPRESSED IN HBL100, SIGNAL = 0.84; EXPRESSED IN FETAL LIVER, SIGNAL = 0.72; EXPRESSED IN ADULT LIVER, SIGNAL = 0.7; EXPRESSED IN BONE MARROW, SIGNAL = 0.97; EXPRESSED IN HELA, SIGNAL = 0.67
ATSSRQIQPKGKHTDIHSPCGDEEQLVPHGFKL

SEQ ID NO: 37723 - protein, 78 aa, Homo sapiens
  MAP TO AC007041.3; EXPRESSED IN LUNG, SIGNAL = 0.98; EXPRESSED IN ADULT LIVER, SIGNAL = 0.84; EXPRESSED IN HEART, SIGNAL = 0.84; EXPRESSED IN PLACENTA, SIGNAL = 0.86; EXPRESSED IN BT474, SIGNAL =   2; EXPRESSED IN BONE MARROW, SIGNAL = 1.7; EXPRESSED IN HBL100, SIGNAL = 1.8; EXPRESSED IN FETAL LIVER, SIGNAL = 1.5; EXPRESSED IN HELA, SIGNAL = 1.2; EST_HUMAN HIT: BE315412.1, EVALUE 4.00e-09; SWISSPROT HIT: P03165, EVALUE 4.20e+00
GSSASSSATRRESLSTSSDLYKRSSSSLAPIGQPFYNSLGFSSSPSPIGMPLPSQTPGHSLTPPPSLSSHGSSSSLHL

SEQ ID NO: 37724 - protein, 80 aa, Homo sapiens
  MAP TO AC007091.3; EXPRESSED IN HEART, SIGNAL = 1.4; EXPRESSED IN BT474, SIGNAL = 0.88; EXPRESSED IN FETAL LIVER, SIGNAL = 0.93; EXPRESSED IN LUNG, SIGNAL = 1.2; EXPRESSED IN ADULT LIVER, SIGNAL = 0.89; EXPRESSED IN BRAIN, SIGNAL = 0.85; EXPRESSED IN PLACENTA, SIGNAL = 0.81; EXPRESSED IN BONE MARROW, SIGNAL = 1.2; EXPRESSED IN HBL100, SIGNAL = 0.75; EXPRESSED IN HELA, SIGNAL = 1.2; EST_HUMAN HIT: AU136779.1, EVALUE 1.00e-07
HHYVPLIQRQVPTAEATHNASDPAEDFHGASTCGGACSCPPHHSSQCGTLHRPHTHLLTCPLPLCTWLALGSHGIQASSM

SEQ ID NO: 37725 - protein, 67 aa, Homo sapiens
  MAP TO AC008274.1; EXPRESSED IN HBL100, SIGNAL = 0.76; EXPRESSED IN ADULT LIVER, SIGNAL = 0.71; EXPRESSED IN PLACENTA, SIGNAL = 0.93; EXPRESSED IN LUNG, SIGNAL = 0.59; EXPRESSED IN HELA, SIGNAL = 0.83; EXPRESSED IN FETAL LIVER, SIGNAL = 0.75; EXPRESSED IN HEART, SIGNAL = 0.85; EST_HUMAN HIT: AI419886.1, EVALUE 8.30e-02; SWISSPROT HIT: P00513, EVALUE 5.70e+00
NDKRRNYEVSEGRTKRAKIWVNTIDCSFPHTCSKSYLMIRTKVVNHMTFKTIIFKSGEGKGTDPNME

SEQ ID NO: 37726 - protein, 34 aa, Homo sapiens
  MAP TO AC009300.1; EXPRESSED IN BRAIN, SIGNAL = 0.8; EXPRESSED IN HEART, SIGNAL = 0.85; EXPRESSED IN BONE MARROW, SIGNAL = 0.74; EXPRESSED IN HELA, SIGNAL = 0.88; EXPRESSED IN PLACENTA, SIGNAL = 0.88; EXPRESSED IN BT474, SIGNAL = 0.72; EXPRESSED IN ADULT LIVER, SIGNAL = 0.75; EXPRESSED IN LUNG, SIGNAL =   1; EXPRESSED IN FETAL LIVER, SIGNAL = 0.82; EXPRESSED IN HBL100, SIGNAL = 0.7; EST_HUMAN HIT: BE891550.1, EVALUE 7.00e-05
MTFALDWWFVFGLTALFPPLGSHCFDCALSSEPY

SEQ ID NO: 37727 - protein, 62 aa, Homo sapiens
  MAP TO AJ229042.1; EXPRESSED IN BONE MARROW, SIGNAL = 1.1; EXPRESSED IN HEART, SIGNAL = 1.1; EXPRESSED IN ADULT LIVER, SIGNAL = 2.1; EXPRESSED IN BRAIN, SIGNAL = 1.2; EXPRESSED IN LUNG, SIGNAL =   1; EXPRESSED IN HELA, SIGNAL = 1.4; EXPRESSED IN HBL100, SIGNAL = 1.2; EXPRESSED IN PLACENTA, SIGNAL = 1.2; EXPRESSED IN BT474, SIGNAL = 1.1; EXPRESSED IN FETAL LIVER, SIGNAL = 2.1; SWISSPROT HIT: Q58314, EVALUE 1.50e+00; EST_HUMAN HIT: AI935517.1, EVALUE 1.40e-01
ISKLKHPCYPCTRAMVLKRERVILPARGCLALSRDISVVTNGGEGVLLASSGKRSEKLLNIL

SEQ ID NO: 37728 - protein, 28 aa, Homo sapiens
  MAP TO AJ229042.1; EXPRESSED IN BONE MARROW, SIGNAL = 1.1; EXPRESSED IN HEART, SIGNAL = 1.1; EXPRESSED IN ADULT LIVER, SIGNAL = 2.1; EXPRESSED IN BRAIN, SIGNAL = 1.2; EXPRESSED IN LUNG, SIGNAL =   1; EXPRESSED IN HELA, SIGNAL = 1.4; EXPRESSED IN HBL100, SIGNAL = 1.2; EXPRESSED IN PLACENTA, SIGNAL = 1.2; EXPRESSED IN BT474, SIGNAL = 1.1; EXPRESSED IN FETAL LIVER, SIGNAL = 2.1
SPGGQNHPLPLENHCSRARIARMFQLAY

SEQ ID NO: 37729 - protein, 47 aa, Homo sapiens
  MAP TO AC006344.2; EXPRESSED IN BT474, SIGNAL = 0.93; EXPRESSED IN HBL100, SIGNAL = 1.3; EXPRESSED IN FETAL LIVER, SIGNAL = 0.93; EXPRESSED IN PLACENTA, SIGNAL = 1.1; EXPRESSED IN BONE MARROW, SIGNAL = 1.4; EXPRESSED IN LUNG, SIGNAL = 0.87; EXPRESSED IN HELA, SIGNAL = 0.81; EXPRESSED IN ADULT LIVER, SIGNAL = 0.92; EXPRESSED IN BRAIN, SIGNAL =   1; EXPRESSED IN HEART, SIGNAL = 0.86; EST_HUMAN HIT: BE466313.1, EVALUE 1.00e-11
FHYPQQSNAGAENQILCFLTYKWELNDKNKWTHGGNNTYWGLLEGGW

SEQ ID NO: 37730 - protein, 49 aa, Homo sapiens
  MAP TO AP000150.1; EXPRESSED IN PLACENTA, SIGNAL = 0.73; EXPRESSED IN LUNG, SIGNAL = 1.2; EXPRESSED IN HEART, SIGNAL = 0.81; SWISSPROT HIT: P29366, EVALUE 3.10e-01
EAWHESLGGFISSGIILQGVHKQQWQSCKEEDNGSVRILDEVMLGKRSL

SEQ ID NO: 37731 - protein, 110 aa, Homo sapiens
  MAP TO AL009182.13; EXPRESSED IN HBL100, SIGNAL = 0.99; EXPRESSED IN FETAL LIVER, SIGNAL = 1.2; EXPRESSED IN LUNG, SIGNAL =   1; EXPRESSED IN BONE MARROW, SIGNAL = 1.3; EXPRESSED IN HELA, SIGNAL = 1.2; EXPRESSED IN HEART, SIGNAL = 1.1; EXPRESSED IN PLACENTA, SIGNAL = 1.3; EXPRESSED IN BT474, SIGNAL =   1; EXPRESSED IN ADULT LIVER, SIGNAL = 1.5; EXPRESSED IN BRAIN, SIGNAL = 1.2; SWISSPROT HIT: Q59567, EVALUE 3.40e+00; EST_HUMAN HIT: BE869398.1, EVALUE 5.00e-19
KKVAMLFQPTVLRCHFSTSSHQPAVVQWKFKSYCQDRMGESLGMSSTRAQSLSKRNLEWDPYLDCLDSRRTVRVVASKQGSTVTLGDFYRGREITIVHGNNAPILNLGNG

SEQ ID NO: 37732 - protein, 73 aa, Homo sapiens
  MAP TO AL009182.13; EXPRESSED IN HBL100, SIGNAL = 0.99; EXPRESSED IN FETAL LIVER, SIGNAL = 1.2; EXPRESSED IN LUNG, SIGNAL =   1; EXPRESSED IN BONE MARROW, SIGNAL = 1.3; EXPRESSED IN HELA, SIGNAL = 1.2; EXPRESSED IN HEART, SIGNAL = 1.1; EXPRESSED IN PLACENTA, SIGNAL = 1.3; EXPRESSED IN BT474, SIGNAL =   1; EXPRESSED IN ADULT LIVER, SIGNAL = 1.5; EXPRESSED IN BRAIN, SIGNAL = 1.2; EST_HUMAN HIT: W04602.1, EVALUE 6.00e-02; SWISSPROT HIT: P05882, EVALUE 3.90e-01
RRWPCSSSPLCFAATSQHPPISLQLCSGSSSPTARIAWENPWACPLPGPNLSARETWNGTPTWIVWTAGGLFE

SEQ ID NO: 37733 - protein, 253 aa, Homo sapiens
  MAP TO AC006059.3; EXPRESSED IN HBL100, SIGNAL = 1.2; EXPRESSED IN HELA, SIGNAL = 1.9; EXPRESSED IN PLACENTA, SIGNAL = 1.3; EXPRESSED IN HEART, SIGNAL = 1.7; EXPRESSED IN BT474, SIGNAL = 1.4; EXPRESSED IN FETAL LIVER, SIGNAL = 1.7; EXPRESSED IN BONE MARROW, SIGNAL = 1.4; EXPRESSED IN LUNG, SIGNAL = 4.6; EXPRESSED IN BRAIN, SIGNAL = 2.8; EST_HUMAN HIT: AI350947.1, EVALUE 1.00e-78; SWISSPROT HIT: P30414, EVALUE 1.00e-108
LNTEENVACLQNIQHVEESVPNGVEDVLQTDDNMEICTPDRSSPAKVEETSPLGNARLDTPDINIVLKQDMATEHPQAEVVKQESSMSESKVLGEVGKQDSSSASLASAGESTGKKEVAEKSQINLIDKKWKPLQGVGNLAAPNAATSSAVEVKVLTTVPEMKPQGLRIEIKSKNKVRPGSLFDEVRKTARLNRRPRNQESSSDEQTPSRDDDSQSRSPSRSRSKSETKSRHRTRSVSYSHSRSRSRSSTSSY

SEQ ID NO: 37734 - protein, 111 aa, Homo sapiens
  MAP TO AJ011930.1; EXPRESSED IN HBL100, SIGNAL = 5.1; EXPRESSED IN FETAL LIVER, SIGNAL = 5.4; EXPRESSED IN LUNG, SIGNAL =   5; EXPRESSED IN BONE MARROW, SIGNAL = 5.5; EXPRESSED IN HEART, SIGNAL = 4.4; EXPRESSED IN HELA, SIGNAL = 5.7; EXPRESSED IN PLACENTA, SIGNAL = 4.8; EXPRESSED IN BT474, SIGNAL = 4.9; EXPRESSED IN ADULT LIVER, SIGNAL = 6.1; EXPRESSED IN BRAIN, SIGNAL = 4.9; EST_HUMAN HIT: AI492246.1, EVALUE 2.00e-50; SWISSPROT HIT: Q43194, EVALUE 5.60e-01
RTCVLEQWLWWAVSTLLRPWRAVCLCVAEAVAGCVSAAEAVVGCVSAAEAVVGCVSAAEAVVGCVSAAEAVVGCVSVLLRPWRAVCLCVAEAVAGCVSVLLPELLAMCILL

SEQ ID NO: 37735 - protein, 398 aa, Homo sapiens
  MAP TO AL021808.1; EXPRESSED IN HBL100, SIGNAL = 2.1; EXPRESSED IN HELA, SIGNAL = 2.2; EXPRESSED IN PLACENTA, SIGNAL =   2; EXPRESSED IN HEART, SIGNAL = 2.1; EXPRESSED IN BT474, SIGNAL = 2.3; EXPRESSED IN FETAL LIVER, SIGNAL = 2.3; EXPRESSED IN ADULT LIVER, SIGNAL =   2; EXPRESSED IN BONE MARROW, SIGNAL = 2.1; EXPRESSED IN LUNG, SIGNAL = 1.9; EXPRESSED IN BRAIN, SIGNAL = 2.1; EST_HUMAN HIT: AI017213.1, EVALUE 4.00e-27; SWISSPROT HIT: P52591, EVALUE 3.00e-54
RESQPSTEHCALRLCPILQTSETSEAKTVLELTARASSLLMGSFLSKLELSPSSPAQVRTDLPERPTKRRPPQPLHQVHRVQFVHRAHPAPRYRPVRRRPNLDPANPTTWLANEAWRRFPMKKSQNSPLGPLPSDWWESYLKRTIWSLRHPRPIWSPVTIRITPPDQRVPPSTSPEDVIALAGLPPSEELADPCSKETVLRALRECRKGKGRLEEPLFPESLDSKRRSPETRPSAFKPLMKNGTLTSFVPRPGPLKRSLHSWGSDHSLTKRPNCSSMSSLASIYRGGTLSSKRNAIGSSYSSCRNFSDPWKRSVPSVSFETPEWPIKKEKSCHRPSSPVPLVSDFESLGGSESSGQQNQKIPQLPSSPENLVSEIPPPQLGYAVSDENLTLGKKAELQ

SEQ ID NO: 37736 - protein, 50 aa, Homo sapiens
  MAP TO AL049697.8; EXPRESSED IN BT474, SIGNAL =   1; EXPRESSED IN FETAL LIVER, SIGNAL = 1.9; EXPRESSED IN HEART, SIGNAL = 0.92; EXPRESSED IN LUNG, SIGNAL = 4.1; SWISSPROT HIT: P47007, EVALUE 6.00e+00
RLGSVTREITDNRACAKEELESLYRKIISYVLLRSGLGSPTDIKTVREVT

SEQ ID NO: 37737 - protein, 27 aa, Homo sapiens
  MAP TO AL008633.1; EXPRESSED IN FETAL LIVER, SIGNAL = 1.2; EXPRESSED IN BT474, SIGNAL = 1.1; EXPRESSED IN HEART, SIGNAL =   1; EXPRESSED IN ADULT LIVER, SIGNAL =   2; EXPRESSED IN BRAIN, SIGNAL = 1.1; EXPRESSED IN LUNG, SIGNAL =   1; EXPRESSED IN BONE MARROW, SIGNAL = 1.3; EXPRESSED IN HELA, SIGNAL = 1.9; EXPRESSED IN HBL100, SIGNAL = 1.3; EST_HUMAN HIT: AL134376.1, EVALUE 1.00e-05
MPTISGNALVTSEVNKALGFTQGLKPM

SEQ ID NO: 37738 - protein, 26 aa, Homo sapiens
  MAP TO AL008633.1; EXPRESSED IN FETAL LIVER, SIGNAL = 1.2; EXPRESSED IN BT474, SIGNAL = 1.1; EXPRESSED IN HEART, SIGNAL =   1; EXPRESSED IN ADULT LIVER, SIGNAL =   2; EXPRESSED IN BRAIN, SIGNAL = 1.1; EXPRESSED IN LUNG, SIGNAL =   1; EXPRESSED IN BONE MARROW, SIGNAL = 1.3; EXPRESSED IN HELA, SIGNAL = 1.9; EXPRESSED IN HBL100, SIGNAL = 1.3
LFPLLFSSRRSFSCPPYLGMHWSHLK

SEQ ID NO: 37739 - protein, 68 aa, Homo sapiens
  MAP TO AL109823.11; EXPRESSED IN BRAIN, SIGNAL =   3; EXPRESSED IN HEART, SIGNAL = 3.5; EXPRESSED IN FETAL LIVER, SIGNAL =   3; EXPRESSED IN ADULT LIVER, SIGNAL = 3.6; EXPRESSED IN LUNG, SIGNAL = 3.3; EXPRESSED IN BONE MARROW, SIGNAL =   4; EXPRESSED IN HELA, SIGNAL = 3.2; EXPRESSED IN PLACENTA, SIGNAL = 3.8; EXPRESSED IN HBL100, SIGNAL = 3.9; EXPRESSED IN BT474, SIGNAL = 3.9; EST_HUMAN HIT: BF573504.1, EVALUE 2.00e-31; SWISSPROT HIT: Q14203, EVALUE 4.00e+00
VLRTLGSKCGDFLRSRFCKDVLPKLAGSLVTQAPISARAGPVYSHTLAFKLQLAVLQGLGPLCERLDL

SEQ ID NO: 37740 - protein, 28 aa, Homo sapiens
  MAP TO AL109823.11; EXPRESSED IN BRAIN, SIGNAL =   3; EXPRESSED IN HEART, SIGNAL = 3.5; EXPRESSED IN FETAL LIVER, SIGNAL =   3; EXPRESSED IN ADULT LIVER, SIGNAL = 3.6; EXPRESSED IN LUNG, SIGNAL = 3.3; EXPRESSED IN BONE MARROW, SIGNAL =   4; EXPRESSED IN HELA, SIGNAL = 3.2; EXPRESSED IN PLACENTA, SIGNAL = 3.8; EXPRESSED IN HBL100, SIGNAL = 3.9; EXPRESSED IN BT474, SIGNAL = 3.9; EST_HUMAN HIT: BF081743.1, EVALUE 5.00e-10
FYVPWEASVVTFFAAGSAKMSCQSWLAP

SEQ ID NO: 37741 - protein, 61 aa, Homo sapiens
  MAP TO AL118508.9; EXPRESSED IN BT474, SIGNAL = 1.2; EXPRESSED IN BONE MARROW, SIGNAL = 1.4; EXPRESSED IN HEART, SIGNAL = 1.9; EXPRESSED IN FETAL LIVER, SIGNAL = 1.4; EXPRESSED IN LUNG, SIGNAL = 1.3; EXPRESSED IN HELA, SIGNAL = 1.2; EXPRESSED IN PLACENTA, SIGNAL = 3.4; EXPRESSED IN HBL100, SIGNAL =   2; EXPRESSED IN ADULT LIVER, SIGNAL = 1.8; EST_HUMAN HIT: N66550.1, EVALUE 3.00e+00
MHKPFVVSEKTQLNLLGKGLYRAPREEVAQVPPEISGAGRGSPIREGEDSEGFEEEAAPKM

SEQ ID NO: 37742 - protein, 152 aa, Homo sapiens
  MAP TO AC007156.2; EXPRESSED IN PLACENTA, SIGNAL = 0.92; EXPRESSED IN FETAL LIVER, SIGNAL = 1.1; EXPRESSED IN BONE MARROW, SIGNAL =   1; EXPRESSED IN BRAIN, SIGNAL = 0.96; EXPRESSED IN HBL100, SIGNAL = 0.96; EXPRESSED IN HELA, SIGNAL = 1.1; EXPRESSED IN HEART, SIGNAL =   2; SWISSPROT HIT: O15178, EVALUE 2.00e+00; EST_HUMAN HIT: BF526561.1, EVALUE 2.20e-01
VYWWPHSRSSGLCFQESCPCTFSLSYGTSCCETPLLLFACAPTSNVCLNLSADSCSTILSDTKLNTLQVIPSPSCRILILFLIAVPLNCVQIIPARNWGQPRVLPYSHVQHLNRYGSHSFSPVNTIQSAPLWSAPGMSHVPMTPCPHGLLSP

SEQ ID NO: 37743 - protein, 25 aa, Homo sapiens
  MAP TO AL118517.5; EXPRESSED IN BT474, SIGNAL = 1.2; EXPRESSED IN HEART, SIGNAL = 1.3; EXPRESSED IN FETAL LIVER, SIGNAL = 1.2; EXPRESSED IN ADULT LIVER, SIGNAL = 1.1; EXPRESSED IN BRAIN, SIGNAL = 1.1; EXPRESSED IN LUNG, SIGNAL = 1.5; EXPRESSED IN BONE MARROW, SIGNAL = 1.9; EXPRESSED IN HELA, SIGNAL = 1.3; EXPRESSED IN PLACENTA, SIGNAL = 1.4; EXPRESSED IN HBL100, SIGNAL = 1.6
AGWGRDLDCSLKYGGQDRIHGESEI

SEQ ID NO: 37744 - protein, 191 aa, Homo sapiens
  MAP TO AC002094.1; EXPRESSED IN PLACENTA, SIGNAL =  31; EXPRESSED IN ADULT LIVER, SIGNAL = 4.9; EXPRESSED IN BT474, SIGNAL =  31; EXPRESSED IN LUNG, SIGNAL = 7.6; EXPRESSED IN BRAIN, SIGNAL = 1.5; EXPRESSED IN HEART, SIGNAL = 1.9; EXPRESSED IN HELA, SIGNAL =  36; EXPRESSED IN HBL100, SIGNAL =  11; EXPRESSED IN FETAL LIVER, SIGNAL = 8.8; EXPRESSED IN BONE MARROW, SIGNAL = 1.9; EST_HUMAN HIT: BE901484.1, EVALUE 5.00e-51
MVLLHEEQLLLESLDLCFQLQPSDIGVINDLVEPMDVTLHRLAHGQLCLILDPKVITSKTGIVDLQNNVGTVHSICKDLSPQVLDGLEVMAPVSDLGSLLLQVLLALQLPVLGIQAPNSVQVGGQVVVEALHGFLLILDDSHSCQTPGHHCGQAPGPHAALEAGEAGHGDPGTRAPDACIDTGHTADQLGT

SEQ ID NO: 37745 - protein, 59 aa, Homo sapiens
  MAP TO AC002094.1; EXPRESSED IN PLACENTA, SIGNAL =  31; EXPRESSED IN ADULT LIVER, SIGNAL = 4.9; EXPRESSED IN BT474, SIGNAL =  31; EXPRESSED IN LUNG, SIGNAL = 7.6; EXPRESSED IN BRAIN, SIGNAL = 1.5; EXPRESSED IN HEART, SIGNAL = 1.9; EXPRESSED IN HELA, SIGNAL =  36; EXPRESSED IN HBL100, SIGNAL =  11; EXPRESSED IN FETAL LIVER, SIGNAL = 8.8; EXPRESSED IN BONE MARROW, SIGNAL = 1.9; EST_HUMAN HIT: AA075986.1, EVALUE 2.00e-07; SWISSPROT HIT: P05783, EVALUE 1.20e-02
STLSTNYQSLGTVQAPSYVPSWSAVWPVSMQASGALVPGSPCPASPASRAAWGPGACPQ

SEQ ID NO: 37746 - protein, 25 aa, Homo sapiens
  MAP TO AC005242.1; EXPRESSED IN BRAIN, SIGNAL = 1.5; EXPRESSED IN HEART, SIGNAL = 1.3; EXPRESSED IN PLACENTA, SIGNAL = 1.4; EXPRESSED IN ADULT LIVER, SIGNAL =   1; SWISSPROT HIT: O19182, EVALUE 6.00e-03
ALESPAEAMGSVRTNRYSIVSSEED

SEQ ID NO: 37747 - protein, 320 aa, Homo sapiens
  MAP TO AC005242.1; EXPRESSED IN BRAIN, SIGNAL = 1.5; EXPRESSED IN HEART, SIGNAL = 1.3; EXPRESSED IN PLACENTA, SIGNAL = 1.4; EXPRESSED IN ADULT LIVER, SIGNAL =   1; SWISSPROT HIT: P48049, EVALUE 0.00e+00; EST_HUMAN HIT: AI569271.1, EVALUE 3.00e-72
LLHGDLDASKEGKACVSEVNSFTAAFLFSIETQTTIGYGFRCVTDECPIAVFMVVFQSIVGCIIDAFIIGAVMAKMAKPKKRNETLVFSHNAVIAMRDGKLCLMWRVGNLRKSHLVEAHVRAQLLKSRITSEGEYIPLDQIDINVGFDSGIDRIFLVSPITIVHEIDEDSPLYDLSKQDIDNADFEIVVILEGMVEATAMTTQCRSSYLANEILWGHRYEPVLFEEKHYYKVDYSRFHKTYEVPNTPLCSARDLAEKKYILSNANSFCYENEVALTSKEEDDSENGVPESTSTDTPPDIDLHNQASVPLEPRPLRRESEI

SEQ ID NO: 37748 - protein, 193 aa, Homo sapiens
  MAP TO AC002467.1; EXPRESSED IN BT474, SIGNAL = 2.6; EXPRESSED IN FETAL LIVER, SIGNAL = 1.6; EXPRESSED IN HELA, SIGNAL = 2.6; EXPRESSED IN PLACENTA, SIGNAL = 2.6; EXPRESSED IN BRAIN, SIGNAL = 1.5; EXPRESSED IN LUNG, SIGNAL = 1.4; EXPRESSED IN BONE MARROW, SIGNAL = 1.3; EXPRESSED IN HEART, SIGNAL = 1.2; EXPRESSED IN HBL100, SIGNAL = 2.1; EST_HUMAN HIT: AA831893.1, EVALUE 7.00e-07
DDSNSGAREPPPPAPAPAHHHPEYQGQPVVSHPHHIMPPQQHYAPPPPPPPPISHPMPHPPQAAGTPHLVYSQAPPPPMTSAPPPITPPPGHIIAQMPPYMNHPPPGPPPPQHGGPPVTAPPPHHYNPNSLPQFTEDQGTLSPPFTQPGGMSPGIWPAPRGPPPPPRLQGPPSQTPLPGPHHPDQTRYRPYYQ

SEQ ID NO: 37749 - protein, 48 aa, Homo sapiens [sequence omitted]

SEQ ID NO: 37750 - protein, 45 aa, Homo sapiens
  MAP TO AL121675.8; EXPRESSED IN LUNG, SIGNAL = 6.8; EXPRESSED IN HELA, SIGNAL = 7.9; EXPRESSED IN PLACENTA, SIGNAL = 9.5; EXPRESSED IN HEART, SIGNAL = 7.9; EXPRESSED IN FETAL LIVER, SIGNAL = 8.6; EXPRESSED IN ADULT LIVER, SIGNAL =   7; EXPRESSED IN BT474, SIGNAL = 6.9; EXPRESSED IN BRAIN, SIGNAL =   7; EXPRESSED IN BONE MARROW, SIGNAL = 9.3; EXPRESSED IN HBL100, SIGNAL =  11; SWISSPROT HIT: Q40406, EVALUE 2.80e+00; EST_HUMAN HIT: BE836139.1, EVALUE 2.00e-19
PMQVLFSGEATHRKYYSTTHGALLSGQREAARLIEMYRDLFQQGT

SEQ ID NO: 37751 - protein, 69 aa, Homo sapiens
  MAP TO AC010183.6; EXPRESSED IN BONE MARROW, SIGNAL = 1.2; EXPRESSED IN LUNG, SIGNAL = 1.4; EXPRESSED IN PLACENTA, SIGNAL = 0.97; EXPRESSED IN HELA, SIGNAL = 1.3; EXPRESSED IN HBL100, SIGNAL = 1.3; EXPRESSED IN HEART, SIGNAL = 1.4; EXPRESSED IN BT474, SIGNAL = 0.98; EXPRESSED IN FETAL LIVER, SIGNAL = 1.3; SWISSPROT HIT: P50895, EVALUE 2.50e+00
LEGMNIHPNYIMREPQLLCVTIEGCPEEVTLELELVSQGEEAEEQHVQRLCGRREHYTLEELNRSQLRK

SEQ ID NO: 37752 - protein, 56 aa, Homo sapiens
  MAP TO AP000080.1; EXPRESSED IN LUNG, SIGNAL = 1.5; EXPRESSED IN HELA, SIGNAL = 1.4; EXPRESSED IN PLACENTA, SIGNAL = 2.2; EXPRESSED IN ADULT LIVER, SIGNAL =   1; EXPRESSED IN BT474, SIGNAL = 2.9; EXPRESSED IN BONE MARROW, SIGNAL = 2.3; EXPRESSED IN BRAIN, SIGNAL = 1.8; EXPRESSED IN HBL100, SIGNAL = 2.6; EXPRESSED IN HEART, SIGNAL = 1.6; EXPRESSED IN FETAL LIVER, SIGNAL = 1.6; SWISSPROT HIT: P44568, EVALUE 4.50e+00
GYEEGMEDKDNSGNREDGSTDSVTWGFEKGDRYWLPLRSCGIMMLEQVSTFIHMQE

SEQ ID NO: 37753 - protein, 114 aa, Homo sapiens
  MAP TO AC010930.2; EXPRESSED IN BONE MARROW, SIGNAL = 1.1; EXPRESSED IN LUNG, SIGNAL = 1.1; EXPRESSED IN PLACENTA, SIGNAL = 1.1; EXPRESSED IN HELA, SIGNAL = 1.1; EXPRESSED IN HBL100, SIGNAL = 1.1; EXPRESSED IN HEART, SIGNAL = 1.1; EXPRESSED IN ADULT LIVER, SIGNAL = 1.4; EXPRESSED IN BT474, SIGNAL =   1; EXPRESSED IN FETAL LIVER, SIGNAL = 1.2; EST_HUMAN HIT: BF679294.1, EVALUE 3.00e-25; SWISSPROT HIT: P23269, EVALUE 1.00e-19
ADAALHEPMYLFLAMLATIDLVLSSTTLPKMLAIFWFRDQEINFFACLVQMFFLHSFSIMESAVLLAMAFDRYVAICKPLHYTTVLTGSLITKIGMAAVARAVTLMTPLPFLLR

SEQ ID NO: 37754 - protein, 23 aa, Homo sapiens
  MAP TO AC010930.2; EXPRESSED IN BONE MARROW, SIGNAL = 1.1; EXPRESSED IN LUNG, SIGNAL = 1.1; EXPRESSED IN PLACENTA, SIGNAL = 1.1; EXPRESSED IN HELA, SIGNAL = 1.1; EXPRESSED IN HBL100, SIGNAL = 1.1; EXPRESSED IN HEART, SIGNAL = 1.1; EXPRESSED IN ADULT LIVER, SIGNAL = 1.4; EXPRESSED IN BT474, SIGNAL =   1; EXPRESSED IN FETAL LIVER, SIGNAL = 1.2
HPLLLCLYSGPARQLYPSLHYPG

SEQ ID NO: 37755 - protein, 68 aa, Homo sapiens
  MAP TO AL022101.1; EXPRESSED IN HEART, SIGNAL = 0.95; EXPRESSED IN PLACENTA, SIGNAL = 0.9; EXPRESSED IN ADULT LIVER, SIGNAL =   1; EST_HUMAN HIT: BE410282.1, EVALUE 5.00e-16; SWISSPROT HIT: O60811, EVALUE 1.00e-34
MEELPRVLYLPLFREAFSRRHFQTLTVMVQAWPFTCLPLVSLMKTLHLEPLKALLEGLHMLLTQKDRP

SEQ ID NO: 37756 - protein, 42 aa, Homo sapiens
  MAP TO AC007172.6; EXPRESSED IN BONE MARROW, SIGNAL = 1.3; EXPRESSED IN BRAIN, SIGNAL = 1.9; EXPRESSED IN HELA, SIGNAL = 1.6; EXPRESSED IN LUNG, SIGNAL = 1.7; EXPRESSED IN HEART, SIGNAL = 1.4; EXPRESSED IN HBL100, SIGNAL = 1.4; EXPRESSED IN PLACENTA, SIGNAL = 1.4; EXPRESSED IN ADULT LIVER, SIGNAL = 1.2; EXPRESSED IN FETAL LIVER, SIGNAL = 1.4; EXPRESSED IN BT474, SIGNAL = 1.4; SWISSPROT HIT: Q04322, EVALUE 1.40e-01; EST_HUMAN HIT: AA713573.1, EVALUE 3.00e-18
MPEEQAFSVLVKIMFDYGLRELFKQNFEDLHCKFYQLERLMQ

SEQ ID NO: 37757 - protein, 48 aa, Homo sapiens
  MAP TO L78833.1; EXPRESSED IN FETAL LIVER, SIGNAL = 3.4; EXPRESSED IN ADULT LIVER, SIGNAL = 1.7; EXPRESSED IN LUNG, SIGNAL =   2; EXPRESSED IN BONE MARROW, SIGNAL = 2.1; EXPRESSED IN BRAIN, SIGNAL = 2.3; EXPRESSED IN PLACENTA, SIGNAL =   2; EXPRESSED IN BT474, SIGNAL = 1.9; EXPRESSED IN HEART, SIGNAL = 1.9; EXPRESSED IN HELA, SIGNAL = 2.4; EXPRESSED IN HBL100, SIGNAL = 2.3; EST_HUMAN HIT: BE018878.1, EVALUE 3.00e-11; SWISSPROT HIT: P38398, EVALUE 4.00e-12
IKLQQEMAELEAVLEQHGSQPSNSYPSIISDSSALEDLRNPEQSTSEK

SEQ ID NO: 37758 - protein, 51 aa, Homo sapiens
  MAP TO AL132642.1; EXPRESSED IN BRAIN, SIGNAL = 6.1; EXPRESSED IN HELA, SIGNAL = 5.9; EXPRESSED IN HBL100, SIGNAL = 6.3; EXPRESSED IN PLACENTA, SIGNAL = 3.2; EXPRESSED IN ADULT LIVER, SIGNAL = 1.6; EXPRESSED IN HEART, SIGNAL = 8.1; EXPRESSED IN BT474, SIGNAL =   9; EXPRESSED IN FETAL LIVER, SIGNAL = 4.5; EXPRESSED IN BONE MARROW, SIGNAL =   6; EXPRESSED IN LUNG, SIGNAL = 2.4; EST_HUMAN HIT: BE744504.1, EVALUE 5.00e-24
FCEFVSAPEVSRWAGPIIDVLLDYVGNVQLCSRLKEHIDSFEDWAVIKEKA

SEQ ID NO: 37759 - protein, 21 aa, Homo sapiens
  MAP TO AL132642.1; EXPRESSED IN BRAIN, SIGNAL = 6.1; EXPRESSED IN HELA, SIGNAL = 5.9; EXPRESSED IN HBL100, SIGNAL = 6.3; EXPRESSED IN PLACENTA, SIGNAL = 3.2; EXPRESSED IN ADULT LIVER, SIGNAL = 1.6; EXPRESSED IN HEART, SIGNAL = 8.1; EXPRESSED IN BT474, SIGNAL =   9; EXPRESSED IN FETAL LIVER, SIGNAL = 4.5; EXPRESSED IN BONE MARROW, SIGNAL =   6; EXPRESSED IN LUNG, SIGNAL = 2.4
NSLLGPGMFSFSSVSSYLPQR

SEQ ID NO: 37760 - protein, 115 aa, Homo sapiens
  MAP TO AL122001.5; EXPRESSED IN BT474, SIGNAL = 4.1; EXPRESSED IN FETAL LIVER, SIGNAL = 3.3; EXPRESSED IN BONE MARROW, SIGNAL = 4.3; EXPRESSED IN LUNG, SIGNAL =   3; EXPRESSED IN BRAIN, SIGNAL = 3.9; EXPRESSED IN HBL100, SIGNAL = 3.3; EXPRESSED IN HELA, SIGNAL = 2.8; EXPRESSED IN PLACENTA, SIGNAL =   3; EXPRESSED IN ADULT LIVER, SIGNAL = 2.9; EXPRESSED IN HEART, SIGNAL = 2.1; EST_HUMAN HIT: AU117812.1, EVALUE 1.00e-53
AATEPKFPAVRLALQNFDMTYSVQFGDLWPSIRVSLLSEQKYGALVNNFAAWDHVSAKLEQLSAKDFVNEAISHWELQSEGGQSAAPSPASWACSPNLRCFTFDRGDISRFPPAR

SEQ ID NO: 37761 - protein, 42 aa, Homo sapiens
  MAP TO D84394.1; EXPRESSED IN BT474, SIGNAL = 5.1; EXPRESSED IN FETAL LIVER, SIGNAL =  16; EXPRESSED IN BONE MARROW, SIGNAL =  37; EXPRESSED IN LUNG, SIGNAL =  62; EXPRESSED IN BRAIN, SIGNAL = 9.5; EXPRESSED IN HBL100, SIGNAL =  39; EXPRESSED IN HELA, SIGNAL =  30; EXPRESSED IN PLACENTA, SIGNAL =  14; EXPRESSED IN ADULT LIVER, SIGNAL = 8.5; EXPRESSED IN HEART, SIGNAL =  13; EST_HUMAN HIT: AA300921.1, EVALUE 8.30e-02; SWISSPROT HIT: Q08136, EVALUE 1.40e-01
PSSQSTVPIVGIVAGLAVLAVVVIGAVVAAVMCRRKSSGREG

SEQ ID NO: 37762 - protein, 21 aa, Homo sapiens
  MAP TO D84394.1; EXPRESSED IN BT474, SIGNAL = 5.1; EXPRESSED IN FETAL LIVER, SIGNAL =  16; EXPRESSED IN BONE MARROW, SIGNAL =  37; EXPRESSED IN LUNG, SIGNAL =  62; EXPRESSED IN BRAIN, SIGNAL = 9.5; EXPRESSED IN HBL100, SIGNAL =  39; EXPRESSED IN HELA, SIGNAL =  30; EXPRESSED IN PLACENTA, SIGNAL =  14; EXPRESSED IN ADULT LIVER, SIGNAL = 8.5; EXPRESSED IN HEART, SIGNAL =  13
CCWPGCPSSCGHRSCGRCCDV

SEQ ID NO: 37763 - protein, 56 aa, Homo sapiens
  MAP TO D87675.1; EXPRESSED IN PLACENTA, SIGNAL = 3.6; EXPRESSED IN HEART, SIGNAL = 4.1; EXPRESSED IN ADULT LIVER, SIGNAL = 2.3; EXPRESSED IN BT474, SIGNAL = 5.2; EXPRESSED IN LUNG, SIGNAL = 4.9; EXPRESSED IN HELA, SIGNAL = 4.5; EXPRESSED IN HBL100, SIGNAL = 4.9; EXPRESSED IN FETAL LIVER, SIGNAL = 3.8; EXPRESSED IN BRAIN, SIGNAL = 7.6; EXPRESSED IN BONE MARROW, SIGNAL = 6.1; EST_HUMAN HIT: AU131304.1, EVALUE 1.00e-27; SWISSPROT HIT: P08592, EVALUE 1.00e-28
EQAETGPCRAMISRWYFDVTEGKCAPFFYGGCGGNRNNFDTEEYCMAVCGSASKWT

SEQ ID NO: 37764 - protein, 54 aa, Homo sapiens
  MAP TO AC007638.1; EXPRESSED IN HEART, SIGNAL = 0.99; EST_HUMAN HIT: AA602010.1, EVALUE 1.90e-02; SWISSPROT HIT: O18809, EVALUE 5.20e-01
KDLVSNNPYDIINAFLDVIDRIVSPPLPHSYVEVLAPSTQNVAIFGNKVIEEIL

SEQ ID NO: 37765 - protein, 58 aa, Homo sapiens
  MAP TO AC011446.2; EXPRESSED IN HBL100, SIGNAL = 9.3; EXPRESSED IN HEART, SIGNAL = 5.9; EXPRESSED IN FETAL LIVER, SIGNAL = 4.4; EXPRESSED IN LUNG, SIGNAL = 6.6; EXPRESSED IN BRAIN, SIGNAL = 6.6; EXPRESSED IN PLACENTA, SIGNAL = 9.9; EXPRESSED IN BT474, SIGNAL = 7.7; EXPRESSED IN ADULT LIVER, SIGNAL = 4.7; EXPRESSED IN BONE MARROW, SIGNAL = 7.4; EXPRESSED IN HELA, SIGNAL = 7.4; SWISSPROT HIT: P20428, EVALUE 2.60e+00; EST_HUMAN HIT: AI961087.1, EVALUE 2.00e-16
SRRLGRYRSPRRGWEAQAWRAAGPEPCPTERQLRPGEKLSAAPVGWRCWGTQYTLCSC

SEQ ID NO: 37766 - protein, 197 aa, Homo sapiens
  MAP TO AC006078.1; EXPRESSED IN ADULT LIVER, SIGNAL =  24; EXPRESSED IN BT474, SIGNAL =  11; EXPRESSED IN FETAL LIVER, SIGNAL =  12; EXPRESSED IN PLACENTA, SIGNAL =  17; EXPRESSED IN BRAIN, SIGNAL = 5.2; EXPRESSED IN LUNG, SIGNAL =  10; EXPRESSED IN BONE MARROW, SIGNAL =   6; EXPRESSED IN HEART, SIGNAL =  22; EXPRESSED IN HELA, SIGNAL = 7.9; EXPRESSED IN HBL100, SIGNAL = 3.4; EST_HUMAN HIT: BE467547.1, EVALUE 1.00e-89; SWISSPROT HIT: P10266, EVALUE 1.00e-109
KPVWVNQWPLPKQKLEALHLLAKEQLEKGHIEPSFSPWNSPVFVIQKKSGRWHKLTDLRAVNAVIQPMGPLQPGLPSLAMIPKDWPLIIIDLKDCFFTIPLAEQDYEKFAFTIPAINNKEPATRFQWKVLPQGMLNSPTICQALQPVRDKFSDCYIIHYVDDILCAAEMRDKLINCYTFLQAEVANAGLAIASDKIQ

SEQ ID NO: 37767 - protein, 70 aa, Homo sapiens
  MAP TO AC011493.2; EXPRESSED IN BONE MARROW, SIGNAL = 6.9; EXPRESSED IN LUNG, SIGNAL = 8.2; EXPRESSED IN HELA, SIGNAL = 7.4; EXPRESSED IN PLACENTA, SIGNAL = 9.3; EXPRESSED IN HBL100, SIGNAL =  15; EXPRESSED IN HEART, SIGNAL = 5.5; EXPRESSED IN FETAL LIVER, SIGNAL =   5; EXPRESSED IN ADULT LIVER, SIGNAL = 1.3; EXPRESSED IN BT474, SIGNAL =  12; EXPRESSED IN BRAIN, SIGNAL = 2.5; SWISSPROT HIT: P47904, EVALUE 2.00e-37; EST_HUMAN HIT: AV755432.1, EVALUE 2.00e-36
EKRKHKKKRLVQSPNSYFMDVKCPGCYKVTTVFSHAQMVVLCVGCSTVLCQPTGGKARLTEGCSFRRKQH

SEQ ID NO: 37768 - protein, 21 aa, Homo sapiens
  MAP TO AC011493.2; EXPRESSED IN BONE MARROW, SIGNAL = 6.9; EXPRESSED IN LUNG, SIGNAL = 8.2; EXPRESSED IN HELA, SIGNAL = 7.4; EXPRESSED IN PLACENTA, SIGNAL = 9.3; EXPRESSED IN HBL100, SIGNAL =  15; EXPRESSED IN HEART, SIGNAL = 5.5; EXPRESSED IN FETAL LIVER, SIGNAL =   5; EXPRESSED IN ADULT LIVER, SIGNAL = 1.3; EXPRESSED IN BT474, SIGNAL =  12; EXPRESSED IN BRAIN, SIGNAL = 2.5; EST_HUMAN HIT: BF676677.1, EVALUE 3.00e-06
KRRGNTRRNAWCRAPIPTSWM

SEQ ID NO: 37769 - protein, 180 aa, Homo sapiens
  MAP TO AL009178.4; EXPRESSED IN BONE MARROW, SIGNAL = 1.5; EXPRESSED IN PLACENTA, SIGNAL = 1.6; EXPRESSED IN HELA, SIGNAL = 1.6; EXPRESSED IN FETAL LIVER, SIGNAL = 1.7; EXPRESSED IN ADULT LIVER, SIGNAL = 1.7; EXPRESSED IN BT474, SIGNAL = 1.5; EXPRESSED IN BRAIN, SIGNAL = 1.2; EXPRESSED IN LUNG, SIGNAL = 1.8; EXPRESSED IN HEART, SIGNAL = 2.8; EXPRESSED IN HBL100, SIGNAL = 1.4
SRTGRSLSGTGRSLSGAGRSLSGTGRSLSGTGRSLSGTGRSLSRTGRSCSGTGRCLSRTGRSLSRALRSLSGAGRSLSGTGRSLSGAGRSLSGTGRCLSGAGRSLSGTGRSLSGAGRSLSGAGKCLSRTGRSFPGTPSPPRAESASEPGAGAAFQRLAPSTERGSALPGHLGCVGDRDTC

SEQ ID NO: 37770 - protein, 70 aa, Homo sapiens
  MAP TO AC012119.1; EXPRESSED IN HELA, SIGNAL = 1.7; EXPRESSED IN HBL100, SIGNAL = 2.4; EXPRESSED IN HEART, SIGNAL = 2.8; EXPRESSED IN FETAL LIVER, SIGNAL = 2.8; EXPRESSED IN LUNG, SIGNAL = 2.4; EXPRESSED IN PLACENTA, SIGNAL = 3.1; EXPRESSED IN BT474, SIGNAL = 1.8; EXPRESSED IN ADULT LIVER, SIGNAL = 1.7; EXPRESSED IN BRAIN, SIGNAL = 2.2; EXPRESSED IN BONE MARROW, SIGNAL = 2.7; SWISSPROT HIT: P52823, EVALUE 3.00e-35; EST_HUMAN HIT: AW954342.1, EVALUE 3.00e-34
GKAFVKESLKCIANGVTSKVFLAIRRCSTFQRMIAEVQEECYSKLNVCSIAKRNPEAITEVVQLPNHFSN

SEQ ID NO: 37771 - protein, 34 aa, Homo sapiens
  MAP TO AC012119.1; EXPRESSED IN HELA, SIGNAL = 1.7; EXPRESSED IN HBL100, SIGNAL = 2.4; EXPRESSED IN HEART, SIGNAL = 2.8; EXPRESSED IN FETAL LIVER, SIGNAL = 2.8; EXPRESSED IN LUNG, SIGNAL = 2.4; EXPRESSED IN PLACENTA, SIGNAL = 3.1; EXPRESSED IN BT474, SIGNAL = 1.8; EXPRESSED IN ADULT LIVER, SIGNAL = 1.7; EXPRESSED IN BRAIN, SIGNAL = 2.2; EXPRESSED IN BONE MARROW, SIGNAL = 2.7; EST_HUMAN HIT: AW954342.1, EVALUE 5.00e-14
KSIRQRELKMHRQRGHLQGLPRHSEVLHFPKDDC

SEQ ID NO: 37772 - protein, 94 aa, Homo sapiens
  MAP TO AL035697.18; EXPRESSED IN FETAL LIVER, SIGNAL = 0.83; EXPRESSED IN BONE MARROW, SIGNAL = 0.79; EXPRESSED IN HBL100, SIGNAL = 0.91; EXPRESSED IN ADULT LIVER, SIGNAL = 0.73; EXPRESSED IN BRAIN, SIGNAL = 0.84; EXPRESSED IN PLACENTA, SIGNAL = 0.81; EXPRESSED IN BT474, SIGNAL = 0.8; EXPRESSED IN LUNG, SIGNAL = 0.79; EXPRESSED IN HEART, SIGNAL = 0.87
KEHLGHHSLDKISKGSCVLPHAQGERAKNVSKHKNESSTLIGIASFVQLAAPRCQSPCSPHSSPRPHVCKSPVLLCGSFSCPLPPATPQDNISC

SEQ ID NO: 37773 - protein, 77 aa, Homo sapiens
  MAP TO AC011700.3; EXPRESSED IN FETAL LIVER, SIGNAL = 5.4; EXPRESSED IN ADULT LIVER, SIGNAL = 5.4; EXPRESSED IN BT474, SIGNAL = 5.9; EXPRESSED IN BRAIN, SIGNAL = 6.1; EXPRESSED IN BONE MARROW, SIGNAL =   6; EXPRESSED IN LUNG, SIGNAL = 6.3; EXPRESSED IN HELA, SIGNAL = 4.9; EXPRESSED IN PLACENTA, SIGNAL = 7.3; EXPRESSED IN HBL100, SIGNAL = 4.8; EXPRESSED IN HEART, SIGNAL = 5.5; SWISSPROT HIT: Q92786, EVALUE 4.00e-38; EST_HUMAN HIT: AV647211.1, EVALUE 1.00e-10
VFPPLQIPQARFAVNGENHNFHTANQRLQCFGDVIIPNPLDTFGNVQMASSTDQTEALPLVVRKNSSDQSASGPAAG

SEQ ID NO: 37774 - protein, 164 aa, Homo sapiens
  MAP TO AC006501.5; EXPRESSED IN PLACENTA, SIGNAL = 1.9; EXPRESSED IN FETAL LIVER, SIGNAL = 1.2; EXPRESSED IN ADULT LIVER, SIGNAL =   1; EXPRESSED IN BT474, SIGNAL = 1.3; EXPRESSED IN LUNG, SIGNAL = 3.1; EXPRESSED IN HEART, SIGNAL = 2.3; EXPRESSED IN HELA, SIGNAL = 2.3; EXPRESSED IN HBL100, SIGNAL = 1.3; EST_HUMAN HIT: BE081527.1, EVALUE 5.00e-49; SWISSPROT HIT: O13695, EVALUE 2.20e-01
QFVAALADLQEAVKLCPTNQEVKRLLARVEEECKQLQRSQQQKQQGPLPAPLNDSENEEDTPTPGLSDHFHSEETEEEETSPQEESVSPTPRSQPSSSVPSSYIRNLQEGLQSKGRPVSPQSRAGIGKSLREPVAQPGLLLQPSKQAQIVKTSQHLGSGQSAVR

SEQ ID NO: 37775 - protein, 48 aa, Homo sapiens [sequence omitted]

SEQ ID NO: 37776 - protein, 59 aa, Homo sapiens
  MAP TO AC012367.2; EXPRESSED IN BONE MARROW, SIGNAL = 2.4; EXPRESSED IN HELA, SIGNAL = 1.9; EXPRESSED IN HBL100, SIGNAL = 2.1; EXPRESSED IN HEART, SIGNAL = 1.8; EXPRESSED IN FETAL LIVER, SIGNAL = 1.7; EXPRESSED IN LUNG, SIGNAL = 1.9; EXPRESSED IN PLACENTA, SIGNAL =   2; EXPRESSED IN BT474, SIGNAL =   2; EXPRESSED IN ADULT LIVER, SIGNAL = 2.4; EXPRESSED IN BRAIN, SIGNAL = 3.3; SWISSPROT HIT: P44550, EVALUE 1.50e+00; EST_HUMAN HIT: AW104516.1, EVALUE 2.30e+00
LLQPQVQKRKRVCNVHNNYIGTTLKLKYLINGINSPMRSWCESLPAFLKPSALKLTSFR

SEQ ID NO: 37777 - protein, 34 aa, Homo sapiens
  MAP TO AC012443.1; EXPRESSED IN FETAL LIVER, SIGNAL = 1.3; EXPRESSED IN ADULT LIVER, SIGNAL = 1.7; EXPRESSED IN BT474, SIGNAL = 1.4; EXPRESSED IN BRAIN, SIGNAL = 1.7; EXPRESSED IN BONE MARROW, SIGNAL = 1.2; EXPRESSED IN LUNG, SIGNAL = 1.4; EXPRESSED IN HELA, SIGNAL = 1.3; EXPRESSED IN PLACENTA, SIGNAL = 1.7; EXPRESSED IN HBL100, SIGNAL = 1.5; EXPRESSED IN HEART, SIGNAL = 1.3; EST_HUMAN HIT: BF061635.1, EVALUE 1.20e-02
GLLLLSAGTIPREDPPHTYIHKLKGYLDPAVTRK

SEQ ID NO: 37778 - protein, 26 aa, Homo sapiens
  MAP TO AC012443.1; EXPRESSED IN FETAL LIVER, SIGNAL = 1.3; EXPRESSED IN ADULT LIVER, SIGNAL = 1.7; EXPRESSED IN BT474, SIGNAL = 1.4; EXPRESSED IN BRAIN, SIGNAL = 1.7; EXPRESSED IN BONE MARROW, SIGNAL = 1.2; EXPRESSED IN LUNG, SIGNAL = 1.4; EXPRESSED IN HELA, SIGNAL = 1.3; EXPRESSED IN PLACENTA, SIGNAL = 1.7; EXPRESSED IN HBL100, SIGNAL = 1.5; EXPRESSED IN HEART, SIGNAL = 1.3
LDFCCFLQERFHVKILPIHTFTSSKA

SEQ ID NO: 37779 - protein, 55 aa, Homo sapiens
  MAP TO AC007382.2; EXPRESSED IN BT474, SIGNAL = 0.66; EXPRESSED IN BRAIN, SIGNAL = 0.98; EXPRESSED IN HEART, SIGNAL = 0.98; EST_HUMAN HIT: AL135549.1, EVALUE 3.00e-24; SWISSPROT HIT: P70483, EVALUE 5.00e-25
YLQEVGYTDTILDVKSKRVRALLGFSSDVTDREDDKNQDSVVNGTEAEVKETAMI

SEQ ID NO: 37780 - protein, 76 aa, Homo sapiens
  MAP TO AC012553.2; EXPRESSED IN BONE MARROW, SIGNAL = 1.3; EXPRESSED IN HEART, SIGNAL = 0.98; EXPRESSED IN FETAL LIVER, SIGNAL =   1; EXPRESSED IN PLACENTA, SIGNAL = 4.4; EXPRESSED IN HELA, SIGNAL = 0.96; EXPRESSED IN HBL100, SIGNAL = 1.2; EXPRESSED IN BT474, SIGNAL = 1.5; EXPRESSED IN ADULT LIVER, SIGNAL = 1.2; EXPRESSED IN BRAIN, SIGNAL = 1.3; EXPRESSED IN LUNG, SIGNAL = 1.6; EST_HUMAN HIT: AW193683.1, EVALUE 3.00e-12
PRLKNVDRSTAQQLAVTVGNVTVIITDFKEKTRSSSTSSSTVTSSAGSEQQNQSSSGSESTDKGSSRSSTPKGDMS

SEQ ID NO: 37781 - protein, 31 aa, Homo sapiens
  MAP TO AC012446.1; EXPRESSED IN BONE MARROW, SIGNAL = 6.3; EXPRESSED IN PLACENTA, SIGNAL = 5.5; EXPRESSED IN FETAL LIVER, SIGNAL =   5; EXPRESSED IN ADULT LIVER, SIGNAL = 5.9; EXPRESSED IN LUNG, SIGNAL = 5.6; EXPRESSED IN HEART, SIGNAL = 4.4; EXPRESSED IN HELA, SIGNAL = 5.1; EXPRESSED IN HBL100, SIGNAL = 5.8; EXPRESSED IN BT474, SIGNAL = 5.6; EXPRESSED IN BRAIN, SIGNAL = 5.1
ISKAQRTPLWMWRMCINVQSIVVHSIQVYLW

SEQ ID NO: 37782 - protein, 83 aa, Homo sapiens
  MAP TO AL021579.1; EXPRESSED IN LUNG, SIGNAL =   3; EXPRESSED IN HELA, SIGNAL = 2.9; EXPRESSED IN HBL100, SIGNAL = 2.4; EXPRESSED IN HEART, SIGNAL = 2.6; EXPRESSED IN BRAIN, SIGNAL = 2.6; EXPRESSED IN BONE MARROW, SIGNAL = 2.5; EXPRESSED IN PLACENTA, SIGNAL = 2.9; EXPRESSED IN ADULT LIVER, SIGNAL = 3.4; EXPRESSED IN FETAL LIVER, SIGNAL = 2.9; EXPRESSED IN BT474, SIGNAL = 3.4; EST_HUMAN HIT: AW375534.1, EVALUE 6.00e-26; SWISSPROT HIT: P48634, EVALUE 2.00e-06
EQMKQQQWQQQQQQGVLPQTVPSQPSSSTVPPPPHRPLYQPMQPHPQHLASMGFDPRWLMMQSYMDPRMMSGRPAMDIPPIHP

SEQ ID NO: 37783 - protein, 28 aa, Homo sapiens
  MAP TO AL021579.1; EXPRESSED IN LUNG, SIGNAL =   3; EXPRESSED IN HELA, SIGNAL = 2.9; EXPRESSED IN HBL100, SIGNAL = 2.4; EXPRESSED IN HEART, SIGNAL = 2.6; EXPRESSED IN BRAIN, SIGNAL = 2.6; EXPRESSED IN BONE MARROW, SIGNAL = 2.5; EXPRESSED IN PLACENTA, SIGNAL = 2.9; EXPRESSED IN ADULT LIVER, SIGNAL = 3.4; EXPRESSED IN FETAL LIVER, SIGNAL = 2.9; EXPRESSED IN BT474, SIGNAL = 3.4; EST_HUMAN HIT: BE001221.1, EVALUE 3.00e-03
SGTDETAAVAAAATARCTSTDCSFTTVQ

SEQ ID NO: 37784 - protein, 24 aa, Homo sapiens
  MAP TO AB020863.1; EXPRESSED IN HELA, SIGNAL = 1.9; EXPRESSED IN HEART, SIGNAL = 0.85; EXPRESSED IN LUNG, SIGNAL = 1.8; EST_HUMAN HIT: BF667099.1, EVALUE 4.00e-07
AALQRLHLQEGRGQNGLHLHLFYR

SEQ ID NO: 37785 - protein, 82 aa, Homo sapiens
  MAP TO AC012513.2; EXPRESSED IN PLACENTA, SIGNAL = 2.7; EXPRESSED IN HBL100, SIGNAL = 2.5; EXPRESSED IN HEART, SIGNAL = 2.7; EXPRESSED IN ADULT LIVER, SIGNAL = 2.6; EXPRESSED IN LUNG, SIGNAL = 2.5; EXPRESSED IN BRAIN, SIGNAL = 2.7; EXPRESSED IN HELA, SIGNAL = 2.5; EXPRESSED IN BT474, SIGNAL = 2.2; EXPRESSED IN FETAL LIVER, SIGNAL = 2.5; EXPRESSED IN BONE MARROW, SIGNAL = 2.9; EST_HUMAN HIT: AW954545.1, EVALUE 1.00e-33
VYRIFKRWQAVNQQWKVLNYDKTKDLEDQKAGGRTNPRTSSSTQANIPSSEEETAGTPAPEQGPAQAAGHPSGPLSHHHCAY

SEQ ID NO: 37786 - protein, 18 aa, Homo sapiens
  MAP TO AC012513.2; EXPRESSED IN PLACENTA, SIGNAL = 2.7; EXPRESSED IN HBL100, SIGNAL = 2.5; EXPRESSED IN HEART, SIGNAL = 2.7; EXPRESSED IN ADULT LIVER, SIGNAL = 2.6; EXPRESSED IN LUNG, SIGNAL = 2.5; EXPRESSED IN BRAIN, SIGNAL = 2.7; EXPRESSED IN HELA, SIGNAL = 2.5; EXPRESSED IN BT474, SIGNAL = 2.2; EXPRESSED IN FETAL LIVER, SIGNAL = 2.5; EXPRESSED IN BONE MARROW, SIGNAL = 2.9; EST_HUMAN HIT: AW954545.1, EVALUE 3.00e-03
RCTASLNGGRLSTSSGKC

SEQ ID NO: 37787 - protein, 84 aa, Homo sapiens
  MAP TO AF024533.1; EXPRESSED IN BT474, SIGNAL = 2.3; EXPRESSED IN LUNG, SIGNAL = 2.1; EXPRESSED IN BRAIN, SIGNAL = 2.7; EXPRESSED IN BONE MARROW, SIGNAL = 3.3; EXPRESSED IN ADULT LIVER, SIGNAL = 1.8; EXPRESSED IN FETAL LIVER, SIGNAL =   2; EXPRESSED IN PLACENTA, SIGNAL = 3.1; EXPRESSED IN HEART, SIGNAL = 2.6; EXPRESSED IN HELA, SIGNAL = 2.5; EXPRESSED IN HBL100, SIGNAL = 2.2; SWISSPROT HIT: P39880, EVALUE 2.00e-29
MSSSESVKSLTELVQQPCPPIEASKDSKPPEPSDPPASDSQPTTPLPLSGHSALSIQELVAMSPELDTYGITKRVKEVLTDNNL

SEQ ID NO: 37788 - protein, 30 aa, Homo sapiens
  MAP TO AL080312.4; EXPRESSED IN HEART, SIGNAL =  23; EXPRESSED IN LUNG, SIGNAL = 0.91; EXPRESSED IN BONE MARROW, SIGNAL =   1; EXPRESSED IN BRAIN, SIGNAL = 0.93
FRCLLTLTTGWHLFFLLRRVLRSVLKLGSH

SEQ ID NO: 37789 - protein, 98 aa, Homo sapiens
  MAP TO AL022143.1; EXPRESSED IN PLACENTA, SIGNAL = 2.3; EXPRESSED IN ADULT LIVER, SIGNAL = 2.8; EXPRESSED IN FETAL LIVER, SIGNAL = 1.6; EXPRESSED IN BONE MARROW, SIGNAL = 1.9; EXPRESSED IN BRAIN, SIGNAL = 1.4; EXPRESSED IN HELA, SIGNAL =   2; EXPRESSED IN HBL100, SIGNAL = 1.6; EXPRESSED IN HEART, SIGNAL = 1.7; EXPRESSED IN BT474, SIGNAL = 2.1; EXPRESSED IN LUNG, SIGNAL = 2.3; EST_HUMAN HIT: AA668227.1, EVALUE 3.00e-38; SWISSPROT HIT: P14077, EVALUE 1.00e-08
TKRNKPKRKSKIRERPQPSSSSDKQTLVVQRTENGAGQSPSRTCYQCSLQGHFKKDCPTRNKLPPRPCPLCQGNHWKAHCPRGQRFSRPEVPNQMIQQ

SEQ ID NO: 37790 - protein, 148 aa, Homo sapiens
  MAP TO AL021917.1; EXPRESSED IN LUNG, SIGNAL =   4; EXPRESSED IN PLACENTA, SIGNAL = 2.1; EXPRESSED IN ADULT LIVER, SIGNAL = 2.3; EXPRESSED IN BRAIN, SIGNAL = 1.8; EXPRESSED IN BONE MARROW, SIGNAL = 2.4; EXPRESSED IN HEART, SIGNAL = 1.8; EXPRESSED IN HELA, SIGNAL = 2.6; EXPRESSED IN HBL100, SIGNAL = 2.9; EXPRESSED IN FETAL LIVER, SIGNAL =   2; EXPRESSED IN BT474, SIGNAL = 2.2; EST_HUMAN HIT: R87400.1, EVALUE 2.00e-52; SWISSPROT HIT: P18892, EVALUE 4.00e-46
DVVLDPDTAHPELFLSEDRRSVRRGPYRQRVPDNPERFDSQPCVLGWESFASGKHYWEVEVENVMVWTVGVCRHSVERKGEVLLIPQNGFWTLEMFGNQYRALSSPERILPLKESLCRVGVFLDYEAGDVSFYNMRDRSHIYTCPRSA

SEQ ID NO: 37791 - protein, 46 aa, Homo sapiens
  MAP TO AL021917.1; EXPRESSED IN LUNG, SIGNAL =   4; EXPRESSED IN PLACENTA, SIGNAL = 2.1; EXPRESSED IN ADULT LIVER, SIGNAL = 2.3; EXPRESSED IN BRAIN, SIGNAL = 1.8; EXPRESSED IN BONE MARROW, SIGNAL = 2.4; EXPRESSED IN HEART, SIGNAL = 1.8; EXPRESSED IN HELA, SIGNAL = 2.6; EXPRESSED IN HBL100, SIGNAL = 2.9; EXPRESSED IN FETAL LIVER, SIGNAL =   2; EXPRESSED IN BT474, SIGNAL = 2.2; EST_HUMAN HIT: AA341547.1, EVALUE 2.00e-05
LGTRNHTIPRVPETPGINLRLPLQLMWSWIQTPLIPSSSCQRTGEV

SEQ ID NO: 37792 - protein, 110 aa, Homo sapiens
  MAP TO AL022145.1; EXPRESSED IN FETAL LIVER, SIGNAL = 1.2; EXPRESSED IN LUNG, SIGNAL =   1; EXPRESSED IN PLACENTA, SIGNAL =   1; EXPRESSED IN BRAIN, SIGNAL = 1.1; EXPRESSED IN BONE MARROW, SIGNAL = 1.2; EXPRESSED IN HEART, SIGNAL = 1.1; EXPRESSED IN HELA, SIGNAL = 1.1; EXPRESSED IN HBL100, SIGNAL = 0.97; EST_HUMAN HIT: AA318972.1, EVALUE 3.00e-13; SWISSPROT HIT: Q61137, EVALUE 2.00e-33
SRFILLEGSQLDASDWLNPAQVVLFSQQNSSGPWAMDLCARRLLDPCEHQCDPETGRREHRAAGNCQRDHASCNHSLEIQTMPPNSPSHCHLEPRPCGLPACGWAAELIG

SEQ ID NO: 37793 - protein, 50 aa, Homo sapiens
  MAP TO AF165138.1; EXPRESSED IN HEART, SIGNAL = 0.96; EXPRESSED IN ADULT LIVER, SIGNAL = 0.68; EXPRESSED IN PLACENTA, SIGNAL = 0.83; EXPRESSED IN BONE MARROW, SIGNAL = 0.97; EXPRESSED IN LUNG, SIGNAL = 0.61; EXPRESSED IN HELA, SIGNAL = 0.66; EXPRESSED IN FETAL LIVER, SIGNAL = 0.62; EST_HUMAN HIT: AI955899.1, EVALUE 1.10e+00; SWISSPROT HIT: P31502, EVALUE 7.80e+00
LLTDPLQLSPQLPQRGAGNINRRKTGFSLGHGKLNKEQRKDKKRLIQGWE

SEQ ID NO: 37794 - protein, 119 aa, Homo sapiens
  MAP TO AL049548.6; EXPRESSED IN BONE MARROW, SIGNAL = 1.6; EXPRESSED IN LUNG, SIGNAL = 0.81; EXPRESSED IN FETAL LIVER, SIGNAL = 0.66; EXPRESSED IN BRAIN, SIGNAL = 0.77; EXPRESSED IN HEART, SIGNAL = 0.88; EST_HUMAN HIT: AA424304.1, EVALUE 3.00e-16; SWISSPROT HIT: Q09778, EVALUE 7.70e-02
ELIDSREIGASRLSRVESLAPEVKQNTTASGCELMHTEMQALRADWKQWEDSVFQTQSCLENLVSQMALSEQEFSGQVAQLEQALEQFSALLKTWAQQLTLLEGKNTDEEIVECWHKGQ

SEQ ID NO: 37795 - protein, 408 aa, Homo sapiens
  MAP TO AL049780.2; EXPRESSED IN ADULT LIVER, SIGNAL = 0.77; EXPRESSED IN PLACENTA, SIGNAL = 1.1; EXPRESSED IN FETAL LIVER, SIGNAL = 0.64; EXPRESSED IN LUNG, SIGNAL = 0.71; EXPRESSED IN HEART, SIGNAL = 1.1; SWISSPROT HIT: P34618, EVALUE 2.40e-01; EST_HUMAN HIT: BE390050.1, EVALUE 1.00e-81
NTTEAPGPHSAKQDSYEQGDSSQQSLKGHLRNNFQKQLLSNKELILDKVYTHPKWNTQTKARSYSYPHCTGISQQDPESDSQGQGNGLFYSSGPQSWYPKANNQDFIPFTKKRVGVDRAFPLKPMVHRKSCSTGEAGTDGDHNVYPRPPEPREFSSRNFGVRNQGNFSVVGTVLAATQAEKAVANFDRTEWVQIRRLEAAGESLEEEIRRKQILLRGKLKKTEEELRRIQTQKEQAKENENGELQKIILPRSRVKGNKSNTMYKPIFSPEFEFEEEFSRDRREDETWGRSQQNSGPFQFSDYRIQRLKRERLVASNNKIRDPVSEPSVEKFSPPSETPVGALQGSARNSSLSMAPDSSGSSGSIEEPQLGECSHCGRKFLSFRLERHSNICSRMRGSKRKVFDSSRAR

SEQ ID NO: 37796 - protein, 42 aa, Homo sapiens
  MAP TO AP000147.1; EXPRESSED IN HELA, SIGNAL = 0.59; EXPRESSED IN ADULT LIVER, SIGNAL = 0.71; EXPRESSED IN HEART, SIGNAL =  79; EXPRESSED IN LUNG, SIGNAL = 0.76; EXPRESSED IN BRAIN, SIGNAL = 0.7; SWISSPROT HIT: O60547, EVALUE 1.20e+00
EYLAHKIGFGRFVEKYFLCVGFVTFEGANLDLLGRFKETTKK

SEQ ID NO: 37797 - protein, 112 aa, Homo sapiens
  MAP TO AL022316.2; EXPRESSED IN BRAIN, SIGNAL = 0.99; EXPRESSED IN BONE MARROW, SIGNAL = 1.1; EXPRESSED IN HEART, SIGNAL = 1.1; SWISSPROT HIT: P13496, EVALUE 4.10e-01; EST_HUMAN HIT: BE958789.1, EVALUE 9.50e-02
SLLGKAMTSPASRQGWETKARAPDPGLPLALAQARSDLQLPRLLFQSTAHLTPAGQAQIQIPPGSRLTPRGSRANHLRESLWVRFQPFICFAHHFPEATLIPAPVISAWTLQ

SEQ ID NO: 37798 - protein, 63 aa, Homo sapiens
  MAP TO AC007738.2; EXPRESSED IN PLACENTA, SIGNAL =   3; EXPRESSED IN HBL100, SIGNAL =   3; EXPRESSED IN HELA, SIGNAL = 3.4; EXPRESSED IN HEART, SIGNAL = 3.1; EXPRESSED IN BT474, SIGNAL = 2.3; EXPRESSED IN ADULT LIVER, SIGNAL = 3.3; EXPRESSED IN FETAL LIVER, SIGNAL = 3.4; EXPRESSED IN BONE MARROW, SIGNAL = 2.5; EXPRESSED IN LUNG, SIGNAL = 3.1; EXPRESSED IN BRAIN, SIGNAL = 2.9; EST_HUMAN HIT: AW869159.1, EVALUE 7.00e-18; SWISSPROT HIT: Q01870, EVALUE 3.30e+00
KESFYPLIDVNWWADSAVTLARCSGALTVSSVKTLKNLLGKSCEWFEPSPQVTATHDGGFLSL

SEQ ID NO: 37799 - protein, 39 aa, Homo sapiens
  MAP TO AC007911.3; EXPRESSED IN BT474, SIGNAL =   8; EXPRESSED IN ADULT LIVER, SIGNAL = 8.4; EXPRESSED IN LUNG, SIGNAL =   8; EXPRESSED IN BRAIN, SIGNAL = 5.7; EXPRESSED IN PLACENTA, SIGNAL = 7.9; EXPRESSED IN HELA, SIGNAL = 7.4; EXPRESSED IN BONE MARROW, SIGNAL =   6; EXPRESSED IN HEART, SIGNAL = 6.8; EXPRESSED IN HBL100, SIGNAL = 6.9; EXPRESSED IN FETAL LIVER, SIGNAL = 8.2; SWISSPROT HIT: P52111, EVALUE 8.10e+00
IGPSVRAGSILYHHCGKKQSNLAKRQEVIHRKESQEKRH

SEQ ID NO: 37800 - protein, 33 aa, Homo sapiens
  MAP TO AL049696.8; EXPRESSED IN BONE MARROW, SIGNAL = 1.2; EXPRESSED IN HELA, SIGNAL = 1.3; EXPRESSED IN ADULT LIVER, SIGNAL = 1.1; EXPRESSED IN BRAIN, SIGNAL = 1.5; EXPRESSED IN PLACENTA, SIGNAL = 1.3; EXPRESSED IN BT474, SIGNAL =   1; EXPRESSED IN LUNG, SIGNAL = 1.3; EXPRESSED IN HEART, SIGNAL = 1.1; EXPRESSED IN HBL100, SIGNAL = 0.84; EXPRESSED IN FETAL LIVER, SIGNAL = 1.2
TSFRNKGILRSKLQQQTGTLTTQGASLPIPLCV

SEQ ID NO: 37801 - protein, 59 aa, Homo sapiens
  MAP TO AC007327.1; EXPRESSED IN FETAL LIVER, SIGNAL = 4.3; EXPRESSED IN ADULT LIVER, SIGNAL = 6.2; EXPRESSED IN LUNG, SIGNAL = 3.2; EXPRESSED IN BRAIN, SIGNAL = 4.9; EXPRESSED IN PLACENTA, SIGNAL = 2.6; EXPRESSED IN HELA, SIGNAL = 7.2; EXPRESSED IN BT474, SIGNAL = 5.5; EXPRESSED IN BONE MARROW, SIGNAL = 4.9; EXPRESSED IN HEART, SIGNAL =   5; EXPRESSED IN HBL100, SIGNAL = 5.4; EST_HUMAN HIT: AW864381.1, EVALUE 7.90e-01; SWISSPROT HIT: O14967, EVALUE 6.70e-01
GICLTSVDKVVHRSVGCGNSLCVHLDCSPATKGDILQLEQKEEKAHMEKFLFYSVQSKK

SEQ ID NO: 37802 - protein, 49 aa, Homo sapiens
  MAP TO AC007993.8; EXPRESSED IN PLACENTA, SIGNAL =   4; EXPRESSED IN HELA, SIGNAL = 4.2; EXPRESSED IN HBL100, SIGNAL = 3.6; EXPRESSED IN HEART, SIGNAL = 4.5; EXPRESSED IN FETAL LIVER, SIGNAL =   4; EXPRESSED IN BT474, SIGNAL = 3.7; EXPRESSED IN ADULT LIVER, SIGNAL =   4; EXPRESSED IN BONE MARROW, SIGNAL = 3.8; EXPRESSED IN LUNG, SIGNAL = 3.9; EXPRESSED IN BRAIN, SIGNAL = 4.1
ASGPARLPRGAGRRLPHQTRGSPRRRLAGGAEPLLRLPAPLPQPGHPAA

SEQ ID NO: 37803 - protein, 54 aa, Homo sapiens
  MAP TO AC008018.18; EXPRESSED IN BRAIN, SIGNAL = 3.5; EXPRESSED IN BONE MARROW, SIGNAL = 2.7; EXPRESSED IN LUNG, SIGNAL = 3.5; EXPRESSED IN PLACENTA, SIGNAL =   3; EXPRESSED IN HBL100, SIGNAL = 2.9; EXPRESSED IN HELA, SIGNAL = 3.6; EXPRESSED IN HEART, SIGNAL = 3.8; EXPRESSED IN FETAL LIVER, SIGNAL = 3.1; EXPRESSED IN BT474, SIGNAL = 3.1; EXPRESSED IN ADULT LIVER, SIGNAL = 2.4; EST_HUMAN HIT: AL043314.2, EVALUE 1.00e-24; SWISSPROT HIT: P11274, EVALUE 2.00e-24
MAEKEAVNKMSLHNLGTVFGPTLLRPSEKESKLPANPSQPITMTDSWSLEVMSQ

SEQ ID NO: 37804 - protein, 42 aa, Homo sapiens
  MAP TO AC008018.18; EXPRESSED IN BRAIN, SIGNAL = 3.5; EXPRESSED IN BONE MARROW, SIGNAL = 2.7; EXPRESSED IN LUNG, SIGNAL = 3.5; EXPRESSED IN PLACENTA, SIGNAL =   3; EXPRESSED IN HBL100, SIGNAL = 2.9; EXPRESSED IN HELA, SIGNAL = 3.6; EXPRESSED IN HEART, SIGNAL = 3.8; EXPRESSED IN FETAL LIVER, SIGNAL = 3.1; EXPRESSED IN BT474, SIGNAL = 3.1; EXPRESSED IN ADULT LIVER, SIGNAL = 2.4; EST_HUMAN HIT: AL043314.2, EVALUE 4.00e-08
WQRRRQSIRCPCTTLARSLAPRCSGPPRRRASSLPTPASPSP

SEQ ID NO: 37805 - protein, 29 aa, Homo sapiens
  MAP TO AC007349.1; EXPRESSED IN BT474, SIGNAL = 4.1; EXPRESSED IN ADULT LIVER, SIGNAL = 4.1; EXPRESSED IN LUNG, SIGNAL = 2.1; EXPRESSED IN BRAIN, SIGNAL = 4.4; EXPRESSED IN PLACENTA, SIGNAL = 2.4; EXPRESSED IN BONE MARROW, SIGNAL = 4.6; EXPRESSED IN HEART, SIGNAL = 4.8; EXPRESSED IN HELA, SIGNAL = 5.7; EXPRESSED IN HBL100, SIGNAL = 4.9; EXPRESSED IN FETAL LIVER, SIGNAL = 2.9
VFWQKQYSQLGGAWVKRIHPNFGIYYMWD

SEQ ID NO: 37806 - protein, 19 aa, Homo sapiens
  MAP TO AC008266.1; EXPRESSED IN BONE MARROW, SIGNAL = 1.3; EXPRESSED IN HELA, SIGNAL = 0.74; EXPRESSED IN ADULT LIVER, SIGNAL = 1.2; EXPRESSED IN BRAIN, SIGNAL = 0.73; EXPRESSED IN PLACENTA, SIGNAL = 0.73; EXPRESSED IN BT474, SIGNAL = 1.1; EXPRESSED IN LUNG, SIGNAL =   1; EXPRESSED IN HEART, SIGNAL = 0.79; EXPRESSED IN HBL100, SIGNAL = 0.79; EXPRESSED IN FETAL LIVER, SIGNAL = 0.81
SPSLDPPCSYSLSSLSWPC

SEQ ID NO: 37807 - protein, 32 aa, Homo sapiens; identical to SEQ ID NO: 34803
  MAP TO AC008132.26; EXPRESSED IN BONE MARROW, SIGNAL = 8.5; EXPRESSED IN LUNG, SIGNAL =  11; EXPRESSED IN PLACENTA, SIGNAL = 9.1; EXPRESSED IN HBL100, SIGNAL = 7.9; EXPRESSED IN HELA, SIGNAL =  11; EXPRESSED IN HEART, SIGNAL = 8.6; EXPRESSED IN FETAL LIVER, SIGNAL =  10; EXPRESSED IN BT474, SIGNAL = 7.8; EXPRESSED IN ADULT LIVER, SIGNAL = 9.4; EXPRESSED IN BRAIN, SIGNAL = 8.9; EST_HUMAN HIT: AL045185.1, EVALUE 8.00e-09; SWISSPROT HIT: P52591, EVALUE 1.90e-01

SEQ ID NO: 37808 - protein, 48 aa, Homo sapiens
  MAP TO AC008430.2; EXPRESSED IN FETAL LIVER, SIGNAL = 1.1; EXPRESSED IN LUNG, SIGNAL = 1.5; EXPRESSED IN BRAIN, SIGNAL = 2.5; EXPRESSED IN PLACENTA, SIGNAL = 0.97; EXPRESSED IN BONE MARROW, SIGNAL = 0.92; EXPRESSED IN HEART, SIGNAL =   2; EXPRESSED IN HELA, SIGNAL = 1.9; EXPRESSED IN HBL100, SIGNAL = 0.99; EST_HUMAN HIT: AA112613.1, EVALUE 1.00e-19; SWISSPROT HIT: P79385, EVALUE 2.00e-10
SNQQITASSTHRALFGLQKWYPYYARLNKKGLINAWTAAENDRWPWIQ

SEQ ID NO: 37809 - protein, 33 aa, Homo sapiens
  MAP TO AC008430.2; EXPRESSED IN FETAL LIVER, SIGNAL = 1.1; EXPRESSED IN LUNG, SIGNAL = 1.5; EXPRESSED IN BRAIN, SIGNAL = 2.5; EXPRESSED IN PLACENTA, SIGNAL = 0.97; EXPRESSED IN BONE MARROW, SIGNAL = 0.92; EXPRESSED IN HEART, SIGNAL =   2; EXPRESSED IN HELA, SIGNAL = 1.9; EXPRESSED IN HBL100, SIGNAL = 0.99; EST_HUMAN HIT: AA112613.1, EVALUE 2.00e-07
YQTSKSQLPLLTELFLDSKNGIPTMHVLIRRGL

SEQ ID NO: 37810 - protein, 19 aa, Homo sapiens
  MAP TO AC008526.2; EXPRESSED IN PLACENTA, SIGNAL = 1.2; EXPRESSED IN HELA, SIGNAL = 1.8; EXPRESSED IN HBL100, SIGNAL = 1.2; EXPRESSED IN HEART, SIGNAL = 3.4; EXPRESSED IN FETAL LIVER, SIGNAL = 1.3; EXPRESSED IN BT474, SIGNAL = 1.1; EXPRESSED IN ADULT LIVER, SIGNAL = 1.1; EXPRESSED IN BONE MARROW, SIGNAL = 1.1; EXPRESSED IN LUNG, SIGNAL = 1.6; EXPRESSED IN BRAIN, SIGNAL =   2
IPDKVSSPCWIVSTQSQLR

SEQ ID NO: 37811 - protein, 41 aa, Homo sapiens
  MAP TO AC007981.31; EXPRESSED IN HBL100, SIGNAL = 3.5; EXPRESSED IN HEART, SIGNAL = 3.4; EXPRESSED IN FETAL LIVER, SIGNAL = 3.9; EXPRESSED IN ADULT LIVER, SIGNAL = 1.9; EXPRESSED IN LUNG, SIGNAL = 5.2; EXPRESSED IN BRAIN, SIGNAL =   5; EXPRESSED IN PLACENTA, SIGNAL = 2.2; EXPRESSED IN HELA, SIGNAL = 4.2; EXPRESSED IN BT474, SIGNAL = 2.8; EXPRESSED IN BONE MARROW, SIGNAL = 3.6; EST_HUMAN HIT: AL045185.1, EVALUE 8.00e-19
SWGTGSLLKTWTGRRRRHSSASTVHCRLRTRPSRTADPHGL

SEQ ID NO: 37812 - protein, 44 aa, Homo sapiens
  MAP TO AC007981.31; EXPRESSED IN HBL100, SIGNAL = 3.5; EXPRESSED IN HEART, SIGNAL = 3.4; EXPRESSED IN FETAL LIVER, SIGNAL = 3.9; EXPRESSED IN ADULT LIVER, SIGNAL = 1.9; EXPRESSED IN LUNG, SIGNAL = 5.2; EXPRESSED IN BRAIN, SIGNAL =   5; EXPRESSED IN PLACENTA, SIGNAL = 2.2; EXPRESSED IN HELA, SIGNAL = 4.2; EXPRESSED IN BT474, SIGNAL = 2.8; EXPRESSED IN BONE MARROW, SIGNAL = 3.6; EST_HUMAN HIT: AL045185.1, EVALUE 9.00e-18; SWISSPROT HIT: P52591, EVALUE 1.00e-03
PPLELGYRVTVEDLDREKEAAFQRINSALQVEDKAISDCRPSRP

SEQ ID NO: 37813 - protein, 65 aa, Homo sapiens
  MAP TO AL031074.1; EXPRESSED IN PLACENTA, SIGNAL =   1; EXPRESSED IN ADULT LIVER, SIGNAL = 1.3; EXPRESSED IN BONE MARROW, SIGNAL = 1.1; EXPRESSED IN HEART, SIGNAL = 0.94; EST_HUMAN HIT: Z38728.1, EVALUE 1.30e+00; SWISSPROT HIT: P22747, EVALUE 1.10e+00
LQAQKQVFQNHIPYKVVDVYNSHNLHILPLGCFSEDAYEIKTFSGGRGQDGPLEAATFGGFHRQK

SEQ ID NO: 37814 - protein, 29 aa, Homo sapiens
  MAP TO AC007333.2; EXPRESSED IN BONE MARROW, SIGNAL = 1.2; EXPRESSED IN LUNG, SIGNAL = 1.4; EXPRESSED IN BRAIN, SIGNAL = 1.2; EXPRESSED IN PLACENTA, SIGNAL = 1.4; EXPRESSED IN HELA, SIGNAL = 1.4; EXPRESSED IN HBL100, SIGNAL = 1.2; EXPRESSED IN HEART, SIGNAL = 1.2; EXPRESSED IN FETAL LIVER, SIGNAL = 1.4; EXPRESSED IN BT474, SIGNAL = 1.4; EXPRESSED IN ADULT LIVER, SIGNAL = 1.4
TNESSLPLGQQQVIQLQNPISASAFSNYF

SEQ ID NO: 37815 - protein, 75 aa, Homo sapiens
  MAP TO AC007220.1; EXPRESSED IN BT474, SIGNAL = 1.3; EXPRESSED IN BONE MARROW, SIGNAL = 1.5; EXPRESSED IN BRAIN, SIGNAL = 1.7; EXPRESSED IN HELA, SIGNAL =   1; EXPRESSED IN HBL100, SIGNAL = 1.4; EXPRESSED IN HEART, SIGNAL = 1.4; EXPRESSED IN ADULT LIVER, SIGNAL = 1.4; EST_HUMAN HIT: BF085009.1, EVALUE 5.00e-22; SWISSPROT HIT: P46578, EVALUE 2.00e-08
VSFGVSITLGSQTVPHSLLTFLLPDNSDLIACTVITKDGGMVQRFLAVDIYQMSLVEPDVSRLGWGVVKFAGLLQ

SEQ ID NO: 37816 - protein, 56 aa, Homo sapiens
  MAP TO AC007444.1; EXPRESSED IN HELA, SIGNAL = 5.7; EXPRESSED IN HEART, SIGNAL = 4.7; EXPRESSED IN FETAL LIVER, SIGNAL =   6; EXPRESSED IN ADULT LIVER, SIGNAL = 6.2; EXPRESSED IN BRAIN, SIGNAL = 4.5; EXPRESSED IN PLACENTA, SIGNAL =   6; EXPRESSED IN HBL100, SIGNAL = 5.4; EXPRESSED IN BT474, SIGNAL = 4.8; EXPRESSED IN LUNG, SIGNAL = 5.7; EXPRESSED IN BONE MARROW, SIGNAL = 5.7; EST_HUMAN HIT: AV705443.1, EVALUE 2.80e+00; SWISSPROT HIT: P24265, EVALUE 1.50e+00
ENHHPKPESPKQTVSARLALVRLDKDKPHGGGCPKPQQFQELLTESMATSAHLLVK

SEQ ID NO: 37817 - protein, 65 aa, Homo sapiens
  MAP TO AC007450.1; EXPRESSED IN LUNG, SIGNAL = 1.3; EXPRESSED IN BONE MARROW, SIGNAL = 1.3; EXPRESSED IN BRAIN, SIGNAL = 1.2; EXPRESSED IN PLACENTA, SIGNAL = 2.2; EXPRESSED IN HBL100, SIGNAL = 1.7; EXPRESSED IN HELA, SIGNAL = 1.5; EXPRESSED IN HEART, SIGNAL = 1.3; EXPRESSED IN BT474, SIGNAL =   1; EXPRESSED IN FETAL LIVER, SIGNAL = 1.8; EXPRESSED IN ADULT LIVER, SIGNAL = 1.3; SWISSPROT HIT: O60014, EVALUE 5.70e+00
NGTREVLQSEKAEAGWASNSFTKSCQTNLGLRRRKKYTSVCVIVNFGLCYCGQTDTLTNAHFMKS

SEQ ID NO: 37818 - protein, 398 aa, Homo sapiens
  MAP TO AC004230.1; EXPRESSED IN FETAL LIVER, SIGNAL = 5.3; EXPRESSED IN LUNG, SIGNAL =  68; EXPRESSED IN BRAIN, SIGNAL = 5.9; EXPRESSED IN HBL100, SIGNAL = 5.8; EXPRESSED IN HELA, SIGNAL =  12; EXPRESSED IN PLACENTA, SIGNAL =  51; EXPRESSED IN BT474, SIGNAL =  45; EXPRESSED IN ADULT LIVER, SIGNAL = 9.2; EXPRESSED IN BONE MARROW, SIGNAL = 5.6; EXPRESSED IN HEART, SIGNAL =  37; SWISSPROT HIT: gi1351900, EVALUE 0.00e+00; EST_HUMAN HIT: BE005926.1, EVALUE 2.00e-88
PKVDVEVPDVSLEGPEGKLKGPKLKMPEMHFKAPKISMPDVDLHLKGPKVKGDVDVSLPKLEGDLTGPSVDVEVPDVELECPDAKLKGPKFKMPEMHFKTPKISMPDVNLNLKGPKVKGDMDVSVPKVEGEMKVPDVDIRGPKVDIDAPDVDVHGPDWHLKMPKMKMPKFSMPGFKGEGPEVDVNLPKADVDVSGPKVDVEVPDVSLEGPEGKLKGPKFKMPEMHFKTPKISMPDVDFNLKGPKIKGDVDVSAPKLEGELKGPELDVKGPKLDADMPEVAVEGPNGKWKTPKFKMPDMHFKAPKISMPDLDLHLKSPKAKGEVDVDVPKLEGDLKGPHVDVSGPDIDIEGPEGKLKGPKFKMPDMHFKAPNISMPDVDLNLKGPKIKGDVDVSVPEVE

SEQ ID NO: 37819 - protein, 45 aa, Homo sapiens
  MAP TO AC010736.3; EXPRESSED IN BT474, SIGNAL = 2.1; EXPRESSED IN FETAL LIVER, SIGNAL = 1.8; EXPRESSED IN ADULT LIVER, SIGNAL = 1.6; EXPRESSED IN LUNG, SIGNAL =   2; EXPRESSED IN BONE MARROW, SIGNAL = 1.5; EXPRESSED IN BRAIN, SIGNAL = 1.6; EXPRESSED IN PLACENTA, SIGNAL = 1.9; EXPRESSED IN HBL100, SIGNAL = 1.8; EXPRESSED IN HELA, SIGNAL = 1.9; EXPRESSED IN HEART, SIGNAL = 1.8; EST_HUMAN HIT: BE542261.1, EVALUE 3.50e-01; SWISSPROT HIT: P42917, EVALUE 2.10e+00
WRGPRSRPPALAAGEKQPGLQPVSPGASQEQCRPESGQARQQART

SEQ ID NO: 37820 - protein, 45 aa, Homo sapiens
  MAP TO AC009961.3; EXPRESSED IN BONE MARROW, SIGNAL = 1.5; EXPRESSED IN HELA, SIGNAL = 1.4; EXPRESSED IN FETAL LIVER, SIGNAL = 1.5; EXPRESSED IN BRAIN, SIGNAL = 1.2; EXPRESSED IN PLACENTA, SIGNAL = 1.2; EXPRESSED IN HEART, SIGNAL = 1.3; EXPRESSED IN HBL100, SIGNAL = 1.5; EXPRESSED IN BT474, SIGNAL = 1.4; EXPRESSED IN ADULT LIVER, SIGNAL = 1.2; EXPRESSED IN LUNG, SIGNAL = 1.3; EST_HUMAN HIT: AA055948.1, EVALUE 6.90e+00
MNNSVITRYPCLAPDGTSKNVLGVFHYDDDFKVCVCIYTYTYTSK

SEQ ID NO: 37821 - protein, 258 aa, Homo sapiens
  MAP TO AC004682.1; EXPRESSED IN LUNG, SIGNAL = 4.5; EXPRESSED IN BRAIN, SIGNAL = 2.2; EXPRESSED IN HEART, SIGNAL = 3.1; EXPRESSED IN HELA, SIGNAL = 2.9; EXPRESSED IN HBL100, SIGNAL = 2.2; EXPRESSED IN PLACENTA, SIGNAL = 3.1; EXPRESSED IN BT474, SIGNAL = 1.9; EXPRESSED IN ADULT LIVER, SIGNAL =  88; EXPRESSED IN FETAL LIVER, SIGNAL = 1.3e+02; EXPRESSED IN BONE MARROW, SIGNAL = 6.6; EST_HUMAN HIT: AI061661.1, EVALUE 1.00e-126; SWISSPROT HIT: P00738, EVALUE 0.00e+00
CGKPKNPANPVQRILGGHLDAKGSFPWQAKMVSHHNLTTGATLINEQWLLTTAKNLFLNHSENATAKDIAPTLTLYVGKKQLVEIEKVVLHPNYSQVDIGLIKLKQKVSVNERVMPICLPSKDYAEVGRVGYVSGWGRNANFKFTDHLKYVMLPVADQDQCIRHYEGSTVPEKKTPKSPVGVQPILNEHTFCAGMSKYQEDTCYGDAGSAFAVHDLEEDTWYATGILSFDKSCAVAEYGVYVKVTSIQDWVQKTIAEN

SEQ ID NO: 37822 - protein, 29 aa, Homo sapiens
  MAP TO AC004682.1; EXPRESSED IN LUNG, SIGNAL = 4.5; EXPRESSED IN BRAIN, SIGNAL = 2.2; EXPRESSED IN HEART, SIGNAL = 3.1; EXPRESSED IN HELA, SIGNAL = 2.9; EXPRESSED IN HBL100, SIGNAL = 2.2; EXPRESSED IN PLACENTA, SIGNAL = 3.1; EXPRESSED IN BT474, SIGNAL = 1.9; EXPRESSED IN ADULT LIVER, SIGNAL =  88; EXPRESSED IN FETAL LIVER, SIGNAL = 1.3e+02; EXPRESSED IN BONE MARROW, SIGNAL = 6.6; EST_HUMAN HIT: AV652245.1, EVALUE 3.00e-11
MWEAQESGKPSAADPGWTPGCQRQLSLAG

SEQ ID NO: 37823 - protein, 22 aa, Homo sapiens
  MAP TO AC010812.2; EXPRESSED IN LUNG, SIGNAL = 3.5; EXPRESSED IN BONE MARROW, SIGNAL =   3; EXPRESSED IN HELA, SIGNAL = 4.1; EXPRESSED IN FETAL LIVER, SIGNAL = 3.2; EXPRESSED IN BRAIN, SIGNAL = 2.9; EXPRESSED IN PLACENTA, SIGNAL = 3.1; EXPRESSED IN HEART, SIGNAL =   3; EXPRESSED IN HBL100, SIGNAL = 3.6; EXPRESSED IN BT474, SIGNAL =   3; EXPRESSED IN ADULT LIVER, SIGNAL = 3.3
RPCLPPAPAALRAPALHPADHV

SEQ ID NO: 37824 - protein, 43 aa, Homo sapiens
  MAP TO AC010825.2; EXPRESSED IN PLACENTA, SIGNAL = 1.6; EXPRESSED IN HBL100, SIGNAL = 1.5; EXPRESSED IN HELA, SIGNAL = 1.6; EXPRESSED IN HEART, SIGNAL = 2.5; EXPRESSED IN BT474, SIGNAL = 1.5; EXPRESSED IN FETAL LIVER, SIGNAL = 1.7; EXPRESSED IN ADULT LIVER, SIGNAL = 1.5; EXPRESSED IN LUNG, SIGNAL = 1.8; EXPRESSED IN BONE MARROW, SIGNAL = 1.3; EXPRESSED IN BRAIN, SIGNAL = 1.2; EST_HUMAN HIT: AI752367.1, EVALUE 9.30e-01
AVRELKSTTQEEEGAVPGPLDKQVCLVRGLYLREQIEEKYVRP

SEQ ID NO: 37825 - protein, 377 aa, Homo sapiens
  MAP TO AC006059.3; EXPRESSED IN BRAIN, SIGNAL = 1.9; EXPRESSED IN HELA, SIGNAL = 1.3; EXPRESSED IN PLACENTA, SIGNAL = 2.1; EXPRESSED IN FETAL LIVER, SIGNAL = 1.3; EXPRESSED IN LUNG, SIGNAL = 2.2; EXPRESSED IN BONE MARROW, SIGNAL = 2.2; EXPRESSED IN HEART, SIGNAL = 1.1; EXPRESSED IN HBL100, SIGNAL = 1.9; EXPRESSED IN ADULT LIVER, SIGNAL = 1.1; EXPRESSED IN BT474, SIGNAL = 1.8; EST_HUMAN HIT: AU118822.1, EVALUE 1.00e-57; SWISSPROT HIT: P30414, EVALUE 1.00e-127
SRTASKSSSHSRSRSKSRSSSKSGHRKRASKSPRKTASQLSENKPVKTEPLRATMAQNENVVVQPVVAENIPVIPLSDSPPPSRWKPGQKPWKPSYERIQEMKAKTTHLLPIQSTYSLANIKETGSSSSYHKREKNSESDQSTYSKYSDRSSESSPRSRSRSSRSRSYSRSYTRSRSLASSHSRSRSPSSRSHSRNKYSDHSQCSRSSSYTSISSDDGRRAKRRLRSSGKKNSVSHKKHSSSSEKTLHSKYVKGRDRSSCVRKYSESRSSLDYSSDSEQSSVQATQSAQEKEKQGQMERTHNKQEKNRGEEKSKSERECPHSKKRTLKENLSDHLRNGSKPKRKNYAGSKWDSESNSERDVTKNSKNDSHPSSDKEE

SEQ ID NO: 37826 - protein, 267 aa, Homo sapiens
  MAP TO AC005829.1; EXPRESSED IN BT474, SIGNAL = 2.5; EXPRESSED IN ADULT LIVER, SIGNAL = 1.9; EXPRESSED IN BRAIN, SIGNAL =   2; EXPRESSED IN HELA, SIGNAL = 1.6; EXPRESSED IN PLACENTA, SIGNAL = 1.7; EXPRESSED IN FETAL LIVER, SIGNAL = 1.3; EXPRESSED IN LUNG, SIGNAL = 2.3; EXPRESSED IN BONE MARROW, SIGNAL = 2.9; EXPRESSED IN HEART, SIGNAL = 1.3; EXPRESSED IN HBL100, SIGNAL =   3; SWISSPROT HIT: Q02817, EVALUE 1.00e-03; EST_HUMAN HIT: BF057132.1, EVALUE 1.00e-58
PSVTVQLLDLGLTITPEPTTEVGHSTPPKRTIVSPKHPEVTLPHPDQVQTQHSHLTRATVQPLDLGFTITPKSMTEVEPSTALMTTAPPPGHPEVTLPPSDKGQAQHSHLTQATVQPLDLELTITTKPTTEVKPSPTTEETSTQPPDLGLAIIPEPTTETGHSTALEKTTAPRPDRVQTLHRSLTEVTGPPTELEPAQDSLVQSESYTQNKALTAPEEHKASTSTNICELCTCGDEMLSCIDLNPEQRLRQVPVPEPNTHNGTFTIL

SEQ ID NO: 37827 - protein, 190 aa, Homo sapiens
  MAP TO AC005962.1; EXPRESSED IN ADULT LIVER, SIGNAL = 1.5; EXPRESSED IN BRAIN, SIGNAL = 1.3; EXPRESSED IN HBL100, SIGNAL = 1.1; EXPRESSED IN HELA, SIGNAL = 0.99; EXPRESSED IN HEART, SIGNAL = 1.3; EXPRESSED IN BT474, SIGNAL = 1.1; EXPRESSED IN LUNG, SIGNAL = 0.96; EXPRESSED IN BONE MARROW, SIGNAL = 1.2; EST_HUMAN HIT: AI809240.1, EVALUE 3.00e-39; SWISSPROT HIT: P23275, EVALUE 5.00e-38
MAFDRLIAISRPLRYVTVMNTQLWVGLVVATWVGGFVHSIVQLALMLPLPFCGPNILDNFYCDVPQVLRLACTDTSLLEFLKISNSGLLDVVWFFLLLMSYLFILVMLRSHPGEARRKAASTCTTHIIVVSMIFVPSIYLYARPFTPFPMDKLVSIGHTVMTPMLNPMIYTLRNQDMQAAVRRLGRHRLV

SEQ ID NO: 37828 - protein, 22 aa, Homo sapiens
  MAP TO AC005962.1; EXPRESSED IN ADULT LIVER, SIGNAL = 1.5; EXPRESSED IN BRAIN, SIGNAL = 1.3; EXPRESSED IN HBL100, SIGNAL = 1.1; EXPRESSED IN HELA, SIGNAL = 0.99; EXPRESSED IN HEART, SIGNAL = 1.3; EXPRESSED IN BT474, SIGNAL = 1.1; EXPRESSED IN LUNG, SIGNAL = 0.96; EXPRESSED IN BONE MARROW, SIGNAL = 1.2
RGYQTLSSWGSRRLGSSSVSCF

SEQ ID NO: 37829 - protein, 58 aa, Homo sapiens
  MAP TO AF067844.1; EXPRESSED IN HEART, SIGNAL = 1.3; EXPRESSED IN FETAL LIVER, SIGNAL = 1.3; EXPRESSED IN ADULT LIVER, SIGNAL = 1.6; EXPRESSED IN BT474, SIGNAL = 1.6; EXPRESSED IN BRAIN, SIGNAL = 1.6; EXPRESSED IN BONE MARROW, SIGNAL = 1.9; EXPRESSED IN LUNG, SIGNAL = 1.2; EXPRESSED IN HELA, SIGNAL = 1.5; EXPRESSED IN PLACENTA, SIGNAL = 1.5; EXPRESSED IN HBL100, SIGNAL = 1.4; EST_HUMAN HIT: AA572972.1, EVALUE 4.70e-01; SWISSPROT HIT: P32480, EVALUE 3.40e+00
GHRLPLPSISKHHLKVKCCAWFGELQRTDMTPVPGDLKSQQEGKQPTHKKRTNIQCKV

SEQ ID NO: 37830 - protein, 21 aa, Homo sapiens
  MAP TO AF139813.1; EXPRESSED IN BRAIN, SIGNAL = 7.4; EXPRESSED IN BONE MARROW, SIGNAL = 8.9; EXPRESSED IN HELA, SIGNAL = 8.7; EXPRESSED IN HBL100, SIGNAL = 8.2; EXPRESSED IN HEART, SIGNAL = 7.1; EXPRESSED IN FETAL LIVER, SIGNAL = 7.7; EXPRESSED IN LUNG, SIGNAL = 8.5; EXPRESSED IN PLACENTA, SIGNAL =   8; EXPRESSED IN BT474, SIGNAL = 7.4; EXPRESSED IN ADULT LIVER, SIGNAL = 8.5; EST_HUMAN HIT: AV650201.1, EVALUE 2.10e+00
EVHSLCTFGTSLWTRGWGPLI

SEQ ID NO: 37831 - protein, 41 aa, Homo sapiens
  MAP TO AJ009611.1; EXPRESSED IN BONE MARROW, SIGNAL = 3.2; EXPRESSED IN LUNG, SIGNAL = 2.5; EXPRESSED IN HBL100, SIGNAL = 3.2; EXPRESSED IN HELA, SIGNAL = 2.9; EXPRESSED IN PLACENTA, SIGNAL = 5.3; EXPRESSED IN HEART, SIGNAL = 2.4; EXPRESSED IN FETAL LIVER, SIGNAL = 2.8; EXPRESSED IN BT474, SIGNAL = 2.2; EXPRESSED IN ADULT LIVER, SIGNAL = 2.3; EXPRESSED IN BRAIN, SIGNAL = 2.7; EST_HUMAN HIT: AW402840.1, EVALUE 4.00e-19; SWISSPROT HIT: P52888, EVALUE 3.00e-20
MEDGKLKVTLKYPHYFPLLKKCHVPETRRKVEEAFNCRCKE

SEQ ID NO: 37832 - protein, 23 aa, Homo sapiens
  MAP TO AJ009611.1; EXPRESSED IN BONE MARROW, SIGNAL = 3.2; EXPRESSED IN LUNG, SIGNAL = 2.5; EXPRESSED IN HBL100, SIGNAL = 3.2; EXPRESSED IN HELA, SIGNAL = 2.9; EXPRESSED IN PLACENTA, SIGNAL = 5.3; EXPRESSED IN HEART, SIGNAL = 2.4; EXPRESSED IN FETAL LIVER, SIGNAL = 2.8; EXPRESSED IN BT474, SIGNAL = 2.2; EXPRESSED IN ADULT LIVER, SIGNAL = 2.3; EXPRESSED IN BRAIN, SIGNAL = 2.7
GRQVEGHPQVPPLLPPPEEMPRA

SEQ ID NO: 37833 - protein, 36 aa, Homo sapiens
  MAP TO AC010183.6; EXPRESSED IN BT474, SIGNAL = 1.1; EXPRESSED IN FETAL LIVER, SIGNAL = 1.3; EXPRESSED IN ADULT LIVER, SIGNAL = 1.1; EXPRESSED IN BONE MARROW, SIGNAL = 0.94; EXPRESSED IN LUNG, SIGNAL = 1.4; EXPRESSED IN BRAIN, SIGNAL = 1.1; EXPRESSED IN PLACENTA, SIGNAL = 1.1; EXPRESSED IN HELA, SIGNAL = 1.1; EXPRESSED IN HEART, SIGNAL = 1.3; EST_HUMAN HIT: BF333236.1, EVALUE 2.00e-08
EWERVFSLAQSHADNLQLHEPDLQKGIKAVSQEDPQ

SEQ ID NO: 37834 - protein, 36 aa, Homo sapiens
  MAP TO AC010083.1; EXPRESSED IN LUNG, SIGNAL = 7.9; EXPRESSED IN ADULT LIVER, SIGNAL = 0.95; EXPRESSED IN HEART, SIGNAL = 0.89; SWISSPROT HIT: Q03333, EVALUE 9.00e-16; EST_HUMAN HIT: AA719772.1, EVALUE 1.00e-14
INTGQADGTPGLDLNVAEAWELGYTGKGVTIGIMDD

SEQ ID NO: 37835 - protein, 42 aa, Homo sapiens
  MAP TO AC007653.1; EXPRESSED IN ADULT LIVER, SIGNAL = 0.85; EXPRESSED IN HBL100, SIGNAL = 0.71; EXPRESSED IN FETAL LIVER, SIGNAL = 0.6; EXPRESSED IN HELA, SIGNAL = 0.71; EXPRESSED IN HEART, SIGNAL = 1.3; EST_HUMAN HIT: AA311884.1, EVALUE 2.00e-17; SWISSPROT HIT: Q92995, EVALUE 1.00e-18
SDVFRFLVEERIQCCQTRKVRYTERVDYLMQLPVAMEAATNK

SEQ ID NO: 37836 - protein, 42 aa, Homo sapiens
  MAP TO AC007653.1; EXPRESSED IN ADULT LIVER, SIGNAL = 0.85; EXPRESSED IN HBL100, SIGNAL = 0.71; EXPRESSED IN FETAL LIVER, SIGNAL = 0.6; EXPRESSED IN HELA, SIGNAL = 0.71; EXPRESSED IN HEART, SIGNAL = 1.3; EST_HUMAN HIT: AA311884.1, EVALUE 5.00e-20; SWISSPROT HIT: O09029, EVALUE 2.70e+00
KRCFSFFGGRTHSVLSDPESPLHGEGGLPDAVTCGHGGGNQQ

SEQ ID NO: 37837 - protein, 26 aa, Homo sapiens
  MAP TO AP000240.1; EXPRESSED IN PLACENTA, SIGNAL = 0.69; EXPRESSED IN HEART, SIGNAL = 0.88
ESVNGATGNHSNSAGKNRAINKMKKQ

SEQ ID NO: 37838 - protein, 101 aa, Homo sapiens
  MAP TO AP000311.1; EXPRESSED IN FETAL LIVER, SIGNAL = 0.79; EXPRESSED IN HEART, SIGNAL = 0.87; EXPRESSED IN PLACENTA, SIGNAL = 0.71; EXPRESSED IN BT474, SIGNAL = 0.62; EXPRESSED IN HELA, SIGNAL = 0.74; EXPRESSED IN BRAIN, SIGNAL = 0.83; EST_HUMAN HIT: BE538712.1, EVALUE 1.00e-24; SWISSPROT HIT: P34216, EVALUE 2.00e-04
GKSANYFVFVLVGVVVLERFFYGHSCSQAMLLVCRALADMNNDGRMDQVEFSIAMKLIKLKLQGYQLPSALPPVMKQQPVAISSAPAFGKSENELVSVFSC

SEQ ID NO: 37839 - protein, 20 aa, Homo sapiens
  MAP TO AC009507.1; EXPRESSED IN HEART, SIGNAL =   1; EXPRESSED IN FETAL LIVER, SIGNAL = 1.3
GAITYYTTCKLLSQWSKGKA

SEQ ID NO: 37840 - protein, 52 aa, Homo sapiens
  MAP TO AP000186.1; EXPRESSED IN PLACENTA, SIGNAL = 0.69; EXPRESSED IN FETAL LIVER, SIGNAL = 0.94; EXPRESSED IN LUNG, SIGNAL = 0.63; EXPRESSED IN ADULT LIVER, SIGNAL = 0.8; EXPRESSED IN HEART, SIGNAL = 0.85; SWISSPROT HIT: P49147, EVALUE 2.00e+00; EST_HUMAN HIT: BE841807.1, EVALUE 2.90e+00
HSKIKNIFSKDNLINISYIETHTHIYTRAFYKYIFYSTFRNGGNVTKQNIKK

SEQ ID NO: 37841 - protein, 63 aa, Homo sapiens
  MAP TO AC008176.1; EXPRESSED IN HELA, SIGNAL = 0.64; EXPRESSED IN HEART, SIGNAL = 0.84; EXPRESSED IN BONE MARROW, SIGNAL = 0.69; EXPRESSED IN ADULT LIVER, SIGNAL = 0.8; EXPRESSED IN BRAIN, SIGNAL = 0.74; EXPRESSED IN FETAL LIVER, SIGNAL = 0.65; EXPRESSED IN LUNG, SIGNAL = 0.83; SWISSPROT HIT: Q03610, EVALUE 8.30e-01; EST_HUMAN HIT: BE868881.1, EVALUE 7.00e-35
YKQHKTDLEAIPQQCPIDLPCQVTGCQCRAYLYVPLNGSQPIRCRCKHFADQHSAAPGFTCNT

SEQ ID NO: 37842 - protein, 30 aa, Homo sapiens
  MAP TO AC008176.1; EXPRESSED IN HELA, SIGNAL = 0.64; EXPRESSED IN HEART, SIGNAL = 0.84; EXPRESSED IN BONE MARROW, SIGNAL = 0.69; EXPRESSED IN ADULT LIVER, SIGNAL = 0.8; EXPRESSED IN BRAIN, SIGNAL = 0.74; EXPRESSED IN FETAL LIVER, SIGNAL = 0.65; EXPRESSED IN LUNG, SIGNAL = 0.83; EST_HUMAN HIT: H17755.1, EVALUE 6.00e-07
LSLSPFLGINNIKLTWKRFLSSAPLICPAK

SEQ ID NO: 37843 - protein, 70 aa, Homo sapiens; identical to SEQ ID NO: 35710
  MAP TO AL034380.22; EXPRESSED IN BRAIN, SIGNAL = 1.9; EXPRESSED IN BONE MARROW, SIGNAL = 1.7; EXPRESSED IN PLACENTA, SIGNAL = 2.5; EXPRESSED IN HELA, SIGNAL = 1.9; EXPRESSED IN HBL100, SIGNAL =   2; EXPRESSED IN FETAL LIVER, SIGNAL = 2.2; EXPRESSED IN LUNG, SIGNAL = 1.7; EXPRESSED IN HEART, SIGNAL = 1.6; EXPRESSED IN BT474, SIGNAL = 1.7; EXPRESSED IN ADULT LIVER, SIGNAL = 2.7; EST_HUMAN HIT: AW075970.1, EVALUE 2.00e-34; SWISSPROT HIT: Q03214, EVALUE 8.50e-01

SEQ ID NO: 37844 - protein, 43 aa, Homo sapiens
  MAP TO AL031665.18; EXPRESSED IN BT474, SIGNAL =   2; EXPRESSED IN BRAIN, SIGNAL = 1.9; EXPRESSED IN PLACENTA, SIGNAL = 2.4; EXPRESSED IN HELA, SIGNAL = 2.4; EXPRESSED IN HBL100, SIGNAL = 2.9; EXPRESSED IN ADULT LIVER, SIGNAL = 1.8; EXPRESSED IN FETAL LIVER, SIGNAL = 2.7; EXPRESSED IN LUNG, SIGNAL = 2.3; EXPRESSED IN BONE MARROW, SIGNAL = 2.4; EXPRESSED IN HEART, SIGNAL = 2.8; EST_HUMAN HIT: BF308748.1, EVALUE 3.00e-19
MAGLEVLFASAAPAITCRQDALVCFLHWEVVTHGYFGLGVGDQ

SEQ ID NO: 37845 - protein, 28 aa, Homo sapiens
  MAP TO AL031665.18; EXPRESSED IN BT474, SIGNAL =   2; EXPRESSED IN BRAIN, SIGNAL = 1.9; EXPRESSED IN PLACENTA, SIGNAL = 2.4; EXPRESSED IN HELA, SIGNAL = 2.4; EXPRESSED IN HBL100, SIGNAL = 2.9; EXPRESSED IN ADULT LIVER, SIGNAL = 1.8; EXPRESSED IN FETAL LIVER, SIGNAL = 2.7; EXPRESSED IN LUNG, SIGNAL = 2.3; EXPRESSED IN BONE MARROW, SIGNAL = 2.4; EXPRESSED IN HEART, SIGNAL = 2.8; EST_HUMAN HIT: AV709682.1, EVALUE 4.00e-03
GGPGGTVRIGSAGHHLQAGRARLLLALG

SEQ ID NO: 37846 - protein, 77 aa, Homo sapiens
  MAP TO AL035091.2; EXPRESSED IN FETAL LIVER, SIGNAL = 1.3; EXPRESSED IN HBL100, SIGNAL = 1.1; EXPRESSED IN HEART, SIGNAL = 1.2; EXPRESSED IN PLACENTA, SIGNAL = 1.4; EXPRESSED IN BT474, SIGNAL = 1.1; EXPRESSED IN ADULT LIVER, SIGNAL =   1; EXPRESSED IN BRAIN, SIGNAL = 1.2; EXPRESSED IN LUNG, SIGNAL = 1.4; EXPRESSED IN BONE MARROW, SIGNAL = 0.97; EXPRESSED IN HELA, SIGNAL = 1.1; EST_HUMAN HIT: AU141111.1, EVALUE 2.00e-21; SWISSPROT HIT: P28906, EVALUE 3.00e-22
SGFMSLDNNGTATPELPTQGTFSNVSTNVSYQETTTPSTLGSTSLHPVSQHGNEATTNITGKNSICVRSRRDAGDAW

SEQ ID NO: 37847 - protein, 97 aa, Homo sapiens
  MAP TO AC008277.1; EXPRESSED IN BONE MARROW, SIGNAL = 0.81; EXPRESSED IN FETAL LIVER, SIGNAL = 0.83; EXPRESSED IN HEART, SIGNAL = 0.95; EXPRESSED IN BRAIN, SIGNAL = 1.1; EXPRESSED IN PLACENTA, SIGNAL = 0.74; EXPRESSED IN BT474, SIGNAL = 1.1; EXPRESSED IN LUNG, SIGNAL = 0.89; SWISSPROT HIT: P16167, EVALUE 6.10e+00; EST_HUMAN HIT: AW754125.1, EVALUE 7.00e-25
SDSNSESDTEGSEEEDDDDKDQDESDSDTEGEKTSMKLNKTTSSVKSPSMSLTGHSTPRNLHIAKAPGSAPAALCSESQSPAFLGTSSSTLTSSPHS

SEQ ID NO: 37848 - protein, 28 aa, Homo sapiens
  MAP TO AC008277.1; EXPRESSED IN BONE MARROW, SIGNAL = 0.81; EXPRESSED IN FETAL LIVER, SIGNAL = 0.83; EXPRESSED IN HEART, SIGNAL = 0.95; EXPRESSED IN BRAIN, SIGNAL = 1.1; EXPRESSED IN PLACENTA, SIGNAL = 0.74; EXPRESSED IN BT474, SIGNAL = 1.1; EXPRESSED IN LUNG, SIGNAL = 0.89
IQKDQKKKMMMIKTKMNQIVILKERKLQ

SEQ ID NO: 37849 - protein, 67 aa, Homo sapiens
  MAP TO AL078591.17; EXPRESSED IN BT474, SIGNAL = 5.8; EXPRESSED IN ADULT LIVER, SIGNAL = 8.9; EXPRESSED IN BRAIN, SIGNAL = 4.9; EXPRESSED IN BONE MARROW, SIGNAL =   5; EXPRESSED IN PLACENTA, SIGNAL = 5.9; EXPRESSED IN HELA, SIGNAL =   5; EXPRESSED IN HBL100, SIGNAL = 5.1; EXPRESSED IN FETAL LIVER, SIGNAL = 5.1; EXPRESSED IN LUNG, SIGNAL = 5.4; EXPRESSED IN HEART, SIGNAL = 5.1; EST_HUMAN HIT: AU138099.1, EVALUE 1.00e-31; SWISSPROT HIT: P33694, EVALUE 2.50e+00
QIYSEMIHNLLRPVLQSKDCNLVRYNVINALPNTADSLIGRAAHIAVLDSEIFLEKFFLVAALKYFQ

SEQ ID NO: 37850 - protein, 20 aa, Homo sapiens
  MAP TO AL078591.17; EXPRESSED IN BT474, SIGNAL = 5.8; EXPRESSED IN ADULT LIVER, SIGNAL = 8.9; EXPRESSED IN BRAIN, SIGNAL = 4.9; EXPRESSED IN BONE MARROW, SIGNAL =   5; EXPRESSED IN PLACENTA, SIGNAL = 5.9; EXPRESSED IN HELA, SIGNAL =   5; EXPRESSED IN HBL100, SIGNAL = 5.1; EXPRESSED IN FETAL LIVER, SIGNAL = 5.1; EXPRESSED IN LUNG, SIGNAL = 5.4; EXPRESSED IN HEART, SIGNAL = 5.1; EST_HUMAN HIT: AA370782.1, EVALUE 6.00e-04
TDLFRNDPQLASTRSAKQGL

SEQ ID NO: 37851 - protein, 57 aa, Homo sapiens
  MAP TO AC008177.1; EXPRESSED IN LUNG, SIGNAL = 0.59; EXPRESSED IN HEART, SIGNAL = 0.79; EXPRESSED IN FETAL LIVER, SIGNAL = 0.75; EXPRESSED IN HELA, SIGNAL = 0.84; EXPRESSED IN ADULT LIVER, SIGNAL = 0.67; SWISSPROT HIT: P06795, EVALUE 3.00e-13
DINKINDAIADQMALFIQRMTSTICGFLLGFFRGWKLTLVIISVSPLIGIGAATIGL

SEQ ID NO: 37852 - protein, 17 aa, Homo sapiens
  MAP TO AL050342.36; EXPRESSED IN PLACENTA, SIGNAL =   4; EXPRESSED IN BT474, SIGNAL = 3.6; EXPRESSED IN FETAL LIVER, SIGNAL = 4.7; EXPRESSED IN LUNG, SIGNAL = 5.8; EXPRESSED IN HEART, SIGNAL = 3.8; EXPRESSED IN HELA, SIGNAL = 4.6; EXPRESSED IN HBL100, SIGNAL = 4.7; EXPRESSED IN ADULT LIVER, SIGNAL = 4.6; EXPRESSED IN BRAIN, SIGNAL =   4; EXPRESSED IN BONE MARROW, SIGNAL = 4.7
VCEQPHKLLHPPSYDFS

SEQ ID NO: 37853 - protein, 23 aa, Homo sapiens
  MAP TO AL035660.13; EXPRESSED IN ADULT LIVER, SIGNAL = 1.8; EXPRESSED IN BRAIN, SIGNAL = 1.7; EXPRESSED IN BONE MARROW, SIGNAL = 1.7; EXPRESSED IN PLACENTA, SIGNAL = 2.2; EXPRESSED IN HELA, SIGNAL = 1.6; EXPRESSED IN HBL100, SIGNAL = 1.7; EXPRESSED IN BT474, SIGNAL = 1.8; EXPRESSED IN FETAL LIVER, SIGNAL = 1.8; EXPRESSED IN LUNG, SIGNAL = 1.9; EXPRESSED IN HEART, SIGNAL = 1.9; EST_HUMAN HIT: AA058575.1, EVALUE 5.60e+00
RTTTRSHFTCTMIAIILKKKNLK

SEQ ID NO: 37854 - protein, 58 aa, Homo sapiens
  MAP TO AL050349.9; EXPRESSED IN HBL100, SIGNAL = 2.7; EXPRESSED IN PLACENTA, SIGNAL = 1.6; EXPRESSED IN BT474, SIGNAL =   1; EXPRESSED IN FETAL LIVER, SIGNAL = 1.6; EXPRESSED IN BRAIN, SIGNAL = 1.9; EXPRESSED IN LUNG, SIGNAL = 2.9; EXPRESSED IN BONE MARROW, SIGNAL = 1.4; EXPRESSED IN HEART, SIGNAL = 1.6; EXPRESSED IN HELA, SIGNAL = 1.7; SWISSPROT HIT: P39929, EVALUE 4.00e-07; EST_HUMAN HIT: BF002690.1, EVALUE 8.00e-26
ALQALKRKKRYEKQLAQIDGTLSTIEFQREALENANTNTEVLKNMGYAAKAMKAAHDN

SEQ ID NO: 37855 - protein, 112 aa, Homo sapiens
  MAP TO AL035669.28; EXPRESSED IN BONE MARROW, SIGNAL = 1.6; EXPRESSED IN LUNG, SIGNAL = 1.1; EXPRESSED IN PLACENTA, SIGNAL = 1.3; EXPRESSED IN HBL100, SIGNAL = 1.2; EXPRESSED IN HELA, SIGNAL = 1.2; EXPRESSED IN HEART, SIGNAL = 1.1; EXPRESSED IN BT474, SIGNAL = 1.3; EXPRESSED IN FETAL LIVER, SIGNAL = 1.3; EXPRESSED IN ADULT LIVER, SIGNAL = 1.7; EXPRESSED IN BRAIN, SIGNAL = 1.4; EST_HUMAN HIT: BE671155.1, EVALUE 9.90e-01
EQSMVGAVAVARPANLGMVRTQVPMAILPQGQVDSVVVTCPVGGPAAPSTGHLGDRMKGLQVPWWMGKVVVRQRVGGWVGWLQVAGEGGRMSAVSFCLRDTQESSLKALLTF

SEQ ID NO: 37856 - protein, 48 aa, Homo sapiens
  MAP TO AL079338.13; EXPRESSED IN BRAIN, SIGNAL = 2.2; EXPRESSED IN BONE MARROW, SIGNAL = 2.5; EXPRESSED IN LUNG, SIGNAL = 2.3; EXPRESSED IN PLACENTA, SIGNAL = 2.2; EXPRESSED IN HBL100, SIGNAL = 2.1; EXPRESSED IN HELA, SIGNAL =   2; EXPRESSED IN HEART, SIGNAL =   2; EXPRESSED IN FETAL LIVER, SIGNAL = 1.5; EXPRESSED IN BT474, SIGNAL = 2.5; EXPRESSED IN ADULT LIVER, SIGNAL = 2.8; EST_HUMAN HIT: BF530640.1, EVALUE 1.50e-01; SWISSPROT HIT: P56260, EVALUE 1.20e+00
RWHAMRFPSHSSSYSVIMILPSLGNGIYSYSLSNTGLSCTGLLICGFF

SEQ ID NO: 37857 - protein, 46 aa, Homo sapiens
  MAP TO AL033397.7; EXPRESSED IN HELA, SIGNAL = 0.78; EXPRESSED IN BRAIN, SIGNAL = 0.86; EXPRESSED IN HEART, SIGNAL = 0.89; EXPRESSED IN PLACENTA, SIGNAL = 0.7; EXPRESSED IN ADULT LIVER, SIGNAL = 0.87; EXPRESSED IN LUNG, SIGNAL =  33; EXPRESSED IN FETAL LIVER, SIGNAL = 0.71; EXPRESSED IN BONE MARROW, SIGNAL = 0.81; EXPRESSED IN BT474, SIGNAL = 0.72
LIKSDSLIKPNGKKTETTTKTETNNNKKAVKPKNNGTTCKITECSN

SEQ ID NO: 37858 - protein, 110 aa, Homo sapiens
  MAP TO AC007906.2; EXPRESSED IN LUNG, SIGNAL =  23; EXPRESSED IN HELA, SIGNAL = 0.86; EXPRESSED IN BRAIN, SIGNAL = 0.84; EXPRESSED IN HEART, SIGNAL = 0.92; EXPRESSED IN PLACENTA, SIGNAL = 0.82; EXPRESSED IN BT474, SIGNAL = 0.83; EXPRESSED IN BONE MARROW, SIGNAL = 1.1; EXPRESSED IN HBL100, SIGNAL = 0.75; EXPRESSED IN FETAL LIVER, SIGNAL = 0.83; EXPRESSED IN ADULT LIVER, SIGNAL = 0.86; SWISSPROT HIT: P18449, EVALUE 2.80e-01; EST_HUMAN HIT: BE882430.1, EVALUE 1.00e-35
PPSSKKSDGSGTYTKLQNTQVRVMSEKKQRKKVESESKQEKANRIISEAIAKAKERGERNIPRVMSPENFPTASVEGKEEKKGRRMKSKPKDKDSKKTKTCSKLKEKTKI

SEQ ID NO: 37859 - protein, 20 aa, Homo sapiens
  MAP TO AC007906.2; EXPRESSED IN LUNG, SIGNAL =  23; EXPRESSED IN HELA, SIGNAL = 0.86; EXPRESSED IN BRAIN, SIGNAL = 0.84; EXPRESSED IN HEART, SIGNAL = 0.92; EXPRESSED IN PLACENTA, SIGNAL = 0.82; EXPRESSED IN BT474, SIGNAL = 0.83; EXPRESSED IN BONE MARROW, SIGNAL = 1.1; EXPRESSED IN HBL100, SIGNAL = 0.75; EXPRESSED IN FETAL LIVER, SIGNAL = 0.83; EXPRESSED IN ADULT LIVER, SIGNAL = 0.86; EST_HUMAN HIT: AA883995.1, EVALUE 2.00e-04
LHLPRRAMVLGHILSCRIPR

SEQ ID NO: 37860 - protein, 34 aa, Homo sapiens
  MAP TO AL080274.13; EXPRESSED IN HBL100, SIGNAL = 2.4; EXPRESSED IN HEART, SIGNAL = 2.4; EXPRESSED IN ADULT LIVER, SIGNAL = 3.2; EXPRESSED IN LUNG, SIGNAL = 2.4; EXPRESSED IN BRAIN, SIGNAL = 2.4; EXPRESSED IN BONE MARROW, SIGNAL = 2.7; EXPRESSED IN PLACENTA, SIGNAL = 2.5; EXPRESSED IN HELA, SIGNAL = 2.3; EXPRESSED IN BT474, SIGNAL = 2.5; EXPRESSED IN FETAL LIVER, SIGNAL = 2.6
TMVSLAPALTLPGSFIELQNLRLLKICRIRISGG

SEQ ID NO: 37861 - protein, 81 aa, Homo sapiens
  MAP TO AL078600.14; EXPRESSED IN BONE MARROW, SIGNAL = 3.7; EXPRESSED IN HBL100, SIGNAL = 3.4; EXPRESSED IN ADULT LIVER, SIGNAL = 3.8; EXPRESSED IN LUNG, SIGNAL = 3.9; EXPRESSED IN BRAIN, SIGNAL = 3.4; EXPRESSED IN PLACENTA, SIGNAL = 3.8; EXPRESSED IN HEART, SIGNAL = 2.9; EXPRESSED IN HELA, SIGNAL = 3.7; EXPRESSED IN BT474, SIGNAL = 3.4; EXPRESSED IN FETAL LIVER, SIGNAL = 3.4; SWISSPROT HIT: P15276, EVALUE 9.10e-01
DSTRLKIHNWCVPKMYFLIIILVTEIAFTEHLHIRKYVKHFSAHPLQQLCKEGSLPRESPIAQMKKSRGKVIFPTSDLGGG

SEQ ID NO: 37862 - protein, 74 aa, Homo sapiens
  MAP TO AL109615.9; EXPRESSED IN PLACENTA, SIGNAL = 2.3; EXPRESSED IN HELA, SIGNAL = 6.6; EXPRESSED IN BONE MARROW, SIGNAL = 2.3; EXPRESSED IN HEART, SIGNAL = 3.6; EXPRESSED IN HBL100, SIGNAL = 6.5; EXPRESSED IN BT474, SIGNAL = 3.3; EXPRESSED IN ADULT LIVER, SIGNAL = 1.1; EXPRESSED IN FETAL LIVER, SIGNAL = 4.3; EXPRESSED IN BRAIN, SIGNAL = 1.6; EXPRESSED IN LUNG, SIGNAL = 6.1; EST_HUMAN HIT: AW827273.1, EVALUE 5.00e-14; SWISSPROT HIT: Q95281, EVALUE 7.00e-14
VKNHNTHNQSPKWHRNGIRKPRSQRYKCLNGVDLKFLRSMHLAKKHNKKGLKKMQANNAEAMRARAEAIKVLES

SEQ ID NO: 37863 - protein, 33 aa, Homo sapiens
  MAP TO AL035468.3; EXPRESSED IN BRAIN, SIGNAL = 2.7; EXPRESSED IN BONE MARROW, SIGNAL =   3; EXPRESSED IN ADULT LIVER, SIGNAL = 2.9; EXPRESSED IN LUNG, SIGNAL = 2.8; EXPRESSED IN PLACENTA, SIGNAL = 2.7; EXPRESSED IN HEART, SIGNAL = 2.4; EXPRESSED IN HELA, SIGNAL = 3.7; EXPRESSED IN HBL100, SIGNAL = 3.4; EXPRESSED IN BT474, SIGNAL = 3.2; EXPRESSED IN FETAL LIVER, SIGNAL = 2.5
NMHMVLSYYYGHLVNFIIIIYGPGILEVSMFLQ

SEQ ID NO: 37864 - protein, 41 aa, Homo sapiens
  MAP TO AL117344.7; EXPRESSED IN BRAIN, SIGNAL = 3.3; EXPRESSED IN PLACENTA, SIGNAL = 4.2; EXPRESSED IN HBL100, SIGNAL = 5.1; EXPRESSED IN HEART, SIGNAL = 4.5; EXPRESSED IN HELA, SIGNAL = 4.5; EXPRESSED IN BT474, SIGNAL = 4.4; EXPRESSED IN FETAL LIVER, SIGNAL =   5; EXPRESSED IN ADULT LIVER, SIGNAL = 5.3; EXPRESSED IN BONE MARROW, SIGNAL = 3.9; EXPRESSED IN LUNG, SIGNAL = 4.1; SWISSPROT HIT: P38159, EVALUE 6.10e+00; EST_HUMAN HIT: BF221718.1, EVALUE 2.00e-05
MRYRASYHGGPPKSDPLGQWSPTFLAPRTSFVENNFSTNWR

SEQ ID NO: 37865 - protein, 27 aa, Homo sapiens
  MAP TO AL117344.7; EXPRESSED IN BRAIN, SIGNAL = 3.3; EXPRESSED IN PLACENTA, SIGNAL = 4.2; EXPRESSED IN HBL100, SIGNAL = 5.1; EXPRESSED IN HEART, SIGNAL = 4.5; EXPRESSED IN HELA, SIGNAL = 4.5; EXPRESSED IN BT474, SIGNAL = 4.4; EXPRESSED IN FETAL LIVER, SIGNAL =   5; EXPRESSED IN ADULT LIVER, SIGNAL = 5.3; EXPRESSED IN BONE MARROW, SIGNAL = 3.9; EXPRESSED IN LUNG, SIGNAL = 4.1
ALSSKLPWWATEIGPSRAVVPNFFGTK

SEQ ID NO: 37866 - protein, 34 aa, Homo sapiens
  MAP TO AC007277.2; EXPRESSED IN ADULT LIVER, SIGNAL = 0.84; EXPRESSED IN HELA, SIGNAL = 0.78; EXPRESSED IN LUNG, SIGNAL = 0.64; EXPRESSED IN HEART, SIGNAL = 0.84
PLGCQCAEMFWQLGTLLGVRVLMSGFVLLNTIVV

SEQ ID NO: 37867 - protein, 29 aa, Homo sapiens
  MAP TO AL035703.19; EXPRESSED IN BT474, SIGNAL = 2.7; EXPRESSED IN BRAIN, SIGNAL = 2.9; EXPRESSED IN BONE MARROW, SIGNAL = 2.5; EXPRESSED IN HEART, SIGNAL = 2.4; EXPRESSED IN ADULT LIVER, SIGNAL = 2.4; EXPRESSED IN FETAL LIVER, SIGNAL = 2.5; EXPRESSED IN LUNG, SIGNAL = 2.5; EXPRESSED IN PLACENTA, SIGNAL = 2.7; EXPRESSED IN HELA, SIGNAL = 2.5; EXPRESSED IN HBL100, SIGNAL = 3.5
MPWLHPRQCKDSMTSAAEQEHGDKDQGHP

SEQ ID NO: 37868 - protein, 23 aa, Homo sapiens
  MAP TO AP000557.2; EXPRESSED IN PLACENTA, SIGNAL = 1.2; EXPRESSED IN HBL100, SIGNAL = 1.8; EXPRESSED IN HEART, SIGNAL = 1.3; EXPRESSED IN BT474, SIGNAL = 1.6; EXPRESSED IN FETAL LIVER, SIGNAL = 1.9; EXPRESSED IN BONE MARROW, SIGNAL = 2.2; EXPRESSED IN LUNG, SIGNAL = 1.2; EXPRESSED IN BRAIN, SIGNAL = 2.6; SWISSPROT HIT: P42356, EVALUE 4.00e-06; EST_HUMAN HIT: BE932859.1, EVALUE 6.00e-05
MSLNIGRAKGSMNRHVAAIGPRF

SEQ ID NO: 37869 - protein, 36 aa, Homo sapiens
  MAP TO AP000557.2; EXPRESSED IN PLACENTA, SIGNAL = 1.2; EXPRESSED IN HBL100, SIGNAL = 1.8; EXPRESSED IN HEART, SIGNAL = 1.3; EXPRESSED IN BT474, SIGNAL = 1.6; EXPRESSED IN FETAL LIVER, SIGNAL = 1.9; EXPRESSED IN BONE MARROW, SIGNAL = 2.2; EXPRESSED IN LUNG, SIGNAL = 1.2; EXPRESSED IN BRAIN, SIGNAL = 2.6; SWISSPROT HIT: P41344, EVALUE 6.20e+00; EST_HUMAN HIT: BE883476.1, EVALUE 5.00e-12
VFLFSLSSWCSGLRSPSTAALTKWRSSPACCSAPCP

SEQ ID NO: 37870 - protein, 39 aa, Homo sapiens
  MAP TO AL035705.16; EXPRESSED IN HBL100, SIGNAL =   3; EXPRESSED IN LUNG, SIGNAL = 2.6; EXPRESSED IN BRAIN, SIGNAL = 2.9; EXPRESSED IN BONE MARROW, SIGNAL = 2.2; EXPRESSED IN PLACENTA, SIGNAL = 3.5; EXPRESSED IN HEART, SIGNAL =   3; EXPRESSED IN HELA, SIGNAL = 2.7; EXPRESSED IN BT474, SIGNAL = 2.8; EXPRESSED IN ADULT LIVER, SIGNAL = 1.8; EXPRESSED IN FETAL LIVER, SIGNAL = 2.4; EST_HUMAN HIT: BE719986.1, EVALUE 6.00e-14; SWISSPROT HIT: O15117, EVALUE 1.00e-04
CSNNSRNGIFDLPISPGEELEVIDTTEQNLVICRNSKGK

SEQ ID NO: 37871 - protein, 31 aa, Homo sapiens
  MAP TO D87009.1; EXPRESSED IN BT474, SIGNAL = 1.4; EXPRESSED IN BONE MARROW, SIGNAL = 2.8; EXPRESSED IN BRAIN, SIGNAL = 1.2; EXPRESSED IN LUNG, SIGNAL = 1.7; EXPRESSED IN HBL100, SIGNAL = 1.2; EXPRESSED IN PLACENTA, SIGNAL = 1.1; EXPRESSED IN HEART, SIGNAL = 1.1; EXPRESSED IN FETAL LIVER, SIGNAL = 0.98; SWISSPROT HIT: P04211, EVALUE 1.00e-07; EST_HUMAN HIT: AW405111.1, EVALUE 4.00e-09
STGAVNGGHYPYWFQQKLGQAPRTLIYHASN

SEQ ID NO: 37872 - protein, 31 aa, Homo sapiens
  MAP TO D87009.1; EXPRESSED IN BT474, SIGNAL = 1.4; EXPRESSED IN BONE MARROW, SIGNAL = 2.8; EXPRESSED IN BRAIN, SIGNAL = 1.2; EXPRESSED IN LUNG, SIGNAL = 1.7; EXPRESSED IN HBL100, SIGNAL = 1.2; EXPRESSED IN PLACENTA, SIGNAL = 1.1; EXPRESSED IN HEART, SIGNAL = 1.1; EXPRESSED IN FETAL LIVER, SIGNAL = 0.98; EST_HUMAN HIT: AW407157.1, EVALUE 2.00e-06; SWISSPROT HIT: P16229, EVALUE 8.30e+00
VACMINQCPGGLAKLLLEPVRIMTPIDCSSA

SEQ ID NO: 37873 - protein, 97 aa, Homo sapiens
  MAP TO AL109627.12; EXPRESSED IN BT474, SIGNAL = 4.3; EXPRESSED IN FETAL LIVER, SIGNAL = 5.1; EXPRESSED IN ADULT LIVER, SIGNAL = 5.6; EXPRESSED IN BONE MARROW, SIGNAL =   5; EXPRESSED IN LUNG, SIGNAL = 5.4; EXPRESSED IN BRAIN, SIGNAL = 4.2; EXPRESSED IN PLACENTA, SIGNAL =   5; EXPRESSED IN HBL100, SIGNAL = 4.7; EXPRESSED IN HELA, SIGNAL = 4.8; EXPRESSED IN HEART, SIGNAL = 4.3; EST_HUMAN HIT: AU120578.1, EVALUE 2.00e-03; SWISSPROT HIT: O88307, EVALUE 4.60e-01
SCLFDHPGTVFFSIFMSFWGHGLPGALEAGSATLAHHWDCSDFQDQEAMPSSAPHHWDCSDFQDQEVMPSSALHHWDCSDFQDQEVMPSSALQATTP

SEQ ID NO: 37874 - protein, 49 aa, Homo sapiens
  MAP TO AC010787.2; EXPRESSED IN PLACENTA, SIGNAL =   2; EXPRESSED IN HELA, SIGNAL = 1.8; EXPRESSED IN HBL100, SIGNAL = 1.6; EXPRESSED IN HEART, SIGNAL = 1.7; EXPRESSED IN FETAL LIVER, SIGNAL = 2.1; EXPRESSED IN BT474, SIGNAL = 3.1; EXPRESSED IN ADULT LIVER, SIGNAL = 2.5; EXPRESSED IN BONE MARROW, SIGNAL = 1.8; EXPRESSED IN LUNG, SIGNAL = 1.8; EXPRESSED IN BRAIN, SIGNAL = 1.5; EST_HUMAN HIT: BF237439.1, EVALUE 2.00e-09; SWISSPROT HIT: Q60649, EVALUE 1.00e-07
LLSEGADVKPYTENIPLSCFRLLSEGADVNAKHRLGWTALMVAAINRNN

SEQ ID NO: 37875 - protein, 42 aa, Homo sapiens
  MAP TO AC010787.2; EXPRESSED IN PLACENTA, SIGNAL =   2; EXPRESSED IN HELA, SIGNAL = 1.8; EXPRESSED IN HBL100, SIGNAL = 1.6; EXPRESSED IN HEART, SIGNAL = 1.7; EXPRESSED IN FETAL LIVER, SIGNAL = 2.1; EXPRESSED IN BT474, SIGNAL = 3.1; EXPRESSED IN ADULT LIVER, SIGNAL = 2.5; EXPRESSED IN BONE MARROW, SIGNAL = 1.8; EXPRESSED IN LUNG, SIGNAL = 1.8; EXPRESSED IN BRAIN, SIGNAL = 1.5; EST_HUMAN HIT: BE886629.1, EVALUE 2.00e-07
CCQKVQMSSHTLKIFLCLVLGCCQKVQMSMQSTDLAGQHSWW

SEQ ID NO: 37876 - protein, 29 aa, Homo sapiens
  MAP TO AC010809.2; EXPRESSED IN BT474, SIGNAL =   5; EXPRESSED IN ADULT LIVER, SIGNAL = 6.9; EXPRESSED IN BRAIN, SIGNAL =   6; EXPRESSED IN BONE MARROW, SIGNAL = 5.3; EXPRESSED IN LUNG, SIGNAL = 6.6; EXPRESSED IN PLACENTA, SIGNAL = 6.1; EXPRESSED IN HBL100, SIGNAL = 5.6; EXPRESSED IN HELA, SIGNAL = 6.2; EXPRESSED IN HEART, SIGNAL = 5.4; EXPRESSED IN FETAL LIVER, SIGNAL = 6.2; SWISSPROT HIT: P30957, EVALUE 8.00e-11; EST_HUMAN HIT: T09039.1, EVALUE 1.00e-08
LEFDGLYITEQPSEDDIKGQWDRLVINTP

SEQ ID NO: 37877 - protein, 27 aa, Homo sapiens
  MAP TO AL109752.7; EXPRESSED IN LUNG, SIGNAL =  26; EXPRESSED IN PLACENTA, SIGNAL =  22; EXPRESSED IN BRAIN, SIGNAL =  13; EXPRESSED IN BONE MARROW, SIGNAL =  18; EXPRESSED IN HEART, SIGNAL =  13; EXPRESSED IN HELA, SIGNAL =  31; EXPRESSED IN HBL100, SIGNAL =  35; EXPRESSED IN ADULT LIVER, SIGNAL = 4.6; EXPRESSED IN FETAL LIVER, SIGNAL =  29; EXPRESSED IN BT474, SIGNAL =  26; EST_HUMAN HIT: AW264192.1, EVALUE 2.00e-07
NQCWLYSCTGLPHGSHCMQVCCTEGKD

SEQ ID NO: 37878 - protein, 58 aa, Homo sapiens
  MAP TO AC011897.2; EXPRESSED IN FETAL LIVER, SIGNAL =   4; EXPRESSED IN BT474, SIGNAL = 3.8; EXPRESSED IN ADULT LIVER, SIGNAL = 4.1; EXPRESSED IN BRAIN, SIGNAL = 3.5; EXPRESSED IN BONE MARROW, SIGNAL = 3.6; EXPRESSED IN LUNG, SIGNAL = 4.4; EXPRESSED IN PLACENTA, SIGNAL = 3.8; EXPRESSED IN HBL100, SIGNAL = 3.8; EXPRESSED IN HELA, SIGNAL = 4.1; EXPRESSED IN HEART, SIGNAL = 3.1; SWISSPROT HIT: P20374, EVALUE 2.60e+00
CLKSPGSFVANGLTYCTSLGGHPWMTMFTTIYPLKTCGSLSASPPPFLPSFMMISKSK

SEQ ID NO: 37879 - protein, 38 aa, Homo sapiens
  MAP TO AC011242.2; EXPRESSED IN HEART, SIGNAL = 2.2; EXPRESSED IN BT474, SIGNAL =   2; EXPRESSED IN FETAL LIVER, SIGNAL = 2.8; EXPRESSED IN ADULT LIVER, SIGNAL = 2.6; EXPRESSED IN BRAIN, SIGNAL =   2; EXPRESSED IN BONE MARROW, SIGNAL = 2.3; EXPRESSED IN LUNG, SIGNAL = 2.7; EXPRESSED IN HBL100, SIGNAL = 2.2; EXPRESSED IN PLACENTA, SIGNAL = 2.3; EXPRESSED IN HELA, SIGNAL = 2.5
MVQTIHVSFNTRKCEKYKLPDLRDMQRLQSNGKEQKKT

SEQ ID NO: 37880 - protein, 61 aa, Homo sapiens
  MAP TO AC012002.2; EXPRESSED IN HELA, SIGNAL = 1.2; EXPRESSED IN HEART, SIGNAL =   1; EXPRESSED IN FETAL LIVER, SIGNAL = 1.1; EXPRESSED IN BT474, SIGNAL = 0.96; EXPRESSED IN BONE MARROW, SIGNAL = 0.92; EXPRESSED IN LUNG, SIGNAL = 1.5; EST_HUMAN HIT: BF214691.1, EVALUE 4.60e+00
AVSGTGILGVLEADCREALPQRSHVVGPWWDVLAPGGLEAPAGGQLGPVFLEEAVLPCGYL

SEQ ID NO: 37881 - protein, 49 aa, Homo sapiens
  MAP TO AC012002.2; EXPRESSED IN HELA, SIGNAL = 1.2; EXPRESSED IN HEART, SIGNAL =   1; EXPRESSED IN FETAL LIVER, SIGNAL = 1.1; EXPRESSED IN BT474, SIGNAL = 0.96; EXPRESSED IN BONE MARROW, SIGNAL = 0.92; EXPRESSED IN LUNG, SIGNAL = 1.5; SWISSPROT HIT: O83653, EVALUE 1.20e+00; EST_HUMAN HIT: BF528354.1, EVALUE 2.60e-01
QCLEQGFWVCWRLTVGKPYPRGPMWLAPGGMSWHLEAWKPPRVGSWGRC

SEQ ID NO: 37882 - protein, 49 aa, Homo sapiens
  MAP TO AC011186.2; EXPRESSED IN PLACENTA, SIGNAL = 1.5; EXPRESSED IN HELA, SIGNAL = 1.3; EXPRESSED IN HEART, SIGNAL = 1.5; EXPRESSED IN LUNG, SIGNAL = 1.4; EXPRESSED IN BRAIN, SIGNAL = 1.3; EXPRESSED IN HBL100, SIGNAL = 1.3; EXPRESSED IN BT474, SIGNAL = 1.3; EXPRESSED IN ADULT LIVER, SIGNAL = 1.4; EXPRESSED IN FETAL LIVER, SIGNAL = 1.5; EXPRESSED IN BONE MARROW, SIGNAL = 1.2
NHHHHHHHHHHHHHHRHHHHHHHHHHHHRHHHHHHHHHHHHHLPLKFTV

SEQ ID NO: 37883 - protein, 166 aa, Homo sapiens
  MAP TO AC011232.3; EXPRESSED IN LUNG, SIGNAL = 1.8; EXPRESSED IN BONE MARROW, SIGNAL = 1.5; EXPRESSED IN HELA, SIGNAL =   2; EXPRESSED IN FETAL LIVER, SIGNAL = 1.6; EXPRESSED IN BRAIN, SIGNAL = 1.9; EXPRESSED IN PLACENTA, SIGNAL = 1.3; EXPRESSED IN HEART, SIGNAL = 1.8; EXPRESSED IN HBL100, SIGNAL = 1.6; EXPRESSED IN BT474, SIGNAL = 1.7; EXPRESSED IN ADULT LIVER, SIGNAL = 1.5; EST_HUMAN HIT: AW444637.1, EVALUE 1.00e-76; SWISSPROT HIT: Q9ZHB3, EVALUE 2.80e+00
AGSVHVRIRRDANEQMVLAHVTNRLYTLVSTLTVQIFKDDWIRPALLSGPVAANVLNFSDHHVIPMPLLKGTDDLNPVTSTPAKPSSPPPEFSFNTPGKNVNPVILLNTQTRPYGFGLNHGHTPYSSMLNQGLGVPGIGATQGLRTGFTNIPSRYGTNNRIGQPRP

SEQ ID NO: 37884 - protein, 83 aa, Homo sapiens
  MAP TO AH008338.1; EXPRESSED IN PLACENTA, SIGNAL = 1.1; EXPRESSED IN HELA, SIGNAL = 1.1; EXPRESSED IN HBL100, SIGNAL = 0.98; EXPRESSED IN HEART, SIGNAL = 0.96; EXPRESSED IN FETAL LIVER, SIGNAL =   1; EXPRESSED IN ADULT LIVER, SIGNAL =   1; EXPRESSED IN BONE MARROW, SIGNAL = 1.1; EXPRESSED IN LUNG, SIGNAL = 1.2; EST_HUMAN HIT: AW452590.1, EVALUE 2.00e-44; SWISSPROT HIT: P12107, EVALUE 3.00e-45
GPPGEVIQPLPILSSKKTRRHTEGMQADADDNILDYSDGMEEIFGSLNSLKQDIEHMKFPMGTQTNPARTCKDLQLSHPDFPD

SEQ ID NO: 37885 - protein, 49 aa, Homo sapiens
  MAP TO AH008338.1; EXPRESSED IN PLACENTA, SIGNAL = 1.1; EXPRESSED IN HELA, SIGNAL = 1.1; EXPRESSED IN HBL100, SIGNAL = 0.98; EXPRESSED IN HEART, SIGNAL = 0.96; EXPRESSED IN FETAL LIVER, SIGNAL =   1; EXPRESSED IN ADULT LIVER, SIGNAL =   1; EXPRESSED IN BONE MARROW, SIGNAL = 1.1; EXPRESSED IN LUNG, SIGNAL = 1.2; EST_HUMAN HIT: AA327960.1, EVALUE 1.00e-22
VHLVKSFSLYQSCPPKKREDILKACKQMQMIIFLITRMEWKKYLVPSIP

SEQ ID NO: 37886 - protein, 36 aa, Homo sapiens
  MAP TO AC011998.2; EXPRESSED IN PLACENTA, SIGNAL = 1.3; EXPRESSED IN HELA, SIGNAL = 2.2; EXPRESSED IN HEART, SIGNAL = 1.4; EXPRESSED IN LUNG, SIGNAL =   2; EXPRESSED IN BRAIN, SIGNAL = 2.1; EXPRESSED IN HBL100, SIGNAL = 2.2; EXPRESSED IN BT474, SIGNAL =   2; EXPRESSED IN ADULT LIVER, SIGNAL = 1.2; EXPRESSED IN FETAL LIVER, SIGNAL = 1.6; EXPRESSED IN BONE MARROW, SIGNAL = 1.2; SWISSPROT HIT: P16100, EVALUE 2.80e+00; EST_HUMAN HIT: AW965253.1, EVALUE 3.00e-11
MPMVEELYGNYGIMADTTERVGQHKDAYQVILDGVK

SEQ ID NO: 37887 - protein, 23 aa, Homo sapiens
  MAP TO AC011998.2; EXPRESSED IN PLACENTA, SIGNAL = 1.3; EXPRESSED IN HELA, SIGNAL = 2.2; EXPRESSED IN HEART, SIGNAL = 1.4; EXPRESSED IN LUNG, SIGNAL =   2; EXPRESSED IN BRAIN, SIGNAL = 2.1; EXPRESSED IN HBL100, SIGNAL = 2.2; EXPRESSED IN BT474, SIGNAL =   2; EXPRESSED IN ADULT LIVER, SIGNAL = 1.2; EXPRESSED IN FETAL LIVER, SIGNAL = 1.6; EXPRESSED IN BONE MARROW, SIGNAL = 1.2; EST_HUMAN HIT: AA331436.1, EVALUE 3.00e-04
ADGRGALRQLWHHGRYHGASGPA

SEQ ID NO: 37888 - protein, 55 aa, Homo sapiens
  MAP TO AC012064.1; EXPRESSED IN PLACENTA, SIGNAL = 3.2; EXPRESSED IN HBL100, SIGNAL = 3.4; EXPRESSED IN HELA, SIGNAL = 4.2; EXPRESSED IN HEART, SIGNAL = 2.8; EXPRESSED IN BT474, SIGNAL = 2.5; EXPRESSED IN FETAL LIVER, SIGNAL = 3.2; EXPRESSED IN ADULT LIVER, SIGNAL = 3.4; EXPRESSED IN LUNG, SIGNAL = 2.9; EXPRESSED IN BONE MARROW, SIGNAL = 3.3; EXPRESSED IN BRAIN, SIGNAL = 3.3; SWISSPROT HIT: O60658, EVALUE 1.00e-25; EST_HUMAN HIT: AW997532.1, EVALUE 4.00e-24
VINIINAAQESSPMPVTEALDRVLEILRTTELYSPQFGAKDDDPHANDLVGGLMS

SEQ ID NO: 37889 - protein, 153 aa, Homo sapiens
  MAP TO AL021921.1; EXPRESSED IN HEART, SIGNAL = 1.1; EXPRESSED IN BT474, SIGNAL = 1.2; EXPRESSED IN ADULT LIVER, SIGNAL = 1.1; EXPRESSED IN FETAL LIVER, SIGNAL = 0.92; EXPRESSED IN BONE MARROW, SIGNAL =   1; EXPRESSED IN HELA, SIGNAL = 0.97; EST_HUMAN HIT: AA723903.1, EVALUE 2.90e-01; SWISSPROT HIT: P55127, EVALUE 1.10e+00
PVCLPCGLLACPLPHPSLSLLVIVPFSFLLPSSFSVSPNTSPAQGGQGHSHKGCSSLASKGCFGYILGHSKDGAQSLAGAQGQEGVLLRDPRGSQQPHHLLSSCCVRSGDPLTERNPSAVTQTWAGLSNPLFNCVTWGKSASLSVCFLICELG

SEQ ID NO: 37890 - protein, 19 aa, Homo sapiens
  MAP TO AL021921.1; EXPRESSED IN HEART, SIGNAL = 1.1; EXPRESSED IN BT474, SIGNAL = 1.2; EXPRESSED IN ADULT LIVER, SIGNAL = 1.1; EXPRESSED IN FETAL LIVER, SIGNAL = 0.92; EXPRESSED IN BONE MARROW, SIGNAL =   1; EXPRESSED IN HELA, SIGNAL = 0.97
TLTTLGGGGVGGNREGGGE

SEQ ID NO: 37891 - protein, 85 aa, Homo sapiens
  MAP TO AL021939.1; EXPRESSED IN LUNG, SIGNAL =   1; EXPRESSED IN HBL100, SIGNAL =   1; EXPRESSED IN HELA, SIGNAL = 1.2; EXPRESSED IN PLACENTA, SIGNAL = 1.2; EXPRESSED IN HEART, SIGNAL = 1.1; EXPRESSED IN BT474, SIGNAL = 1.4; EXPRESSED IN FETAL LIVER, SIGNAL = 1.4; EXPRESSED IN ADULT LIVER, SIGNAL = 1.6; EXPRESSED IN BONE MARROW, SIGNAL = 0.99; EST_HUMAN HIT: BE876423.1, EVALUE 3.00e-14; SWISSPROT HIT: P80668, EVALUE 2.00e-16
VPPGVVNIVFGTGPRVGEALVSHPEVPLISFTGSQPTAERITQLSAPHCKKLSLELGGKNPAIIFEDANLDECIPATVRSSFANQ

SEQ ID NO: 37892 - protein, 51 aa, Homo sapiens
  MAP TO AC007383.2; EXPRESSED IN LUNG, SIGNAL = 5.5; EXPRESSED IN ADULT LIVER, SIGNAL = 0.91; EXPRESSED IN BT474, SIGNAL =   1; EXPRESSED IN HEART, SIGNAL = 1.1; EST_HUMAN HIT: BF308518.1, EVALUE 2.00e-25
PKLCKQRRLNGYAFCIRHVLEDKTAPFKQCEYVAKYNSQRCTNPIPKSEDR

SEQ ID NO: 37893 - protein, 46 aa, Homo sapiens
  MAP TO AC007383.2; EXPRESSED IN LUNG, SIGNAL = 5.5; EXPRESSED IN ADULT LIVER, SIGNAL = 0.91; EXPRESSED IN BT474, SIGNAL =   1; EXPRESSED IN HEART, SIGNAL = 1.1; EST_HUMAN HIT: BF308518.1, EVALUE 8.00e-20; SWISSPROT HIT: Q08708, EVALUE 9.10e-01
STATPSVSDTFWRTRLPPSSNVNMWPSITANAAPTPSPNQRIVGKG

SEQ ID NO: 37894 - protein, 128 aa, Homo sapiens
  MAP TO AC007064.22; EXPRESSED IN HEART, SIGNAL = 1.1; EXPRESSED IN BRAIN, SIGNAL = 0.92; EST_HUMAN HIT: AA256009.1, EVALUE 2.00e-13; SWISSPROT HIT: P51811, EVALUE 5.00e-18
NNSNMVGTVLMLFLITLLYAAINFSCWSAVKLQLSDDKIIDGRQRWGHRILHYSFQFLENVIMILVFRFFGGKTLLNCCDSLIAVQLIISYLLATGFMLLFYQYLYPWQSGKVLPGRTENQPEAPYYY

SEQ ID NO: 37895 - protein, 59 aa, Homo sapiens
  MAP TO AL121578.1; EXPRESSED IN BT474, SIGNAL = 1.3; EXPRESSED IN HELA, SIGNAL = 5.8; EXPRESSED IN HEART, SIGNAL = 1.2; SWISSPROT HIT: P79147, EVALUE 6.70e-01; EST_HUMAN HIT: N92159.1, EVALUE 4.00e-08
TSLNSMMSVYSETGDYGNVKVSGEILLHISYCYKTGGLYIFVKNCRNLAIGDEKKQRTD

SEQ ID NO: 37896 - protein, 47 aa, Homo sapiens
  MAP TO AC010809.2; EXPRESSED IN PLACENTA, SIGNAL = 1.1; EXPRESSED IN HELA, SIGNAL = 0.98; EXPRESSED IN HEART, SIGNAL = 1.2; EXPRESSED IN ADULT LIVER, SIGNAL =   1; SWISSPROT HIT: P30957, EVALUE 3.00e-15
VEQPLRSKKAVWHKLLSKQRKRAVVACFRMAPLYNLPRQVFCLFSWH

SEQ ID NO: 37897 - protein, 46 aa, Homo sapiens
  MAP TO AC010809.2; EXPRESSED IN PLACENTA, SIGNAL = 1.1; EXPRESSED IN HELA, SIGNAL = 0.98; EXPRESSED IN HEART, SIGNAL = 1.2; EXPRESSED IN ADULT LIVER, SIGNAL =   1
GTAFEVQEGRLAQTVIKATETGSGGLFQDGPSLQPAQASILSFFLA

SEQ ID NO: 37898 - protein, 179 aa, Homo sapiens
  MAP TO AL022097.1; EXPRESSED IN PLACENTA, SIGNAL = 2.7; EXPRESSED IN HEART, SIGNAL = 2.7; EXPRESSED IN FETAL LIVER, SIGNAL = 2.8; EXPRESSED IN ADULT LIVER, SIGNAL =   3; EXPRESSED IN BT474, SIGNAL = 2.6; EXPRESSED IN BRAIN, SIGNAL = 2.9; EXPRESSED IN BONE MARROW, SIGNAL = 3.2; EXPRESSED IN LUNG, SIGNAL = 2.8; EXPRESSED IN HBL100, SIGNAL =   3; EXPRESSED IN HELA, SIGNAL = 2.7; SWISSPROT HIT: Q9KA23, EVALUE 1.80e+00; EST_HUMAN HIT: AV702131.1, EVALUE 5.30e-01
DRLLWPLLKFISRHSLAQSPEASFQEESKEPPNFILFSYCLFKEQSYKIKIPSPGKENLIQTFLRTDSTTFSSHAKQKQTCFILGFSQLHKERKNGSREAVYTGERISTCAVNVTERLVTAVHRHCPVRCSQQAYERILQLFHIIDEEDEDTEAWKGLQRVQGCTQSRVLNPAAFSHDP

SEQ ID NO: 37899 - protein, 26 aa, Homo sapiens
  MAP TO AC008283.2; EXPRESSED IN HELA, SIGNAL = 0.59; EXPRESSED IN ADULT LIVER, SIGNAL = 0.71; EXPRESSED IN HEART, SIGNAL = 0.81; EXPRESSED IN PLACENTA, SIGNAL = 0.6; EXPRESSED IN FETAL LIVER, SIGNAL = 0.67
MTIVRDSTVEAPAVRHHDDMSCDKVH

SEQ ID NO: 37900 - protein, 56 aa, Homo sapiens
  MAP TO AL031003.1; EXPRESSED IN BT474, SIGNAL = 2.3; EXPRESSED IN BRAIN, SIGNAL = 2.2; EXPRESSED IN HELA, SIGNAL = 1.6; EXPRESSED IN HEART, SIGNAL =   2; EXPRESSED IN FETAL LIVER, SIGNAL = 2.2; EXPRESSED IN LUNG, SIGNAL = 1.8; EXPRESSED IN BONE MARROW, SIGNAL = 2.4; EXPRESSED IN PLACENTA, SIGNAL = 2.1; EXPRESSED IN HBL100, SIGNAL = 1.9; EXPRESSED IN ADULT LIVER, SIGNAL = 2.1; EST_HUMAN HIT: AA993554.1, EVALUE 4.10e+00; SWISSPROT HIT: O10293, EVALUE 7.70e+00
GMMHSPGFDGNSSLSFQMLMNADSLYTAAHCALLLNLKLSHGDYYRKRPTLAPGVM

SEQ ID NO: 37901 - protein, 28 aa, Homo sapiens
  MAP TO AL049871.2; EXPRESSED IN FETAL LIVER, SIGNAL = 0.67; EXPRESSED IN BRAIN, SIGNAL = 0.68; EXPRESSED IN LUNG, SIGNAL = 1.3; EXPRESSED IN HEART, SIGNAL = 1.1; EST_HUMAN HIT: AA434363.1, EVALUE 4.00e-10
GGRCRGENLPADELRQRRLPRGIRAHCV

SEQ ID NO: 37902 - protein, 18 aa, Homo sapiens
  MAP TO AL031120.1; EXPRESSED IN BRAIN, SIGNAL = 2.6; EXPRESSED IN BONE MARROW, SIGNAL = 2.9; EXPRESSED IN HEART, SIGNAL = 2.7; EXPRESSED IN FETAL LIVER, SIGNAL =   3; EXPRESSED IN ADULT LIVER, SIGNAL =   3; EXPRESSED IN BT474, SIGNAL = 2.9; EXPRESSED IN LUNG, SIGNAL =   3; EXPRESSED IN PLACENTA, SIGNAL = 3.2; EXPRESSED IN HELA, SIGNAL = 2.9; EXPRESSED IN HBL100, SIGNAL = 3.2; EST_HUMAN HIT: AA252036.1, EVALUE 1.70e-01
WEDENVLKMDRGDDCNIM

SEQ ID NO: 37903 - protein, 141 aa, Homo sapiens
  MAP TO AL023279.1; EXPRESSED IN BRAIN, SIGNAL = 5.6; EXPRESSED IN BONE MARROW, SIGNAL = 6.2; EXPRESSED IN HELA, SIGNAL = 7.1; EXPRESSED IN HEART, SIGNAL =   6; EXPRESSED IN BT474, SIGNAL = 7.4; EXPRESSED IN ADULT LIVER, SIGNAL = 5.9; EXPRESSED IN FETAL LIVER, SIGNAL = 5.7; EXPRESSED IN LUNG, SIGNAL = 5.5; EXPRESSED IN PLACENTA, SIGNAL = 8.3; EXPRESSED IN HBL100, SIGNAL = 6.3; SWISSPROT HIT: P43363, EVALUE 4.00e-14; EST_HUMAN HIT: BE729944.1, EVALUE 9.00e-13
SSLSSSSPLSSPLPSTLILGVPEDEDMPAAGMPPLPQSPPEIPPQGPPKISPQGPPQSPPQSPLDSCSSPLLWTRLDEESSSEEEDTATWHALPESESLPRYALDEKVAELVQFLLLKYQTKEPVTKAEMLTTVIKKYKDY

SEQ ID NO: 37904 - protein, 63 aa, Homo sapiens
  MAP TO AL022344.1; EXPRESSED IN BT474, SIGNAL = 2.2; EXPRESSED IN LUNG, SIGNAL =   3; EXPRESSED IN BRAIN, SIGNAL = 1.7; EXPRESSED IN BONE MARROW, SIGNAL = 1.4; EXPRESSED IN HBL100, SIGNAL = 3.7; EXPRESSED IN HEART, SIGNAL = 2.8; EXPRESSED IN FETAL LIVER, SIGNAL = 2.7; EXPRESSED IN ADULT LIVER, SIGNAL = 2.8; EXPRESSED IN PLACENTA, SIGNAL = 3.4; EXPRESSED IN HELA, SIGNAL = 3.1; EST_HUMAN HIT: AA047147.1, EVALUE 9.00e-17
QKMKKAKEQRHLHNKEHFRAKQKEEEEKLKRQKDLRKKLFRIQGQKERRNQKSSLKGAEGQLQ

SEQ ID NO: 37905 - protein, 47 aa, Homo sapiens
  MAP TO AJ239323.2; EXPRESSED IN HBL100, SIGNAL = 1.9; EXPRESSED IN HEART, SIGNAL = 0.93; EXPRESSED IN BRAIN, SIGNAL = 0.94; EXPRESSED IN BT474, SIGNAL = 1.1; EXPRESSED IN FETAL LIVER, SIGNAL =   1; SWISSPROT HIT: P37275, EVALUE 6.00e+00
VNKGSCVTRSEIIIKFYDPDAAISTLRVFLPTIYTCQLSPFSLTRMK

SEQ ID NO: 37906 - protein, 33 aa, Homo sapiens
  MAP TO AL022477.1; EXPRESSED IN BRAIN, SIGNAL = 1.9; EXPRESSED IN BONE MARROW, SIGNAL = 2.2; EXPRESSED IN HBL100, SIGNAL = 1.9; EXPRESSED IN PLACENTA, SIGNAL = 1.9; EXPRESSED IN FETAL LIVER, SIGNAL = 1.9; EXPRESSED IN LUNG, SIGNAL = 1.9; EXPRESSED IN HEART, SIGNAL = 1.6; EXPRESSED IN HELA, SIGNAL = 1.8; EXPRESSED IN ADULT LIVER, SIGNAL = 1.9; EXPRESSED IN BT474, SIGNAL = 2.2; EST_HUMAN HIT: AI633653.1, EVALUE 5.00e-03
LQTTTFWLCPYMVKRKRDSKLSGVSSYMGTSPL

SEQ ID NO: 37907 - protein, 56 aa, Homo sapiens
  MAP TO AL020993.1; EXPRESSED IN BT474, SIGNAL = 1.2; EXPRESSED IN HEART, SIGNAL = 0.82; EXPRESSED IN ADULT LIVER, SIGNAL = 0.67; EXPRESSED IN HELA, SIGNAL = 1.5; EXPRESSED IN LUNG, SIGNAL = 0.91; EXPRESSED IN HBL100, SIGNAL = 1.1; EXPRESSED IN PLACENTA, SIGNAL = 0.67; EXPRESSED IN BRAIN, SIGNAL = 0.97; EXPRESSED IN FETAL LIVER, SIGNAL = 0.66; EST_HUMAN HIT: BF312113.1, EVALUE 4.00e-17; SWISSPROT HIT: Q09906, EVALUE 4.00e-05
VTSGYLYVTIIYNISVSLALYALFLFYFATRELLSPYSPVLKFFMVKSVIFLSFWQ

SEQ ID NO: 37908 - protein, 53 aa, Homo sapiens
  MAP TO AL020993.1; EXPRESSED IN BT474, SIGNAL = 1.2; EXPRESSED IN HEART, SIGNAL = 0.82; EXPRESSED IN ADULT LIVER, SIGNAL = 0.67; EXPRESSED IN HELA, SIGNAL = 1.5; EXPRESSED IN LUNG, SIGNAL = 0.91; EXPRESSED IN HBL100, SIGNAL = 1.1; EXPRESSED IN PLACENTA, SIGNAL = 0.67; EXPRESSED IN BRAIN, SIGNAL = 0.97; EXPRESSED IN FETAL LIVER, SIGNAL = 0.66; SWISSPROT HIT: O83348, EVALUE 1.50e+00; EST_HUMAN HIT: AW579547.1, EVALUE 2.20e-01
GSLSSAGGVGLRAMGTVCGAVEESPFPPRVCPSQKMLPVPQRHQWLPLRDHHL

SEQ ID NO: 37909 - protein, 36 aa, Homo sapiens
  MAP TO AL034424.9; EXPRESSED IN BRAIN, SIGNAL = 0.74; EXPRESSED IN HELA, SIGNAL = 0.61; EXPRESSED IN ADULT LIVER, SIGNAL = 0.71; EXPRESSED IN LUNG, SIGNAL = 0.64; EXPRESSED IN HEART, SIGNAL = 1.3; EXPRESSED IN FETAL LIVER, SIGNAL = 0.61; EST_HUMAN HIT: BF511846.1, EVALUE 6.00e-15
MSARLPLILRRCQGFHLCALRREAGQHTQYVPHPSV

SEQ ID NO: 37910 - protein, 18 aa, Homo sapiens
  MAP TO AL022578.1; EXPRESSED IN PLACENTA, SIGNAL =  11; EXPRESSED IN HEART, SIGNAL = 9.2; EXPRESSED IN ADULT LIVER, SIGNAL =   7; EXPRESSED IN LUNG, SIGNAL =  11; EXPRESSED IN BRAIN, SIGNAL =  10; EXPRESSED IN BONE MARROW, SIGNAL =  10; EXPRESSED IN HBL100, SIGNAL =  12; EXPRESSED IN HELA, SIGNAL =  10; EXPRESSED IN BT474, SIGNAL =  10; EXPRESSED IN FETAL LIVER, SIGNAL =  10; EST_HUMAN HIT: AA708499.1, EVALUE 2.90e-02
MQRTFLESSLLRQIPLPL

SEQ ID NO: 37911 - protein, 18 aa, Homo sapiens
  MAP TO AL022578.1; EXPRESSED IN PLACENTA, SIGNAL =  11; EXPRESSED IN HEART, SIGNAL = 9.2; EXPRESSED IN ADULT LIVER, SIGNAL =   7; EXPRESSED IN LUNG, SIGNAL =  11; EXPRESSED IN BRAIN, SIGNAL =  10; EXPRESSED IN BONE MARROW, SIGNAL =  10; EXPRESSED IN HBL100, SIGNAL =  12; EXPRESSED IN HELA, SIGNAL =  10; EXPRESSED IN BT474, SIGNAL =  10; EXPRESSED IN FETAL LIVER, SIGNAL =  10; EST_HUMAN HIT: AI871442.1, EVALUE 2.00e-04
WRALYSGKYLCLSGKLPC

SEQ ID NO: 37912 - protein, 32 aa, Homo sapiens
  MAP TO AL031228.1; EXPRESSED IN BRAIN, SIGNAL = 1.3; EXPRESSED IN BONE MARROW, SIGNAL = 1.2; EXPRESSED IN HBL100, SIGNAL = 1.3; EXPRESSED IN HELA, SIGNAL =   1; EXPRESSED IN PLACENTA, SIGNAL = 1.2; EXPRESSED IN HEART, SIGNAL = 1.1; EXPRESSED IN BT474, SIGNAL = 1.1; EXPRESSED IN FETAL LIVER, SIGNAL = 1.3; EST_HUMAN HIT: T07142.1, EVALUE 2.00e-10
ITRRYAEFSSALVSINQTIPNERTMQLLGQLQ

SEQ ID NO: 37913 - protein, 56 aa, Homo sapiens
  MAP TO AL031664.1; EXPRESSED IN PLACENTA, SIGNAL = 1.9; EXPRESSED IN HELA, SIGNAL = 1.9; EXPRESSED IN HEART, SIGNAL = 1.9; EXPRESSED IN FETAL LIVER, SIGNAL = 1.6; EXPRESSED IN ADULT LIVER, SIGNAL = 2.2; EXPRESSED IN BT474, SIGNAL =   2; EXPRESSED IN BRAIN, SIGNAL = 2.3; EXPRESSED IN HBL100, SIGNAL = 1.8; EXPRESSED IN LUNG, SIGNAL = 1.6; EXPRESSED IN BONE MARROW, SIGNAL =   2; EST_HUMAN HIT: BE257514.1, EVALUE 1.00e-26; SWISSPROT HIT: Q03333, EVALUE 2.00e-27
MLDQPFMTDIIEASSISHMPQLIDIYSASWGPTDNGKTVDGPRELTLQAMADGVNK

SEQ ID NO: 37914 - protein, 47 aa, Homo sapiens
  MAP TO AL035700.13; EXPRESSED IN HELA, SIGNAL = 0.62; EXPRESSED IN ADULT LIVER, SIGNAL = 0.69; EXPRESSED IN BRAIN, SIGNAL = 0.76; EXPRESSED IN PLACENTA, SIGNAL = 0.89; EXPRESSED IN HEART, SIGNAL = 0.86; EXPRESSED IN FETAL LIVER, SIGNAL = 0.63; EXPRESSED IN LUNG, SIGNAL = 0.63; EXPRESSED IN BT474, SIGNAL = 0.67; EST_HUMAN HIT: M85504.1, EVALUE 4.50e+00; SWISSPROT HIT: Q04782, EVALUE 7.90e+00
LLVSFSVICIKNPNWHNLFLLIPWSGINPYCEQDSSFSENVGDEILK

SEQ ID NO: 37915 - protein, 34 aa, Homo sapiens
  MAP TO AL035416.7; EXPRESSED IN HBL100, SIGNAL = 0.96; EXPRESSED IN HEART, SIGNAL = 1.1; EXPRESSED IN BONE MARROW, SIGNAL = 1.1; EXPRESSED IN BRAIN, SIGNAL =   1; EXPRESSED IN FETAL LIVER, SIGNAL = 0.99; EXPRESSED IN BT474, SIGNAL = 1.3; EST_HUMAN HIT: BF371330.1, EVALUE 4.00e-07; SWISSPROT HIT: P23886, EVALUE 7.20e-01
LEAAKDDYRVHCEELEKQLIEFQHRNDELTSLAE

SEQ ID NO: 37916 - protein, 38 aa, Homo sapiens
  MAP TO AL118508.9; EXPRESSED IN BONE MARROW, SIGNAL = 2.1; EXPRESSED IN PLACENTA, SIGNAL = 2.5; EXPRESSED IN HBL100, SIGNAL = 1.7; EXPRESSED IN HELA, SIGNAL = 2.1; EXPRESSED IN FETAL LIVER, SIGNAL = 2.8; EXPRESSED IN BT474, SIGNAL = 2.1; EXPRESSED IN LUNG, SIGNAL = 2.9; EXPRESSED IN BRAIN, SIGNAL = 1.7; EXPRESSED IN HEART, SIGNAL = 1.8; EXPRESSED IN ADULT LIVER, SIGNAL = 2.5; EST_HUMAN HIT: AV730318.1, EVALUE 1.90e+00; SWISSPROT HIT: P15309, EVALUE 6.20e+00
KTACKHLCSCCPQSPLPGYCQLPGPTFPKDQPGHSEGQ

SEQ ID NO: 37917 - protein, 26 aa, Homo sapiens
  MAP TO AL118508.9; EXPRESSED IN BONE MARROW, SIGNAL = 2.1; EXPRESSED IN PLACENTA, SIGNAL = 2.5; EXPRESSED IN HBL100, SIGNAL = 1.7; EXPRESSED IN HELA, SIGNAL = 2.1; EXPRESSED IN FETAL LIVER, SIGNAL = 2.8; EXPRESSED IN BT474, SIGNAL = 2.1; EXPRESSED IN LUNG, SIGNAL = 2.9; EXPRESSED IN BRAIN, SIGNAL = 1.7; EXPRESSED IN HEART, SIGNAL = 1.8; EXPRESSED IN ADULT LIVER, SIGNAL = 2.5
RAHFLDIASCLDQPFRKISQVTVRVK

SEQ ID NO: 37918 - protein, 73 aa, Homo sapiens
  MAP TO AL132773.1; EXPRESSED IN FETAL LIVER, SIGNAL = 0.96; EXPRESSED IN ADULT LIVER, SIGNAL = 1.5; EXPRESSED IN LUNG, SIGNAL =   1; EXPRESSED IN HBL100, SIGNAL = 1.6; EXPRESSED IN PLACENTA, SIGNAL = 1.4; EXPRESSED IN BT474, SIGNAL = 1.6; EXPRESSED IN BRAIN, SIGNAL = 1.3; EXPRESSED IN BONE MARROW, SIGNAL = 1.2; EXPRESSED IN HEART, SIGNAL = 1.5; EXPRESSED IN HELA, SIGNAL =   1; EST_HUMAN HIT: AI372809.1, EVALUE 3.00e-39; SWISSPROT HIT: P22897, EVALUE 6.00e-03
SKLTLTPWVGLRKINVSYWCWEDMSPFTNSLLQWMPSEPSDAGFCGILSEPSTRGLKAATCINPLNGSVCERP

SEQ ID NO: 37919 - protein, 28 aa, Homo sapiens
  MAP TO AL132773.1; EXPRESSED IN FETAL LIVER, SIGNAL = 0.96; EXPRESSED IN ADULT LIVER, SIGNAL = 1.5; EXPRESSED IN LUNG, SIGNAL =   1; EXPRESSED IN HBL100, SIGNAL = 1.6; EXPRESSED IN PLACENTA, SIGNAL = 1.4; EXPRESSED IN BT474, SIGNAL = 1.6; EXPRESSED IN BRAIN, SIGNAL = 1.3; EXPRESSED IN BONE MARROW, SIGNAL = 1.2; EXPRESSED IN HEART, SIGNAL = 1.5; EXPRESSED IN HELA, SIGNAL =   1; EST_HUMAN HIT: AI372810.1, EVALUE 6.00e-10
QAHLNPMGRPSEDQCVLLVLGRYVPIYK

SEQ ID NO: 37920 - protein, 42 aa, Homo sapiens; identical to SEQ ID NO: 33592
  MAP TO AP000009.2; EXPRESSED IN FETAL LIVER, SIGNAL = 1.6; EXPRESSED IN BONE MARROW, SIGNAL = 1.8; EXPRESSED IN LUNG, SIGNAL = 2.1; EXPRESSED IN HELA, SIGNAL = 1.8; EXPRESSED IN PLACENTA, SIGNAL = 1.1; EXPRESSED IN HEART, SIGNAL = 0.98; EXPRESSED IN BT474, SIGNAL = 4.5; EXPRESSED IN ADULT LIVER, SIGNAL = 1.4; EST_HUMAN HIT: BF695531.1, EVALUE 1.00e-07; SWISSPROT HIT: P57054, EVALUE 1.00e-08

SEQ ID NO: 37921 - protein, 19 aa, Homo sapiens
  MAP TO AP000009.2; EXPRESSED IN FETAL LIVER, SIGNAL = 1.6; EXPRESSED IN BONE MARROW, SIGNAL = 1.8; EXPRESSED IN LUNG, SIGNAL = 2.1; EXPRESSED IN HELA, SIGNAL = 1.8; EXPRESSED IN PLACENTA, SIGNAL = 1.1; EXPRESSED IN HEART, SIGNAL = 0.98; EXPRESSED IN BT474, SIGNAL = 4.5; EXPRESSED IN ADULT LIVER, SIGNAL = 1.4; EST_HUMAN HIT: BF699923.1, EVALUE 1.00e-03
ITMQKINSRRNTKRRPFQP

SEQ ID NO: 37922 - protein, 48 aa, Homo sapiens [sequence omitted]

SEQ ID NO: 37923 - protein, 28 aa, Homo sapiens
  MAP TO AL121759.5; EXPRESSED IN FETAL LIVER, SIGNAL = 2.1; EXPRESSED IN HBL100, SIGNAL = 2.3; EXPRESSED IN HEART, SIGNAL = 1.8; EXPRESSED IN PLACENTA, SIGNAL = 1.3; EXPRESSED IN ADULT LIVER, SIGNAL = 2.4; EXPRESSED IN BT474, SIGNAL = 2.2; EXPRESSED IN BRAIN, SIGNAL = 1.5; EXPRESSED IN LUNG, SIGNAL = 1.5; EXPRESSED IN BONE MARROW, SIGNAL = 2.2; EXPRESSED IN HELA, SIGNAL = 2.5
AHGFDTNYLHLPNQPLADAPPLLVEVST

SEQ ID NO: 37924 - protein, 33 aa, Homo sapiens
  MAP TO AL109810.4; EXPRESSED IN PLACENTA, SIGNAL = 2.2; EXPRESSED IN HELA, SIGNAL = 2.9; EXPRESSED IN HBL100, SIGNAL = 2.1; EXPRESSED IN HEART, SIGNAL = 2.5; EXPRESSED IN FETAL LIVER, SIGNAL = 2.9; EXPRESSED IN ADULT LIVER, SIGNAL = 1.7; EXPRESSED IN BT474, SIGNAL = 3.5; EXPRESSED IN BRAIN, SIGNAL = 2.1; EXPRESSED IN BONE MARROW, SIGNAL = 1.7; EXPRESSED IN LUNG, SIGNAL = 2.8; SWISSPROT HIT: O59230, EVALUE 8.20e+00
FTLNTVLSGQGANHRKVNKQKVRELQIVKSSFR

SEQ ID NO: 37925 - protein, 57 aa, Homo sapiens; identical to SEQ ID NO: 36774
  MAP TO AL118501.4; EXPRESSED IN BONE MARROW, SIGNAL = 0.98; EXPRESSED IN LUNG, SIGNAL = 1.7; EXPRESSED IN PLACENTA, SIGNAL = 1.2; EXPRESSED IN HELA, SIGNAL = 1.2; EXPRESSED IN HEART, SIGNAL = 1.3; EXPRESSED IN HBL100, SIGNAL = 1.1; EXPRESSED IN FETAL LIVER, SIGNAL = 1.2; EXPRESSED IN ADULT LIVER, SIGNAL = 1.3; EXPRESSED IN BT474, SIGNAL = 1.3; EXPRESSED IN BRAIN, SIGNAL = 1.2; EST_HUMAN HIT: AA577823.1, EVALUE 3.60e-01; SWISSPROT HIT: P29584, EVALUE 4.50e+00

SEQ ID NO: 37926 - protein, 90 aa, Homo sapiens
  MAP TO AC005537.2; EXPRESSED IN ADULT LIVER, SIGNAL = 0.78; EXPRESSED IN BRAIN, SIGNAL = 1.1; EXPRESSED IN HEART, SIGNAL = 0.79; EXPRESSED IN BONE MARROW, SIGNAL = 0.64; EXPRESSED IN FETAL LIVER, SIGNAL = 0.61; EXPRESSED IN PLACENTA, SIGNAL = 0.8; EXPRESSED IN LUNG, SIGNAL = 0.66; SWISSPROT HIT: Q42429, EVALUE 1.10e+00; EST_HUMAN HIT: AW956659.1, EVALUE 3.10e+00
WFPPPRQNPGLMPGTGYVTYASISSSVPGTVAIDIHLHQVPLIKEKERTQFIEKEALAKLEATKPRVWLLEYCHLSGAFQGLSRNTFHSS

SEQ ID NO: 37927 - protein, 28 aa, Homo sapiens
  MAP TO AL109836.12; EXPRESSED IN ADULT LIVER, SIGNAL = 1.7; EXPRESSED IN BRAIN, SIGNAL = 2.4; EXPRESSED IN BONE MARROW, SIGNAL = 1.7; EXPRESSED IN PLACENTA, SIGNAL =   2; EXPRESSED IN HBL100, SIGNAL = 2.2; EXPRESSED IN FETAL LIVER, SIGNAL = 2.4; EXPRESSED IN BT474, SIGNAL = 3.5; EXPRESSED IN LUNG, SIGNAL = 1.8; EXPRESSED IN HEART, SIGNAL = 1.5; EXPRESSED IN HELA, SIGNAL = 2.5; EST_HUMAN HIT: AA487021.1, EVALUE 9.10e-01
HIGDEESGKHDNTKETHKVPVNDPKEIK

SEQ ID NO: 37928 - protein, 180 aa, Homo sapiens
  MAP TO AL118511.6; EXPRESSED IN BT474, SIGNAL = 1.7; EXPRESSED IN ADULT LIVER, SIGNAL = 1.7; EXPRESSED IN BRAIN, SIGNAL = 1.7; EXPRESSED IN BONE MARROW, SIGNAL = 1.4; EXPRESSED IN PLACENTA, SIGNAL = 1.8; EXPRESSED IN HELA, SIGNAL = 1.8; EXPRESSED IN HBL100, SIGNAL = 1.5; EXPRESSED IN FETAL LIVER, SIGNAL = 1.3; EXPRESSED IN LUNG, SIGNAL = 2.6; EXPRESSED IN HEART, SIGNAL = 1.6; EST_HUMAN HIT: N34078.1, EVALUE 2.00e-22; SWISSPROT HIT: P43597, EVALUE 1.00e-02
QMEFSISALSIQEPSNGTAASEPRPLSKASQGSQALKSSQGSRSSSLDALGPTRKEEEASFWKINAERSRGEGPEAEFQSLTPSQIKSMEKGEKVLPPCYRQEPAPKDREAKVERPSTLRQEQRPLPNVSTERERPQPVQAFSSALHEAAPSQLEGKLPSPDVRQDDGEDTLFSEPKFAQ

SEQ ID NO: 37929 - protein, 31 aa, Homo sapiens
  MAP TO AC007366.2; EXPRESSED IN PLACENTA, SIGNAL = 0.59; EXPRESSED IN LUNG, SIGNAL = 0.64; EXPRESSED IN HELA, SIGNAL = 4.7; EXPRESSED IN HEART, SIGNAL = 0.92
WQEFLRKEWRDIQTCVGHNYISKREKQKEDQ

SEQ ID NO: 37930 - protein, 69 aa, Homo sapiens
  MAP TO AP000067.1; EXPRESSED IN BONE MARROW, SIGNAL = 1.3; EXPRESSED IN BRAIN, SIGNAL = 0.99; EXPRESSED IN PLACENTA, SIGNAL = 1.9; EXPRESSED IN BT474, SIGNAL = 1.2; EXPRESSED IN FETAL LIVER, SIGNAL =   1; EXPRESSED IN LUNG, SIGNAL = 1.3; EXPRESSED IN HEART, SIGNAL = 1.8; EXPRESSED IN HELA, SIGNAL = 1.1; EXPRESSED IN HBL100, SIGNAL = 1.1; EXPRESSED IN ADULT LIVER, SIGNAL = 1.2
EGGGGGKEGGDGGGRGGGGKRGEGGDARGKEGGGGKGGGGGDGGEGKGGGGEDGGGSECRGMEMEERRR

SEQ ID NO: 37931 - protein, 27 aa, Homo sapiens
  MAP TO AL121754.8; EXPRESSED IN BONE MARROW, SIGNAL = 1.2; EXPRESSED IN BRAIN, SIGNAL = 1.1; EXPRESSED IN PLACENTA, SIGNAL = 1.3; EXPRESSED IN BT474, SIGNAL = 1.2; EXPRESSED IN FETAL LIVER, SIGNAL = 1.1; EXPRESSED IN LUNG, SIGNAL = 1.3; EXPRESSED IN HEART, SIGNAL = 1.4; EXPRESSED IN HELA, SIGNAL = 1.1; EXPRESSED IN HBL100, SIGNAL = 1.3; EXPRESSED IN ADULT LIVER, SIGNAL = 1.7
DHGNLSASPFYVALLGLPVTVTLQPSP

SEQ ID NO: 37932 - protein, 102 aa, Homo sapiens
  MAP TO AP000014.2; EXPRESSED IN BONE MARROW, SIGNAL = 2.1; EXPRESSED IN BRAIN, SIGNAL = 1.9; EXPRESSED IN BT474, SIGNAL = 5.8; EXPRESSED IN FETAL LIVER, SIGNAL = 1.6; EXPRESSED IN LUNG, SIGNAL = 1.9; EXPRESSED IN PLACENTA, SIGNAL = 2.6; EXPRESSED IN HEART, SIGNAL = 1.9; EXPRESSED IN HELA, SIGNAL = 1.6; EXPRESSED IN HBL100, SIGNAL =   2; EXPRESSED IN ADULT LIVER, SIGNAL = 1.6; EST_HUMAN HIT: BE271455.1, EVALUE 6.00e+00
KVGVLPGLCPSAWFHFFPQHQTAANIPGQLWGSYKLGAVPENPLSSLLLKPLNGYGLLFYAGNYLSKETPSVFLLSIERHIFVERMLYIGVYGFVGACSHRQ

SEQ ID NO: 37933 - protein, 49 aa, Homo sapiens
  MAP TO AP000014.2; EXPRESSED IN BONE MARROW, SIGNAL = 2.1; EXPRESSED IN BRAIN, SIGNAL = 1.9; EXPRESSED IN BT474, SIGNAL = 5.8; EXPRESSED IN FETAL LIVER, SIGNAL = 1.6; EXPRESSED IN LUNG, SIGNAL = 1.9; EXPRESSED IN PLACENTA, SIGNAL = 2.6; EXPRESSED IN HEART, SIGNAL = 1.9; EXPRESSED IN HELA, SIGNAL = 1.6; EXPRESSED IN HBL100, SIGNAL =   2; EXPRESSED IN ADULT LIVER, SIGNAL = 1.6; EST_HUMAN HIT: H94903.1, EVALUE 1.20e+00; SWISSPROT HIT: P08697, EVALUE 4.60e+00
GRWGCCQGCAQVPGSIFSPNTRQQPISQDSSGAPTSWELFLKTHSALCS

SEQ ID NO: 37934 - protein, 51 aa, Homo sapiens
  MAP TO AL121763.5; EXPRESSED IN BT474, SIGNAL = 1.6; EXPRESSED IN ADULT LIVER, SIGNAL = 1.4; EXPRESSED IN BONE MARROW, SIGNAL = 1.7; EXPRESSED IN FETAL LIVER, SIGNAL = 1.3; EXPRESSED IN LUNG, SIGNAL = 1.8; EXPRESSED IN BRAIN, SIGNAL = 1.6; EXPRESSED IN PLACENTA, SIGNAL = 2.1; EXPRESSED IN HBL100, SIGNAL = 1.6; EXPRESSED IN HELA, SIGNAL = 1.6; EXPRESSED IN HEART, SIGNAL = 1.8; SWISSPROT HIT: P28827, EVALUE 8.00e-17; EST_HUMAN HIT: AU140785.1, EVALUE 7.00e-12
RDRSSPGALNVYVKVNGGPQGNPVWNVSGVVTEGWVKAELAISTFWPHFYQ

SEQ ID NO: 37935 - protein, 34 aa, Homo sapiens
  MAP TO AL122023.1; EXPRESSED IN HBL100, SIGNAL = 3.4; EXPRESSED IN HELA, SIGNAL = 5.4; EXPRESSED IN BT474, SIGNAL = 5.7; EXPRESSED IN LUNG, SIGNAL = 4.7; EXPRESSED IN BRAIN, SIGNAL = 5.2; EXPRESSED IN BONE MARROW, SIGNAL =   5; EXPRESSED IN PLACENTA, SIGNAL = 4.1; EXPRESSED IN HEART, SIGNAL = 2.4; EXPRESSED IN ADULT LIVER, SIGNAL = 5.9; EXPRESSED IN FETAL LIVER, SIGNAL =   5
YMLLGLQHCNHPVMQGRNLSHRFLLPLHHSPYQF

SEQ ID NO: 37936 - protein, 195 aa, Homo sapiens
  MAP TO AB019441.1; EXPRESSED IN PLACENTA, SIGNAL = 1.1; EXPRESSED IN HEART, SIGNAL = 2.8; EXPRESSED IN FETAL LIVER, SIGNAL = 1.8; EXPRESSED IN BONE MARROW, SIGNAL = 1.6; EXPRESSED IN BRAIN, SIGNAL =   2; EXPRESSED IN HELA, SIGNAL = 1.9; EXPRESSED IN HBL100, SIGNAL = 2.4; EXPRESSED IN BT474, SIGNAL = 3.3; EXPRESSED IN LUNG, SIGNAL = 0.97; EST_HUMAN HIT: AU133113.1, EVALUE 1.40e-02; SWISSPROT HIT: Q99965, EVALUE 1.20e-02
IMRLDDLAYEIKPLQDSRRFEHVVFQIVAEPNATGPTFRDDDNETDPLFSEANDSMNPRISNSLYSSHRGNIKGHVQCSNSYYRIYGNITTCSKEVVQMFSLIDSIAQNIDLRYYIYLLTIYNNRDPAPVNEYRIQSAMFTYFKTTFFDTFHVHSSTLLIKYVPHESNYEPERYNFCSRIALLHIGTPGRHYLLV

SEQ ID NO: 37937 - protein, 73 aa, Homo sapiens; identical to SEQ ID NO: 34161
  MAP TO D87675.1; EXPRESSED IN BT474, SIGNAL = 2.8; EXPRESSED IN FETAL LIVER, SIGNAL = 1.2; EXPRESSED IN BRAIN, SIGNAL =   5; EXPRESSED IN BONE MARROW, SIGNAL =   1; EXPRESSED IN ADULT LIVER, SIGNAL = 1.1; EXPRESSED IN LUNG, SIGNAL = 4.3; EXPRESSED IN PLACENTA, SIGNAL = 3.8; EXPRESSED IN HEART, SIGNAL = 1.8; EXPRESSED IN HELA, SIGNAL = 3.4; EXPRESSED IN HBL100, SIGNAL = 2.4; EST_HUMAN HIT: BE167331.1, EVALUE 1.00e-36; SWISSPROT HIT: Q95241, EVALUE 1.00e-37

SEQ ID NO: 37938 - protein, 560 aa, Homo sapiens
  MAP TO AC005074.1; EXPRESSED IN FETAL LIVER, SIGNAL = 1.2; EXPRESSED IN HELA, SIGNAL = 2.5; EXPRESSED IN BT474, SIGNAL = 2.8; EXPRESSED IN BRAIN, SIGNAL = 1.1; EXPRESSED IN LUNG, SIGNAL = 2.9; EXPRESSED IN BONE MARROW, SIGNAL = 0.93; EXPRESSED IN PLACENTA, SIGNAL = 0.99; EXPRESSED IN HEART, SIGNAL = 1.3; EXPRESSED IN HBL100, SIGNAL = 1.8; EST_HUMAN HIT: AW976211.1, EVALUE 2.00e-91; SWISSPROT HIT: P53935, EVALUE 2.00e-03
TKRKNTGSPDRKPSKKSKTDNSSLSSPLNPKLWCHVHLKKSLSGSPLKVKNSKNSKSPEEHLEEMMKMMSPNKLHTNFHIPKKGPPAKKPGKHSDKPLKAKGRSKGILNGQKSTGNSKSPKKGLKTPKTKMKQMTLLDMAKGTQKMTRAPRNSGGTPRTSSKPHKHLPPAALHLIAYYKENKDREDKRSALSCVISKTARLLSSEDRARLPEELRSLVQKRYELLEHKKRWASMSEEQRKEYLKKKREELKKKLKEKAKERREKEMLERLEKQKRYEDQELTGKNLPAFRLVDTPEGLPNTLFGDVAMVVEFLSCYSGLLLPDAQYPITAVSLMEALSADKGGFLYLNRVLVILLQTLLQDEIAEDYGELGMKLSEIPLTLHSVSELVRLCLRRSDVQEESEGSDTDDNKDSAAFEDNEVQDEFLEKLETSEFFELTSEEKLQILTALCHRILMTYSVQDHMETRQQMSAELWKERLAVLKEENDKKRAEKQKRKEMEAKNKENGKVENGLGKTDRKKEIVKFEPQVDTEAEDMISAVKSRRLLAIQAKKEREIQEREMK

SEQ ID NO: 37939 - protein, 19 aa, Homo sapiens
  MAP TO AC002086.1; EXPRESSED IN PLACENTA, SIGNAL =   1; EXPRESSED IN HBL100, SIGNAL = 1.5; EXPRESSED IN HEART, SIGNAL = 1.5; EXPRESSED IN FETAL LIVER, SIGNAL = 1.4; EXPRESSED IN BONE MARROW, SIGNAL = 1.3; EXPRESSED IN HELA, SIGNAL = 1.8; EXPRESSED IN BT474, SIGNAL = 2.1; EXPRESSED IN ADULT LIVER, SIGNAL =   1; EXPRESSED IN BRAIN, SIGNAL =   2; EXPRESSED IN LUNG, SIGNAL = 1.6; EST_HUMAN HIT: AI672359.1, EVALUE 2.00e-04
KTDFCYRHSVLWQSAELLE

SEQ ID NO: 37940 - protein, 192 aa, Homo sapiens
  MAP TO AC002368.1; EXPRESSED IN LUNG, SIGNAL = 5.2; EXPRESSED IN PLACENTA, SIGNAL = 4.5; EXPRESSED IN BRAIN, SIGNAL =   3; EXPRESSED IN BONE MARROW, SIGNAL =   3; EXPRESSED IN HEART, SIGNAL = 3.5; EXPRESSED IN HELA, SIGNAL = 5.3; EXPRESSED IN HBL100, SIGNAL = 4.2; EXPRESSED IN ADULT LIVER, SIGNAL = 1.8; EXPRESSED IN FETAL LIVER, SIGNAL = 4.7; EXPRESSED IN BT474, SIGNAL = 4.5; EST_HUMAN HIT: AU118377.1, EVALUE 1.00e-18; SWISSPROT HIT: P51816, EVALUE 1.00e-112
TNKGDALANRVQNTLGNYDEMKNLLTNHSNQNHLVGIPKNSVPQNPNNKNEPSFFPEQKNRIIPPHQDNTHPSAPMPPPSVVILNSTLIHSNRKSKPEWSRDSHNPSTVLASQASGQPNKMQTLTQDQSQAKLEDFFVYPAEQPQIGEVEESNPSAKEDSNPNSSGEDAFKEIFQSNSPEESEFAVQAPGSP

SEQ ID NO: 37941 - protein, 31 aa, Homo sapiens
  MAP TO AL121959.4; EXPRESSED IN BT474, SIGNAL = 1.8; EXPRESSED IN FETAL LIVER, SIGNAL = 2.2; EXPRESSED IN BRAIN, SIGNAL = 1.8; EXPRESSED IN BONE MARROW, SIGNAL = 1.8; EXPRESSED IN ADULT LIVER, SIGNAL = 2.8; EXPRESSED IN LUNG, SIGNAL = 2.4; EXPRESSED IN PLACENTA, SIGNAL = 2.2; EXPRESSED IN HEART, SIGNAL = 2.1; EXPRESSED IN HELA, SIGNAL = 1.7; EXPRESSED IN HBL100, SIGNAL = 1.9; EST_HUMAN HIT: AA125913.1, EVALUE 1.60e-01
FDSSRGPSGAATSMMPAATEEAQLGLSTTWS

SEQ ID NO: 37942 - protein, 108 aa, Homo sapiens
  MAP TO AC012271.1; EXPRESSED IN HBL100, SIGNAL =  14; EXPRESSED IN HELA, SIGNAL =  17; EXPRESSED IN HEART, SIGNAL =  62; EXPRESSED IN BONE MARROW, SIGNAL =  13; EXPRESSED IN LUNG, SIGNAL =  28; EXPRESSED IN PLACENTA, SIGNAL = 9.9; EXPRESSED IN ADULT LIVER, SIGNAL = 3.1; EXPRESSED IN FETAL LIVER, SIGNAL =  12; EXPRESSED IN BT474, SIGNAL =  27; EXPRESSED IN BRAIN, SIGNAL =  14; SWISSPROT HIT: O15998, EVALUE 9.00e-60; EST_HUMAN HIT: BF127509.1, EVALUE 2.00e-58
GVMVGMGQKDSYVGDEAQSKRGILTLKYPIEHGIITNWDDMEKIWHHTFYNELRVAPEEHPTLLTEAPLNPKANREKMTQIMFETFNVPAMYVAIQAVLSLYASGRTT

SEQ ID NO: 37943 - protein, 605 aa, Homo sapiens
  MAP TO AC003002.1; EXPRESSED IN BT474, SIGNAL = 1.4; EXPRESSED IN FETAL LIVER, SIGNAL = 1.2; EXPRESSED IN BONE MARROW, SIGNAL = 1.4; EXPRESSED IN LUNG, SIGNAL = 1.5; EXPRESSED IN BRAIN, SIGNAL =   1; EXPRESSED IN HELA, SIGNAL =   1; EXPRESSED IN PLACENTA, SIGNAL =   1; EXPRESSED IN HEART, SIGNAL = 1.4; EST_HUMAN HIT: AF150239.1, EVALUE 1.00e-112; EST_HUMAN HIT: AF150239.1, EVALUE 1.00e-112; SWISSPROT HIT: P52740, EVALUE 0.00e+00
FWCEAEHEAPSEQSVSVEGVSQVRTAESGLFQKAHPCEMCDPLLKDILHLAEHQGSHLTQKLCTRGPCRRRFSFSANFYQHQKQHNGENCFRGDDGGASFVKSCTVHMLGRSFTCREEGMDLPDSSGLFQHQTTYNRVSPCRRTECMESFPHSSSLRQHQGDYDGQMLFSCGDEGKAFLDTFTLLDSQMTHAEVRPFRCLPCGNVFKEKSALINHRKIHSGEISHVCKECGKAFIHLHHLKMHQKFHTGKRHYTCSECGKAFSRKDTLVQHQRVHTGERSYDCSECGKAYSRSSHLVQHQRIHTGERPYKCNECGKAFSRKDTLVQHQRFHTGERPYECSECGKFFSQSSHLIEHWRIHTGARPYECIECGKFFSHNSSLIKHRRVHTGARSYVCSKCGKAFGCKDTLVQHQIIHTGARPYECSECGKAFSRKDTLVQHQKIHTGERPYECGECGKFFSHSSNLIVHQRIHTGAKPYECNECGKCFSHNSSLILHQRVHTGARPYVCSECGKAYISSSHLVQHKKVHTGARPYECSECGKFFSRNSGLILHQRVHTGEKPYVCSECGKAYSRSSHLVRHQKAHTGERAHECNSFGGPLAASLKLV

SEQ ID NO: 37944 - protein, 292 aa, Homo sapiens
  MAP TO AC005414.2; EXPRESSED IN PLACENTA, SIGNAL = 5.5; EXPRESSED IN HBL100, SIGNAL = 6.2; EXPRESSED IN HEART, SIGNAL = 7.1; EXPRESSED IN FETAL LIVER, SIGNAL = 6.1; EXPRESSED IN BONE MARROW, SIGNAL = 5.5; EXPRESSED IN HELA, SIGNAL = 8.2; EXPRESSED IN BT474, SIGNAL = 7.7; EXPRESSED IN ADULT LIVER, SIGNAL = 3.2; EXPRESSED IN BRAIN, SIGNAL = 7.9; EXPRESSED IN LUNG, SIGNAL =  11
QWPPCSGLLNPHLPAMSTSNITSFRHHHHHHDYHDHHHHHHHHYHHHHHYHHHPHHHHNHHHHHHHHYHYHYHHHHHHHYHHHPHHHNHHHHHHHHRRHYPTIPTTTTTTIPTITITTIPTTTSTITIITTATTITTITTIITTIITTTTLTTTTIIPLPLPPPPPSSPSLSPPSQPSPPPPLHCHHHYHLYYLYYHHHHHRHHHYHHHHHHHHHHHYHHHYHHHHHHHPHHHHHHLYHLHYHHYHHPHYHHPNYLYHYHHCHHQHHLPHHHHYHHFHLPYLHHHHLHHSCH

SEQ ID NO: 37945 - protein, 291 aa, Homo sapiens
  MAP TO AC005538.2; EXPRESSED IN BONE MARROW, SIGNAL = 1.7; EXPRESSED IN LUNG, SIGNAL = 1.1; EXPRESSED IN HBL100, SIGNAL = 2.3; EXPRESSED IN HELA, SIGNAL = 1.9; EXPRESSED IN HEART, SIGNAL = 0.97; EXPRESSED IN BT474, SIGNAL = 1.3; EXPRESSED IN FETAL LIVER, SIGNAL = 1.7; EXPRESSED IN ADULT LIVER, SIGNAL = 0.98; EST_HUMAN HIT: BE869162.1, EVALUE 1.00e-109; SWISSPROT HIT: Q03414, EVALUE 3.30e+00
EIEIRFDQLHREYCLSPRNQPRRMCLPDSWAMNMYRGGPASPGGLQGLETRRLSLPSSKAKAKSLSEAFENLGKRSLEAGRCLPKSDSSSSLPKTNPTHSATRPQQTSDLHVQGNSSGIFRKSVSPSKTLSVPDKEVPGHGRNRYDEIKEEFDKLHQKYCLKSPGQMTVPLCIGVSTDKASMEVRYQTEGFLGKLNPDPHFQGFQKLPSSPLGCRKSLLGSTAIEAPSSTCVARAITRDGTRDHQFPAKRPRLSEPQGSGRQGNSLGASDGVDNTVRPGDQGSSSQPNSEE

SEQ ID NO: 37946 - protein, 231 aa, Homo sapiens
  MAP TO AC003958.1; EXPRESSED IN BT474, SIGNAL = 1.7; EXPRESSED IN FETAL LIVER, SIGNAL = 1.9; EXPRESSED IN ADULT LIVER, SIGNAL = 1.3; EXPRESSED IN BONE MARROW, SIGNAL =   2; EXPRESSED IN LUNG, SIGNAL = 1.5; EXPRESSED IN BRAIN, SIGNAL = 1.6; EXPRESSED IN PLACENTA, SIGNAL =   2; EXPRESSED IN HBL100, SIGNAL = 1.3; EXPRESSED IN HELA, SIGNAL = 1.5; EXPRESSED IN HEART, SIGNAL = 2.2; SWISSPROT HIT: P08131, EVALUE 9.00e-16; EST_HUMAN HIT: AI907096.1, EVALUE 3.00e-39
CCQPVGSEATSCQPVLCVPTSCQPVLCKSSCCQPVVCEPSCCSAVCTLPSSCQPVVCEPSCCQPVCPTPTCSVTSSCQAVCCDPSPCEPSCSESSICQPATCVALVCEPVCLRPVCCVQSSCEPPSVPSTCQEPSCCVSSICQPICSEPSPCSPAVCVSSPCQPTCYVVKRCPSVCPEPVSCPSTSCRPLSCSPGSSASAICRPTCPRTFYIPSSSKRPCSATISYRPVSR

SEQ ID NO: 37947 - protein, 124 aa, Homo sapiens
  MAP TO AL078475.2; EXPRESSED IN HEART, SIGNAL = 0.8; EST_HUMAN HIT: AI806860.1, EVALUE 2.00e-24; SWISSPROT HIT: P44811, EVALUE 6.90e+00
TLTLSRDVFIIGITLHSIAHMVILVSRHERQSQHLHSISISPQAFPEKRAAQTIPLLVSYCLVMCWVDLIISSSSTLLWTCNPVFLSMQNLVGDVYATVVPLEQISSDKNIVDILQNMQSAIKL

SEQ ID NO: 37948 - protein, 31 aa, Homo sapiens
  MAP TO AP000134.1; EXPRESSED IN ADULT LIVER, SIGNAL = 0.7; EXPRESSED IN PLACENTA, SIGNAL = 0.62; EXPRESSED IN LUNG, SIGNAL = 0.65; EXPRESSED IN HEART, SIGNAL = 0.83
CPQMTRWLSGAHYYPCRVGRGNQEQELGLMD

SEQ ID NO: 37949 - protein, 31 aa, Homo sapiens [sequence omitted]

SEQ ID NO: 37950 - protein, 46 aa, Homo sapiens
  MAP TO AF001550.1; EXPRESSED IN HBL100, SIGNAL = 9.1; EXPRESSED IN HEART, SIGNAL = 7.6; EXPRESSED IN FETAL LIVER, SIGNAL =  11; EXPRESSED IN ADULT LIVER, SIGNAL =  11; EXPRESSED IN LUNG, SIGNAL =  10; EXPRESSED IN BRAIN, SIGNAL = 8.1; EXPRESSED IN PLACENTA, SIGNAL = 9.6; EXPRESSED IN HELA, SIGNAL = 9.5; EXPRESSED IN BT474, SIGNAL = 9.2; EXPRESSED IN BONE MARROW, SIGNAL = 9.2; EST_HUMAN HIT: AW298181.1, EVALUE 1.00e-22; SWISSPROT HIT: P40342, EVALUE 3.50e+00
PRLFPQRVIRAPVPWHSVYRSAKKWNEEHLHTVNPMMLRLKELWFA

SEQ ID NO: 37951 - protein, 39 aa, Homo sapiens
  MAP TO AF001550.1; EXPRESSED IN HBL100, SIGNAL = 9.1; EXPRESSED IN HEART, SIGNAL = 7.6; EXPRESSED IN FETAL LIVER, SIGNAL =  11; EXPRESSED IN ADULT LIVER, SIGNAL =  11; EXPRESSED IN LUNG, SIGNAL =  10; EXPRESSED IN BRAIN, SIGNAL = 8.1; EXPRESSED IN PLACENTA, SIGNAL = 9.6; EXPRESSED IN HELA, SIGNAL = 9.5; EXPRESSED IN BT474, SIGNAL = 9.2; EXPRESSED IN BONE MARROW, SIGNAL = 9.2; EST_HUMAN HIT: AW298181.1, EVALUE 1.00e-16
PLVSSKSDPGPCALAQCLQERQEVERGASAHGEPHDAQA

SEQ ID NO: 37952 - protein, 1591 aa, Homo sapiens
  MAP TO AC000119.1; EXPRESSED IN BT474, SIGNAL = 8.8; EXPRESSED IN FETAL LIVER, SIGNAL = 5.1; EXPRESSED IN ADULT LIVER, SIGNAL = 1.8; EXPRESSED IN LUNG, SIGNAL = 3.5; EXPRESSED IN PLACENTA, SIGNAL = 3.4; EXPRESSED IN BRAIN, SIGNAL = 5.7; EXPRESSED IN BONE MARROW, SIGNAL = 4.6; EXPRESSED IN HEART, SIGNAL = 7.8; EXPRESSED IN HELA, SIGNAL = 5.8; EXPRESSED IN HBL100, SIGNAL = 7.7; EST_HUMAN HIT: BE888763.1, EVALUE 1.00e-113; SWISSPROT HIT: P50495, EVALUE 1.80e-02
IRMAKQLNLPENTDDWTKEDVNQWLESHKIDQKHREILTEQDVNGAVLKWLKKEHLVDMGITHGPAIQIEELFKELRKTAIEDSIQTSKMGKPSKNAPKDQTVSQKERRETSKQKQKGKENPDMANPSAMSTTAKGSKSLKVELIEDKIDYTKERQPSIDLTCVSYPFDEFSNPYRYKLDFSLQPETGPGNLIDPIHEFKAFTNTATATEEDVKMKFSNEVFRFASACMNSRTNGTIHFGVKDKPHGKIVGIKVTNDTKEALINHFNLMINKYFEDHQVQQAKKCIREPRFVEVLLPNSTLSDRFVIEVDIIPQFSECQYDYFQIKMQNYNNKIWEQSKKFSLFVRDGTSSKDITKNKVDFRAFKADFKTLAESRKAAEEKFRAKTNKKEREGPKLVKLLTGNQDLLDNSYYEQYILVTNKCHPDQTKHLDFLKEIKWFAVLEFDPESNINGVVKAYKESRVANLHFPSVYVEQKTTPNETISTLNLYHQPSWIFCNGRLDLDSEKYKPFDPSSWQRERASDVRKLISFLTHEDIMPRGKFLVVFLLLSSVDDPRDPLIETFCAFYQDLKGMENILCICVHPHIFQGWKDLLEARLIKHQDEISSQCISALSLEEINGTILKLKSVTQSSKRLLPSIGLSTVLLKKEEDIMTALEIICENECEGTLLEKDKNKFLEFKASKEEDFYRGGKVSWWNFYFSSESYSSPFVKRDKYERLEAMIQNCADSSKPTSTKIIHLYHHPGCGGTTLAMHILWELRKKFRCAVLKNKTVDFSEIGEQVTSLITYGAMNRQEYVPVLLLVDDFEEQDNVYLLQYSIQTAIAKKYIRYEKPLVIILNCMRSQNPEKSARIPDSIAVIQQLSPKEQRAFELKLKEIKEQHKNFEDFYSFMIMKTNFNKEYIENVVRNILKGQNIFTKEAKLFSFLALLNSYVPDTTISLSQCEKFLGIGNKKAFWGTEKFEDKMGTYSTILIKTEVIECGNYCGVRIIHSLIAEFSLEELKKSYHLNKSQIMLDMLTENLFFDTGMGKSKFLQDMHTLLLTRHRDEHEGETGNWFSPFIEALHKDEGNEAVEAVLLESIHRFNPNAFICQALARHFYIKKKDFGNALNWAKQAKIIEPDNSYISDTLGQVYKSKIRWWIEENGGNGNISVDDLIALLDLAEHASSAFKESQQQSEDREYEVKERLYPKSKRRYDTYNIAGYQGEIEVGLYTIQILQLIPFFDNKNELSKRYMVNFVSGSSDIPGDPNNEYKLALKNYIPYLTKLKFSLKKSFDFFDEYFVLLKPRNNIKQNEEAKTRRKVAGYFKKYVDIFCLLEESQNNTGLGSKFSEPLQVERCRRNLVALKADKFSGLLEYLIKSQEDAISTMKCIVNEYTFLLEQCTVKIQSKEKLNFILANIILSCIQPTSRLVKPVEKLKDQLREVLQPIGLTYQFSEPYFLASLLFWPENQQLDQHSEQMKEYAQALKNSFKGQYKHMHRTKQPIAYFFLGKGKRLERLVHKGKIDQCFKKTPDINSLWQSGDVWKEEKVQELLLRLQGRAENNCLYIEYGINEKITIPITPAFLGQLRSGRSIEKVSFYLGFSIGGPLAYDIEIV

SEQ ID NO: 37953 - protein, 47 aa, Homo sapiens
  MAP TO AF001905.1; EXPRESSED IN BT474, SIGNAL = 2.6; EXPRESSED IN ADULT LIVER, SIGNAL = 2.7; EXPRESSED IN BRAIN, SIGNAL = 2.8; EXPRESSED IN BONE MARROW, SIGNAL = 2.3; EXPRESSED IN LUNG, SIGNAL =   3; EXPRESSED IN PLACENTA, SIGNAL = 2.7; EXPRESSED IN HBL100, SIGNAL = 2.8; EXPRESSED IN HELA, SIGNAL = 3.1; EXPRESSED IN HEART, SIGNAL = 2.7; EXPRESSED IN FETAL LIVER, SIGNAL = 3.1; EST_HUMAN HIT: BE162737.1, EVALUE 5.00e-05
AACGDSNDELLLQELLQEHTRKAERIHRAFELDYPCRLSEMPKNCES

SEQ ID NO: 37954 - protein, 408 aa, Homo sapiens
  MAP TO AL021808.1; EXPRESSED IN BT474, SIGNAL = 0.94; EXPRESSED IN ADULT LIVER, SIGNAL =   3; EXPRESSED IN BONE MARROW, SIGNAL = 1.2; EXPRESSED IN BRAIN, SIGNAL = 0.98; EXPRESSED IN HELA, SIGNAL = 0.96; EXPRESSED IN HEART, SIGNAL = 1.2; EXPRESSED IN FETAL LIVER, SIGNAL = 3.7; EST_HUMAN HIT: AU132511.1, EVALUE 3.00e-19; SWISSPROT HIT: P52591, EVALUE 6.00e-32
STGEATSVAHSPLKTPSLPTPPGCSQSELLPGTSPDSKPTATFILLTPTSPTLPVTDTTWPPSTSQADRSPMPPDPPAPPTIQSTLLGMVSSPTSHLSASAPPDATSAHLMLKPILGPLHNSEIGSSSYSRISVTAAASSISSLSTIQGTLTPTFKPIFGSIDPLKTTPMIAPFSSKQTPPPFTHASTHHFHGLVKATSVVMSTTLASTSKDSVFKPPLDFGVVNVTSAVGNTYSVPSTCDTFLLGTAQAFRADFTPATGFIFPPHHHPTIPTVHTVTMFTQVLSSVVQISPRSSTANFRGMGSPLPASALVSTNWLASTPSISNLTPAITSPLGSSSRPPFPLSQGANPQPAFGATNGQKQGPSQPALMPSVSSSFLFGSSAVALPTPMPTPAQPAFISTTQSALGC

SEQ ID NO: 37955 - protein, 29 aa, Homo sapiens [sequence omitted]

SEQ ID NO: 37956 - protein, 252 aa, Homo sapiens
  MAP TO AL022344.1; EXPRESSED IN BRAIN, SIGNAL = 0.97; EXPRESSED IN HELA, SIGNAL =   1; EXPRESSED IN HBL100, SIGNAL = 2.7; EXPRESSED IN HEART, SIGNAL = 0.95; EXPRESSED IN BT474, SIGNAL = 1.3; EST_HUMAN HIT: BE928084.1, EVALUE 1.00e-35
LMMPKEEKQMDLNTGRMRRKAIFGDEDESGDSDDEEDDEMSEDDGLENGSSDEEAEEEENAEMTDQYMAVKGIKRRKLELEEDSEMDLPAFADSDDDLERSSAEEGEAEEADESSEEEDCTAGEKGISGSKAAGEGSKAGLSPANCQSDRVNLEKSLLMKKAALPTFDSGHCTAEEVFASEDESEESSSLSAEEEDSENEEAIRKKLSKPSQVSSGQKLGPQNFIDETSDIENLLKEEEDYKEENNDSKETS

SEQ ID NO: 37957 - protein, 90 aa, Homo sapiens
  MAP TO AE000662.1; EXPRESSED IN HEART, SIGNAL = 1.7; EXPRESSED IN FETAL LIVER, SIGNAL = 1.8; EXPRESSED IN BT474, SIGNAL = 1.6; EXPRESSED IN ADULT LIVER, SIGNAL = 1.7; EXPRESSED IN BRAIN, SIGNAL = 1.8; EXPRESSED IN BONE MARROW, SIGNAL = 1.7; EXPRESSED IN LUNG, SIGNAL = 1.9; EXPRESSED IN PLACENTA, SIGNAL = 1.3; EXPRESSED IN HBL100, SIGNAL = 1.9; EXPRESSED IN HELA, SIGNAL = 1.6; SWISSPROT HIT: P01848, EVALUE 4.00e-48; EST_HUMAN HIT: AW410869.1, EVALUE 3.00e-47
IQNPDPAVYQLRDSKSSDKSVCLFTDFDSQTNVSQSKDSDVYITDKTVLDMRSMDFKSNSAVAWSNKSDFACANAFNNSIIPEDTFFPSP

SEQ ID NO: 37958 - protein, 30 aa, Homo sapiens
  MAP TO AE000662.1; EXPRESSED IN HEART, SIGNAL = 1.7; EXPRESSED IN FETAL LIVER, SIGNAL = 1.8; EXPRESSED IN BT474, SIGNAL = 1.6; EXPRESSED IN ADULT LIVER, SIGNAL = 1.7; EXPRESSED IN BRAIN, SIGNAL = 1.8; EXPRESSED IN BONE MARROW, SIGNAL = 1.7; EXPRESSED IN LUNG, SIGNAL = 1.9; EXPRESSED IN PLACENTA, SIGNAL = 1.3; EXPRESSED IN HBL100, SIGNAL = 1.9; EXPRESSED IN HELA, SIGNAL = 1.6; EST_HUMAN HIT: BF375676.1, EVALUE 4.00e-10
SLSAYSPILILKQMCHKVRILMCISQTKLC

SEQ ID NO: 37959 - protein, 48 aa, Homo sapiens
  MAP TO AF001549.1; EXPRESSED IN BONE MARROW, SIGNAL = 3.6; EXPRESSED IN HBL100, SIGNAL = 5.6; EXPRESSED IN HELA, SIGNAL = 3.2; EXPRESSED IN HEART, SIGNAL = 2.5; EXPRESSED IN FETAL LIVER, SIGNAL = 3.3; EXPRESSED IN BT474, SIGNAL = 3.5; EXPRESSED IN LUNG, SIGNAL = 4.2; EXPRESSED IN BRAIN, SIGNAL =   8; EXPRESSED IN PLACENTA, SIGNAL = 1.6; EST_HUMAN HIT: BE000837.1, EVALUE 1.00e-20; SWISSPROT HIT: Q58341, EVALUE 9.10e-01
NKIVLKDVITLRRHVETKVRAKIRKRKVTTKINHHDKINGKRKTARKQ

SEQ ID NO: 37960 - protein, 32 aa, Homo sapiens
  MAP TO AF030876.1; EXPRESSED IN BONE MARROW, SIGNAL = 1.5; EXPRESSED IN HBL100, SIGNAL = 1.8; EXPRESSED IN HELA, SIGNAL = 1.7; EXPRESSED IN HEART, SIGNAL = 1.7; EXPRESSED IN FETAL LIVER, SIGNAL = 1.8; EXPRESSED IN ADULT LIVER, SIGNAL = 1.7; EXPRESSED IN BRAIN, SIGNAL = 1.4; EXPRESSED IN PLACENTA, SIGNAL = 1.3; EXPRESSED IN BT474, SIGNAL = 1.1; EXPRESSED IN LUNG, SIGNAL =   2; SWISSPROT HIT: P51608, EVALUE 1.00e-13; EST_HUMAN HIT: BE903173.1, EVALUE 2.00e-12
MYDDPTLPEGWTRKLKQRKSGRSAGKYDVYLI

SEQ ID NO: 37961 - protein, 25 aa, Homo sapiens
  MAP TO AF030876.1; EXPRESSED IN BONE MARROW, SIGNAL = 1.5; EXPRESSED IN HBL100, SIGNAL = 1.8; EXPRESSED IN HELA, SIGNAL = 1.7; EXPRESSED IN HEART, SIGNAL = 1.7; EXPRESSED IN FETAL LIVER, SIGNAL = 1.8; EXPRESSED IN ADULT LIVER, SIGNAL = 1.7; EXPRESSED IN BRAIN, SIGNAL = 1.4; EXPRESSED IN PLACENTA, SIGNAL = 1.3; EXPRESSED IN BT474, SIGNAL = 1.1; EXPRESSED IN LUNG, SIGNAL =   2; EST_HUMAN HIT: R18712.1, EVALUE 4.00e-05
NTSGKKSQKTRTSRASRTNPSSLKR

SEQ ID NO: 37962 - protein, 40 aa, Homo sapiens
  MAP TO AF111167.2; EXPRESSED IN PLACENTA, SIGNAL = 1.3; EXPRESSED IN HELA, SIGNAL = 1.1; EXPRESSED IN ADULT LIVER, SIGNAL = 1.5; EXPRESSED IN LUNG, SIGNAL = 1.2; EXPRESSED IN BRAIN, SIGNAL =   1; EXPRESSED IN HEART, SIGNAL = 1.1; EXPRESSED IN BT474, SIGNAL = 1.4; EXPRESSED IN FETAL LIVER, SIGNAL = 1.2; EXPRESSED IN BONE MARROW, SIGNAL = 0.95; EXPRESSED IN HBL100, SIGNAL = 1.2; SWISSPROT HIT: P27353, EVALUE 1.20e+00
GPGFFLLLWDSSRYMASVLEEIENVEGCKHSRHKHEPTHP

SEQ ID NO: 37963 - protein, 20 aa, Homo sapiens
  MAP TO AF042484.1; EXPRESSED IN BONE MARROW, SIGNAL = 2.9; EXPRESSED IN HBL100, SIGNAL =   3; EXPRESSED IN PLACENTA, SIGNAL = 2.6; EXPRESSED IN HELA, SIGNAL =   4; EXPRESSED IN FETAL LIVER, SIGNAL = 3.5; EXPRESSED IN ADULT LIVER, SIGNAL = 3.1; EXPRESSED IN LUNG, SIGNAL = 3.1; EXPRESSED IN BRAIN, SIGNAL = 2.7; EXPRESSED IN HEART, SIGNAL = 3.1; EXPRESSED IN BT474, SIGNAL = 2.7; EST_HUMAN HIT: BF183195.1, EVALUE 1.00e-03
CQRPSNQSDSILNTGWVKQG

SEQ ID NO: 37964 - protein, 75 aa, Homo sapiens
  MAP TO AC007336.2; EXPRESSED IN HEART, SIGNAL = 1.1; EXPRESSED IN PLACENTA, SIGNAL = 1.5; EXPRESSED IN LUNG, SIGNAL =   2; EST_HUMAN HIT: AI752577.1, EVALUE 1.00e-41; SWISSPROT HIT: P33436, EVALUE 1.00e-42
QYLNTFYGCPKESCNLFVLKDTLKKMQKFFGLPQTGDLDQNTIETMRKPRCGNPDVANYNFFPRKPKWDKNQITY

SEQ ID NO: 37965 - protein, 81 aa, Homo sapiens
  MAP TO AF121897.1; EXPRESSED IN PLACENTA, SIGNAL = 2.5; EXPRESSED IN HELA, SIGNAL = 3.1; EXPRESSED IN HEART, SIGNAL = 3.2; EXPRESSED IN ADULT LIVER, SIGNAL = 2.3; EXPRESSED IN BT474, SIGNAL = 2.2; EXPRESSED IN FETAL LIVER, SIGNAL = 2.8; EXPRESSED IN LUNG, SIGNAL = 2.7; EXPRESSED IN BONE MARROW, SIGNAL = 2.4; EXPRESSED IN BRAIN, SIGNAL =   3; EXPRESSED IN HBL100, SIGNAL =   2; EST_HUMAN HIT: AA928672.1, EVALUE 5.00e-14; SWISSPROT HIT: P17149, EVALUE 3.50e-01
MRTLSGDSTKRMVLNHHKPPHDPITSLQAPPPTLRITIQHEISVGTQSQTISAEKALPVETLLSNTTRLSPFLHYTLCCSH

SEQ ID NO: 37966 - protein, 31 aa, Homo sapiens
  MAP TO AC005095.2; EXPRESSED IN HEART, SIGNAL =   1; EST_HUMAN HIT: AU135927.1, EVALUE 1.00e-03; SWISSPROT HIT: P33750, EVALUE 1.60e+00
VLQECVRVLNATKLEGVFAKPCLAWLDGHEM

SEQ ID NO: 37967 - protein, 38 aa, Homo sapiens
  MAP TO AC009478.1; EXPRESSED IN HBL100, SIGNAL =   4; EXPRESSED IN HEART, SIGNAL = 1.3
KAGLGQSIYFTESQFLVHRNEVKNVSLIDLAMENKWNK

SEQ ID NO: 37968 - protein, 50 aa, Homo sapiens
  MAP TO AC008125.9; EXPRESSED IN HEART, SIGNAL = 0.99; EST_HUMAN HIT: BF679546.1, EVALUE 2.90e+00
DSFLEPSLHTVRKPKRHTLTEHVEKLQPRVDVLVNIPVDVTANSLHQVPD

SEQ ID NO: 37969 - protein, 39 aa, Homo sapiens
  MAP TO AF045555.1; EXPRESSED IN BT474, SIGNAL = 2.9; EXPRESSED IN LUNG, SIGNAL = 2.6; EXPRESSED IN BONE MARROW, SIGNAL = 3.2; EXPRESSED IN PLACENTA, SIGNAL = 2.9; EXPRESSED IN HBL100, SIGNAL = 2.8; EXPRESSED IN HELA, SIGNAL = 2.1; EXPRESSED IN ADULT LIVER, SIGNAL = 2.7; EXPRESSED IN FETAL LIVER, SIGNAL = 2.6; EXPRESSED IN BRAIN, SIGNAL = 2.8; EXPRESSED IN HEART, SIGNAL = 3.2; EST_HUMAN HIT: BE387054.1, EVALUE 5.00e-10; SWISSPROT HIT: P35250, EVALUE 3.00e-11
VCDEPHPLLVKEMIQHCVNANIDEAYKVGLLPPVLAEEP

SEQ ID NO: 37970 - protein, 44 aa, Homo sapiens
  MAP TO AB020864.1; EXPRESSED IN BT474, SIGNAL =   1; EXPRESSED IN HELA, SIGNAL = 1.2; EXPRESSED IN HEART, SIGNAL = 1.2; EXPRESSED IN LUNG, SIGNAL = 2.2; SWISSPROT HIT: P04977, EVALUE 6.10e+00; EST_HUMAN HIT: BE742687.1, EVALUE 1.00e-19
GNAAVIKYEEKPPKPAFQNGSSGSFYLKPLVSRAHVHLMKTPPK

SEQ ID NO: 37971 - protein, 41 aa, Homo sapiens
  MAP TO AL121587.4; EXPRESSED IN HEART, SIGNAL = 0.88; EXPRESSED IN LUNG, SIGNAL = 1.6; EXPRESSED IN BRAIN, SIGNAL =   1; EXPRESSED IN BONE MARROW, SIGNAL = 0.94; EXPRESSED IN FETAL LIVER, SIGNAL = 0.96
KDLANISKIKSVTHIKNIIVQCFYFKETLRLKKAIIIVVII

SEQ ID NO: 37972 - protein, 25 aa, Homo sapiens
  MAP TO AL078459.8; EXPRESSED IN FETAL LIVER, SIGNAL =   1; EXPRESSED IN HEART, SIGNAL = 0.89
FSFLKNRLITPSPPNSEGTFSRQMR

SEQ ID NO: 37973 - protein, 78 aa, Homo sapiens
  MAP TO AL031407.3; EXPRESSED IN BONE MARROW, SIGNAL = 8.1; EXPRESSED IN HEART, SIGNAL = 6.7; EXPRESSED IN FETAL LIVER, SIGNAL = 6.6; EXPRESSED IN ADULT LIVER, SIGNAL = 8.3; EXPRESSED IN BT474, SIGNAL = 6.9; EXPRESSED IN LUNG, SIGNAL =   7; EXPRESSED IN PLACENTA, SIGNAL = 6.2; EXPRESSED IN HELA, SIGNAL = 7.3; EXPRESSED IN HBL100, SIGNAL = 6.6; EXPRESSED IN BRAIN, SIGNAL = 7.2; SWISSPROT HIT: O54951, EVALUE 1.20e+00; EST_HUMAN HIT: AU119016.1, EVALUE 8.60e+00
KPGAANSHASPSGENDDGGEKEQETGHGHGGPGGLESRVHGGPEPTLPLSLQQFDYVSHFPFFVSANSSWVSVTYRQR

SEQ ID NO: 37974 - protein, 36 aa, Homo sapiens
  MAP TO AL031407.3; EXPRESSED IN BONE MARROW, SIGNAL = 8.1; EXPRESSED IN HEART, SIGNAL = 6.7; EXPRESSED IN FETAL LIVER, SIGNAL = 6.6; EXPRESSED IN ADULT LIVER, SIGNAL = 8.3; EXPRESSED IN BT474, SIGNAL = 6.9; EXPRESSED IN LUNG, SIGNAL =   7; EXPRESSED IN PLACENTA, SIGNAL = 6.2; EXPRESSED IN HELA, SIGNAL = 7.3; EXPRESSED IN HBL100, SIGNAL = 6.6; EXPRESSED IN BRAIN, SIGNAL = 7.2
RRERTGDRTWTWRSWGPGEPGSWGPGAHSAPVSSAV

SEQ ID NO: 37975 - protein, 104 aa, Homo sapiens; identical to SEQ ID NO: 35862
  MAP TO AL033520.9; EXPRESSED IN BRAIN, SIGNAL = 1.2; EXPRESSED IN BONE MARROW, SIGNAL = 1.2; EXPRESSED IN HELA, SIGNAL = 1.2; EXPRESSED IN PLACENTA, SIGNAL = 1.1; EXPRESSED IN HBL100, SIGNAL = 1.3; EXPRESSED IN HEART, SIGNAL = 0.99; EXPRESSED IN FETAL LIVER, SIGNAL = 0.95; EXPRESSED IN BT474, SIGNAL = 1.3; SWISSPROT HIT: Q15544, EVALUE 5.00e-28; EST_HUMAN HIT: AI204671.1, EVALUE 5.00e-53

SEQ ID NO: 37976 - protein, 39 aa, Homo sapiens
  MAP TO AC006546.9; EXPRESSED IN ADULT LIVER, SIGNAL = 0.72; EXPRESSED IN HEART, SIGNAL = 0.81; SWISSPROT HIT: Q9ZCT9, EVALUE 8.10e+00
NKAQAVLRRTEGNWAFDPLVICVRKIMEHLCDIQQYSCQ

SEQ ID NO: 37977 - protein, 52 aa, Homo sapiens
  MAP TO AC012140.1; EXPRESSED IN FETAL LIVER, SIGNAL = 0.96; EXPRESSED IN BONE MARROW, SIGNAL = 1.1; EXPRESSED IN BRAIN, SIGNAL = 0.96; EXPRESSED IN HELA, SIGNAL = 1.1; EXPRESSED IN PLACENTA, SIGNAL = 0.99; EXPRESSED IN HEART, SIGNAL = 1.1; EXPRESSED IN ADULT LIVER, SIGNAL = 1.1; SWISSPROT HIT: O75031, EVALUE 9.00e-22
VLRLVQSVVLEPEVFSKSASEFRSSLPLQRILAMSKSRNPRLQTAAQELLED

SEQ ID NO: 37978 - protein, 36 aa, Homo sapiens
  MAP TO AF188031.1; EXPRESSED IN HEART, SIGNAL = 1.4; EXPRESSED IN BRAIN, SIGNAL =   1; EXPRESSED IN BONE MARROW, SIGNAL = 0.99; EXPRESSED IN BT474, SIGNAL = 1.2; SWISSPROT HIT: Q9Z184, EVALUE 5.00e-15; EST_HUMAN HIT: BE830869.1, EVALUE 2.00e-10
DEMELGYVQAPHKTLPVVFDSPRNGELQDFPYKRIL

SEQ ID NO: 37979 - protein, 31 aa, Homo sapiens
  MAP TO AC007558.3; EXPRESSED IN BONE MARROW, SIGNAL = 1.4; EXPRESSED IN LUNG, SIGNAL =   2; EXPRESSED IN HEART, SIGNAL = 0.86
KILHRLCYLFFQKYGGKIKVVHTDDIREKKL

SEQ ID NO: 37980 - protein, 18 aa, Homo sapiens
  MAP TO AC007558.3; EXPRESSED IN BONE MARROW, SIGNAL = 1.4; EXPRESSED IN LUNG, SIGNAL =   2; EXPRESSED IN HEART, SIGNAL = 0.86
EKYFIDYVTSSFKNMEEK

SEQ ID NO: 37981 - protein, 46 aa, Homo sapiens
  MAP TO AC007270.2; EXPRESSED IN FETAL LIVER, SIGNAL = 0.63; EXPRESSED IN HEART, SIGNAL = 0.81; EXPRESSED IN HELA, SIGNAL = 0.77; EXPRESSED IN PLACENTA, SIGNAL = 0.6; EXPRESSED IN LUNG, SIGNAL = 0.7; EST_HUMAN HIT: AW236973.1, EVALUE 2.00e-03
LQKLEVQSQGTTFGEDLFAGEVSVQSPKEAQGIHGEGAEHANVLAQ

SEQ ID NO: 37982 - protein, 49 aa, Homo sapiens
  MAP TO AL121587.4; EXPRESSED IN LUNG, SIGNAL = 2.7; EXPRESSED IN BONE MARROW, SIGNAL = 0.97; EXPRESSED IN FETAL LIVER, SIGNAL =   1; EXPRESSED IN ADULT LIVER, SIGNAL = 0.97; EXPRESSED IN HEART, SIGNAL = 0.91; EST_HUMAN HIT: BE296613.1, EVALUE 2.00e-13; SWISSPROT HIT: Q95840, EVALUE 6.00e+00
KYECVPLQVLPEAPLKLWHNLQNLHFITFLKFKQILKLHEFWLRAVDLC

SEQ ID NO: 37983 - protein, 41 aa, Homo sapiens
  MAP TO AC007102.4; EXPRESSED IN FETAL LIVER, SIGNAL = 0.62; EXPRESSED IN HEART, SIGNAL = 0.82; EXPRESSED IN LUNG, SIGNAL = 0.82; EST_HUMAN HIT: BF207273.1, EVALUE 5.40e+00
LNVTSSGKLSLTTKHVAPFSLNLITYPNGGIGDYRVPLPTT

SEQ ID NO: 37984 - protein, 37 aa, Homo sapiens
  MAP TO AC007560.3; EXPRESSED IN LUNG, SIGNAL = 0.82; EXPRESSED IN HEART, SIGNAL = 0.85; EXPRESSED IN ADULT LIVER, SIGNAL = 0.77; EXPRESSED IN BRAIN, SIGNAL = 0.95; EXPRESSED IN PLACENTA, SIGNAL = 0.65; EXPRESSED IN HELA, SIGNAL = 0.85; EST_HUMAN HIT: T99826.1, EVALUE 2.20e-02
CFCPLAIASNAATNTEVQMPLQGPSFQFLWVNTRNHM

SEQ ID NO: 37985 - protein, 64 aa, Homo sapiens
  MAP TO AL121998.2; EXPRESSED IN PLACENTA, SIGNAL = 2.7; EXPRESSED IN HBL100, SIGNAL = 3.5; EXPRESSED IN HELA, SIGNAL = 2.9; EXPRESSED IN BT474, SIGNAL =   3; EXPRESSED IN LUNG, SIGNAL =   2; EXPRESSED IN BRAIN, SIGNAL = 2.9; EXPRESSED IN BONE MARROW, SIGNAL =   3; EXPRESSED IN HEART, SIGNAL = 2.9; EXPRESSED IN ADULT LIVER, SIGNAL = 3.7; EXPRESSED IN FETAL LIVER, SIGNAL = 2.5; EST_HUMAN HIT: R97452.1, EVALUE 1.00e-23; SWISSPROT HIT: P07358, EVALUE 4.00e-26
RNKRDTMVEDLVVLVRGGASEHITTLAYQELPTADLMQEWGDAVQYNPAIIKVKVHNAALPILS

SEQ ID NO: 37986 - protein, 271 aa, Homo sapiens
  MAP TO AC007556.2; EXPRESSED IN FETAL LIVER, SIGNAL = 2.9; EXPRESSED IN ADULT LIVER, SIGNAL =   2; EXPRESSED IN HEART, SIGNAL = 0.82; EXPRESSED IN HELA, SIGNAL = 1.6; EXPRESSED IN PLACENTA, SIGNAL = 2.3; EXPRESSED IN BRAIN, SIGNAL =   3; EXPRESSED IN BT474, SIGNAL = 0.6; EXPRESSED IN LUNG, SIGNAL = 2.1; EXPRESSED IN BONE MARROW, SIGNAL = 1.7; SWISSPROT HIT: P98164, EVALUE 0.00e+00; EST_HUMAN HIT: AL135050.1, EVALUE 6.00e-25
NLYFTNAFVSETLIEVLRINTTYRRVLLKVTVDMPRHIVVDPKNRYLFWADYGQRPKIERSFLDCTNRTVLVSEGIVTPRGLAVDRSDGYVYWVDDSLDIIARIRINGENSEVIRYGSRYPTPYGITVFENSIIWVDRNLKKIFQASKEPENTEPPTVIRDNINWLRDVTIFDKQVQPRSPAEVNNNPCLENNGGCSHLCFALPGLHTPKCDCAFGTLQSDGKNCAISTENFLIFALSNSLRSLHLDPENHSPPFQTINVERTVMSLDYDS

SEQ ID NO: 37987 - protein, 41 aa, Homo sapiens
  MAP TO AL122020.1; EXPRESSED IN HBL100, SIGNAL = 2.3; EXPRESSED IN HELA, SIGNAL = 2.9; EXPRESSED IN FETAL LIVER, SIGNAL = 2.8; EXPRESSED IN BT474, SIGNAL = 2.5; EXPRESSED IN BRAIN, SIGNAL = 1.9; EXPRESSED IN PLACENTA, SIGNAL = 3.7; EXPRESSED IN HEART, SIGNAL = 1.7; EXPRESSED IN ADULT LIVER, SIGNAL = 3.1; EXPRESSED IN LUNG, SIGNAL = 3.9; EXPRESSED IN BONE MARROW, SIGNAL = 1.7; EST_HUMAN HIT: BE744303.1, EVALUE 1.40e+00; SWISSPROT HIT: Q91513, EVALUE 6.10e+00
VPREHRRSDRPQHQLLMAHTSWGCKACPWLWQRDDRAVAPA

SEQ ID NO: 37988 - protein, 114 aa, Homo sapiens
  MAP TO D84394.1; EXPRESSED IN BONE MARROW, SIGNAL = 1.6; EXPRESSED IN PLACENTA, SIGNAL = 1.2; EXPRESSED IN HBL100, SIGNAL = 3.9; EXPRESSED IN HELA, SIGNAL = 3.3; EXPRESSED IN BT474, SIGNAL = 1.3; EXPRESSED IN BRAIN, SIGNAL = 1.1; EXPRESSED IN LUNG, SIGNAL = 2.4; EXPRESSED IN HEART, SIGNAL = 1.4; EXPRESSED IN ADULT LIVER, SIGNAL = 0.99; EST_HUMAN HIT: BE743982.1, EVALUE 8.00e-54; SWISSPROT HIT: Q30201, EVALUE 9.00e-16
EQGFTGSALSSPVPPMVNVTRSEASEGNITVTCRASSFYPRNIILTWRQDGVSLSHDTQQWGDVLPDGNGTYQTWVATRICRGEEQRFTCYMEHSGNHSTHPVPSGEPRVTLER

SEQ ID NO: 37989 - protein, 52 aa, Homo sapiens
  MAP TO D87675.1; EXPRESSED IN HBL100, SIGNAL = 2.4; EXPRESSED IN BT474, SIGNAL = 1.6; EXPRESSED IN LUNG, SIGNAL = 3.4; EXPRESSED IN BRAIN, SIGNAL = 3.4; EXPRESSED IN PLACENTA, SIGNAL = 2.7; EXPRESSED IN HELA, SIGNAL = 2.7; EXPRESSED IN HEART, SIGNAL = 1.4; EST_HUMAN HIT: BE831859.1, EVALUE 6.00e-26; SWISSPROT HIT: Q95241, EVALUE 5.00e-27
GNAGLLAEPQIAMFCGRLNMHMNVQNGKWDSDPSGTKTCIDTKEGILQYCQE

SEQ ID NO: 37990 - protein, 50 aa, Homo sapiens
  MAP TO AP000125.1; EXPRESSED IN HEART, SIGNAL = 0.84; EXPRESSED IN BONE MARROW, SIGNAL = 0.7; EXPRESSED IN FETAL LIVER, SIGNAL = 0.57; EXPRESSED IN LUNG, SIGNAL = 0.65; EST_HUMAN HIT: AU156079.1, EVALUE 2.20e+00
VMLVEKGMVLSIKAFKISTLQLQPLGSLRPLEEKAHTGDSVIPVAVCLSL

SEQ ID NO: 37991 - protein, 468 aa, Homo sapiens
  MAP TO AC005261.1; EXPRESSED IN FETAL LIVER, SIGNAL = 1.8; EXPRESSED IN LUNG, SIGNAL = 4.7; EXPRESSED IN HBL100, SIGNAL = 1.7; EXPRESSED IN PLACENTA, SIGNAL = 1.3; EXPRESSED IN BT474, SIGNAL = 2.2; EXPRESSED IN BRAIN, SIGNAL = 1.9; EXPRESSED IN BONE MARROW, SIGNAL = 1.3; EXPRESSED IN HEART, SIGNAL =   2; EXPRESSED IN HELA, SIGNAL = 2.4; SWISSPROT HIT: P52742, EVALUE 0.00e+00; EST_HUMAN HIT: AF150239.1, EVALUE 1.00e-105; EST_HUMAN HIT: AF150239.1, EVALUE 1.00e-105
DKGKPKSTEPTTCELALSEGISFWGQLTQGASGDSQLGQPKDQDGFSEMQGERLRPGLDSQKEKLPGKMSPKHDGLGTADSVCSRIIQDRVSLGDDVHDCDSHGSGKNPVIQEEENIFKCNECEKVFNKKRLLARHERIHSGVKPYECTECGKTFSKSTYLLQHHMVHTGEKPYKCMECGKAFNRKSHLTQHQRIHSGEKPYKCSECGKAFTHRSTFVLHNRSHTGEKPFVCKECGKAFRDRPGFIRHYIIHSGENPYECFECGKVFKHRSYLMWHQQTHTGEKPYECSECGKAFCESAALIHHYVIHTGEKPFECLECGKAFNHRSYLKRHQRIHTGEKPYVCSECGKAFTHCSTFILHKRAHTGEKPFECKECGKAFSNRADLIRHFSIHTGEKPYECMECGKAFNRRSGLTRHQRIHSGEKPYECIECGKTFCWSTNLIRHSIIHTGEKPYECSECGKAFSRSSS

SEQ ID NO: 37992 - protein, 237 aa, Homo sapiens
  MAP TO AC004414.1; EXPRESSED IN HEART, SIGNAL = 1.2; EXPRESSED IN BT474, SIGNAL =   2; EXPRESSED IN BRAIN, SIGNAL = 1.8; EXPRESSED IN PLACENTA, SIGNAL = 1.4; EXPRESSED IN HELA, SIGNAL = 1.9; EXPRESSED IN HBL100, SIGNAL = 0.92; EXPRESSED IN ADULT LIVER, SIGNAL = 1.8; EXPRESSED IN FETAL LIVER, SIGNAL = 1.3; EXPRESSED IN LUNG, SIGNAL =   2; EXPRESSED IN BONE MARROW, SIGNAL = 1.2; EST_HUMAN HIT: BF036746.1, EVALUE 3.50e+00; SWISSPROT HIT: O61345, EVALUE 2.00e-03
CLSLFAEMEDSYETDTSSLTSSIHGASNHCPQDAMIPHGDTDAIPVTFIGEVSDDPVDSGLFSNRNNNAGSFDSEGVASRRDSLAPLQAEHSQPHEKAREEVPALHPASHDVGKGIRVALSNISKDGNLMETAPRVTSFASNLHTDNLNAKVKDKVYGCADGERTQATERVNSQPVNEKDSNDKNAALAPTSWHQRGQNPGKSYRLKHGLTTYKIIPPKSEMRCYDRDVSLSTGAIK

SEQ ID NO: 37993 - protein, 120 aa, Homo sapiens
  MAP TO AL009182.13; EXPRESSED IN HEART, SIGNAL = 1.1; EST_HUMAN HIT: BF376402.1, EVALUE 3.00e-07
SLLLSPFHREMPIKVHPALEVGCLECGFLCASFQSGCLLAWCSWASSSSSSWWGSAGASAALTAAAAMSAAHAAQIPAAALKPVSTVTAGETERSREMSTSLPDSCVRWVPPPPPVLPPP

SEQ ID NO: 37994 - protein, 420 aa, Homo sapiens
  MAP TO AC003682.1; EXPRESSED IN FETAL LIVER, SIGNAL = 2.5; EXPRESSED IN HBL100, SIGNAL = 2.3; EXPRESSED IN HEART, SIGNAL = 2.3; EXPRESSED IN PLACENTA, SIGNAL = 2.7; EXPRESSED IN ADULT LIVER, SIGNAL = 2.4; EXPRESSED IN BT474, SIGNAL = 2.4; EXPRESSED IN BRAIN, SIGNAL = 2.2; EXPRESSED IN LUNG, SIGNAL = 2.6; EXPRESSED IN BONE MARROW, SIGNAL = 2.3; EXPRESSED IN HELA, SIGNAL = 2.5; EST_HUMAN HIT: AW175723.1, EVALUE 8.00e-90; SWISSPROT HIT: P52742, EVALUE 1.00e-111
CGHGTEDEETPSDQNVSVGVSQSKAGSSTQKTQSCEMCVPVLKDILHLADLPGQKPYLVGECTNHHQHQKHHSAKKSLKRDMDRASYVKCCLFCMSLKPFRKWEVGKDLPAMLRLLRSLVFPGGKKPGTITECGEDIRSQKSHYKSGECGKASRHKHTPVYHPRVYTGKKLYECSKCGKAFRGKYSLVQHQRVHTGERPWECNECGKFFSQTSHLNDHRRIHTGERPYECSECGKLFRQNSSLVDHQKIHTGARPYECSQCGKSFSQKATLVKHQRVHTGERPYKCGECGNSFSQSAILNQHRRIHTGAKPYECGQCGKSFSQKATLIKHQRVHTGERPYKCGDCGKSFSQSSILIQHRRIHTGARPYECGQCGKSFSQKSGLIQHQVVHTGERPYECNKCGNSFSQCSSLIHHQKCHNT

SEQ ID NO: 37995 - protein, 777 aa, Homo sapiens
  MAP TO AC005587.1; EXPRESSED IN HBL100, SIGNAL =   1; EXPRESSED IN HEART, SIGNAL = 1.1; EXPRESSED IN PLACENTA, SIGNAL =   1; EXPRESSED IN HELA, SIGNAL = 1.9; EXPRESSED IN BT474, SIGNAL = 1.5; EXPRESSED IN ADULT LIVER, SIGNAL =   1; EXPRESSED IN FETAL LIVER, SIGNAL =   2; EXPRESSED IN LUNG, SIGNAL =   3; EXPRESSED IN BRAIN, SIGNAL = 0.95; SWISSPROT HIT: P25386, EVALUE 8.00e-12; EST_HUMAN HIT: BF678896.1, EVALUE 2.00e-92
MEEPGATPQPYLGLVLEELGRVVAALPESMRPDENPYGFPSELVVCAAVIGFFVVLLFLWRSFRSVRSRLYVGREQKLGATLSGLIEEKCKLLEKFSLIQKEYEGYEVESSLEDASFEKAAAEEARSLEATCEKLSRSNSELEDEILCLEKDLKEEKSKHSQQDELMADISKSIQSLEDESKSLKSQIAEAKIICKTFKMSEERRAIAIKDALNENSQLQTSHKQLFQQEAEVWKGQVSELNKQKITFEDSKVHAEQVLNDKENHIKTLTGHLPMMKDQAAVLEEDTTDDDNLELKVNSQWENGANLDDPPKGALKKLIHAAKLNVSLKSLEGERNHIIIQLSEVDKTKEELTEHIKNLQTQQASLQSENIYFESENQKLQQKLKIMTEFYQENEMKLYRKLTVEENYRIEEEEKLSRVEEKISHATEELETYRKLAKDLEEELERTVHFYQKQVISYEKRGHDNWLAARTAERNLSDLRKENAHNKQKLTERELKFELLEKDPNALDVSNTAFGREHSPCSPSPLGRPSSETRAFPSPQTLLEDPLRLSPVLPGGGGRGPSSPGNPLDHQITNERGEPSYDRLIDPHRAPSDTGSLSSPVEQDRRMMFPPPGQSYPDSTLPPQREDRFYSNSERLSGPAEPRSFKMTSLDKMDRSMPSEMESSRNDAKDDLGNLNVPDSSLPAENEATGPGLIPPPLAPISGPLFPVDTRGPFMRRGPPFPPPPPGTMFGASRGYFPPRDFPGPPHAPFAMRNIYPPRGLPPYLHPRPGFYPNPTF

SEQ ID NO: 37996 - protein, 63 aa, Homo sapiens
  MAP TO AP000105.1; EXPRESSED IN HBL100, SIGNAL = 1.1; EXPRESSED IN FETAL LIVER, SIGNAL = 0.98; EXPRESSED IN ADULT LIVER, SIGNAL = 3.2; EXPRESSED IN HEART, SIGNAL = 0.89; EXPRESSED IN BT474, SIGNAL = 0.66; EXPRESSED IN BONE MARROW, SIGNAL = 0.76; EXPRESSED IN LUNG, SIGNAL = 0.7; EXPRESSED IN HELA, SIGNAL = 1.1
VLNVAVVTVATLTPEQTYKWEITTLIKHKTWSKFLVLTVRGSAVPTDLEAEAAKCQRKVHFSQ

SEQ ID NO: 37997 - protein, 166 aa, Homo sapiens
  MAP TO AL031058.1; EXPRESSED IN BONE MARROW, SIGNAL = 1.5; EXPRESSED IN BRAIN, SIGNAL = 1.2; EXPRESSED IN PLACENTA, SIGNAL = 4.3; EXPRESSED IN BT474, SIGNAL =  10; EXPRESSED IN FETAL LIVER, SIGNAL = 2.8; EXPRESSED IN LUNG, SIGNAL = 2.9; EXPRESSED IN HEART, SIGNAL = 8.6; EXPRESSED IN HELA, SIGNAL = 6.4; EXPRESSED IN HBL100, SIGNAL = 1.4; EXPRESSED IN ADULT LIVER, SIGNAL = 1.9; EST_HUMAN HIT: AW383133.1, EVALUE 3.00e-65; SWISSPROT HIT: P15924, EVALUE 9.00e-28
LKNTKIEVLEEELRLARDANSENCNKNKFLDQNLQKYQAECSQFKAKLASLEELKRQAELDGKSAKQNLDKCYGQIKELNEKITRLTYEIEDEKRRRKSVEDRFDQQKNDYDQLQKARQCEKENLGWQKLESEKAIKEKEYEIERLRVLLQEEGTRKREYENELAK

SEQ ID NO: 37998 - protein, 89 aa, Homo sapiens
  MAP TO AL049839.2; EXPRESSED IN LUNG, SIGNAL = 0.71; EXPRESSED IN HELA, SIGNAL = 0.71; EXPRESSED IN BRAIN, SIGNAL = 0.75; EXPRESSED IN HEART, SIGNAL = 0.85; EXPRESSED IN PLACENTA, SIGNAL = 0.7; EXPRESSED IN FETAL LIVER, SIGNAL = 0.69; EXPRESSED IN ADULT LIVER, SIGNAL = 0.83; EST_HUMAN HIT: BE870736.1, EVALUE 3.00e-24; SWISSPROT HIT: P29622, EVALUE 3.00e-25
EWMKPFDSRATSPKEFFVDEHSAVWVPMMKEKASHRFLHDRELQCSVLRMDHAGNTTTFFIFPNRGKMRQLEDALLPETLIKWDSLLRT

SEQ ID NO: 37999 - protein, 306 aa, Homo sapiens
  MAP TO AL031664.1; EXPRESSED IN BT474, SIGNAL = 1.3; EXPRESSED IN FETAL LIVER, SIGNAL = 0.98; EXPRESSED IN BONE MARROW, SIGNAL = 0.97; EXPRESSED IN LUNG, SIGNAL = 1.3; EXPRESSED IN HEART, SIGNAL = 1.2; SWISSPROT HIT: Q12934, EVALUE 0.00e+00; EST_HUMAN HIT: BE895400.1, EVALUE 2.00e-36
LYLNFCLCVFPDLTRALQDITAAKPRQKALPKNVPRRKEIITKDKTNGALEDAPLKGLEDTKLVQVVLKEESESKFESESKEVSPLTQEGAPEDVPDGGQISKGFGKLYRKVKEKVRSPKEPETPTELYTKERHVLVTGDANYVDPRFYVSSITAKGGVAVSVAEDSVLYDGQVEPSPESPKPPLENGQVGLQEKEDGQPIDQQPIDKEIEPDGAELEGPEEKREGEERDEESRRPCAMVTPGAEEPSIPEPPKPAADQDGAEVLGTRSRSLPEKGPPKALAYKTVEVVESIEKISTESIQTYEET

SEQ ID NO: 38000 - protein, 983 aa, Homo sapiens
  MAP TO AL031277.1; EXPRESSED IN HEART, SIGNAL = 1.6; EXPRESSED IN BT474, SIGNAL = 1.4; EXPRESSED IN BONE MARROW, SIGNAL = 1.1; EXPRESSED IN LUNG, SIGNAL = 2.6; EXPRESSED IN BRAIN, SIGNAL = 1.8; EXPRESSED IN PLACENTA, SIGNAL = 0.98; EST_HUMAN HIT: AU140221.1, EVALUE 1.00e-111; SWISSPROT HIT: Q61116, EVALUE 1.00e-09
TQDKLTPAGISATEIAKLGPVCVSAPASMLPVTSSRFKRRTSSPPSSPQHSPALRDFGKPSDGKAAWTDAGLTSKKSKLESHSDSPAWSLSGRDERETVSPPCFDEYKMSKEWTASSAFSSVCNQQPLDLSSGVKQKAEGTGKTPVQWESVLDLSVHKKHCSDSEGKEFKESHSVQPTCSAVKKRKPTTCMLQKVLLNEYNGIDLPVENPADGTRSPSPCKSLEAQPDPDLGPGSGFPAPTVESTPDVCPSSPALQTPSLSSGQLPPLLIPTDPSSPPPCPPVLTVATPPPPLLPTVPLPAPSSSASPHPCPSPLSNATAQSPLPILSPTVSPSPSPIPPVEPLMSAASPGPPTLSSSSSSSSSSSSFSSSSSSSSPSPPPLSAISSVVSSGDNLEASLPMISFKQEELENEGLKPREEPQSAAEQDVVVQETFNKNFVCNVCESPFLSIKDLTKHLSIHAEEWPFKCEFCVQLFKDKTDLSEHRFLLHGVGNIFVCSVCKKEFAFLCNLQQHQRDLHPDKVCTHHEFESGTLRPQNFTDPSKAHVEHMQSLPEDPLETSKEEEELNDSSEELYTTIKIMASGIKTKDPDVRLGLNQHYPSFKPPPFQYHHRNPMGIGVTATNFTTHNIPQTFTTAIRCTKCGKGVDNMPELHKHILACASASDKKRYTPKKNPVPLKQTVQPKNGVVVLDNSGKNAFRRMGQPKRLNFSVELSKMSSNKLKLNALKKKNQLVQKAILQKNKSAKQKADLKNACESSSHICPYCNREFTYIGSLNKHAAFSCPKKPLSPPKKKVSHSSKKGGHSSPASSDKNSNSNHRRRTADAEIKMQSMQTPLGKTRARSSGPTQVPLPSSSFRSKQNVKFAASVKSKKPSSSSLRNSSPIRMAKITHVEGKKPKAVAKNHSAQLSSKTSRSLHVRVQKSKAVLQSKSTLASKKRTDRFNIKSRERSGGPVTRSLQLAAAADLSENKREDGSAKQELKDFR

SEQ ID NO: 38001 - protein, 78 aa, Homo sapiens
  MAP TO AL035694.8; EXPRESSED IN ADULT LIVER, SIGNAL = 0.65; EXPRESSED IN HELA, SIGNAL = 0.59; EXPRESSED IN HEART, SIGNAL = 0.78; EXPRESSED IN PLACENTA, SIGNAL = 0.71; EXPRESSED IN HBL100, SIGNAL = 1.7; EXPRESSED IN LUNG, SIGNAL = 0.7; EXPRESSED IN BRAIN, SIGNAL = 1.2; SWISSPROT HIT: O70306, EVALUE 1.00e-08; EST_HUMAN HIT: BF526419.1, EVALUE 1.00e-07
NASSSTLLQGTGNGVPATHPHLLSGSSCSSPAFHLGPNTSQLCSLAPADYSACARSGLTLNRYSTSLAETYNRLTNQA

SEQ ID NO: 38002 - protein, 93 aa, Homo sapiens
  MAP TO AL035694.8; EXPRESSED IN ADULT LIVER, SIGNAL = 0.65; EXPRESSED IN HELA, SIGNAL = 0.59; EXPRESSED IN HEART, SIGNAL = 0.78; EXPRESSED IN PLACENTA, SIGNAL = 0.71; EXPRESSED IN HBL100, SIGNAL = 1.7; EXPRESSED IN LUNG, SIGNAL = 0.7; EXPRESSED IN BRAIN, SIGNAL = 1.2; SWISSPROT HIT: P34296, EVALUE 6.60e+00; EST_HUMAN HIT: AU117556.1, EVALUE 4.60e-02
AMQVPPPCSKVLGMAFLPLTLTFCLAPLAPLLPSIWGPTPASCVVWPLLTILPVPAQASPSTDTAHLWQRPTTGSPTRLVRPLPRPGLPPMWA

SEQ ID NO: 38003 - protein, 57 aa, Homo sapiens
  MAP TO AF053356.1; EXPRESSED IN BT474, SIGNAL = 1.5; EXPRESSED IN HBL100, SIGNAL = 1.5; EXPRESSED IN HELA, SIGNAL = 1.4; EXPRESSED IN ADULT LIVER, SIGNAL = 1.1; EXPRESSED IN BRAIN, SIGNAL = 1.4; EXPRESSED IN LUNG, SIGNAL = 0.93; EXPRESSED IN BONE MARROW, SIGNAL = 1.4; EXPRESSED IN PLACENTA, SIGNAL =   1; EXPRESSED IN HEART, SIGNAL = 1.7; EXPRESSED IN FETAL LIVER, SIGNAL = 1.4
VCYLQRPITLWCGLNHSLVLSQSSEFSKELLGCGCGAGGRLPGWPKGSASFVKLQVK

SEQ ID NO: 38004 - protein, 52 aa, Homo sapiens
  MAP TO AF053356.1; EXPRESSED IN BT474, SIGNAL = 1.5; EXPRESSED IN HBL100, SIGNAL = 1.5; EXPRESSED IN HELA, SIGNAL = 1.4; EXPRESSED IN ADULT LIVER, SIGNAL = 1.1; EXPRESSED IN BRAIN, SIGNAL = 1.4; EXPRESSED IN LUNG, SIGNAL = 0.93; EXPRESSED IN BONE MARROW, SIGNAL = 1.4; EXPRESSED IN PLACENTA, SIGNAL =   1; EXPRESSED IN HEART, SIGNAL = 1.7; EXPRESSED IN FETAL LIVER, SIGNAL = 1.4; SWISSPROT HIT: Q9RP66, EVALUE 6.10e+00; EST_HUMAN HIT: BF572565.1, EVALUE 2.50e-01
LLPAAAHHPVVRPQPLPGAEPELRVQQGAAGLRLWGWGPPPRLAQGECLLRQ

SEQ ID NO: 38005 - protein, 91 aa, Homo sapiens
  MAP TO AF055066.1; EXPRESSED IN PLACENTA, SIGNAL =  11; EXPRESSED IN HBL100, SIGNAL =  38; EXPRESSED IN HELA, SIGNAL =  33; EXPRESSED IN HEART, SIGNAL =  25; EXPRESSED IN FETAL LIVER, SIGNAL =  16; EXPRESSED IN BT474, SIGNAL = 6.4; EXPRESSED IN ADULT LIVER, SIGNAL = 7.5; EXPRESSED IN LUNG, SIGNAL =  59; EXPRESSED IN BONE MARROW, SIGNAL =  25; EXPRESSED IN BRAIN, SIGNAL =  13; EST_HUMAN HIT: BF357946.1, EVALUE 5.00e-48; SWISSPROT HIT: P17693, EVALUE 4.00e-53
PPKTHVTHHPVFDYEATLRCWALGFYPAEIILTWQRDGEDQTQDVELVETRPAGDGTFQKWAAVVVPSGEEQRYTCHVQHEGLPEPLMLRW

SEQ ID NO: 38006 - protein, 33 aa, Homo sapiens
  MAP TO AF064860.1; EXPRESSED IN HELA, SIGNAL = 1.7; EXPRESSED IN HEART, SIGNAL = 1.5; EXPRESSED IN FETAL LIVER, SIGNAL = 1.8; EXPRESSED IN BT474, SIGNAL = 1.4; EXPRESSED IN LUNG, SIGNAL = 1.8; EXPRESSED IN BRAIN, SIGNAL = 1.7; EXPRESSED IN PLACENTA, SIGNAL = 1.4; EXPRESSED IN HBL100, SIGNAL = 1.8; EXPRESSED IN ADULT LIVER, SIGNAL = 1.6; EXPRESSED IN BONE MARROW, SIGNAL = 1.7; EST_HUMAN HIT: AU122572.1, EVALUE 5.80e+00; SWISSPROT HIT: P26550, EVALUE 2.10e+00
YPVDVPPEPQESTPAQLGPLLVTNEPGAGICTQ

SEQ ID NO: 38007 - protein, 27 aa, Homo sapiens
  MAP TO AF064860.1; EXPRESSED IN HELA, SIGNAL = 1.7; EXPRESSED IN HEART, SIGNAL = 1.5; EXPRESSED IN FETAL LIVER, SIGNAL = 1.8; EXPRESSED IN BT474, SIGNAL = 1.4; EXPRESSED IN LUNG, SIGNAL = 1.8; EXPRESSED IN BRAIN, SIGNAL = 1.7; EXPRESSED IN PLACENTA, SIGNAL = 1.4; EXPRESSED IN HBL100, SIGNAL = 1.8; EXPRESSED IN ADULT LIVER, SIGNAL = 1.6; EXPRESSED IN BONE MARROW, SIGNAL = 1.7
ILWTFHQSHRRAPRLSWDPCWSPTSQA

SEQ ID NO: 38008 - protein, 153 aa, Homo sapiens
  MAP TO AJ010770.1; EXPRESSED IN PLACENTA, SIGNAL = 2.8; EXPRESSED IN HELA, SIGNAL =   3; EXPRESSED IN HEART, SIGNAL = 2.5; EXPRESSED IN FETAL LIVER, SIGNAL = 3.3; EXPRESSED IN BT474, SIGNAL = 2.4; EXPRESSED IN BRAIN, SIGNAL = 2.4; EXPRESSED IN HBL100, SIGNAL = 2.6; EXPRESSED IN ADULT LIVER, SIGNAL = 3.5; EXPRESSED IN LUNG, SIGNAL = 3.5; EXPRESSED IN BONE MARROW, SIGNAL =   2; SWISSPROT HIT: Q61771, EVALUE 1.20e-02; EST_HUMAN HIT: BF672826.1, EVALUE 1.00e-50
VKETNMTSLQKDLSQVRDHLAEAKEKLSILEKEDETEVQESKKACMFEPLPIKLSKSIASQTDGTLKISSSNQTPQILVKNAGIQINLQSECSSEEVTEIISQFTEKIEKMQELHAAEILDMESRHISETETLKREHYVAVQLLKEECGTLKA

SEQ ID NO: 38009 - protein, 67 aa, Homo sapiens
  MAP TO AL021154.1; EXPRESSED IN PLACENTA, SIGNAL = 3.9; EXPRESSED IN HELA, SIGNAL =   4; EXPRESSED IN HEART, SIGNAL = 3.7; EXPRESSED IN FETAL LIVER, SIGNAL = 4.7; EXPRESSED IN BT474, SIGNAL = 2.4; EXPRESSED IN BRAIN, SIGNAL = 2.3; EXPRESSED IN HBL100, SIGNAL = 3.6; EXPRESSED IN ADULT LIVER, SIGNAL = 3.9; EXPRESSED IN LUNG, SIGNAL = 4.2; EXPRESSED IN BONE MARROW, SIGNAL = 3.3; EST_HUMAN HIT: BE538633.1, EVALUE 6.50e-01; SWISSPROT HIT: O43593, EVALUE 4.20e+00
WSGMSTGLRVWRETQLTTPSALCDLGEVHAASVAAIHSLLHCLARNQYWVPAIVQAKSMAWGHCGTL

SEQ ID NO: 38010 - protein, 57 aa, Homo sapiens
  MAP TO AJ229041.1; EXPRESSED IN BONE MARROW, SIGNAL = 2.6; EXPRESSED IN HELA, SIGNAL = 3.9; EXPRESSED IN HEART, SIGNAL =   3; EXPRESSED IN FETAL LIVER, SIGNAL = 3.8; EXPRESSED IN BT474, SIGNAL = 2.9; EXPRESSED IN LUNG, SIGNAL =   4; EXPRESSED IN BRAIN, SIGNAL = 3.5; EXPRESSED IN PLACENTA, SIGNAL =   3; EXPRESSED IN HBL100, SIGNAL = 2.9; EXPRESSED IN ADULT LIVER, SIGNAL =   3
YLRLAEDSPQRCPRPHGTGAQAKTCKQPAKAGKDKKKYPPVELPERTQHCQHLDPSP

SEQ ID NO: 38011 - protein, 45 aa, Homo sapiens
  MAP TO AJ229041.1; EXPRESSED IN BONE MARROW, SIGNAL = 2.6; EXPRESSED IN HELA, SIGNAL = 3.9; EXPRESSED IN HEART, SIGNAL =   3; EXPRESSED IN FETAL LIVER, SIGNAL = 3.8; EXPRESSED IN BT474, SIGNAL = 2.9; EXPRESSED IN LUNG, SIGNAL =   4; EXPRESSED IN BRAIN, SIGNAL = 3.5; EXPRESSED IN PLACENTA, SIGNAL =   3; EXPRESSED IN HBL100, SIGNAL = 2.9; EXPRESSED IN ADULT LIVER, SIGNAL =   3
GVDMNLIVISVLSICGLQKTAPKDVHVLMERGHKLKHASSQQKLE

SEQ ID NO: 38012 - protein, 98 aa, Homo sapiens
  MAP TO AC010680.2; EXPRESSED IN BT474, SIGNAL = 1.2; EXPRESSED IN HEART, SIGNAL = 0.86; EXPRESSED IN LUNG, SIGNAL = 4.6; EST_HUMAN HIT: AA176492.1, EVALUE 9.00e+00
RTVLEEKVSVAFRQEVVVKERLELEVVEAEVEEIPEEEEFHEVEEYFEEGEFHEVEEFIKLEQHRVEEEHRVEKVHRVIEVFEAEEVEVFEKPKAPPK

SEQ ID NO: 38013 - protein, 99 aa, Homo sapiens
  MAP TO AL021332.1; EXPRESSED IN PLACENTA, SIGNAL = 4.9; EXPRESSED IN HELA, SIGNAL = 7.8; EXPRESSED IN BT474, SIGNAL = 5.5; EXPRESSED IN BRAIN, SIGNAL = 6.1; EXPRESSED IN HBL100, SIGNAL = 5.5; EXPRESSED IN HEART, SIGNAL = 7.6; EXPRESSED IN ADULT LIVER, SIGNAL = 5.1; EXPRESSED IN FETAL LIVER, SIGNAL = 6.8; EXPRESSED IN LUNG, SIGNAL = 5.9; EXPRESSED IN BONE MARROW, SIGNAL = 5.3
EEEEEKEEEEKKKRKKKEEEEEEEEEKEKKKKEEEEEEEEEEEEEEEEEEKKKKKKKRRRRRRGRRRGRGRRRRRRRRRRRRRRTFENDFIGGCQKIDH

SEQ ID NO: 38014 - protein, 35 aa, Homo sapiens
  MAP TO AC010703.1; EXPRESSED IN HEART, SIGNAL = 0.88; EXPRESSED IN LUNG, SIGNAL =   7; EXPRESSED IN BT474, SIGNAL = 9.1
KTIFIESCKKFNMYPLALKPSNNLSPVGRIKEVLS

SEQ ID NO: 38015 - protein, 70 aa, Homo sapiens
  MAP TO AC009857.1; EXPRESSED IN HEART, SIGNAL = 1.3; SWISSPROT HIT: O25700, EVALUE 3.10e+00; EST_HUMAN HIT: H96293.1, EVALUE 6.00e+00
  unsure 68
IEELQDGKMGPQFKPFQLLSHWQQFQQSKMFNVTIKHSGQSLKSREILNRNNDKENPYRNLLIPLNKXGC

SEQ ID NO: 38016 - protein, 94 aa, Homo sapiens
  MAP TO AJ009617.1; EXPRESSED IN PLACENTA, SIGNAL =  10; EXPRESSED IN HELA, SIGNAL = 9.8; EXPRESSED IN HEART, SIGNAL = 8.3; EXPRESSED IN BT474, SIGNAL =   7; EXPRESSED IN FETAL LIVER, SIGNAL =  11; EXPRESSED IN ADULT LIVER, SIGNAL =  11; EXPRESSED IN BRAIN, SIGNAL = 7.3; EXPRESSED IN BONE MARROW, SIGNAL = 9.2; EXPRESSED IN LUNG, SIGNAL =  11; EXPRESSED IN HBL100, SIGNAL = 8.4; EST_HUMAN HIT: AU119940.1, EVALUE 3.00e-16; SWISSPROT HIT: Q13588, EVALUE 1.00e-27
MPGWDGHHLRWPRVLSPSYGDQVQHFKVLREASGKYFLWEEKFNSLNELVDFYRTTTIAKKRQIFLRDEEPLLKVGAGGGWPVGASLHLLPSAA

SEQ ID NO: 38017 - protein, 53 aa, Homo sapiens
  MAP TO AJ011929.1; EXPRESSED IN LUNG, SIGNAL = 1.3; EXPRESSED IN BONE MARROW, SIGNAL = 0.93; EXPRESSED IN HBL100, SIGNAL = 0.97; EXPRESSED IN HELA, SIGNAL =   1; EXPRESSED IN HEART, SIGNAL = 1.3; EXPRESSED IN FETAL LIVER, SIGNAL = 1.2; EXPRESSED IN BRAIN, SIGNAL = 0.97; EXPRESSED IN PLACENTA, SIGNAL = 1.2; EXPRESSED IN BT474, SIGNAL = 0.99; EXPRESSED IN ADULT LIVER, SIGNAL = 1.3
YARKDQLAACQKVFPSFSKQQFESYIEHSITTEHLVRDANFLRMRRNTTASAK

SEQ ID NO: 38018 - protein, 595 aa, Homo sapiens
  MAP TO AC010680.3; EXPRESSED IN ADULT LIVER, SIGNAL = 0.98; EXPRESSED IN BT474, SIGNAL = 0.93; EXPRESSED IN HEART, SIGNAL =  12; EST_HUMAN HIT: BE835668.1, EVALUE 1.00e-85; SWISSPROT HIT: Q90688, EVALUE 2.00e-52
PPSVELDVKLIEGLVVKAGTTVRFPAIIRGVPVPTAKWTTDGSEIKTDEHYTVETDNFSSVLTIKNCLRRDTGEYQITVSNAAGSKTVAVHLTVLDVPGPPTGPINILDVTPEHMTISWQPPKDDGGSPVINYIVEKQDTRKDTWGVVSSGSSKTKLKIPHLQKGCEYVFRVRAENKIGVGPPLDSTPTVAKHKFSPPSPPGKPVVTDITENAATVSWTLPKSDGGSPITGYYMERREVTGKWVRVNKTPIADLKFRVTGLYEGNTYEFRVFAENLAGLSKPSPSSDPIKACRPIKPPGPPINPKLKDKSRETADLVWTKPLSDGGSPILGYVVECQKPGTAQWNRINKDELIRQCAFRVPGLIEGNEYRFRIKAANIVGEGEPRELAESVIAKDILHPPEVELDVTCRDVITVRVGQTIRILARVKGRPEPDITWTKEGKVLVREKRVDLIQDLPRVELQIKEAVRADHGKYIISAKNSSGHAQGSAIVNVLDRPGPCQNLKVTNVTKENCTISWENPLDNGGSEITNFIVEYRKPNQKGWSIVASDVTKRLIKANLLANNEYYFRVCAENKVGVGPTIETKTPILAINPIDRP

SEQ ID NO: 38019 - protein, 62 aa, Homo sapiens
  MAP TO AJ229042.1; EXPRESSED IN LUNG, SIGNAL = 1.1; EXPRESSED IN BONE MARROW, SIGNAL =   1; EXPRESSED IN HBL100, SIGNAL = 1.1; EXPRESSED IN BT474, SIGNAL = 0.91; EXPRESSED IN ADULT LIVER, SIGNAL = 1.5; EXPRESSED IN FETAL LIVER, SIGNAL =   1; EXPRESSED IN BRAIN, SIGNAL = 1.1; EXPRESSED IN PLACENTA, SIGNAL = 1.2; EXPRESSED IN HEART, SIGNAL =   1; EXPRESSED IN HELA, SIGNAL = 1.2; EST_HUMAN HIT: BE540656.1, EVALUE 4.50e+00; SWISSPROT HIT: P43129, EVALUE 1.50e+00
MFCVQARVVEVVESGSHWRLVVLGGSVKSTAHSVITVAGTLGFSHTRSIQHNRYVQKWRILG

SEQ ID NO: 38020 - protein, 55 aa, Homo sapiens
  MAP TO AL049548.6; EXPRESSED IN PLACENTA, SIGNAL = 3.2; EXPRESSED IN FETAL LIVER, SIGNAL = 0.6; EXPRESSED IN LUNG, SIGNAL = 1.2; EXPRESSED IN HEART, SIGNAL = 1.2; EXPRESSED IN HBL100, SIGNAL = 0.66; EXPRESSED IN BT474, SIGNAL = 0.6; EXPRESSED IN BONE MARROW, SIGNAL = 1.6; EXPRESSED IN ADULT LIVER, SIGNAL = 0.72; EXPRESSED IN BRAIN, SIGNAL = 1.3; EST_HUMAN HIT: BF376311.1, EVALUE 1.00e-26; SWISSPROT HIT: Q59757, EVALUE 2.60e+00
RLQLIEELCVKLPVRDPVRDTPGTCHVTLKELRAAIDSTYRKLMEDPDKWKDYTS

SEQ ID NO: 38021 - protein, 142 aa, Homo sapiens
  MAP TO AL031177.1; EXPRESSED IN HBL100, SIGNAL =   1; EXPRESSED IN ADULT LIVER, SIGNAL = 1.2; EXPRESSED IN HEART, SIGNAL = 0.95; EXPRESSED IN BT474, SIGNAL = 0.95; EXPRESSED IN BRAIN, SIGNAL = 1.1; EXPRESSED IN BONE MARROW, SIGNAL = 0.99; SWISSPROT HIT: Q14031, EVALUE 3.00e-55; EST_HUMAN HIT: AU142039.1, EVALUE 2.00e-42
QPDLPCPCPLSLLPGFAGSCLPRFSTMPFIYCNINEVCHYARRNDKSYWLSTTAPIPMMPVSQTQIPQYISRCSVCEAPSQAIAVHSQDITIPQCPLGWRSLWIGYSFLMVRSCTVSSPSWRQRAPWTGSQAQGTPGRKHRV

SEQ ID NO: 38022 - protein, 49 aa, Homo sapiens
  MAP TO AC010734.1; EXPRESSED IN LUNG, SIGNAL =   1; EXPRESSED IN HEART, SIGNAL = 0.93
SVDSVVQELSAQPFQCVVNFGRLHADTIRQHLLLAPITHPFCRTLCGMQ

SEQ ID NO: 38023 - protein, 34 aa, Homo sapiens
  MAP TO AL022149.2; EXPRESSED IN BT474, SIGNAL =   2; EXPRESSED IN BONE MARROW, SIGNAL = 1.7; EXPRESSED IN HBL100, SIGNAL = 3.7; EXPRESSED IN PLACENTA, SIGNAL =   2; EXPRESSED IN HELA, SIGNAL = 2.7; EXPRESSED IN FETAL LIVER, SIGNAL = 2.7; EXPRESSED IN ADULT LIVER, SIGNAL = 2.3; EXPRESSED IN BRAIN, SIGNAL =   2; EXPRESSED IN LUNG, SIGNAL = 2.4; EXPRESSED IN HEART, SIGNAL =   2; EST_HUMAN HIT: BE150554.1, EVALUE 1.00e+00; SWISSPROT HIT: P38354, EVALUE 3.60e+00
RENFYCVREYIYHHENNGYMNIKGASGEVSDENV

SEQ ID NO: 38024 - protein, 155 aa, Homo sapiens
  MAP TO AL022163.1; EXPRESSED IN BONE MARROW, SIGNAL = 1.6; EXPRESSED IN HBL100, SIGNAL =   2; EXPRESSED IN PLACENTA, SIGNAL = 1.5; EXPRESSED IN HELA, SIGNAL = 3.8; EXPRESSED IN HEART, SIGNAL = 1.5; EXPRESSED IN ADULT LIVER, SIGNAL = 1.8; EXPRESSED IN BRAIN, SIGNAL = 1.7; EXPRESSED IN LUNG, SIGNAL = 2.1; EXPRESSED IN BT474, SIGNAL = 1.6; EXPRESSED IN FETAL LIVER, SIGNAL = 2.3; SWISSPROT HIT: P14324, EVALUE 2.00e-62; EST_HUMAN HIT: BF205968.1, EVALUE 4.00e-69
ILTEQEPTSRNRALCSSLRMNGDQKSDVYAQEKQDFVQHFPQIIRVLSEDEMGHSETGDAVDRLKEVLEYNAIGGKYHQDLMVLVAFWELVEPRKQDADSLQQALTVGWCVELLQAFFLVADDIMDSSVSRRGQIWWYQKPGMGLDAINDAMLLE

SEQ ID NO: 38025 - protein, 53 aa, Homo sapiens
  MAP TO AC009948.2; EXPRESSED IN HEART, SIGNAL = 1.1; EXPRESSED IN BT474, SIGNAL = 1.3; EXPRESSED IN FETAL LIVER, SIGNAL = 0.9; EXPRESSED IN HELA, SIGNAL = 1.4; SWISSPROT HIT: Q62703, EVALUE 6.80e-01; EST_HUMAN HIT: AI271550.1, EVALUE 8.00e-26
INLYLQREFEKDEKPRDKSYQDAVLEDIFKKNDHDGDGFISPKEYNVYQHDEL

SEQ ID NO: 38026 - protein, 35 aa, Homo sapiens
  MAP TO AL096817.12; EXPRESSED IN HEART, SIGNAL = 0.85; EXPRESSED IN LUNG, SIGNAL = 2.8; EST_HUMAN HIT: BE069344.1, EVALUE 4.00e-15; SWISSPROT HIT: Q58310, EVALUE 8.20e+00
VCNKIIPPAPFGKTFKRIHEYKPLKTRFYTHKDIL

SEQ ID NO: 38027 - protein, 53 aa, Homo sapiens
  MAP TO AC009229.1; EXPRESSED IN PLACENTA, SIGNAL = 0.82; EXPRESSED IN LUNG, SIGNAL = 0.62; EXPRESSED IN BT474, SIGNAL = 0.65; EXPRESSED IN HEART, SIGNAL = 0.87
VTLFNTAPNNIPLLHMLILCHQDNYIPTQPGARQYSMESLENESACARREALI

SEQ ID NO: 38028 - protein, 45 aa, Homo sapiens
  MAP TO AC009696.2; EXPRESSED IN BT474, SIGNAL = 1.1; EXPRESSED IN HEART, SIGNAL = 0.94; EXPRESSED IN BRAIN, SIGNAL = 0.95; EST_HUMAN HIT: AI205486.1, EVALUE 2.00e-20
WFHLQHHRNAVVTASFWDLLASLLLKGHTFYRSTSRNRSDLLFRK

SEQ ID NO: 38029 - protein, 68 aa, Homo sapiens
  MAP TO AC009297.2; EXPRESSED IN FETAL LIVER, SIGNAL = 0.92; EXPRESSED IN HEART, SIGNAL = 0.91; EXPRESSED IN BRAIN, SIGNAL = 0.98; SWISSPROT HIT: Q10473, EVALUE 3.00e-19; EST_HUMAN HIT: BF683528.1, EVALUE 3.00e-18
FLKLTLENYVKNLEVPVKIIRMEERSGLIRARLRGAAASKGQVITFLDAHCECTLGWLEPLLARIKED

SEQ ID NO: 38030 - protein, 57 aa, Homo sapiens
  MAP TO AE000662.1; EXPRESSED IN HBL100, SIGNAL =   2; EXPRESSED IN PLACENTA, SIGNAL = 2.2; EXPRESSED IN HEART, SIGNAL = 2.1; EXPRESSED IN FETAL LIVER, SIGNAL = 2.1; EXPRESSED IN ADULT LIVER, SIGNAL = 2.6; EXPRESSED IN HELA, SIGNAL = 2.2; EXPRESSED IN BT474, SIGNAL = 2.3; EXPRESSED IN BRAIN, SIGNAL = 2.3; EXPRESSED IN LUNG, SIGNAL = 2.3; EXPRESSED IN BONE MARROW, SIGNAL = 2.3; EST_HUMAN HIT: AW845365.1, EVALUE 1.40e+00; SWISSPROT HIT: P07092, EVALUE 7.70e+00
MAVPSDLAQPILFGSWFVFLGILMHSHFIFALGFQFTKHSTPITAFNPFNNTENRWA

SEQ ID NO: 38031 - protein, 78 aa, Homo sapiens
  MAP TO AL022143.1; EXPRESSED IN BONE MARROW, SIGNAL = 0.94; EXPRESSED IN LUNG, SIGNAL = 1.1; EXPRESSED IN HEART, SIGNAL =   1; EXPRESSED IN FETAL LIVER, SIGNAL = 1.1; EXPRESSED IN BT474, SIGNAL = 0.99; EXPRESSED IN ADULT LIVER, SIGNAL = 0.99; EXPRESSED IN BRAIN, SIGNAL = 1.3; EST_HUMAN HIT: R15400.1, EVALUE 5.00e-37; SWISSPROT HIT: P16581, EVALUE 6.60e-01
LQVLLPEYLRERFVAAALSYITCSSEGELVCKENDCWCKCSPTFPECNCPDADIQAMEDSLLQIQDSWATHNRQFEES

SEQ ID NO: 38032 - protein, 45 aa, Homo sapiens
  MAP TO AL096763.9; EXPRESSED IN HEART, SIGNAL =   1; EXPRESSED IN FETAL LIVER, SIGNAL = 2.1; SWISSPROT HIT: P13240, EVALUE 2.70e+00; EST_HUMAN HIT: BE564307.1, EVALUE 1.00e-03
GCFLVLAIRSKAAMNTHIPYRLCVNTSFHFSEILPKSAVAGSYGN

SEQ ID NO: 38033 - protein, 37 aa, Homo sapiens
  MAP TO AL049874.2; EXPRESSED IN PLACENTA, SIGNAL = 5.9; EXPRESSED IN BONE MARROW, SIGNAL = 6.1; EXPRESSED IN FETAL LIVER, SIGNAL = 0.74; EXPRESSED IN ADULT LIVER, SIGNAL = 0.82; EXPRESSED IN BRAIN, SIGNAL = 0.92; EXPRESSED IN HEART, SIGNAL = 0.82; EXPRESSED IN BT474, SIGNAL = 0.65; EXPRESSED IN HELA, SIGNAL =  10; EXPRESSED IN LUNG, SIGNAL = 1.1
DWAYFREMKVIDVYIVNDNVNTCYGYRNEGGCTGGSH

SEQ ID NO: 38034 - protein, 42 aa, Homo sapiens
  MAP TO AC005193.2; EXPRESSED IN ADULT LIVER, SIGNAL = 0.88; EXPRESSED IN BRAIN, SIGNAL = 0.71; EXPRESSED IN PLACENTA, SIGNAL = 0.68; EXPRESSED IN HEART, SIGNAL = 0.84; EXPRESSED IN HELA, SIGNAL = 0.85; EXPRESSED IN LUNG, SIGNAL = 0.77; EXPRESSED IN HBL100, SIGNAL = 0.66; EXPRESSED IN BONE MARROW, SIGNAL = 0.69
RWQAREKERERKPLLLPSLLPPALPPHCKGWRKTKTPGLRAL

SEQ ID NO: 38035 - protein, 40 aa, Homo sapiens
  MAP TO AB020862.1; EXPRESSED IN HEART, SIGNAL = 1.1; EXPRESSED IN BRAIN, SIGNAL = 0.97; EXPRESSED IN BONE MARROW, SIGNAL = 1.2; EST_HUMAN HIT: BF337054.1, EVALUE 1.80e+00; SWISSPROT HIT: P34079, EVALUE 2.10e+00
GMGHCQHFLLCLLTGSRVGPTYNCNDDVYCCRCLSYYRSQ

SEQ ID NO: 38036 - protein, 269 aa, Homo sapiens
  MAP TO AC005877.2; EXPRESSED IN LUNG, SIGNAL = 2.6; EXPRESSED IN PLACENTA, SIGNAL = 1.1; EXPRESSED IN HEART, SIGNAL = 1.3; EST_HUMAN HIT: BE046326.1, EVALUE 9.00e-68; SWISSPROT HIT: P37275, EVALUE 1.00e-116
YYALNAQPSAEELSKIADSVNLPLDVVKKWFEKMQAGQISVQSSEPSSPEPGKVNIPAKNNDQPQSANANEPQDSTVNLQSPLKMTNSPVLPVGSTTNGSRSSTPSPSPLNLSSSRNTQGYLYTAEGAQEEPQVEPLDLSLPKQQGELLERSTITSVYQNSVYSVQEEPLNLSCAKKEPQKDSCVTDSEPVVNVIPPSANPINIAIPTVTAQLPTIVAIADQNSVPCLRALAANKQTILIPQVAYTYSTTVSPAVQEPPLKVIQPNGNQ

SEQ ID NO: 38037 - protein, 17 aa, Homo sapiens
  MAP TO AC005877.2; EXPRESSED IN LUNG, SIGNAL = 2.6; EXPRESSED IN PLACENTA, SIGNAL = 1.1; EXPRESSED IN HEART, SIGNAL = 1.3
ILCFECTTKCRRALKNC

SEQ ID NO: 38038 - protein, 66 aa, Homo sapiens
  MAP TO AL022323.7; EXPRESSED IN BT474, SIGNAL = 7.3; EXPRESSED IN BRAIN, SIGNAL = 7.2; EXPRESSED IN HBL100, SIGNAL = 7.8; EXPRESSED IN HEART, SIGNAL = 7.1; EXPRESSED IN ADULT LIVER, SIGNAL = 9.4; EXPRESSED IN FETAL LIVER, SIGNAL = 9.6; EXPRESSED IN LUNG, SIGNAL = 9.6; EXPRESSED IN BONE MARROW, SIGNAL = 8.4; EXPRESSED IN PLACENTA, SIGNAL =   8; EXPRESSED IN HELA, SIGNAL = 8.2
ATWPDPVLIFKKKKKSAEGGEKGGRDKNGRGRRGKGGEKTGGREEGGREKGGGKEGSGEGANRAKG

SEQ ID NO: 38039 - protein, 55 aa, Homo sapiens
  MAP TO AL022162.1; EXPRESSED IN BT474, SIGNAL =   4; EXPRESSED IN HEART, SIGNAL = 5.1; EXPRESSED IN FETAL LIVER, SIGNAL = 6.2; EXPRESSED IN ADULT LIVER, SIGNAL = 7.1; EXPRESSED IN BRAIN, SIGNAL = 3.3; EXPRESSED IN LUNG, SIGNAL = 6.4; EXPRESSED IN BONE MARROW, SIGNAL =   4; EXPRESSED IN PLACENTA, SIGNAL = 7.3; EXPRESSED IN HELA, SIGNAL = 6.2; EXPRESSED IN HBL100, SIGNAL = 5.7; EST_HUMAN HIT: AU130651.1, EVALUE 3.00e-28; SWISSPROT HIT: Q01968, EVALUE 2.00e-28
FVFENVKFRQLQKEKFQISNNGQVPCHFSFIPKLNDSQYCKPWLRAEPFEGYLEP

SEQ ID NO: 38040 - protein, 31 aa, Homo sapiens
  MAP TO AF001549.1; EXPRESSED IN LUNG, SIGNAL = 3.1; EXPRESSED IN BONE MARROW, SIGNAL = 3.9; EXPRESSED IN BRAIN, SIGNAL =   3; EXPRESSED IN HBL100, SIGNAL = 2.4; EXPRESSED IN HELA, SIGNAL = 2.1; EXPRESSED IN HEART, SIGNAL = 2.6; EXPRESSED IN BT474, SIGNAL = 3.2; EXPRESSED IN FETAL LIVER, SIGNAL = 2.4; EXPRESSED IN ADULT LIVER, SIGNAL =   3; EXPRESSED IN PLACENTA, SIGNAL =   3; EST_HUMAN HIT: AI799954.1, EVALUE 6.00e-11
RALENDFFNSPPRKTVRFGGTVTEVLLKYKK

SEQ ID NO: 38041 - protein, 57 aa, Homo sapiens
  MAP TO AF001552.1; EXPRESSED IN HELA, SIGNAL = 4.6; EXPRESSED IN PLACENTA, SIGNAL = 4.3; EXPRESSED IN ADULT LIVER, SIGNAL = 4.9; EXPRESSED IN HEART, SIGNAL = 3.8; EXPRESSED IN BT474, SIGNAL = 5.5; EXPRESSED IN FETAL LIVER, SIGNAL = 4.3; EXPRESSED IN LUNG, SIGNAL = 5.2; EXPRESSED IN BONE MARROW, SIGNAL = 6.5; EXPRESSED IN BRAIN, SIGNAL = 4.6; EXPRESSED IN HBL100, SIGNAL = 5.2
FAALYINGNKLATCNAFQFLKLSAVYRQSQIHLREDSALLKDLVLVALDFLDNRGTE

SEQ ID NO: 38042 - protein, 44 aa, Homo sapiens
  MAP TO AC012330.5; EXPRESSED IN BONE MARROW, SIGNAL = 3.6; EXPRESSED IN BRAIN, SIGNAL =   3; EXPRESSED IN HBL100, SIGNAL = 2.7; EXPRESSED IN PLACENTA, SIGNAL = 3.6; EXPRESSED IN FETAL LIVER, SIGNAL = 2.2; EXPRESSED IN LUNG, SIGNAL = 2.9; EXPRESSED IN HEART, SIGNAL =   2; EXPRESSED IN HELA, SIGNAL = 2.3; EXPRESSED IN ADULT LIVER, SIGNAL = 2.5; EXPRESSED IN BT474, SIGNAL = 2.6; EST_HUMAN HIT: AV684182.1, EVALUE 7.00e-19; SWISSPROT HIT: P11274, EVALUE 5.00e-20
NKDVSVMMSEMDVNAIAGTLKLYFRELPEPLFTDEFYPNFAEGI

SEQ ID NO: 38043 - protein, 94 aa, Homo sapiens
  MAP TO AB026898.1; EXPRESSED IN HEART, SIGNAL = 0.86; EXPRESSED IN LUNG, SIGNAL =   1; EXPRESSED IN BRAIN, SIGNAL = 0.95; EXPRESSED IN BT474, SIGNAL = 1.2; EXPRESSED IN FETAL LIVER, SIGNAL = 0.92; EST_HUMAN HIT: AA586738.1, EVALUE 1.50e-01
MSAFFMFADHFVFTAQKPYCNTSWILAVGPHLSKAEQLNLTIPQAPNGSFLTCFMYLPVPWNLDSTIQFGLNDTDTCQDGWIYPDAKKRSLINE

SEQ ID NO: 38044 - protein, 71 aa, Homo sapiens
  MAP TO AF001548.1; EXPRESSED IN BT474, SIGNAL = 3.3; EXPRESSED IN LUNG, SIGNAL =   5; EXPRESSED IN BONE MARROW, SIGNAL =   4; EXPRESSED IN BRAIN, SIGNAL = 3.6; EXPRESSED IN HBL100, SIGNAL = 3.8; EXPRESSED IN FETAL LIVER, SIGNAL = 3.3; EXPRESSED IN PLACENTA, SIGNAL = 5.2; EXPRESSED IN HEART, SIGNAL = 3.4; EXPRESSED IN HELA, SIGNAL = 3.1; EXPRESSED IN ADULT LIVER, SIGNAL = 4.1; EST_HUMAN HIT: AI128192.1, EVALUE 4.00e-33; SWISSPROT HIT: P35749, EVALUE 6.00e-34
LDDEIAQKNNALKKIRELEGHISDLQEDLDSERAARNKAEKQKRDLGEELEALKTELEDTLDSTATQQELR

SEQ ID NO: 38045 - protein, 34 aa, Homo sapiens
  MAP TO AF134471.1; EXPRESSED IN HBL100, SIGNAL =   2; EXPRESSED IN FETAL LIVER, SIGNAL = 3.7; EXPRESSED IN BT474, SIGNAL = 2.2; EXPRESSED IN LUNG, SIGNAL = 2.5; EXPRESSED IN PLACENTA, SIGNAL = 2.3; EXPRESSED IN HEART, SIGNAL = 2.1; EXPRESSED IN HELA, SIGNAL = 2.1; EXPRESSED IN ADULT LIVER, SIGNAL = 2.8; EXPRESSED IN BRAIN, SIGNAL = 2.3; EXPRESSED IN BONE MARROW, SIGNAL = 2.2; SWISSPROT HIT: Q92908, EVALUE 7.20e-01; EST_HUMAN HIT: BF371719.1, EVALUE 2.00e-11
PGWKASHMGGAGAPGWKASHTDRARGGSGEALRG

SEQ ID NO: 38046 - protein, 50 aa, Homo sapiens
  MAP TO AF002223.1; EXPRESSED IN BT474, SIGNAL = 1.6; EXPRESSED IN BONE MARROW, SIGNAL = 2.5; EXPRESSED IN BRAIN, SIGNAL = 2.1; EXPRESSED IN HBL100, SIGNAL = 1.7; EXPRESSED IN PLACENTA, SIGNAL = 4.4; EXPRESSED IN FETAL LIVER, SIGNAL = 1.7; EXPRESSED IN LUNG, SIGNAL = 1.8; EXPRESSED IN HEART, SIGNAL = 1.7; EXPRESSED IN HELA, SIGNAL = 1.8; EXPRESSED IN ADULT LIVER, SIGNAL = 1.7
GMNVCSRGTKWLHEKSTGEEAEGLFRKTKLLMGAKARGVYTREGRKSNAG

SEQ ID NO: 38047 - protein, 35 aa, Homo sapiens
  MAP TO AL021395.8; EXPRESSED IN HEART, SIGNAL = 1.1
CPGDHANPLEHYLYDLAVAELCLVSSPHPSAPSRF

SEQ ID NO: 38048 - protein, 31 aa, Homo sapiens
  MAP TO AL109853.3; EXPRESSED IN HEART, SIGNAL = 1.2; EST_HUMAN HIT: AW504444.1, EVALUE 4.50e+00
TSKNFTSTSLYSCLCKTLFYSSPHPGSHSGL

SEQ ID NO: 38049 - protein, 30 aa, Homo sapiens
  MAP TO AF088219.1; EXPRESSED IN FETAL LIVER, SIGNAL = 1.1; EXPRESSED IN ADULT LIVER, SIGNAL = 1.1; EXPRESSED IN LUNG, SIGNAL =   1; EXPRESSED IN HELA, SIGNAL =   1; EXPRESSED IN PLACENTA, SIGNAL = 1.3; EXPRESSED IN HBL100, SIGNAL = 1.1; EXPRESSED IN HEART, SIGNAL =   1; EST_HUMAN HIT: AV661393.1, EVALUE 2.00e-04
CYLQTATSSQWRVRVTAFYTLPSWYPGPCL

SEQ ID NO: 38050 - protein, 45 aa, Homo sapiens
  MAP TO AF093117.1; EXPRESSED IN BONE MARROW, SIGNAL = 1.1; EXPRESSED IN HBL100, SIGNAL = 1.5; EXPRESSED IN FETAL LIVER, SIGNAL = 1.2; EXPRESSED IN BT474, SIGNAL = 1.2; EXPRESSED IN LUNG, SIGNAL =   1; EXPRESSED IN PLACENTA, SIGNAL = 1.2; EXPRESSED IN HEART, SIGNAL = 0.94; EXPRESSED IN HELA, SIGNAL = 1.2; EXPRESSED IN ADULT LIVER, SIGNAL = 1.3; EXPRESSED IN BRAIN, SIGNAL = 1.1
SFQFLMDLLQGIKAEYRKLSLWSSTDLRSVSTSSLLRSFDSKSTS

SEQ ID NO: 38051 - protein, 53 aa, Homo sapiens
  MAP TO AC007279.3; EXPRESSED IN HEART, SIGNAL = 8.7; EST_HUMAN HIT: N27808.1, EVALUE 9.00e-24
FLNKNQELLQDLSEVNDENTQLMEILNTLFFLPIRRLHNYAKVLLKLATCFEV

SEQ ID NO: 38052 - protein, 63 aa, Homo sapiens
  MAP TO AH005549.1; EXPRESSED IN BRAIN, SIGNAL = 1.4; EXPRESSED IN BONE MARROW, SIGNAL = 4.4; EXPRESSED IN HELA, SIGNAL = 1.4; EXPRESSED IN HBL100, SIGNAL = 1.5; EXPRESSED IN FETAL LIVER, SIGNAL = 1.5; EXPRESSED IN LUNG, SIGNAL = 1.3; EXPRESSED IN PLACENTA, SIGNAL = 1.4; EXPRESSED IN HEART, SIGNAL = 1.1; EXPRESSED IN BT474, SIGNAL = 1.2; EXPRESSED IN ADULT LIVER, SIGNAL = 1.7; EST_HUMAN HIT: AA804315.1, EVALUE 3.00e-02; SWISSPROT HIT: P55518, EVALUE 6.60e-01
HILDDIVLAQNLTYGDDIASEDIAPTQNFTAGYDIASDNITQPKTLVLGMTLPLCCRGHPHLH

SEQ ID NO: 38053 - protein, 81 aa, Homo sapiens
  MAP TO AF053356.1; EXPRESSED IN BT474, SIGNAL = 3.8; EXPRESSED IN HBL100, SIGNAL = 4.6; EXPRESSED IN HELA, SIGNAL = 4.5; EXPRESSED IN HEART, SIGNAL = 4.3; EXPRESSED IN FETAL LIVER, SIGNAL = 4.4; EXPRESSED IN BRAIN, SIGNAL =   5; EXPRESSED IN LUNG, SIGNAL = 4.9; EXPRESSED IN BONE MARROW, SIGNAL = 4.8; EXPRESSED IN PLACENTA, SIGNAL = 5.2; EXPRESSED IN ADULT LIVER, SIGNAL = 5.5; EST_HUMAN HIT: AA393625.1, EVALUE 1.00e-04; SWISSPROT HIT: Q28983, EVALUE 9.00e-20
VGVCQLPGESHYVSFDGSNHSIPDACTLVLVKVCHPAMALPLFKISAKHEKEEGGTEAFRLHEVYIDMYDAQVTLQKGHRV

SEQ ID NO: 38054 - protein, 19 aa, Homo sapiens
  MAP TO AF053356.1; EXPRESSED IN BT474, SIGNAL = 3.8; EXPRESSED IN HBL100, SIGNAL = 4.6; EXPRESSED IN HELA, SIGNAL = 4.5; EXPRESSED IN HEART, SIGNAL = 4.3; EXPRESSED IN FETAL LIVER, SIGNAL = 4.4; EXPRESSED IN BRAIN, SIGNAL =   5; EXPRESSED IN LUNG, SIGNAL = 4.9; EXPRESSED IN BONE MARROW, SIGNAL = 4.8; EXPRESSED IN PLACENTA, SIGNAL = 5.2; EXPRESSED IN ADULT LIVER, SIGNAL = 5.5
CPPRCGSVSAPRGVPLREL

SEQ ID NO: 38055 - protein, 48 aa, Homo sapiens
  MAP TO AF053356.1; EXPRESSED IN HEART, SIGNAL = 6.3; EXPRESSED IN FETAL LIVER, SIGNAL = 7.3; EXPRESSED IN ADULT LIVER, SIGNAL =   8; EXPRESSED IN BT474, SIGNAL = 5.9; EXPRESSED IN LUNG, SIGNAL = 7.2; EXPRESSED IN PLACENTA, SIGNAL =  11; EXPRESSED IN HELA, SIGNAL = 6.4; EXPRESSED IN HBL100, SIGNAL = 6.3; EXPRESSED IN BRAIN, SIGNAL = 6.2; EXPRESSED IN BONE MARROW, SIGNAL = 7.6; EST_HUMAN HIT: AW401851.1, EVALUE 4.00e-21; SWISSPROT HIT: P14605, EVALUE 4.00e-01
LSRNRFPEVPEAACQLVSLEGLSLYHNCLRCLNPALGNLTALTYLNLR

SEQ ID NO: 38056 - protein, 65 aa, Homo sapiens
  MAP TO AF109907.1; EXPRESSED IN BT474, SIGNAL = 2.7; EXPRESSED IN BRAIN, SIGNAL = 2.8; EXPRESSED IN HELA, SIGNAL = 2.2; EXPRESSED IN HEART, SIGNAL = 2.2; EXPRESSED IN FETAL LIVER, SIGNAL = 2.2; EXPRESSED IN LUNG, SIGNAL = 2.7; EXPRESSED IN BONE MARROW, SIGNAL = 2.6; EXPRESSED IN PLACENTA, SIGNAL = 3.2; EXPRESSED IN HBL100, SIGNAL = 2.9; EXPRESSED IN ADULT LIVER, SIGNAL = 2.2; SWISSPROT HIT: P97887, EVALUE 8.00e-12; EST_HUMAN HIT: BE935454.1, EVALUE 1.00e-18
IYTPFTEDTETVGQRALHSILNAAIMISVIVVMTILLVVLYKYRCYKVSMRHRSLLSTLFFLWLG

SEQ ID NO: 38057 - protein, 65 aa, Homo sapiens
  MAP TO AF042089.1; EXPRESSED IN ADULT LIVER, SIGNAL =   2; EXPRESSED IN BT474, SIGNAL = 1.8; EXPRESSED IN HBL100, SIGNAL = 1.7; EXPRESSED IN HELA, SIGNAL = 1.6; EXPRESSED IN HEART, SIGNAL = 1.8; EXPRESSED IN FETAL LIVER, SIGNAL = 1.6; EXPRESSED IN BRAIN, SIGNAL = 1.8; EXPRESSED IN LUNG, SIGNAL = 1.5; EXPRESSED IN BONE MARROW, SIGNAL = 2.2; EXPRESSED IN PLACENTA, SIGNAL = 1.5; SWISSPROT HIT: Q15746, EVALUE 2.00e-31; EST_HUMAN HIT: AV707622.1, EVALUE 2.00e-07
NPPPEVIWLHNGNEIQESEDFHFEQRGTQHSLCIQEVFPEDTGMYTCEAWNSAEEVRTQAMLMVQ

SEQ ID NO: 38058 - protein, 22 aa, Homo sapiens
  MAP TO AF043945.1; EXPRESSED IN BONE MARROW, SIGNAL = 1.9; EXPRESSED IN BRAIN, SIGNAL = 1.4; EXPRESSED IN HEART, SIGNAL = 1.3; EXPRESSED IN FETAL LIVER, SIGNAL = 1.4; EXPRESSED IN ADULT LIVER, SIGNAL = 1.7; EXPRESSED IN BT474, SIGNAL = 1.5; EXPRESSED IN LUNG, SIGNAL = 1.5; EXPRESSED IN PLACENTA, SIGNAL = 1.3; EXPRESSED IN HELA, SIGNAL = 1.3; EXPRESSED IN HBL100, SIGNAL = 1.2
MSRNIKATITPPAAGPLPCTKL

SEQ ID NO: 38059 - protein, 58 aa, Homo sapiens
  MAP TO AF051934.1; EXPRESSED IN BT474, SIGNAL = 1.3; EXPRESSED IN BRAIN, SIGNAL = 1.3; EXPRESSED IN HELA, SIGNAL = 1.2; EXPRESSED IN HEART, SIGNAL = 1.7; EXPRESSED IN FETAL LIVER, SIGNAL = 1.3; EXPRESSED IN LUNG, SIGNAL = 1.3; EXPRESSED IN BONE MARROW, SIGNAL = 1.5; EXPRESSED IN PLACENTA, SIGNAL = 1.2; EXPRESSED IN HBL100, SIGNAL = 1.2; EXPRESSED IN ADULT LIVER, SIGNAL = 1.4
TDAGVKRGVECSITSLTPWTTWEPAATLIFNPDTKFTVPVRTMILTSDMHQKQKKNKA

SEQ ID NO: 38060 - protein, 40 aa, Homo sapiens
  MAP TO AL022101.1; EXPRESSED IN PLACENTA, SIGNAL =   2; EXPRESSED IN HBL100, SIGNAL = 0.95; EXPRESSED IN FETAL LIVER, SIGNAL = 1.1; EXPRESSED IN ADULT LIVER, SIGNAL = 1.7; EXPRESSED IN LUNG, SIGNAL = 1.1; EXPRESSED IN BONE MARROW, SIGNAL = 0.98; EXPRESSED IN HELA, SIGNAL = 1.2; EXPRESSED IN HEART, SIGNAL =   1; SWISSPROT HIT: O60810, EVALUE 1.60e-02; EST_HUMAN HIT: AI766573.1, EVALUE 5.50e+00
SLAIGEDEIAWAWPERDAFSLGLSSGSFPCRFMKMSIWTP

SEQ ID NO: 38061 - protein, 82 aa, Homo sapiens
  MAP TO AL021706.1; EXPRESSED IN BT474, SIGNAL = 1.2; EXPRESSED IN LUNG, SIGNAL = 1.4; EXPRESSED IN BRAIN, SIGNAL = 1.2; EXPRESSED IN BONE MARROW, SIGNAL = 1.3; EXPRESSED IN HEART, SIGNAL = 1.1; EXPRESSED IN ADULT LIVER, SIGNAL = 1.8; EXPRESSED IN FETAL LIVER, SIGNAL = 1.3; EXPRESSED IN PLACENTA, SIGNAL = 2.6; EXPRESSED IN HELA, SIGNAL = 1.8; EXPRESSED IN HBL100, SIGNAL = 1.7; SWISSPROT HIT: P11227, EVALUE 6.40e+00; EST_HUMAN HIT: AA247696.1, EVALUE 3.00e-19
RGTMGLVGLFGFQRQHTAHLGVLLWSNYRVTQKAASFEWCPEQEKALHQVQAAVQAALTFGAYDPADSLVLKVSVADRDVVW

SEQ ID NO: 38062 - protein, 40 aa, Homo sapiens
  MAP TO AL021918.1; EXPRESSED IN BT474, SIGNAL = 8.7; EXPRESSED IN BRAIN, SIGNAL = 5.4; EXPRESSED IN BONE MARROW, SIGNAL = 8.6; EXPRESSED IN HEART, SIGNAL = 4.6; EXPRESSED IN PLACENTA, SIGNAL =  11; EXPRESSED IN ADULT LIVER, SIGNAL = 2.7; EXPRESSED IN FETAL LIVER, SIGNAL = 9.2; EXPRESSED IN LUNG, SIGNAL = 6.2; EXPRESSED IN HELA, SIGNAL =  24; EXPRESSED IN HBL100, SIGNAL =  18; EST_HUMAN HIT: AA187754.1, EVALUE 3.00e-10
STPKVTVVAIHSVVFLNDNPFHGVMVIKSYKAKPLFLPLP

SEQ ID NO: 38063 - protein, 40 aa, Homo sapiens
  MAP TO AJ010598.1; EXPRESSED IN HEART, SIGNAL = 0.85; EXPRESSED IN PLACENTA, SIGNAL = 0.62; EXPRESSED IN HELA, SIGNAL = 0.79; EXPRESSED IN BRAIN, SIGNAL = 0.75; SWISSPROT HIT: Q9UHP3, EVALUE 1.00e-16; EST_HUMAN HIT: AA482201.1, EVALUE 2.00e-15
FMRELRYLFALLVGTKRKYVDPSRAVEILKDAFKSNDSQQ

SEQ ID NO: 38064 - protein, 116 aa, Homo sapiens
  MAP TO AL031577.1; EXPRESSED IN HELA, SIGNAL = 1.2; EXPRESSED IN HEART, SIGNAL = 1.5; EXPRESSED IN LUNG, SIGNAL = 1.6; EXPRESSED IN BRAIN, SIGNAL =   1; EST_HUMAN HIT: AW452728.1, EVALUE 7.00e-52; SWISSPROT HIT: Q12263, EVALUE 5.30e+00
VIWVILSVEVGGLLGVTQQLSSFETEFNTQPHRKVEGNFNPFASPQKNRQSDENNLKDPGGSEFDSISKNTWAPAPDTWAPAPDQTEQDQNRLSQNSVNLSPSSHANNLSVVTYSK

SEQ ID NO: 38065 - protein, 70 aa, Homo sapiens
  MAP TO AP000275.1; EXPRESSED IN PLACENTA, SIGNAL = 0.8; EXPRESSED IN LUNG, SIGNAL = 0.71; EXPRESSED IN ADULT LIVER, SIGNAL = 0.73; EXPRESSED IN BONE MARROW, SIGNAL = 0.68; EXPRESSED IN BRAIN, SIGNAL = 1.5; EXPRESSED IN HEART, SIGNAL = 0.8; EXPRESSED IN BT474, SIGNAL = 1.4; EST_HUMAN HIT: BE175478.1, EVALUE 2.00e-28; SWISSPROT HIT: O86576, EVALUE 4.30e+00
YPQMQLQEHLIILFLIFPVHAILFSLLLHGFTFPAIIFEHSYFPLVSPMLVYHIHPNVWYHIIGLICASL

SEQ ID NO: 38066 - protein, 22 aa, Homo sapiens
  MAP TO AC007678.1; EXPRESSED IN HELA, SIGNAL =   1; EXPRESSED IN HEART, SIGNAL = 0.85; EXPRESSED IN BONE MARROW, SIGNAL = 0.97; EXPRESSED IN ADULT LIVER, SIGNAL = 1.1; EXPRESSED IN BT474, SIGNAL =   1; EXPRESSED IN FETAL LIVER, SIGNAL = 0.96
VHIPRSSGTLQELSSLIPTSAL

SEQ ID NO: 38067 - protein, 38 aa, Homo sapiens
  MAP TO AC008164.2; EXPRESSED IN LUNG, SIGNAL = 0.59; EXPRESSED IN HEART, SIGNAL = 4.5; EXPRESSED IN HELA, SIGNAL = 0.67; EXPRESSED IN ADULT LIVER, SIGNAL = 0.7; EXPRESSED IN PLACENTA, SIGNAL = 0.86; EST_HUMAN HIT: AW237996.1, EVALUE 6.50e+00; SWISSPROT HIT: O20672, EVALUE 2.80e+00
LLQHLLEQPRMWICKFPLPFSGCILLLIHSYGTQSTAL

SEQ ID NO: 38068 - protein, 73 aa, Homo sapiens
  MAP TO AL049739.1; EXPRESSED IN ADULT LIVER, SIGNAL =   1; EXPRESSED IN HEART, SIGNAL = 0.94; EXPRESSED IN HBL100, SIGNAL =   1; EXPRESSED IN HELA, SIGNAL =   1; EXPRESSED IN PLACENTA, SIGNAL = 0.91; EST_HUMAN HIT: AI079550.1, EVALUE 1.00e-07; SWISSPROT HIT: O83536, EVALUE 2.40e+00
EVEEMELAYASQERNCFVCREEVLQHFWQCYAGVADVQAGQVSQEEIHRGMESRIRDDNHQNGSIPSHTDEVD

SEQ ID NO: 38069 - protein, 43 aa, Homo sapiens
  MAP TO AL109956.13; EXPRESSED IN LUNG, SIGNAL = 1.1; EXPRESSED IN PLACENTA, SIGNAL = 1.6; EXPRESSED IN HEART, SIGNAL = 1.1; SWISSPROT HIT: P97697, EVALUE 7.00e-01; EST_HUMAN HIT: AU123146.1, EVALUE 3.00e-18
KTEAAIKNFSPYYSRQYSVAFCNHVRTEVEQQRDLTSQFLKTK

SEQ ID NO: 38070 - protein, 215 aa, Homo sapiens
  MAP TO AL031665.18; EXPRESSED IN PLACENTA, SIGNAL = 1.2; EXPRESSED IN BT474, SIGNAL = 1.5; EXPRESSED IN LUNG, SIGNAL = 1.8; EXPRESSED IN BRAIN, SIGNAL = 1.6; EXPRESSED IN HEART, SIGNAL = 1.2; EST_HUMAN HIT: AW628999.1, EVALUE 3.00e-31; SWISSPROT HIT: P17473, EVALUE 1.00e+00
AKGPRDELGPSFPMASPPGLELKTLSNGPQAPRRSAPLGPVAPTREGVENACFSSEEHETHFQNPGNTRLGSSPSPPGGVSSLPRSQRDDLSLHSEEGPALEPVSRPVDYGFVSALVFLVSGILLVVTAYAIPREARVNPDTVTAREMERLEMYYARLGSHLDRCIIAGLGLLTVGGMLLSVLLMVSLCKGELYRRRTFVPGKGSRKTYGSINLR

SEQ ID NO: 38071 - protein, 27 aa, Homo sapiens
  MAP TO AL096864.6; EXPRESSED IN HEART, SIGNAL = 1.1
ITSISCLCLLLIDGFFIITLNSPHSFT

SEQ ID NO: 38072 - protein, 258 aa, Homo sapiens; identical to SEQ ID NO: 35600
  MAP TO AC010680.3; EXPRESSED IN HEART, SIGNAL = 2.8; EXPRESSED IN ADULT LIVER, SIGNAL = 1.3; EST_HUMAN HIT: BF701545.1, EVALUE 2.00e-06; SWISSPROT HIT: P11799, EVALUE 2.00e-06

SEQ ID NO: 38073 - protein, 17 aa, Homo sapiens
  MAP TO AC010680.3; EXPRESSED IN HEART, SIGNAL = 2.8; EXPRESSED IN ADULT LIVER, SIGNAL = 1.3
HLKKSRYCSKKSILTTW

SEQ ID NO: 38074 - protein, 67 aa, Homo sapiens
  MAP TO AL009178.4; EXPRESSED IN HBL100, SIGNAL = 1.2; EXPRESSED IN HELA, SIGNAL = 1.3; EXPRESSED IN PLACENTA, SIGNAL = 1.8; EXPRESSED IN ADULT LIVER, SIGNAL = 1.4; EXPRESSED IN HEART, SIGNAL = 1.9; EXPRESSED IN BT474, SIGNAL = 1.5; EXPRESSED IN FETAL LIVER, SIGNAL = 1.3; EXPRESSED IN LUNG, SIGNAL =   1; EXPRESSED IN BONE MARROW, SIGNAL = 1.9; EXPRESSED IN BRAIN, SIGNAL = 1.5; EST_HUMAN HIT: BE787234.1, EVALUE 4.90e-01; SWISSPROT HIT: P81067, EVALUE 2.20e+00
LTPSIPVSAFPSGLGPSPAPLSSPGCLHECCGSFPPPFSLALVSIPCSTRGVSSCCPVPAPLGSLRP

SEQ ID NO: 38075 - protein, 19 aa, Homo sapiens
  MAP TO AL009178.4; EXPRESSED IN HBL100, SIGNAL = 1.2; EXPRESSED IN HELA, SIGNAL = 1.3; EXPRESSED IN PLACENTA, SIGNAL = 1.8; EXPRESSED IN ADULT LIVER, SIGNAL = 1.4; EXPRESSED IN HEART, SIGNAL = 1.9; EXPRESSED IN BT474, SIGNAL = 1.5; EXPRESSED IN FETAL LIVER, SIGNAL = 1.3; EXPRESSED IN LUNG, SIGNAL =   1; EXPRESSED IN BONE MARROW, SIGNAL = 1.9; EXPRESSED IN BRAIN, SIGNAL = 1.5
ESAWRRELKFGKQNRGRFY

SEQ ID NO: 38076 - protein, 23 aa, Homo sapiens
  MAP TO AC008119.6; EXPRESSED IN LUNG, SIGNAL = 1.8; EXPRESSED IN ADULT LIVER, SIGNAL = 0.91; EXPRESSED IN FETAL LIVER, SIGNAL = 1.1; EXPRESSED IN HEART, SIGNAL = 0.88
PSLFYVLLVELSITASITTSVVY

SEQ ID NO: 38077 - protein, 37 aa, Homo sapiens
  MAP TO AC010183.6; EXPRESSED IN HEART, SIGNAL = 1.2; EXPRESSED IN ADULT LIVER, SIGNAL = 1.1; EXPRESSED IN LUNG, SIGNAL =   1; EST_HUMAN HIT: BF106045.1, EVALUE 1.50e+00; SWISSPROT HIT: Q9ZHG4, EVALUE 8.10e+00
TAPWIYLPFSFFSWLVYFQKLASCYLKDSYLNCSAAC

SEQ ID NO: 38078 - protein, 60 aa, Homo sapiens
  MAP TO AC011457.1; EXPRESSED IN HEART, SIGNAL = 0.88; SWISSPROT HIT: Q9Y375, EVALUE 9.00e-20; EST_HUMAN HIT: BF058796.1, EVALUE 1.00e-18
PFFQIFFPNQGRVQDVQSQLLLDKISSIAFTLADKVGGPFFLEIDFIGVLTVPAHTEFAY

SEQ ID NO: 38079 - protein, 50 aa, Homo sapiens
  MAP TO AC007251.1; EXPRESSED IN FETAL LIVER, SIGNAL = 0.95; EXPRESSED IN ADULT LIVER, SIGNAL = 2.4; EXPRESSED IN LUNG, SIGNAL = 1.1; EXPRESSED IN HEART, SIGNAL = 1.2
ETSELKMRLNIAIFFGALFGALGVLLFLVAFGSDYWLLATEVGRCSGEKN

SEQ ID NO: 38080 - protein, 143 aa, Homo sapiens
  MAP TO AC010680.3; EXPRESSED IN HEART, SIGNAL = 2.9; EST_HUMAN HIT: AV652850.1, EVALUE 7.00e-41; SWISSPROT HIT: P54296, EVALUE 2.00e-17
IWKLIPNGQYEFRVRAVNKYGISDECKSDKVVIQDPYRLPGPPGKPKVLARTKGSMLVSWTPPLDNGGSPITGYWLEKREEGSPYWSRVSRAPITKVGLKGVEFNVPRLLEGVKYQFRAMAINAAGIGPPSEPSDPEVAGDPI

SEQ ID NO: 38081 - protein, 37 aa, Homo sapiens
  MAP TO AL022144.1; EXPRESSED IN HELA, SIGNAL = 5.9; EXPRESSED IN HBL100, SIGNAL = 5.7; EXPRESSED IN FETAL LIVER, SIGNAL = 6.6; EXPRESSED IN ADULT LIVER, SIGNAL =   9; EXPRESSED IN BRAIN, SIGNAL = 4.7; EXPRESSED IN LUNG, SIGNAL = 5.6; EXPRESSED IN BONE MARROW, SIGNAL = 5.2; EXPRESSED IN PLACENTA, SIGNAL = 7.1; EXPRESSED IN HEART, SIGNAL = 4.9; EXPRESSED IN BT474, SIGNAL =   5; EST_HUMAN HIT: AI141063.1, EVALUE 8.00e-15
QRENNDKYTVNFVINKQKLLPRQQNKSIPASSHHSVK

SEQ ID NO: 38082 - protein, 34 aa, Homo sapiens
  MAP TO AL021307.1; EXPRESSED IN PLACENTA, SIGNAL = 3.6; EXPRESSED IN HEART, SIGNAL = 3.6; EXPRESSED IN ADULT LIVER, SIGNAL =   5; EXPRESSED IN BT474, SIGNAL = 3.8; EXPRESSED IN FETAL LIVER, SIGNAL = 3.6; EXPRESSED IN LUNG, SIGNAL = 3.8; EXPRESSED IN BONE MARROW, SIGNAL = 4.4; EXPRESSED IN BRAIN, SIGNAL = 3.6; EXPRESSED IN HBL100, SIGNAL = 3.7; EXPRESSED IN HELA, SIGNAL =   4
PDASCGDECKKKCSTTTTTTKGWVRNVERSQGPI

SEQ ID NO: 38083 - protein, 55 aa, Homo sapiens
  MAP TO AL022344.1; EXPRESSED IN HBL100, SIGNAL = 1.3; EXPRESSED IN FETAL LIVER, SIGNAL = 1.2; EXPRESSED IN BT474, SIGNAL = 1.1; EXPRESSED IN LUNG, SIGNAL =   1; EXPRESSED IN PLACENTA, SIGNAL = 1.3; EXPRESSED IN HEART, SIGNAL = 1.1; EXPRESSED IN HELA, SIGNAL = 1.4; EXPRESSED IN ADULT LIVER, SIGNAL = 1.7; EXPRESSED IN BRAIN, SIGNAL = 1.2; EXPRESSED IN BONE MARROW, SIGNAL = 1.1; EST_HUMAN HIT: AV764194.1, EVALUE 8.00e-15; SWISSPROT HIT: Q15404, EVALUE 7.00e-16
SSIPRFTLSIYVSMVVPPNIAELKNLEVLNFLNNQIEKLPTQISRLQKLKHLNLG

SEQ ID NO: 38084 - protein, 23 aa, Homo sapiens
  MAP TO AL031005.1; EXPRESSED IN FETAL LIVER, SIGNAL = 3.5; EXPRESSED IN ADULT LIVER, SIGNAL = 4.3; EXPRESSED IN BT474, SIGNAL = 2.7; EXPRESSED IN BRAIN, SIGNAL = 3.2; EXPRESSED IN BONE MARROW, SIGNAL = 3.4; EXPRESSED IN LUNG, SIGNAL = 3.4; EXPRESSED IN HELA, SIGNAL = 3.4; EXPRESSED IN PLACENTA, SIGNAL = 3.4; EXPRESSED IN HBL100, SIGNAL = 3.4; EXPRESSED IN HEART, SIGNAL = 2.6
DEPLLTRSREEQQVPAVPLPPLT

SEQ ID NO: 38085 - protein, 34 aa, Homo sapiens
  MAP TO AL031055.1; EXPRESSED IN BONE MARROW, SIGNAL = 3.3; EXPRESSED IN HBL100, SIGNAL = 3.2; EXPRESSED IN FETAL LIVER, SIGNAL = 3.5; EXPRESSED IN BT474, SIGNAL = 4.2; EXPRESSED IN LUNG, SIGNAL = 3.4; EXPRESSED IN PLACENTA, SIGNAL = 3.4; EXPRESSED IN HEART, SIGNAL = 2.7; EXPRESSED IN HELA, SIGNAL =   4; EXPRESSED IN ADULT LIVER, SIGNAL = 4.5; EXPRESSED IN BRAIN, SIGNAL = 2.1
RSTLWRYEEEPSPSATASTGRPTSSSASPSSISL

SEQ ID NO: 38086 - protein, 125 aa, Homo sapiens
  MAP TO AL022575.1; EXPRESSED IN BRAIN, SIGNAL =   7; EXPRESSED IN BONE MARROW, SIGNAL = 9.2; EXPRESSED IN HELA, SIGNAL =  12; EXPRESSED IN HBL100, SIGNAL =  10; EXPRESSED IN FETAL LIVER, SIGNAL =  11; EXPRESSED IN LUNG, SIGNAL =  12; EXPRESSED IN PLACENTA, SIGNAL =  12; EXPRESSED IN HEART, SIGNAL = 8.4; EXPRESSED IN BT474, SIGNAL = 9.8; EXPRESSED IN ADULT LIVER, SIGNAL =  13; SWISSPROT HIT: P97279, EVALUE 4.00e-05; EST_HUMAN HIT: AA808986.1, EVALUE 2.00e-11
LHVSGKLLGAPPRPGHKDQTRTYFQIITVTTDKPRAYTITISRSSISLRGEGTLRLSWDQPALLKRPQLELYVAAAARLTLRLGPYLEFLVLRHRYRHPSTLQLPHLGFYVANGSGLSPSARGLI

SEQ ID NO: 38087 - protein, 87 aa, Homo sapiens
  MAP TO AL022575.1; EXPRESSED IN BRAIN, SIGNAL =   7; EXPRESSED IN BONE MARROW, SIGNAL = 9.2; EXPRESSED IN HELA, SIGNAL =  12; EXPRESSED IN HBL100, SIGNAL =  10; EXPRESSED IN FETAL LIVER, SIGNAL =  11; EXPRESSED IN LUNG, SIGNAL =  12; EXPRESSED IN PLACENTA, SIGNAL =  12; EXPRESSED IN HEART, SIGNAL = 8.4; EXPRESSED IN BT474, SIGNAL = 9.8; EXPRESSED IN ADULT LIVER, SIGNAL =  13; EST_HUMAN HIT: AA323793.1, EVALUE 6.80e-02; SWISSPROT HIT: P16356, EVALUE 5.60e-01
AACEWEAAWRTTKAGPQGPDSHLLPDHHSHYRQTPGLYYHHQPQFYIFARRGYLAPVLGPTCPAEEAPAGALCGCCSPPYPPPWALP

SEQ ID NO: 38088 - protein, 29 aa, Homo sapiens
  MAP TO AJ011929.1; EXPRESSED IN BONE MARROW, SIGNAL = 1.3; EXPRESSED IN LUNG, SIGNAL = 1.2; EXPRESSED IN PLACENTA, SIGNAL = 1.5; EXPRESSED IN HBL100, SIGNAL = 1.2; EXPRESSED IN HELA, SIGNAL = 3.3; EXPRESSED IN ADULT LIVER, SIGNAL = 1.3; EXPRESSED IN HEART, SIGNAL = 1.2; EXPRESSED IN BT474, SIGNAL = 1.1; EXPRESSED IN FETAL LIVER, SIGNAL = 1.2; SWISSPROT HIT: Q42563, EVALUE 3.70e+00; EST_HUMAN HIT: BE878131.1, EVALUE 3.00e-09
MSDQRGLIIDDLRVTGATLTPERQQQQDD

SEQ ID NO: 38089 - protein, 44 aa, Homo sapiens
  MAP TO AJ011929.1; EXPRESSED IN BONE MARROW, SIGNAL = 1.3; EXPRESSED IN LUNG, SIGNAL = 1.2; EXPRESSED IN PLACENTA, SIGNAL = 1.5; EXPRESSED IN HBL100, SIGNAL = 1.2; EXPRESSED IN HELA, SIGNAL = 3.3; EXPRESSED IN ADULT LIVER, SIGNAL = 1.3; EXPRESSED IN HEART, SIGNAL = 1.2; EXPRESSED IN BT474, SIGNAL = 1.1; EXPRESSED IN FETAL LIVER, SIGNAL = 1.2; SWISSPROT HIT: Q9Y5Z0, EVALUE 2.00e-13; EST_HUMAN HIT: AL134813.1, EVALUE 3.00e-12
LMSVCGAILLVLIVLLLLPFRCQRRPRDPEVVNDESSLVRHRWK

SEQ ID NO: 38090 - protein, 20 aa, Homo sapiens
  MAP TO AL031114.1; EXPRESSED IN HELA, SIGNAL = 6.4; EXPRESSED IN HEART, SIGNAL = 4.4; EXPRESSED IN PLACENTA, SIGNAL = 6.2; EXPRESSED IN HBL100, SIGNAL =   5; EXPRESSED IN FETAL LIVER, SIGNAL = 5.4; EXPRESSED IN ADULT LIVER, SIGNAL = 9.4; EXPRESSED IN BT474, SIGNAL =   5; EXPRESSED IN BRAIN, SIGNAL = 3.1; EXPRESSED IN BONE MARROW, SIGNAL = 5.4; EXPRESSED IN LUNG, SIGNAL = 5.2; EST_HUMAN HIT: R10667.1, EVALUE 4.30e+00
GSLTLPLGAPSQGSTDLLTA

SEQ ID NO: 38091 - protein, 52 aa, Homo sapiens
  MAP TO AL035250.17; EXPRESSED IN HEART, SIGNAL = 0.92; EXPRESSED IN FETAL LIVER, SIGNAL = 2.5; EST_HUMAN HIT: BE349408.1, EVALUE 6.50e-01
ISEMKAEMGELTHKQGRAGVSTLGSLSPSSWIRHWQGTSAKRAACSTPTEAT

SEQ ID NO: 38092 - protein, 32 aa, Homo sapiens
  MAP TO AL031177.1; EXPRESSED IN HELA, SIGNAL = 2.4; EXPRESSED IN PLACENTA, SIGNAL = 2.7; EXPRESSED IN HBL100, SIGNAL = 2.5; EXPRESSED IN HEART, SIGNAL = 2.1; EXPRESSED IN FETAL LIVER, SIGNAL = 2.3; EXPRESSED IN ADULT LIVER, SIGNAL = 2.7; EXPRESSED IN BT474, SIGNAL = 2.3; EXPRESSED IN BRAIN, SIGNAL = 2.3; EXPRESSED IN BONE MARROW, SIGNAL = 2.1; EXPRESSED IN LUNG, SIGNAL = 2.3; EST_HUMAN HIT: BE253090.1, EVALUE 4.00e-05; SWISSPROT HIT: Q14031, EVALUE 5.00e-14
MRGEPGFMGTPGKVGPPGDPGFPGMKGKAGPR

SEQ ID NO: 38093 - protein, 37 aa, Homo sapiens
  MAP TO AL030996.1; EXPRESSED IN BRAIN, SIGNAL =  29; EXPRESSED IN BONE MARROW, SIGNAL = 9.8; EXPRESSED IN HBL100, SIGNAL =  31; EXPRESSED IN FETAL LIVER, SIGNAL =  12; EXPRESSED IN BT474, SIGNAL =  15; EXPRESSED IN LUNG, SIGNAL = 5.4; EXPRESSED IN PLACENTA, SIGNAL = 8.6; EXPRESSED IN HEART, SIGNAL = 5.1; EXPRESSED IN HELA, SIGNAL =  26; EXPRESSED IN ADULT LIVER, SIGNAL = 2.2; EST_HUMAN HIT: AA722257.1, EVALUE 7.00e-12; SWISSPROT HIT: Q13509, EVALUE 2.00e-11
FKCISAQFTAMLWCKAFLHWYTGEGMDEMEFTETDSN

SEQ ID NO: 38094 - protein, 29 aa, Homo sapiens
  MAP TO AB020876.1; EXPRESSED IN HEART, SIGNAL = 0.86; EXPRESSED IN LUNG, SIGNAL = 3.4; SWISSPROT HIT: P11369, EVALUE 1.90e-01; EST_HUMAN HIT: AV720080.1, EVALUE 5.30e-01
SPKENPCIYGHMNFDRGVRQFGGEKNNIF

SEQ ID NO: 38095 - protein, 45 aa, Homo sapiens
  MAP TO AL031003.1; EXPRESSED IN PLACENTA, SIGNAL = 4.6; EXPRESSED IN HEART, SIGNAL =   5; EXPRESSED IN HBL100, SIGNAL = 6.1; EXPRESSED IN BT474, SIGNAL = 5.8; EXPRESSED IN FETAL LIVER, SIGNAL = 6.5; EXPRESSED IN ADULT LIVER, SIGNAL =   7; EXPRESSED IN BRAIN, SIGNAL = 5.6; EXPRESSED IN BONE MARROW, SIGNAL =   6; EXPRESSED IN LUNG, SIGNAL = 7.8; EXPRESSED IN HELA, SIGNAL =   6; EST_HUMAN HIT: BE614962.1, EVALUE 7.00e-21; SWISSPROT HIT: P29508, EVALUE 2.10e+00
PGSYEIRHYGPAKWVSTSVESMDWDSAIQTGFTKLNSYIQGKNEK

SEQ ID NO: 38096 - protein, 77 aa, Homo sapiens
  MAP TO AL035457.13; EXPRESSED IN BT474, SIGNAL = 1.1; EXPRESSED IN BRAIN, SIGNAL =   1; EXPRESSED IN LUNG, SIGNAL =   1; EXPRESSED IN HELA, SIGNAL = 1.1; EXPRESSED IN HBL100, SIGNAL =   1; EXPRESSED IN HEART, SIGNAL = 1.2; SWISSPROT HIT: P32537, EVALUE 4.20e+00; EST_HUMAN HIT: AW935413.1, EVALUE 8.30e-01
GLVSNGHVTPAGAMDIESQDFCGKLISRDAVFLLATPSEVDISQEVTAISSQHGDSLPENEASTDDSRTQRQRETDL

SEQ ID NO: 38097 - protein, 31 aa, Homo sapiens
  MAP TO AL031058.1; EXPRESSED IN ADULT LIVER, SIGNAL = 4.6; EXPRESSED IN LUNG, SIGNAL = 3.1; EXPRESSED IN BRAIN, SIGNAL = 3.2; EXPRESSED IN BONE MARROW, SIGNAL = 3.2; EXPRESSED IN HELA, SIGNAL = 5.9; EXPRESSED IN BT474, SIGNAL = 6.2; EXPRESSED IN FETAL LIVER, SIGNAL = 3.8; EXPRESSED IN PLACENTA, SIGNAL = 4.8; EXPRESSED IN HEART, SIGNAL = 5.4; EXPRESSED IN HBL100, SIGNAL = 3.5; EST_HUMAN HIT: BF086994.1, EVALUE 6.00e-13
RNKEAEEHSNPDHRESQEGGRRHPTAKGHWL

SEQ ID NO: 38098 - protein, 37 aa, Homo sapiens
  MAP TO AL078602.10; EXPRESSED IN HEART, SIGNAL = 1.1; SWISSPROT HIT: O29516, EVALUE 8.10e+00
PVKRTQKLHGSGCGPTGLTVNEVETVTNSDARALSSW

SEQ ID NO: 38099 - protein, 37 aa, Homo sapiens
  MAP TO AL078602.10; EXPRESSED IN HEART, SIGNAL = 1.1; EST_HUMAN HIT: BF528599.1, EVALUE 6.50e-01
ASKEDSETSWVRLRPDWPDSQRGGNRDKFRRQGFIQL

SEQ ID NO: 38100 - protein, 40 aa, Homo sapiens
  MAP TO AC012458.2; EXPRESSED IN PLACENTA, SIGNAL = 1.5; EXPRESSED IN HELA, SIGNAL = 2.1; EXPRESSED IN HEART, SIGNAL = 1.5; EXPRESSED IN BT474, SIGNAL = 1.7; EXPRESSED IN FETAL LIVER, SIGNAL = 1.9; EXPRESSED IN ADULT LIVER, SIGNAL = 1.6; EXPRESSED IN BONE MARROW, SIGNAL = 1.7; EXPRESSED IN LUNG, SIGNAL = 1.9; EXPRESSED IN BRAIN, SIGNAL = 1.7
RIRKGKGKWLLLEFLWKQNPTSPKPTPRKYPKRTSSEAVQ

SEQ ID NO: 38101 - protein, 70 aa, Homo sapiens
  MAP TO AL033504.3; EXPRESSED IN PLACENTA, SIGNAL = 3.5; EXPRESSED IN HBL100, SIGNAL = 4.3; EXPRESSED IN LUNG, SIGNAL = 3.2; EXPRESSED IN BRAIN, SIGNAL = 3.4; EXPRESSED IN BONE MARROW, SIGNAL = 3.2; EXPRESSED IN HEART, SIGNAL = 2.9; EXPRESSED IN HELA, SIGNAL = 3.6; EXPRESSED IN BT474, SIGNAL = 3.5; EXPRESSED IN ADULT LIVER, SIGNAL =   5; EXPRESSED IN FETAL LIVER, SIGNAL = 3.5; EST_HUMAN HIT: BE563130.1, EVALUE 9.00e-01
MSEVNTKNCDLFQAPDGLAFDPKMLSCCPDLLHMLQASCSRIGLCFTFSVTRPLPMICGGLLPCFPYPQQ

SEQ ID NO: 38102 - protein, 405 aa, Homo sapiens
  MAP TO AL033538.1; EXPRESSED IN PLACENTA, SIGNAL = 1.4; EXPRESSED IN HBL100, SIGNAL = 2.2; EXPRESSED IN HELA, SIGNAL = 2.1; EXPRESSED IN BT474, SIGNAL = 1.1; EXPRESSED IN LUNG, SIGNAL = 0.97; EXPRESSED IN BRAIN, SIGNAL =   1; EXPRESSED IN BONE MARROW, SIGNAL = 1.2; EXPRESSED IN HEART, SIGNAL = 0.99; EXPRESSED IN ADULT LIVER, SIGNAL = 1.3; EXPRESSED IN FETAL LIVER, SIGNAL = 1.2; EST_HUMAN HIT: AW959321.1, EVALUE 2.00e-53; SWISSPROT HIT: P08046, EVALUE 5.00e-03
NKDEEEYEGFSIISNEPLATYQENRNTCFSPDHKQPQPGTAGGMRVSVSSKGSISTPNSPVKMTLIPSPNSPFQKVGKLASSDTGESDQSSTETDSTVKSQEESNPKLDPQELAQKILEETQSHLIAVERLQRSGGQVSKSNNPEDGVQAPSSTAVFRASETSAFSRPVLSHQKSQPSPVTVKPKPPARSSSLPKVSSGYSSPTTSEMSIKDSPSQHSGRPSPGCDSQTSQLDQPLFKLKYPSSPYSAHISKSPRNMSPSSGHQSPAGSAPSPALSYSSAGSARSSPADAPDIDKLKMAAIDEKVQAVHNLKMFWQSTPQHSTGPMKIFRGAPGTMTSKRDVLSLLNLSPRHNKKEEGVDKLELKELSLQQHDGAPPKAPPNGHWRTETTSLGSLPLPAGPPATA

SEQ ID NO: 38103 - protein, 68 aa, Homo sapiens
  MAP TO AL031622.1; EXPRESSED IN PLACENTA, SIGNAL = 2.7; EXPRESSED IN HBL100, SIGNAL = 3.2; EXPRESSED IN LUNG, SIGNAL = 2.8; EXPRESSED IN BRAIN, SIGNAL = 2.3; EXPRESSED IN BONE MARROW, SIGNAL = 2.8; EXPRESSED IN HEART, SIGNAL = 2.3; EXPRESSED IN HELA, SIGNAL = 3.4; EXPRESSED IN BT474, SIGNAL = 3.3; EXPRESSED IN ADULT LIVER, SIGNAL =   5; EXPRESSED IN FETAL LIVER, SIGNAL =   3; EST_HUMAN HIT: AA909057.1, EVALUE 4.00e-14; SWISSPROT HIT: P53114, EVALUE 9.80e-02
ECNVNPIVNCTWEESKLHSPYENPMHDDLRWNSFILESSTSSPEYVEKLSSTKPVPGAKNVGEHCLID

SEQ ID NO: 38104 - protein, 21 aa, Homo sapiens
  MAP TO AL034399.6; EXPRESSED IN BONE MARROW, SIGNAL = 1.2; EXPRESSED IN PLACENTA, SIGNAL = 1.5; EXPRESSED IN HELA, SIGNAL = 1.3; EXPRESSED IN HEART, SIGNAL = 1.3; EXPRESSED IN HBL100, SIGNAL = 1.7; EXPRESSED IN BT474, SIGNAL = 1.2; EXPRESSED IN FETAL LIVER, SIGNAL = 1.6; EXPRESSED IN ADULT LIVER, SIGNAL = 2.4; EXPRESSED IN LUNG, SIGNAL = 1.7
QMRGGAKEEERNLLAAPSTQG

SEQ ID NO: 38105 - protein, 28 aa, Homo sapiens [sequence omitted]

SEQ ID NO: 38106 - protein, 24 aa, Homo sapiens [sequence omitted]

SEQ ID NO: 38107 - protein, 54 aa, Homo sapiens
  MAP TO AL031679.1; EXPRESSED IN PLACENTA, SIGNAL = 0.95; EXPRESSED IN HBL100, SIGNAL = 1.2; EXPRESSED IN HELA, SIGNAL = 0.99; EXPRESSED IN FETAL LIVER, SIGNAL =   1; EXPRESSED IN BT474, SIGNAL = 1.3; EXPRESSED IN BRAIN, SIGNAL = 0.99; EXPRESSED IN HEART, SIGNAL = 0.94; EXPRESSED IN ADULT LIVER, SIGNAL = 1.5; EXPRESSED IN LUNG, SIGNAL = 1.2; EXPRESSED IN BONE MARROW, SIGNAL = 1.2; SWISSPROT HIT: P42396, EVALUE 5.20e-01
IHMADMLYYFMNYTFLVTSLNSSIFLAILLRFMVILFFLLFMRVISNSSTLLSV

SEQ ID NO: 38108 - protein, 54 aa, Homo sapiens
  MAP TO AP000498.1; EXPRESSED IN BONE MARROW, SIGNAL =   1; EXPRESSED IN BRAIN, SIGNAL = 1.1; EXPRESSED IN FETAL LIVER, SIGNAL = 1.1; EXPRESSED IN ADULT LIVER, SIGNAL = 0.97; EXPRESSED IN BT474, SIGNAL =   1; EXPRESSED IN HELA, SIGNAL =   1; EXPRESSED IN HEART, SIGNAL = 1.2; EST_HUMAN HIT: AA121545.1, EVALUE 1.00e-03
PLCPKIMTFKDYINRLPLPTGFLLGLASRRHQWEIREQKENEVRIFIPLALFLW

SEQ ID NO: 38109 - protein, 42 aa, Homo sapiens
  MAP TO AC011493.2; EXPRESSED IN HEART, SIGNAL = 0.96; EXPRESSED IN BT474, SIGNAL =   1; EST_HUMAN HIT: BE783649.1, EVALUE 2.00e-14; SWISSPROT HIT: Q05481, EVALUE 2.00e-14
GLLTFRDVAIEFSLEEWQYLDTAQKNLYRKMMLENYINLAFL

SEQ ID NO: 38110 - protein, 46 aa, Homo sapiens
  MAP TO AL031595.4; EXPRESSED IN BONE MARROW, SIGNAL = 3.7; EXPRESSED IN HBL100, SIGNAL = 2.8; EXPRESSED IN FETAL LIVER, SIGNAL =   3; EXPRESSED IN BT474, SIGNAL = 2.7; EXPRESSED IN LUNG, SIGNAL = 2.8; EXPRESSED IN PLACENTA, SIGNAL = 2.5; EXPRESSED IN HEART, SIGNAL =   2; EXPRESSED IN HELA, SIGNAL = 2.5; EXPRESSED IN ADULT LIVER, SIGNAL = 3.3; EXPRESSED IN BRAIN, SIGNAL = 2.4; EST_HUMAN HIT: AW962090.1, EVALUE 1.00e-13; SWISSPROT HIT: P11533, EVALUE 7.90e+00
RLAALKLEAEDIALTATSQKHKLTVVLEAVNRSLQLEEWQAKWSVE

SEQ ID NO: 38111 - protein, 47 aa, Homo sapiens
  MAP TO AL031595.4; EXPRESSED IN BONE MARROW, SIGNAL = 3.7; EXPRESSED IN HBL100, SIGNAL = 2.8; EXPRESSED IN FETAL LIVER, SIGNAL =   3; EXPRESSED IN BT474, SIGNAL = 2.7; EXPRESSED IN LUNG, SIGNAL = 2.8; EXPRESSED IN PLACENTA, SIGNAL = 2.5; EXPRESSED IN HEART, SIGNAL =   2; EXPRESSED IN HELA, SIGNAL = 2.5; EXPRESSED IN ADULT LIVER, SIGNAL = 3.3; EXPRESSED IN BRAIN, SIGNAL = 2.4; EST_HUMAN HIT: AU123514.1, EVALUE 1.50e-01; SWISSPROT HIT: P36777, EVALUE 1.60e+00
WRSGRPSGAWRVRGPQPGYPWGVWGRWGPSASGFSPTRKAHSSFSQQ

SEQ ID NO: 38112 - protein, 156 aa, Homo sapiens; identical to SEQ ID NO: 36000
  MAP TO AL034380.22; EXPRESSED IN BONE MARROW, SIGNAL =   2; EXPRESSED IN HBL100, SIGNAL = 2.5; EXPRESSED IN FETAL LIVER, SIGNAL = 1.9; EXPRESSED IN BT474, SIGNAL =   2; EXPRESSED IN LUNG, SIGNAL = 1.9; EXPRESSED IN PLACENTA, SIGNAL = 2.3; EXPRESSED IN HEART, SIGNAL = 1.7; EXPRESSED IN HELA, SIGNAL = 2.3; EXPRESSED IN ADULT LIVER, SIGNAL =   2; EXPRESSED IN BRAIN, SIGNAL = 2.3; EST_HUMAN HIT: AI813708.1, EVALUE 2.00e-42; SWISSPROT HIT: Q09712, EVALUE 5.00e-08

SEQ ID NO: 38113 - protein, 34 aa, Homo sapiens; identical to SEQ ID NO: 36001
  MAP TO AL034380.22; EXPRESSED IN BONE MARROW, SIGNAL =   2; EXPRESSED IN HBL100, SIGNAL = 2.5; EXPRESSED IN FETAL LIVER, SIGNAL = 1.9; EXPRESSED IN BT474, SIGNAL =   2; EXPRESSED IN LUNG, SIGNAL = 1.9; EXPRESSED IN PLACENTA, SIGNAL = 2.3; EXPRESSED IN HEART, SIGNAL = 1.7; EXPRESSED IN HELA, SIGNAL = 2.3; EXPRESSED IN ADULT LIVER, SIGNAL =   2; EXPRESSED IN BRAIN, SIGNAL = 2.3; EST_HUMAN HIT: AA078328.1, EVALUE 1.30e+00

SEQ ID NO: 38114 - protein, 40 aa, Homo sapiens
  MAP TO AC007103.4; EXPRESSED IN PLACENTA, SIGNAL = 0.74; EXPRESSED IN BT474, SIGNAL = 0.63; EXPRESSED IN HEART, SIGNAL = 0.78
RKDSLRMKSTYGRGQRRKYRKLNQNPTDHYLKPTLCPDFK

SEQ ID NO: 38115 - protein, 26 aa, Homo sapiens
  MAP TO AL034400.2; EXPRESSED IN BT474, SIGNAL = 2.4; EXPRESSED IN BRAIN, SIGNAL = 2.4; EXPRESSED IN HELA, SIGNAL = 2.6; EXPRESSED IN HBL100, SIGNAL = 2.8; EXPRESSED IN ADULT LIVER, SIGNAL = 3.8; EXPRESSED IN FETAL LIVER, SIGNAL = 2.3; EXPRESSED IN LUNG, SIGNAL = 2.7; EXPRESSED IN BONE MARROW, SIGNAL = 2.6; EXPRESSED IN PLACENTA, SIGNAL = 3.2; EXPRESSED IN HEART, SIGNAL =   2
RTLTQRLRDMNSYTRKKQLPLKTGRV

SEQ ID NO: 38116 - protein, 63 aa, Homo sapiens
  MAP TO AL034412.1; EXPRESSED IN BONE MARROW, SIGNAL = 0.93; EXPRESSED IN LUNG, SIGNAL = 1.5; EXPRESSED IN HELA, SIGNAL =   5; EXPRESSED IN HEART, SIGNAL = 1.9; EXPRESSED IN HBL100, SIGNAL =   4; EXPRESSED IN FETAL LIVER, SIGNAL = 3.9; EXPRESSED IN ADULT LIVER, SIGNAL = 4.8; EXPRESSED IN BRAIN, SIGNAL = 1.1; EST_HUMAN HIT: BE069375.1, EVALUE 1.00e-14; SWISSPROT HIT: P03783, EVALUE 4.40e+00
RISIILVCFGSKLRPREAKLLGQEYRAPIFLLRNHHSNYYTLLLPQTIVIECLAKTLHSPICQ

SEQ ID NO: 38117 - protein, 40 aa, Homo sapiens
  MAP TO AC007652.1; EXPRESSED IN ADULT LIVER, SIGNAL = 0.83; EXPRESSED IN PLACENTA, SIGNAL =  13; EXPRESSED IN BT474, SIGNAL = 0.6; EXPRESSED IN HEART, SIGNAL = 0.82
PKSVIHQVITKCRIQIQVLMPHIINVMHCGGCIMESTISK

SEQ ID NO: 38118 - protein, 55 aa, Homo sapiens
  MAP TO AL079303.2; EXPRESSED IN HEART, SIGNAL = 1.3; EXPRESSED IN FETAL LIVER, SIGNAL = 2.2; SWISSPROT HIT: Q99297, EVALUE 2.00e-04; EST_HUMAN HIT: BF210869.1, EVALUE 4.00e-16
QPSTVGYARQIIKKEGWGLQGLNKGLTATLGRHGVFNMVYFGFYYNVKNMIPVNK

SEQ ID NO: 38119 - protein, 47 aa, Homo sapiens
  MAP TO AL078462.9; EXPRESSED IN ADULT LIVER, SIGNAL = 0.92; EXPRESSED IN HEART, SIGNAL =   1
VLQLNVRICFIKILHISFLFLSHDFLLFKLLLLWWWWLLCGWILSST

SEQ ID NO: 38120 - protein, 29 aa, Homo sapiens
  MAP TO AL078462.9; EXPRESSED IN ADULT LIVER, SIGNAL = 0.92; EXPRESSED IN HEART, SIGNAL =   1
LYPHLVELKIHPQSNHHHHNNNNLNNRKS

SEQ ID NO: 38121 - protein, 282 aa, Homo sapiens
  MAP TO AL096710.8; EXPRESSED IN ADULT LIVER, SIGNAL = 0.91; EXPRESSED IN HBL100, SIGNAL = 1.8; EXPRESSED IN HEART, SIGNAL = 1.3; SWISSPROT HIT: P56455, EVALUE 1.50e-01; EST_HUMAN HIT: BF315176.1, EVALUE 5.50e+00
INNKKERIEQQLPKEQALSPRSQEKEVQIPELSQVFVEDVKDILKSRLKEGHMNPQEVEEPSACADTKILIQNLIKRITTSQLVNEASTVPSDSQMSDSSGVSPMTNSSELKPESRDDPFCIGNLKSELLLNILKQDQHSQKITGVFELMRELTHMEYDLEKRGITSKVLPLQLENIFYKLLADGYSEKIEHVGDFNQKACSTSEMMEEKPHILGDIKSKEGNYYSPNLETVKEIGLESSTVWASTLPRDEKLKDLCNDFPSHLECTSGSKEMASGDSSTEQ

SEQ ID NO: 38122 - protein, 40 aa, Homo sapiens
  MAP TO AL096710.8; EXPRESSED IN ADULT LIVER, SIGNAL = 0.91; EXPRESSED IN HBL100, SIGNAL = 1.8; EXPRESSED IN HEART, SIGNAL = 1.3; EST_HUMAN HIT: AW183834.1, EVALUE 4.80e+00
KLIIRKKELSNSYQKNKPCLQDPKKRRFRFLNCLRYLWRM

SEQ ID NO: 38123 - protein, 66 aa, Homo sapiens
  MAP TO AC005002.2; EXPRESSED IN HBL100, SIGNAL = 1.4; EXPRESSED IN HELA, SIGNAL =   1; EXPRESSED IN HEART, SIGNAL = 1.1; EXPRESSED IN BRAIN, SIGNAL =   1; EXPRESSED IN BONE MARROW, SIGNAL = 1.3; EXPRESSED IN ADULT LIVER, SIGNAL = 0.92; EXPRESSED IN BT474, SIGNAL =   1; EST_HUMAN HIT: BF107276.1, EVALUE 3.00e-12; SWISSPROT HIT: P35371, EVALUE 2.90e-01
SDVDEIHQLLSGEVFISPSCLKCNFVRNTILGLKVFPFSTLNISCHSLLAFKISTEKLAARPSGAL

SEQ ID NO: 38124 - protein, 292 aa, Homo sapiens
  MAP TO AF002994.1; EXPRESSED IN PLACENTA, SIGNAL = 2.1; EXPRESSED IN HELA, SIGNAL = 3.3; EXPRESSED IN HEART, SIGNAL = 1.1; SWISSPROT HIT: P43356, EVALUE 0.00e+00; EST_HUMAN HIT: BE897495.1, EVALUE 1.00e-74
MPLEQRSQHCKPEEGLEARGEALGLVGAQAPATEEQQTASSSSTLVEVTLGEVPAADSPSPPHSPQGASSFSTTINYTLWRQSDEGSSNQEEEGPRMFPDLESEFQAAISRKMVELVHFLLLKYRAREPVTKAEMLESVLRNCQDFFPVIFSKASEYLQLVFGIEVVEVVPISHLYILVTCLGLSYDGLLGDNQVMPKTGLLIIVLAIIAIEGDCAPEEKIWEELSMLEVFEGREDSVFAHPRKLLMQDLVQENYLEYRQVPGSDPACYEFLWGPRALIETSYVKVLHHTLK

SEQ ID NO: 38125 - protein, 17 aa, Homo sapiens
  MAP TO AF002994.1; EXPRESSED IN PLACENTA, SIGNAL = 2.1; EXPRESSED IN HELA, SIGNAL = 3.3; EXPRESSED IN HEART, SIGNAL = 1.1; EST_HUMAN HIT: BF125869.1, EVALUE 3.00e-03
APARTPACCPDQSHHAS

SEQ ID NO: 38126 - protein, 46 aa, Homo sapiens
  MAP TO AC007392.3; EXPRESSED IN ADULT LIVER, SIGNAL = 0.81; EXPRESSED IN FETAL LIVER, SIGNAL = 0.66; EXPRESSED IN LUNG, SIGNAL = 1.1; EXPRESSED IN HELA, SIGNAL = 0.64; EXPRESSED IN HEART, SIGNAL = 0.98; EXPRESSED IN PLACENTA, SIGNAL = 0.71; EXPRESSED IN BONE MARROW, SIGNAL = 0.69; EXPRESSED IN BRAIN, SIGNAL = 0.92; SWISSPROT HIT: P54889, EVALUE 7.90e+00; EST_HUMAN HIT: AA897343.1, EVALUE 6.00e-11
LIIRSAGPLIICLSLLSAAQRELAKLLSFTLTKTAKCSRARGGLSK

SEQ ID NO: 38127 - protein, 33 aa, Homo sapiens
  MAP TO AC005072.2; EXPRESSED IN LUNG, SIGNAL = 0.73; EXPRESSED IN HELA, SIGNAL = 4.6; EXPRESSED IN ADULT LIVER, SIGNAL = 0.72; EXPRESSED IN PLACENTA, SIGNAL = 0.67; EXPRESSED IN FETAL LIVER, SIGNAL = 0.72; EXPRESSED IN HEART, SIGNAL = 0.88; EXPRESSED IN BONE MARROW, SIGNAL = 0.67; EST_HUMAN HIT: AA078097.1, EVALUE 8.00e-03
NKERRGRFHQDQHPWCHTSRNTTSPGSATLCPG

SEQ ID NO: 38128 - protein, 27 aa, Homo sapiens
  MAP TO AC005072.2; EXPRESSED IN LUNG, SIGNAL = 0.73; EXPRESSED IN HELA, SIGNAL = 4.6; EXPRESSED IN ADULT LIVER, SIGNAL = 0.72; EXPRESSED IN PLACENTA, SIGNAL = 0.67; EXPRESSED IN FETAL LIVER, SIGNAL = 0.72; EXPRESSED IN HEART, SIGNAL = 0.88; EXPRESSED IN BONE MARROW, SIGNAL = 0.67
TKRDVGVSIKINTLGVTPAGTPPALAL

SEQ ID NO: 38129 - protein, 37 aa, Homo sapiens
  MAP TO AC010799.1; EXPRESSED IN BONE MARROW, SIGNAL = 1.2; EXPRESSED IN ADULT LIVER, SIGNAL = 0.95; EXPRESSED IN HEART, SIGNAL = 1.1; EST_HUMAN HIT: AV739743.1, EVALUE 3.00e-04
RIRKEQSGYCMPSLHRDMNQVSCNSNYHILLPSKRRH

SEQ ID NO: 38130 - protein, 91 aa, Homo sapiens
  MAP TO AC010680.3; EXPRESSED IN HEART, SIGNAL = 3.5; EXPRESSED IN LUNG, SIGNAL = 0.99; EST_HUMAN HIT: Z17362.1, EVALUE 2.00e-40; SWISSPROT HIT: Q00872, EVALUE 3.00e-06
VIRDWLVKPIRDQHVKPKGTAIFACDIAKDTPNIKWFKGYDEIPAEPNDKTEILRDGNHLYLKIKNAMPEDIAEYAVEIEGKRYPAKLTLG

SEQ ID NO: 38131 - protein, 195 aa, Homo sapiens
  MAP TO AC010680.3; EXPRESSED IN HEART, SIGNAL = 7.8; EST_HUMAN HIT: AA677345.1, EVALUE 8.00e-60; SWISSPROT HIT: Q14324, EVALUE 2.00e-24
APTIVLDPTIKDGLTIKAGDTIVLNAISILGKPLPKSSWSKAGKDIRPSDITQITSTPTSSMLTIKYATRKDAGEYTITATNPFGTKVEHVKVTVLDVPGPPGPVEISNVSAEKATLTWTPPLEDGGSPIKSYILEKRETSRLLWTVVSEDIQSCRHVATKLIQGNEYIFRVSAVNHYGKGEPVQSEPVKMVDRF

SEQ ID NO: 38132 - protein, 40 aa, Homo sapiens
  MAP TO AC006581.16; EXPRESSED IN BT474, SIGNAL = 0.62; EXPRESSED IN ADULT LIVER, SIGNAL = 2.4; EXPRESSED IN PLACENTA, SIGNAL = 0.82; EXPRESSED IN LUNG, SIGNAL = 1.1; EXPRESSED IN HEART, SIGNAL = 1.3; EST_HUMAN HIT: R85213.1, EVALUE 6.30e+00
VTLTLLLVQRFWTAMNHVGARRGLFPKRAEVTRSSSQFSS

SEQ ID NO: 38133 - protein, 65 aa, Homo sapiens
  MAP TO AC012119.1; EXPRESSED IN HEART, SIGNAL = 1.1; EXPRESSED IN LUNG, SIGNAL = 0.94; SWISSPROT HIT: Q9ZMW2, EVALUE 3.30e+00; EST_HUMAN HIT: BE544034.1, EVALUE 4.40e+00
EIGAVNGLSQGGVDLLRMSCALLQNSVTIAKKGLLHDKESKLYCLWTLRAVEGGEGESSMYPIIR

SEQ ID NO: 38134 - protein, 69 aa, Homo sapiens
  MAP TO AL022143.1; EXPRESSED IN BRAIN, SIGNAL = 0.99; EXPRESSED IN BONE MARROW, SIGNAL = 1.2; EXPRESSED IN PLACENTA, SIGNAL = 1.4; EXPRESSED IN HEART, SIGNAL = 1.5; EXPRESSED IN BT474, SIGNAL =   1; EST_HUMAN HIT: U72943.1, EVALUE 5.00e-16
EESLTIFVDKQKLGRKTETTGGASIIGGSGNSTAVSLETLHQLAASYFIDRESTLRRLHHIQIATGAIK

SEQ ID NO: 38135 - protein, 55 aa, Homo sapiens
  MAP TO AP000359.1; EXPRESSED IN HEART, SIGNAL = 0.98; EXPRESSED IN LUNG, SIGNAL = 1.5; EXPRESSED IN FETAL LIVER, SIGNAL = 0.92
EIWLGYVTSVLQYENSITLCADVSHKLLRIETAYDFIKRTSAQAQTGNIREEVTN

SEQ ID NO: 38136 - protein, 22 aa, Homo sapiens
  MAP TO AP000359.1; EXPRESSED IN HEART, SIGNAL = 0.98; EXPRESSED IN LUNG, SIGNAL = 1.5; EXPRESSED IN FETAL LIVER, SIGNAL = 0.92
KSGLVMLLLFFNTKTALPSVPM

SEQ ID NO: 38137 - protein, 31 aa, Homo sapiens
  MAP TO AL021917.1; EXPRESSED IN LUNG, SIGNAL = 1.5; EXPRESSED IN BONE MARROW, SIGNAL = 1.5; EXPRESSED IN HBL100, SIGNAL = 1.6; EXPRESSED IN HELA, SIGNAL = 1.2; EXPRESSED IN HEART, SIGNAL = 1.7; EXPRESSED IN BT474, SIGNAL = 1.6; EXPRESSED IN FETAL LIVER, SIGNAL = 1.4; EXPRESSED IN ADULT LIVER, SIGNAL = 1.2; EXPRESSED IN BRAIN, SIGNAL = 1.2; EXPRESSED IN PLACENTA, SIGNAL = 1.1; EST_HUMAN HIT: H67836.1, EVALUE 4.00e-09; SWISSPROT HIT: P18892, EVALUE 3.00e-04
VIIRDKSVRNVSCSINDTLLGQKKESVIFIP

SEQ ID NO: 38138 - protein, 38 aa, Homo sapiens
  MAP TO AL021917.1; EXPRESSED IN LUNG, SIGNAL = 1.5; EXPRESSED IN BONE MARROW, SIGNAL = 1.5; EXPRESSED IN HBL100, SIGNAL = 1.6; EXPRESSED IN HELA, SIGNAL = 1.2; EXPRESSED IN HEART, SIGNAL = 1.7; EXPRESSED IN BT474, SIGNAL = 1.6; EXPRESSED IN FETAL LIVER, SIGNAL = 1.4; EXPRESSED IN ADULT LIVER, SIGNAL = 1.2; EXPRESSED IN BRAIN, SIGNAL = 1.2; EXPRESSED IN PLACENTA, SIGNAL = 1.1; SWISSPROT HIT: P18892, EVALUE 6.00e-06; EST_HUMAN HIT: BE840049.1, EVALUE 2.00e-13
LDSEPVIEMRDHEDGGIQLECISGGWYPKPLTVWRDPY

SEQ ID NO: 38139 - protein, 34 aa, Homo sapiens
  MAP TO AC006364.3; EXPRESSED IN FETAL LIVER, SIGNAL = 0.91; EXPRESSED IN HEART, SIGNAL = 0.93; EXPRESSED IN LUNG, SIGNAL =  17; EST_HUMAN HIT: AL079555.1, EVALUE 3.00e-04; SWISSPROT HIT: Q92520, EVALUE 2.00e-05
AAKLVVAVAVFLLTFYVISQVFEIKMDASLGNLF

SEQ ID NO: 38140 - protein, 45 aa, Homo sapiens
  MAP TO AC006972.2; EXPRESSED IN HEART, SIGNAL = 5.5; SWISSPROT HIT: P34888, EVALUE 2.10e+00
LSRKTHMGLTDETKRVCKKRFDIVNSLYSSVMAAALVENVGNYRL

SEQ ID NO: 38141 - protein, 27 aa, Homo sapiens
  MAP TO AL022146.1; EXPRESSED IN PLACENTA, SIGNAL = 0.91; EXPRESSED IN HEART, SIGNAL = 1.2; EXPRESSED IN BT474, SIGNAL = 1.1; EXPRESSED IN FETAL LIVER, SIGNAL = 1.1; EXPRESSED IN LUNG, SIGNAL = 0.94; EXPRESSED IN BRAIN, SIGNAL = 0.99; EXPRESSED IN BONE MARROW, SIGNAL = 0.97; EXPRESSED IN HBL100, SIGNAL = 0.98; EXPRESSED IN HELA, SIGNAL =   1; EST_HUMAN HIT: H44529.1, EVALUE 1.00e-05
STNVYDSSPHDRSQGPSGDPYWGWLAD

SEQ ID NO: 38142 - protein, 57 aa, Homo sapiens
  MAP TO AC007358.2; EXPRESSED IN HEART, SIGNAL = 1.2; SWISSPROT HIT: P56257, EVALUE 3.40e+00
VLDIGVDNGDSAKNKRKLSLRQTDEYIHRKVGARLRGIPTLNLTHQRRLPRFQEQPE

SEQ ID NO: 38143 - protein, 71 aa, Homo sapiens
  MAP TO AL022344.1; EXPRESSED IN BT474, SIGNAL = 2.8; EXPRESSED IN BONE MARROW, SIGNAL = 2.9; EXPRESSED IN HBL100, SIGNAL = 2.7; EXPRESSED IN PLACENTA, SIGNAL = 3.5; EXPRESSED IN FETAL LIVER, SIGNAL = 3.2; EXPRESSED IN BRAIN, SIGNAL = 2.7; EXPRESSED IN LUNG, SIGNAL =   3; EXPRESSED IN HEART, SIGNAL = 2.6; EXPRESSED IN HELA, SIGNAL = 3.4; EXPRESSED IN ADULT LIVER, SIGNAL = 3.1; EST_HUMAN HIT: AA161513.1, EVALUE 2.00e-09; SWISSPROT HIT: P09513, EVALUE 9.60e+00
NEDIEKEVKEEIDPDEEESAKKKHLDKKRKLKEMFDAEYDEGESTYFDDLKGEMQKQAQVRNLSSSQPLVK

SEQ ID NO: 38144 - protein, 37 aa, Homo sapiens
  MAP TO AL031010.1; EXPRESSED IN BONE MARROW, SIGNAL = 7.1; EXPRESSED IN BRAIN, SIGNAL = 5.3; EXPRESSED IN HBL100, SIGNAL = 7.3; EXPRESSED IN HELA, SIGNAL = 5.7; EXPRESSED IN PLACENTA, SIGNAL = 6.4; EXPRESSED IN ADULT LIVER, SIGNAL = 8.1; EXPRESSED IN HEART, SIGNAL = 6.1; EXPRESSED IN BT474, SIGNAL = 5.6; EXPRESSED IN FETAL LIVER, SIGNAL = 7.1; EXPRESSED IN LUNG, SIGNAL = 7.5
LQLLIMSLQNFLNRRVMGKTEEVAEAGRHNEKFYVIK

SEQ ID NO: 38145 - protein, 49 aa, Homo sapiens
  MAP TO AL031076.1; EXPRESSED IN HEART, SIGNAL = 5.1; EXPRESSED IN ADULT LIVER, SIGNAL = 5.5; EXPRESSED IN LUNG, SIGNAL = 5.8; EXPRESSED IN BONE MARROW, SIGNAL =   6; EXPRESSED IN PLACENTA, SIGNAL = 5.1; EXPRESSED IN HELA, SIGNAL = 5.2; EXPRESSED IN HBL100, SIGNAL = 4.1; EXPRESSED IN BT474, SIGNAL = 5.9; EXPRESSED IN FETAL LIVER, SIGNAL = 5.9; EXPRESSED IN BRAIN, SIGNAL = 5.4
TIITTIITMITIIIAIITITIITISLPSPSSPLPSLPSPLSPSTPPSTP

SEQ ID NO: 38146 - protein, 29 aa, Homo sapiens
  MAP TO AL023281.1; EXPRESSED IN BONE MARROW, SIGNAL =   2; EXPRESSED IN BRAIN, SIGNAL =   2; EXPRESSED IN HELA, SIGNAL = 2.4; EXPRESSED IN HEART, SIGNAL = 1.8; EXPRESSED IN FETAL LIVER, SIGNAL = 2.2; EXPRESSED IN ADULT LIVER, SIGNAL = 1.8; EXPRESSED IN LUNG, SIGNAL = 2.1; EXPRESSED IN PLACENTA, SIGNAL = 1.8; EXPRESSED IN HBL100, SIGNAL = 2.8; EXPRESSED IN BT474, SIGNAL = 1.8; SWISSPROT HIT: P33324, EVALUE 4.80e+00
YKDLSDYIGPTHIGPQLEIPNHIDKVLYH

SEQ ID NO: 38147 - protein, 415 aa, Homo sapiens
  MAP TO AC004600.2; EXPRESSED IN BRAIN, SIGNAL = 1.6; EXPRESSED IN HELA, SIGNAL = 1.2; EXPRESSED IN HBL100, SIGNAL = 1.3; EXPRESSED IN HEART, SIGNAL = 1.4; EXPRESSED IN BT474, SIGNAL = 1.4; EXPRESSED IN FETAL LIVER, SIGNAL = 0.94; EXPRESSED IN LUNG, SIGNAL = 1.7; EST_HUMAN HIT: BE886203.1, EVALUE 7.00e-85; SWISSPROT HIT: Q05086, EVALUE 0.00e+00
VTYLTEEKVYEILELCREREDYSPLIRVIGRVFSSAEALVQSFRKVKQHTKEELKSLQAKDEDKDEDEKEKAACSAAAMEEDSEASSSRIGDSSQGDNNLQKLGPDDVSVDIDAIRRVYTRLLSNEKIETAFLNALVYLSPNVECDLTYHNVYSRDPNYLNLFIIVMENRNLHSPEYLEMALPLFCKAMSKLPLAAQGKLIRLWSKYNADQIRRMMETFQQLITYKVISNEFNSRNLVNDDDAIVAASKCLKMVYYANVVGGEVDTNHNEEDDEEPIPESSELTLQELLGEERRNKKGPRVDPLETELGVKTLDCRKPLIPFEEFINEPLNEVLEMDKDYTFFKVETENKFSFMTCPFILNAVTKNLGLYYDNRIRMYSERRITVLYSLVQGQQLNPYLRLKVRRDHIIDDALVR

SEQ ID NO: 38148 - protein, 19 aa, Homo sapiens
  MAP TO AC007156.2; EXPRESSED IN ADULT LIVER, SIGNAL = 1.1; EXPRESSED IN FETAL LIVER, SIGNAL = 1.1; EXPRESSED IN PLACENTA, SIGNAL = 0.89; EXPRESSED IN HELA, SIGNAL = 1.1; EXPRESSED IN HEART, SIGNAL = 1.1
GGDHEEMVEKHCKGGSTQN

SEQ ID NO: 38149 - protein, 62 aa, Homo sapiens
  MAP TO AC008163.1; EXPRESSED IN ADULT LIVER, SIGNAL = 0.71; EXPRESSED IN HEART, SIGNAL = 0.89; EXPRESSED IN HELA, SIGNAL = 0.7; SWISSPROT HIT: P16410, EVALUE 1.50e+00; EST_HUMAN HIT: AV691569.1, EVALUE 1.20e+00
ILISPLQSLCPVSIMTPPTISPGLQKTATTEVLNGDATLTNEFLIDLVSAVSVGPPVEHSLE

SEQ ID NO: 38150 - protein, 41 aa, Homo sapiens
  MAP TO AC010904.1; EXPRESSED IN BONE MARROW, SIGNAL = 0.95; EXPRESSED IN HEART, SIGNAL =  50; EXPRESSED IN BRAIN, SIGNAL = 0.96; EST_HUMAN HIT: AA333503.1, EVALUE 2.80e+00
SPDTGDVGWAIGHMSLMPSQTPAVPQTRWANWVYVRRGKVG

SEQ ID NO: 38151 - protein, 58 aa, Homo sapiens
  MAP TO NM_006902.1; EXPRESSED IN ADULT LIVER, SIGNAL =   1; EXPRESSED IN HEART, SIGNAL =   1; EXPRESSED IN BONE MARROW, SIGNAL =   1; EST_HUMAN HIT: AW450135.1, EVALUE 2.00e-27; SWISSPROT HIT: P43271, EVALUE 6.00e-29
FQNRRAKFRRNERAMLANKNASLLKSYSGDVTAVEQPIVPRPAPRPTDYLSWGTASPY

SEQ ID NO: 38152 - protein, 17 aa, Homo sapiens
  MAP TO AL022344.1; EXPRESSED IN HEART, SIGNAL =   6; EXPRESSED IN FETAL LIVER, SIGNAL = 7.5; EXPRESSED IN ADULT LIVER, SIGNAL = 8.9; EXPRESSED IN BT474, SIGNAL = 6.6; EXPRESSED IN LUNG, SIGNAL = 8.8; EXPRESSED IN BRAIN, SIGNAL = 5.8; EXPRESSED IN PLACENTA, SIGNAL = 8.2; EXPRESSED IN HELA, SIGNAL = 7.5; EXPRESSED IN HBL100, SIGNAL = 7.1; EXPRESSED IN BONE MARROW, SIGNAL = 7.4
SRLCPPSAHRTVNFPSR

SEQ ID NO: 38153 - protein, 47 aa, Homo sapiens
  MAP TO AL022344.1; EXPRESSED IN HEART, SIGNAL =   6; EXPRESSED IN FETAL LIVER, SIGNAL = 7.5; EXPRESSED IN ADULT LIVER, SIGNAL = 8.9; EXPRESSED IN BT474, SIGNAL = 6.6; EXPRESSED IN LUNG, SIGNAL = 8.8; EXPRESSED IN BRAIN, SIGNAL = 5.8; EXPRESSED IN PLACENTA, SIGNAL = 8.2; EXPRESSED IN HELA, SIGNAL = 7.5; EXPRESSED IN HBL100, SIGNAL = 7.1; EXPRESSED IN BONE MARROW, SIGNAL = 7.4; SWISSPROT HIT: P52416, EVALUE 9.10e-01
FSQPLVSFWFAKTQRLGEARQQVAALPAEERRGTGLAPLDEEVRELC

SEQ ID NO: 38154 - protein, 65 aa, Homo sapiens [sequence omitted]

SEQ ID NO: 38155 - protein, 26 aa, Homo sapiens
  MAP TO AL031431.8; EXPRESSED IN BRAIN, SIGNAL = 1.4; EXPRESSED IN PLACENTA, SIGNAL = 0.72; EXPRESSED IN BT474, SIGNAL = 0.63; EXPRESSED IN LUNG, SIGNAL = 0.6; EXPRESSED IN HELA, SIGNAL = 0.72; EXPRESSED IN HEART, SIGNAL = 0.86; EST_HUMAN HIT: BE796417.1, EVALUE 2.00e-08
STLLPPCQSCKKSTAPEVPLGSPTES

SEQ ID NO: 38156 - protein, 27 aa, Homo sapiens
  MAP TO AL023279.1; EXPRESSED IN BONE MARROW, SIGNAL = 1.4; EXPRESSED IN HEART, SIGNAL = 1.1; EXPRESSED IN FETAL LIVER, SIGNAL = 1.5; EXPRESSED IN ADULT LIVER, SIGNAL = 1.1; EXPRESSED IN BT474, SIGNAL = 1.4; EXPRESSED IN BRAIN, SIGNAL = 1.4; EXPRESSED IN LUNG, SIGNAL = 1.1; EXPRESSED IN PLACENTA, SIGNAL = 1.3; EXPRESSED IN HELA, SIGNAL = 1.2; EXPRESSED IN HBL100, SIGNAL = 1.5; EST_HUMAN HIT: AA173508.1, EVALUE 1.00e-04; SWISSPROT HIT: P11369, EVALUE 3.00e-04
KEKKHMIISIDAEKTFHKIQHHLLVKT

SEQ ID NO: 38157 - protein, 51 aa, Homo sapiens
  MAP TO AL031407.3; EXPRESSED IN BONE MARROW, SIGNAL = 1.4; EXPRESSED IN LUNG, SIGNAL = 1.1; EXPRESSED IN PLACENTA, SIGNAL = 1.2; EXPRESSED IN HEART, SIGNAL = 2.1; EXPRESSED IN FETAL LIVER, SIGNAL = 1.3; EXPRESSED IN ADULT LIVER, SIGNAL = 1.1; EXPRESSED IN BT474, SIGNAL = 1.5; EXPRESSED IN BRAIN, SIGNAL = 1.3; EXPRESSED IN HBL100, SIGNAL = 1.3
GEGGEGEEQEEEEEEEEEEEEEEEEEEEEEEEEEEEGEEGEEEEEEEEEEE

SEQ ID NO: 38158 - protein, 30 aa, Homo sapiens
  MAP TO AL034412.1; EXPRESSED IN HBL100, SIGNAL = 1.9; EXPRESSED IN HELA, SIGNAL = 1.3; EXPRESSED IN PLACENTA, SIGNAL = 1.5; EXPRESSED IN ADULT LIVER, SIGNAL = 1.8; EXPRESSED IN HEART, SIGNAL = 1.7; EXPRESSED IN BT474, SIGNAL = 1.7; EXPRESSED IN FETAL LIVER, SIGNAL = 1.4; EXPRESSED IN LUNG, SIGNAL = 1.5; EXPRESSED IN BONE MARROW, SIGNAL = 1.8; EXPRESSED IN BRAIN, SIGNAL = 1.1; SWISSPROT HIT: P98164, EVALUE 6.30e+00
LPHFHHCPCPNAWPSSCLCCCFLFFSVIAR

SEQ ID NO: 38159 - protein, 53 aa, Homo sapiens
  MAP TO AL031584.1; EXPRESSED IN BONE MARROW, SIGNAL = 4.7; EXPRESSED IN BRAIN, SIGNAL = 3.6; EXPRESSED IN HBL100, SIGNAL =   5; EXPRESSED IN HELA, SIGNAL = 4.4; EXPRESSED IN PLACENTA, SIGNAL = 5.2; EXPRESSED IN ADULT LIVER, SIGNAL = 5.7; EXPRESSED IN HEART, SIGNAL =   4; EXPRESSED IN BT474, SIGNAL = 4.3; EXPRESSED IN FETAL LIVER, SIGNAL = 5.8; EXPRESSED IN LUNG, SIGNAL = 4.5; EST_HUMAN HIT: BF033484.1, EVALUE 3.00e-15; SWISSPROT HIT: Q13247, EVALUE 7.00e-16
WQDLKDFMQQADEVTYVDAHKECTSEGVEFHSYFDMKLALDKLDGAEILGLLK

SEQ ID NO: 38160 - protein, 88 aa, Homo sapiens
  MAP TO AL033533.5; EXPRESSED IN BONE MARROW, SIGNAL = 3.7; EXPRESSED IN HBL100, SIGNAL = 2.3; EXPRESSED IN PLACENTA, SIGNAL = 2.9; EXPRESSED IN HEART, SIGNAL = 2.3; EXPRESSED IN BRAIN, SIGNAL = 2.6; EXPRESSED IN LUNG, SIGNAL = 2.5; EXPRESSED IN HELA, SIGNAL = 1.8; EXPRESSED IN ADULT LIVER, SIGNAL = 2.9; EXPRESSED IN BT474, SIGNAL = 2.6; EXPRESSED IN FETAL LIVER, SIGNAL = 2.4
MGRPEGAQNRGLRKQKKRRKKKCQRQRTRTRRRGRGGRERRGRRRRRRRRRRRRRRRRRRRRRRRRRRRRRRRRRRRRRRRNTNNETG

SEQ ID NO: 38161 - protein, 101 aa, Homo sapiens
  MAP TO AL031687.14; EXPRESSED IN FETAL LIVER, SIGNAL =   1; EXPRESSED IN HEART, SIGNAL = 0.85; SWISSPROT HIT: Q91713, EVALUE 7.50e-01
MRDAKHDFQPSGLEHLTDEGVIHEDGKPQRRVSFREEEYVEFEVFWRHLSGGMREQLYVYPWASEERLGLRILSLGVIIVLMVMETISMDEIAQGKSEESA

SEQ ID NO: 38162 - protein, 43 aa, Homo sapiens
  MAP TO AL031664.1; EXPRESSED IN BT474, SIGNAL = 1.3; EXPRESSED IN FETAL LIVER, SIGNAL = 1.8; EXPRESSED IN BONE MARROW, SIGNAL =   2; EXPRESSED IN HBL100, SIGNAL = 1.6; EXPRESSED IN PLACENTA, SIGNAL = 1.4; EXPRESSED IN HEART, SIGNAL = 1.5; EXPRESSED IN BRAIN, SIGNAL = 1.3; EXPRESSED IN LUNG, SIGNAL = 1.5; EXPRESSED IN HELA, SIGNAL = 1.4; EXPRESSED IN ADULT LIVER, SIGNAL = 1.7; EST_HUMAN HIT: AI133031.1, EVALUE 5.40e-01
MDVAVFRYNFTYKNRPWADLAGGPYFVTFAVGDQRKRTQQEKS

SEQ ID NO: 38163 - protein, 17 aa, Homo sapiens
  MAP TO AL031664.1; EXPRESSED IN BT474, SIGNAL = 1.3; EXPRESSED IN FETAL LIVER, SIGNAL = 1.8; EXPRESSED IN BONE MARROW, SIGNAL =   2; EXPRESSED IN HBL100, SIGNAL = 1.6; EXPRESSED IN PLACENTA, SIGNAL = 1.4; EXPRESSED IN HEART, SIGNAL = 1.5; EXPRESSED IN BRAIN, SIGNAL = 1.3; EXPRESSED IN LUNG, SIGNAL = 1.5; EXPRESSED IN HELA, SIGNAL = 1.4; EXPRESSED IN ADULT LIVER, SIGNAL = 1.7; EST_HUMAN HIT: AW376061.1, EVALUE 1.30e-01
GCGCVPIQLYLQKQAMG

SEQ ID NO: 38164 - protein, 19 aa, Homo sapiens
  MAP TO AC009396.3; EXPRESSED IN FETAL LIVER, SIGNAL = 0.89; EXPRESSED IN HEART, SIGNAL = 0.94; EXPRESSED IN LUNG, SIGNAL = 6.6
SFLYSSVSTKVRHGIRRRQ

SEQ ID NO: 38165 - protein, 68 aa, Homo sapiens
  MAP TO AL034423.16; EXPRESSED IN HELA, SIGNAL = 1.6; EXPRESSED IN HEART, SIGNAL = 1.7; EXPRESSED IN FETAL LIVER, SIGNAL = 1.6; EXPRESSED IN ADULT LIVER, SIGNAL = 1.3; EXPRESSED IN BT474, SIGNAL = 1.7; EXPRESSED IN LUNG, SIGNAL = 1.4; EXPRESSED IN PLACENTA, SIGNAL = 1.2; EXPRESSED IN HBL100, SIGNAL = 1.7; EXPRESSED IN BRAIN, SIGNAL = 1.6; EXPRESSED IN BONE MARROW, SIGNAL = 1.8; EST_HUMAN HIT: AA350093.1, EVALUE 1.40e+00; SWISSPROT HIT: P29935, EVALUE 1.50e+00
VLLLPGLHGLLLHKRSQGHVTLVCSVPLLSLGLFKGQGRAAVLVLGQGRSGAACCCVTWRRPSLSLSL

SEQ ID NO: 38166 - protein, 48 aa, Homo sapiens
  MAP TO AL049833.3; EXPRESSED IN ADULT LIVER, SIGNAL =   1; EXPRESSED IN FETAL LIVER, SIGNAL = 0.96; EXPRESSED IN BONE MARROW, SIGNAL =   1; EXPRESSED IN HBL100, SIGNAL = 1.1; EXPRESSED IN HEART, SIGNAL = 1.2; EXPRESSED IN HELA, SIGNAL = 1.1; EXPRESSED IN PLACENTA, SIGNAL = 2.1; SWISSPROT HIT: P11298, EVALUE 7.90e+00
EAVAEFWTESLTLAVLKHGTWNSWVLVQKRLYAVVGQQPSKNLHVTIV

SEQ ID NO: 38167 - protein, 89 aa, Homo sapiens
  MAP TO AC010680.3; EXPRESSED IN HEART, SIGNAL = 2.3; SWISSPROT HIT: Q14896, EVALUE 4.00e-05; EST_HUMAN HIT: BF355447.1, EVALUE 3.00e-42
PVTLIKDIENQTVLKDNDAVFEIDIKINYPEIKLSWYKGTEKLEPSDKFEISIDGDRHTLRVKNCQLKDQGNYRLVCGPHIASAKLTVI

SEQ ID NO: 38168 - protein, 216 aa, Homo sapiens
  MAP TO AC010680.3; EXPRESSED IN HEART, SIGNAL =   3; EST_HUMAN HIT: AW293420.1, EVALUE 6.00e-69; SWISSPROT HIT: Q02173, EVALUE 5.00e-26
VPDAPGIPEPSNITGNSITLTWARPESDGGSEIQQYILERREKKSTRWVKVISKRPISETRFKVTGLTEGNEYEFHVMAENAAGVGPASGISRLIKCREPVNPPGPPTVVKVTDTSKTTVSLEWSKPVFDGGREIIGYIIEMCKADLGDWHKVNAEACVKTRYTVTDLQAGEEYKFRVSAINGAGKGDSCEVTGTIKAVDRLTAPELDIDANFKQT

SEQ ID NO: 38169 - protein, 25 aa, Homo sapiens
  MAP TO AL050342.36; EXPRESSED IN BT474, SIGNAL = 0.91; EXPRESSED IN HEART, SIGNAL = 0.95
MAAPFGGFLLLLFFFPWLLLLLSSI

SEQ ID NO: 38170 - protein, 102 aa, Homo sapiens
  MAP TO AC010680.3; EXPRESSED IN PLACENTA, SIGNAL = 0.92; EXPRESSED IN HEART, SIGNAL = 4.2; EST_HUMAN HIT: F00912.1, EVALUE 4.00e-25; SWISSPROT HIT: Q05623, EVALUE 2.00e-15
KPSPPVNPEAIDTTCNSVDLTWQPPRHDGGSKILGYIVEYQKVGDEEWRRANHTPESCPETKYKVTGLRDGQTYKFRVLAVNAAGESDPAHVPEPVLVKDRL

SEQ ID NO: 38171 - protein, 46 aa, Homo sapiens
  MAP TO AL078591.17; EXPRESSED IN PLACENTA, SIGNAL =   1; EXPRESSED IN BT474, SIGNAL = 1.4; EXPRESSED IN LUNG, SIGNAL = 1.6; EXPRESSED IN HBL100, SIGNAL = 1.5; EXPRESSED IN HELA, SIGNAL = 2.3; EXPRESSED IN HEART, SIGNAL = 2.3; EXPRESSED IN ADULT LIVER, SIGNAL = 1.5; EXPRESSED IN FETAL LIVER, SIGNAL = 1.7
MTLAFPASVHDSLICSKTFQILYKNEEVVLNDVMIFKVKMLLDERK

SEQ ID NO: 38172 - protein, 46 aa, Homo sapiens
  MAP TO AC010896.2; EXPRESSED IN PLACENTA, SIGNAL = 1.1; EXPRESSED IN HBL100, SIGNAL =   1; EXPRESSED IN HEART, SIGNAL = 3.8; EXPRESSED IN BT474, SIGNAL = 1.2; EXPRESSED IN BRAIN, SIGNAL = 0.96; EST_HUMAN HIT: AU118266.1, EVALUE 1.00e-18; SWISSPROT HIT: P55084, EVALUE 9.00e-20
HSADRLAAAFAVSRLEQDEYALRSHSLAKKAQDEGLLSDVVPFKVP

SEQ ID NO: 38173 - protein, 18 aa, Homo sapiens
  MAP TO AC010896.2; EXPRESSED IN PLACENTA, SIGNAL = 1.1; EXPRESSED IN HBL100, SIGNAL =   1; EXPRESSED IN HEART, SIGNAL = 3.8; EXPRESSED IN BT474, SIGNAL = 1.2; EXPRESSED IN BRAIN, SIGNAL = 0.96; EST_HUMAN HIT: AI272223.1, EVALUE 6.00e-05
PLCRPTGRCLCCFSAGTG

SEQ ID NO: 38174 - protein, 88 aa, Homo sapiens
  MAP TO AL035458.32; EXPRESSED IN ADULT LIVER, SIGNAL = 3.4; EXPRESSED IN BT474, SIGNAL =   3; EXPRESSED IN BRAIN, SIGNAL = 2.7; EXPRESSED IN HBL100, SIGNAL = 3.3; EXPRESSED IN HELA, SIGNAL = 2.9; EXPRESSED IN HEART, SIGNAL = 2.8; EXPRESSED IN FETAL LIVER, SIGNAL = 2.7; EXPRESSED IN LUNG, SIGNAL = 2.7; EXPRESSED IN BONE MARROW, SIGNAL = 3.4; EXPRESSED IN PLACENTA, SIGNAL = 3.4; EST_HUMAN HIT: AU132928.1, EVALUE 3.00e-14
PPPSLNSMVSQRNGAERRSSQRAGTAALVLVAVVLCHDRSANARDGVGRDCTPLVAPRPLAPSLEWQASKQASGRGQRPKKGKSARAS

SEQ ID NO: 38175 - protein, 147 aa, Homo sapiens
  MAP TO AL035458.32; EXPRESSED IN ADULT LIVER, SIGNAL = 3.4; EXPRESSED IN BT474, SIGNAL =   3; EXPRESSED IN BRAIN, SIGNAL = 2.7; EXPRESSED IN HBL100, SIGNAL = 3.3; EXPRESSED IN HELA, SIGNAL = 2.9; EXPRESSED IN HEART, SIGNAL = 2.8; EXPRESSED IN FETAL LIVER, SIGNAL = 2.7; EXPRESSED IN LUNG, SIGNAL = 2.7; EXPRESSED IN BONE MARROW, SIGNAL = 3.4; EXPRESSED IN PLACENTA, SIGNAL = 3.4; EST_HUMAN HIT: BE244323.1, EVALUE 1.00e-24
LHETAGASARPRGTYSERALRADSAATAAAALAGPRALSLLGALTPPACLLACLPLKRRCQGTRSDERRAVPANSVSGVGAAVVAEDYGDKDEGRCPSSLRAAPLGSVPLADHGVQAGRRAGVIGKMFINSSVGSEGKPIITRKLQV

SEQ ID NO: 38176 - protein, 51 aa, Homo sapiens
  MAP TO AL078591.17; EXPRESSED IN PLACENTA, SIGNAL = 2.4; EXPRESSED IN HEART, SIGNAL = 2.6; EXPRESSED IN FETAL LIVER, SIGNAL = 2.4; EXPRESSED IN ADULT LIVER, SIGNAL = 3.1; EXPRESSED IN BT474, SIGNAL = 2.5; EXPRESSED IN BRAIN, SIGNAL =   2; EXPRESSED IN HELA, SIGNAL = 2.5; EXPRESSED IN HBL100, SIGNAL = 3.2; EXPRESSED IN LUNG, SIGNAL = 2.6; EXPRESSED IN BONE MARROW, SIGNAL = 2.6; EST_HUMAN HIT: AW813906.1, EVALUE 2.00e-13; SWISSPROT HIT: P47025, EVALUE 4.50e+00
YAQHSKQHELPVHVSFPCIHSSKSHGSDMEAGQVDTMYVVGFWSQLRNPKL

SEQ ID NO: 38177 - protein, 37 aa, Homo sapiens
  MAP TO AL035467.21; EXPRESSED IN BONE MARROW, SIGNAL = 9.5; EXPRESSED IN HEART, SIGNAL =  17; EXPRESSED IN FETAL LIVER, SIGNAL =  11; EXPRESSED IN ADULT LIVER, SIGNAL =  22; EXPRESSED IN BT474, SIGNAL =  11; EXPRESSED IN LUNG, SIGNAL =  11; EXPRESSED IN BRAIN, SIGNAL = 7.2; EXPRESSED IN PLACENTA, SIGNAL =  15; EXPRESSED IN HELA, SIGNAL = 7.8; EXPRESSED IN HBL100, SIGNAL = 8.4; SWISSPROT HIT: P03189, EVALUE 6.20e+00
EAEALCHRAAHVGAEVTEAVGRGPARVTGALGPAAAP

SEQ ID NO: 38178 - protein, 37 aa, Homo sapiens
  MAP TO AL078623.24; EXPRESSED IN BONE MARROW, SIGNAL = 1.9; EXPRESSED IN HELA, SIGNAL = 1.2; EXPRESSED IN HEART, SIGNAL = 1.3; EXPRESSED IN FETAL LIVER, SIGNAL = 1.5; EXPRESSED IN ADULT LIVER, SIGNAL = 1.8; EXPRESSED IN BRAIN, SIGNAL = 1.2; EXPRESSED IN LUNG, SIGNAL = 1.8; EXPRESSED IN PLACENTA, SIGNAL = 1.8; EXPRESSED IN HBL100, SIGNAL = 1.6; EXPRESSED IN BT474, SIGNAL = 1.5
ELSVLWGENVIEEHTVICWGQLDDSQELINLPKGANP

SEQ ID NO: 38179 - protein, 64 aa, Homo sapiens
  MAP TO AL035554.1; EXPRESSED IN BT474, SIGNAL =  12; EXPRESSED IN HELA, SIGNAL =  12; EXPRESSED IN HEART, SIGNAL =  11; EXPRESSED IN FETAL LIVER, SIGNAL =  13; EXPRESSED IN BRAIN, SIGNAL =  12; EXPRESSED IN LUNG, SIGNAL =  14; EXPRESSED IN BONE MARROW, SIGNAL =  14; EXPRESSED IN PLACENTA, SIGNAL =  14; EXPRESSED IN HBL100, SIGNAL =  14; EXPRESSED IN ADULT LIVER, SIGNAL =  17; EST_HUMAN HIT: AA379242.1, EVALUE 3.00e-32; SWISSPROT HIT: P04040, EVALUE 3.00e-33
TDQGIKNLSVEDAARLSQEDPDYGIRDLFNAIATGKYPSWTFYIQVMTFNQAETFPFNPFDLTK

SEQ ID NO: 38180 - protein, 46 aa, Homo sapiens
  MAP TO AL035554.1; EXPRESSED IN BT474, SIGNAL =  12; EXPRESSED IN HELA, SIGNAL =  12; EXPRESSED IN HEART, SIGNAL =  11; EXPRESSED IN FETAL LIVER, SIGNAL =  13; EXPRESSED IN BRAIN, SIGNAL =  12; EXPRESSED IN LUNG, SIGNAL =  14; EXPRESSED IN BONE MARROW, SIGNAL =  14; EXPRESSED IN PLACENTA, SIGNAL =  14; EXPRESSED IN HBL100, SIGNAL =  14; EXPRESSED IN ADULT LIVER, SIGNAL =  17; EST_HUMAN HIT: AA295119.1, EVALUE 3.00e-19
LTRASKTFLLKMRRDFPRKILTMASGIFLTPLPQESTPPGLFTSRS

SEQ ID NO: 38181 - protein, 51 aa, Homo sapiens
  MAP TO AL035662.23; EXPRESSED IN PLACENTA, SIGNAL = 1.6; EXPRESSED IN HEART, SIGNAL = 1.7; EXPRESSED IN FETAL LIVER, SIGNAL = 1.4; EXPRESSED IN ADULT LIVER, SIGNAL = 1.4; EXPRESSED IN BT474, SIGNAL = 1.4; EXPRESSED IN BRAIN, SIGNAL = 1.5; EXPRESSED IN HELA, SIGNAL = 1.2; EXPRESSED IN HBL100, SIGNAL = 1.6; EXPRESSED IN LUNG, SIGNAL = 1.5; EXPRESSED IN BONE MARROW, SIGNAL = 1.5; EST_HUMAN HIT: AA147464.1, EVALUE 1.00e-24; SWISSPROT HIT: P25942, EVALUE 2.00e-25
APHPKQEPQEINFPDDLPGSNTAAPVQETLHGCQPVTQEDGKESRISVQER

SEQ ID NO: 38182 - protein, 38 aa, Homo sapiens
  MAP TO AL035662.23; EXPRESSED IN PLACENTA, SIGNAL = 1.6; EXPRESSED IN HEART, SIGNAL = 1.7; EXPRESSED IN FETAL LIVER, SIGNAL = 1.4; EXPRESSED IN ADULT LIVER, SIGNAL = 1.4; EXPRESSED IN BT474, SIGNAL = 1.4; EXPRESSED IN BRAIN, SIGNAL = 1.5; EXPRESSED IN HELA, SIGNAL = 1.2; EXPRESSED IN HBL100, SIGNAL = 1.6; EXPRESSED IN LUNG, SIGNAL = 1.5; EXPRESSED IN BONE MARROW, SIGNAL = 1.5; EST_HUMAN HIT: AA147464.1, EVALUE 6.00e-19; SWISSPROT HIT: P48809, EVALUE 4.70e+00
PPPQAGTPGDQFSRRSSWLQHCCSSAGDFTWMPTGHPG

SEQ ID NO: 38183 - protein, 45 aa, Homo sapiens
  MAP TO AL078645.18; EXPRESSED IN BONE MARROW, SIGNAL = 4.1; EXPRESSED IN HEART, SIGNAL = 2.8; EXPRESSED IN FETAL LIVER, SIGNAL = 3.5; EXPRESSED IN ADULT LIVER, SIGNAL = 3.2; EXPRESSED IN BT474, SIGNAL = 3.1; EXPRESSED IN BRAIN, SIGNAL = 2.4; EXPRESSED IN LUNG, SIGNAL = 3.6; EXPRESSED IN PLACENTA, SIGNAL = 3.4; EXPRESSED IN HELA, SIGNAL =   3; EXPRESSED IN HBL100, SIGNAL = 3.3; EST_HUMAN HIT: W56288.1, EVALUE 2.70e+00; SWISSPROT HIT: Q14106, EVALUE 7.90e+00
NAVATSAFAVVVVVIAAAIAAVLDSQPAPSQGQHPSPCFLIPSII

SEQ ID NO: 38184 - protein, 50 aa, Homo sapiens; identical to SEQ ID NO: 35773
  MAP TO AL079341.13; EXPRESSED IN ADULT LIVER, SIGNAL =  11; EXPRESSED IN BT474, SIGNAL = 7.6; EXPRESSED IN HELA, SIGNAL =   8; EXPRESSED IN HEART, SIGNAL = 7.5; EXPRESSED IN FETAL LIVER, SIGNAL = 7.1; EXPRESSED IN BRAIN, SIGNAL = 6.4; EXPRESSED IN LUNG, SIGNAL = 8.5; EXPRESSED IN BONE MARROW, SIGNAL = 8.7; EXPRESSED IN PLACENTA, SIGNAL = 9.6; EXPRESSED IN HBL100, SIGNAL = 8.5; EST_HUMAN HIT: BE540156.1, EVALUE 9.00e-08

SEQ ID NO: 38185 - protein, 18 aa, Homo sapiens
  MAP TO AL035704.9; EXPRESSED IN PLACENTA, SIGNAL = 2.8; EXPRESSED IN ADULT LIVER, SIGNAL = 3.1; EXPRESSED IN BT474, SIGNAL = 2.6; EXPRESSED IN BRAIN, SIGNAL = 2.9; EXPRESSED IN HELA, SIGNAL =   2; EXPRESSED IN HBL100, SIGNAL = 2.8; EXPRESSED IN HEART, SIGNAL = 3.1; EXPRESSED IN FETAL LIVER, SIGNAL = 2.2; EXPRESSED IN LUNG, SIGNAL = 2.6; EXPRESSED IN BONE MARROW, SIGNAL =   3
MMMMMMMMMMMMMMMMMK

SEQ ID NO: 38186 - protein, 25 aa, Homo sapiens
  MAP TO AL035704.9; EXPRESSED IN PLACENTA, SIGNAL = 2.8; EXPRESSED IN ADULT LIVER, SIGNAL = 3.1; EXPRESSED IN BT474, SIGNAL = 2.6; EXPRESSED IN BRAIN, SIGNAL = 2.9; EXPRESSED IN HELA, SIGNAL =   2; EXPRESSED IN HBL100, SIGNAL = 2.8; EXPRESSED IN HEART, SIGNAL = 3.1; EXPRESSED IN FETAL LIVER, SIGNAL = 2.2; EXPRESSED IN LUNG, SIGNAL = 2.6; EXPRESSED IN BONE MARROW, SIGNAL =   3
RSCHHVSASDTCLTMPPSFWLQILG

SEQ ID NO: 38187 - protein, 52 aa, Homo sapiens
  MAP TO AL080274.13; EXPRESSED IN BONE MARROW, SIGNAL = 2.1; EXPRESSED IN LUNG, SIGNAL = 1.7; EXPRESSED IN PLACENTA, SIGNAL = 1.3; EXPRESSED IN HEART, SIGNAL = 2.1; EXPRESSED IN FETAL LIVER, SIGNAL =   2; EXPRESSED IN ADULT LIVER, SIGNAL = 2.1; EXPRESSED IN BT474, SIGNAL = 1.8; EXPRESSED IN BRAIN, SIGNAL = 1.4; EXPRESSED IN HELA, SIGNAL = 1.5; EXPRESSED IN HBL100, SIGNAL = 2.4
EKKEKLKKEEKEKDEKKNKKRKEKEEENEKEKKRRNSSSCRRRRKRRRRRRE

SEQ ID NO: 38188 - protein, 64 aa, Homo sapiens
  MAP TO AL035452.6; EXPRESSED IN PLACENTA, SIGNAL = 3.5; EXPRESSED IN HBL100, SIGNAL = 3.6; EXPRESSED IN ADULT LIVER, SIGNAL =   4; EXPRESSED IN BT474, SIGNAL = 3.6; EXPRESSED IN HELA, SIGNAL =   3; EXPRESSED IN HEART, SIGNAL = 2.4; EXPRESSED IN FETAL LIVER, SIGNAL = 3.4; EXPRESSED IN BRAIN, SIGNAL =   3; EXPRESSED IN LUNG, SIGNAL = 3.3; EXPRESSED IN BONE MARROW, SIGNAL = 3.5; SWISSPROT HIT: O75962, EVALUE 7.50e+00; EST_HUMAN HIT: BF541484.1, EVALUE 3.40e+00
TKKHTKKRTASLILHAMICCRSLNSSKTKNTKCLNSINQRLKILSLQKDLMCGTAGRCKTLTEQ

SEQ ID NO: 38189 - protein, 41 aa, Homo sapiens
  MAP TO AL079336.5; EXPRESSED IN PLACENTA, SIGNAL = 3.6; EXPRESSED IN LUNG, SIGNAL =   3; EXPRESSED IN BONE MARROW, SIGNAL = 4.4; EXPRESSED IN HBL100, SIGNAL = 3.4; EXPRESSED IN HELA, SIGNAL =   3; EXPRESSED IN HEART, SIGNAL = 3.7; EXPRESSED IN BT474, SIGNAL = 3.4; EXPRESSED IN ADULT LIVER, SIGNAL = 3.9; EXPRESSED IN FETAL LIVER, SIGNAL =   6; EXPRESSED IN BRAIN, SIGNAL = 3.1; EST_HUMAN HIT: AU129453.1, EVALUE 3.20e+00
TGAAGRAVKRTGGFGNWCRSCLAPAGRRQLCPAHRDSVLVY

SEQ ID NO: 38190 - protein, 36 aa, Homo sapiens
  MAP TO AL035703.19; EXPRESSED IN HBL100, SIGNAL = 9.2; EXPRESSED IN HELA, SIGNAL = 8.2; EXPRESSED IN PLACENTA, SIGNAL =   8; EXPRESSED IN ADULT LIVER, SIGNAL = 9.9; EXPRESSED IN HEART, SIGNAL = 7.3; EXPRESSED IN BT474, SIGNAL =  11; EXPRESSED IN FETAL LIVER, SIGNAL = 8.3; EXPRESSED IN LUNG, SIGNAL =  10; EXPRESSED IN BONE MARROW, SIGNAL = 8.4; EXPRESSED IN BRAIN, SIGNAL = 6.3; EST_HUMAN HIT: AW151067.1, EVALUE 2.20e+00
VTSWWSWIAIHTSEAASWPTRPPARWLYGEVSEKGF

SEQ ID NO: 38191 - protein, 78 aa, Homo sapiens
  MAP TO AF172274.1; EXPRESSED IN HELA, SIGNAL = 1.7; EXPRESSED IN HBL100, SIGNAL = 0.92; EXPRESSED IN HEART, SIGNAL = 0.98; EXPRESSED IN LUNG, SIGNAL =  11; EXPRESSED IN FETAL LIVER, SIGNAL = 1.7; SWISSPROT HIT: P25929, EVALUE 3.80e-01; EST_HUMAN HIT: AV714230.1, EVALUE 4.00e-37
NAQTKQLQTAVSNVEKHFGELCQIFAAYVRKTARLRDKADLLVNEINAYAGTETPHLKLGLMNFADEFAKLQDYRQAE

SEQ ID NO: 38192 - protein, 44 aa, Homo sapiens
  MAP TO AF172274.1; EXPRESSED IN HELA, SIGNAL = 1.7; EXPRESSED IN HBL100, SIGNAL = 0.92; EXPRESSED IN HEART, SIGNAL = 0.98; EXPRESSED IN LUNG, SIGNAL =  11; EXPRESSED IN FETAL LIVER, SIGNAL = 1.7; EST_HUMAN HIT: AA447931.1, EVALUE 2.00e-20; SWISSPROT HIT: P41180, EVALUE 5.40e-01
ERSNETTANSCFKCGEAFWRTVPNFRCLCAENCQAERQSRPPGE

SEQ ID NO: 38193 - protein, 61 aa, Homo sapiens
  MAP TO AL049542.5; EXPRESSED IN PLACENTA, SIGNAL =   3; EXPRESSED IN HEART, SIGNAL = 3.1; EXPRESSED IN ADULT LIVER, SIGNAL = 3.7; EXPRESSED IN LUNG, SIGNAL =   3; EXPRESSED IN BONE MARROW, SIGNAL = 3.6; EXPRESSED IN HELA, SIGNAL = 3.2; EXPRESSED IN HBL100, SIGNAL = 3.8; EXPRESSED IN BT474, SIGNAL = 3.3; EXPRESSED IN FETAL LIVER, SIGNAL = 3.2; EXPRESSED IN BRAIN, SIGNAL = 2.7; EST_HUMAN HIT: BE906556.1, EVALUE 2.00e-23; SWISSPROT HIT: P27398, EVALUE 7.00e-16
ALAKLHGSYFALQAGRAIEGLATLTGAPCESLALQLSSTNPREEPVDTDLIWAKMLSSKEA

SEQ ID NO: 38194 - protein, 55 aa, Homo sapiens
  MAP TO AL049542.5; EXPRESSED IN PLACENTA, SIGNAL =   3; EXPRESSED IN HEART, SIGNAL = 3.1; EXPRESSED IN ADULT LIVER, SIGNAL = 3.7; EXPRESSED IN LUNG, SIGNAL =   3; EXPRESSED IN BONE MARROW, SIGNAL = 3.6; EXPRESSED IN HELA, SIGNAL = 3.2; EXPRESSED IN HBL100, SIGNAL = 3.8; EXPRESSED IN BT474, SIGNAL = 3.3; EXPRESSED IN FETAL LIVER, SIGNAL = 3.2; EXPRESSED IN BRAIN, SIGNAL = 2.7; EST_HUMAN HIT: BE906556.1, EVALUE 6.00e-22; SWISSPROT HIT: P52951, EVALUE 3.00e-01
RWPSCTAPTLRSRRAAPSKAWPRSPAPPVRAWRCSSAPLTPARSPLTLTSSGPKC

SEQ ID NO: 38195 - protein, 57 aa, Homo sapiens
  MAP TO AL117375.4; EXPRESSED IN BT474, SIGNAL =   2; EXPRESSED IN BONE MARROW, SIGNAL = 3.1; EXPRESSED IN HBL100, SIGNAL = 2.6; EXPRESSED IN PLACENTA, SIGNAL = 2.5; EXPRESSED IN FETAL LIVER, SIGNAL = 2.3; EXPRESSED IN BRAIN, SIGNAL = 2.4; EXPRESSED IN LUNG, SIGNAL = 1.9; EXPRESSED IN HEART, SIGNAL = 2.1; EXPRESSED IN HELA, SIGNAL = 1.9; EXPRESSED IN ADULT LIVER, SIGNAL = 2.5; EST_HUMAN HIT: BE856521.1, EVALUE 1.60e+00
YFHKQMVQLTYRNTSSYPSIQFSRFALDKQQYSPHAAKSYKLHQGESLQWDEAGVWD

SEQ ID NO: 38196 - protein, 55 aa, Homo sapiens
  MAP TO AL109809.14; EXPRESSED IN PLACENTA, SIGNAL = 1.6; EXPRESSED IN HELA, SIGNAL = 1.4; EXPRESSED IN HEART, SIGNAL = 1.7; EXPRESSED IN ADULT LIVER, SIGNAL = 1.8; EXPRESSED IN BT474, SIGNAL = 1.4; EXPRESSED IN LUNG, SIGNAL = 2.2; EXPRESSED IN BONE MARROW, SIGNAL = 2.6; EXPRESSED IN HBL100, SIGNAL = 2.2; EXPRESSED IN FETAL LIVER, SIGNAL = 1.9; EXPRESSED IN BRAIN, SIGNAL = 2.8; SWISSPROT HIT: O10315, EVALUE 5.90e+00; EST_HUMAN HIT: AI363143.1, EVALUE 7.00e-12
MEGTYDWTSWLLVNISAHRDDVLTYQMAHDGQLVVSKSLALEVSAHQEQSSEATL

SEQ ID NO: 38197 - protein, 28 aa, Homo sapiens
  MAP TO AL109809.14; EXPRESSED IN PLACENTA, SIGNAL = 1.6; EXPRESSED IN HELA, SIGNAL = 1.4; EXPRESSED IN HEART, SIGNAL = 1.7; EXPRESSED IN ADULT LIVER, SIGNAL = 1.8; EXPRESSED IN BT474, SIGNAL = 1.4; EXPRESSED IN LUNG, SIGNAL = 2.2; EXPRESSED IN BONE MARROW, SIGNAL = 2.6; EXPRESSED IN HBL100, SIGNAL = 2.2; EXPRESSED IN FETAL LIVER, SIGNAL = 1.9; EXPRESSED IN BRAIN, SIGNAL = 2.8; EST_HUMAN HIT: BE514786.1, EVALUE 2.70e-02
ASELCSWWAETSRARLLLTTSCPSCAIW

SEQ ID NO: 38198 - protein, 25 aa, Homo sapiens
  MAP TO AL109838.8; EXPRESSED IN ADULT LIVER, SIGNAL =   1; EXPRESSED IN BT474, SIGNAL =  10; EXPRESSED IN BONE MARROW, SIGNAL =   3; EXPRESSED IN HBL100, SIGNAL = 6.4; EXPRESSED IN PLACENTA, SIGNAL = 2.6; EXPRESSED IN FETAL LIVER, SIGNAL = 1.5; EXPRESSED IN BRAIN, SIGNAL = 4.7; EXPRESSED IN LUNG, SIGNAL = 2.5; EXPRESSED IN HEART, SIGNAL = 4.2; EXPRESSED IN HELA, SIGNAL = 7.5
GSKAAKGEQLVGDVLSGLPMQAPGA

SEQ ID NO: 38199 - protein, 72 aa, Homo sapiens
  MAP TO AL118522.7; EXPRESSED IN LUNG, SIGNAL = 0.93; EXPRESSED IN BONE MARROW, SIGNAL = 1.9; EXPRESSED IN BRAIN, SIGNAL = 1.3; EXPRESSED IN HBL100, SIGNAL = 1.6; EXPRESSED IN PLACENTA, SIGNAL = 1.2; EXPRESSED IN ADULT LIVER, SIGNAL = 1.1; EXPRESSED IN HEART, SIGNAL = 1.6; EXPRESSED IN BT474, SIGNAL = 1.5; SWISSPROT HIT: P15392, EVALUE 4.30e+00; EST_HUMAN HIT: AW956936.1, EVALUE 5.00e-22
VIVWGNYGRMERKQFMGVARVLLEELDLTTLAVGWYKLFPTSSMVDPATGPLLRQASQLSLESTVGPCGERS

SEQ ID NO: 38200 - protein, 50 aa, Homo sapiens
  MAP TO AL118522.7; EXPRESSED IN LUNG, SIGNAL = 0.93; EXPRESSED IN BONE MARROW, SIGNAL = 1.9; EXPRESSED IN BRAIN, SIGNAL = 1.3; EXPRESSED IN HBL100, SIGNAL = 1.6; EXPRESSED IN PLACENTA, SIGNAL = 1.2; EXPRESSED IN ADULT LIVER, SIGNAL = 1.1; EXPRESSED IN HEART, SIGNAL = 1.6; EXPRESSED IN BT474, SIGNAL = 1.5; EST_HUMAN HIT: AI752432.1, EVALUE 2.00e-02; SWISSPROT HIT: P39061, EVALUE 1.20e+00
DRVGELRADGAEAVHGCGSRAAGGAGLDHPGRGLVQALPHLLHGGPSHRP

SEQ ID NO: 38201 - protein, 67 aa, Homo sapiens
  MAP TO AL121575.6; EXPRESSED IN HELA, SIGNAL = 1.2; EXPRESSED IN HEART, SIGNAL = 1.1; EXPRESSED IN ADULT LIVER, SIGNAL = 1.3; EXPRESSED IN BT474, SIGNAL = 1.3; EXPRESSED IN BONE MARROW, SIGNAL = 1.5; EXPRESSED IN HBL100, SIGNAL = 1.3; EXPRESSED IN PLACENTA, SIGNAL = 1.5; EXPRESSED IN FETAL LIVER, SIGNAL = 1.1; EXPRESSED IN BRAIN, SIGNAL = 1.1; EXPRESSED IN LUNG, SIGNAL = 1.4; EST_HUMAN HIT: AW969054.1, EVALUE 5.00e-25
HKQRCPVLEDQLVDLVVYAMERSETEEKFDDGGTSQLLWQHLSSQLIFFVLFQFASFPHMVLSLHQK

SEQ ID NO: 38202 - protein, 35 aa, Homo sapiens
  MAP TO AL121575.6; EXPRESSED IN HELA, SIGNAL = 1.2; EXPRESSED IN HEART, SIGNAL = 1.1; EXPRESSED IN ADULT LIVER, SIGNAL = 1.3; EXPRESSED IN BT474, SIGNAL = 1.3; EXPRESSED IN BONE MARROW, SIGNAL = 1.5; EXPRESSED IN HBL100, SIGNAL = 1.3; EXPRESSED IN PLACENTA, SIGNAL = 1.5; EXPRESSED IN FETAL LIVER, SIGNAL = 1.1; EXPRESSED IN BRAIN, SIGNAL = 1.1; EXPRESSED IN LUNG, SIGNAL = 1.4; EST_HUMAN HIT: AW363299.1, EVALUE 3.00e-16
GFWNTVFNLCPTAQAALPCAGGPVGGSGCLCHGAI

SEQ ID NO: 38203 - protein, 30 aa, Homo sapiens
  MAP TO AC011334.1; EXPRESSED IN HEART, SIGNAL =   1; EXPRESSED IN LUNG, SIGNAL = 5.8
VLQQIMVEPAQEETAKPFTPQARVISTQMN

SEQ ID NO: 38204 - protein, 61 aa, Homo sapiens
  MAP TO AC011589.2; EXPRESSED IN BONE MARROW, SIGNAL = 0.92; EXPRESSED IN HEART, SIGNAL = 0.99; EXPRESSED IN BT474, SIGNAL = 0.92; EXPRESSED IN FETAL LIVER, SIGNAL = 0.95; EST_HUMAN HIT: H50832.1, EVALUE 2.00e-07
QIRCQPGMQSSQAQQWSFRLIHVAIGRLQVLDGCWPEASVPCHMDLTVGQFMIWQLTSLRA

SEQ ID NO: 38205 - protein, 36 aa, Homo sapiens
  MAP TO AP000021.2; EXPRESSED IN HEART, SIGNAL = 0.95; SWISSPROT HIT: Q90837, EVALUE 7.00e-16; EST_HUMAN HIT: BE828013.1, EVALUE 1.00e-14
NIDGKELCKMTKDDFQRLTPSYNADILLSHLHYLRE

SEQ ID NO: 38206 - protein, 24 aa, Homo sapiens
  MAP TO AP000021.2; EXPRESSED IN HEART, SIGNAL = 0.95; EST_HUMAN HIT: AW948986.1, EVALUE 4.00e-04
MCSHPFQILRYGVQTMCGSGWSGR

SEQ ID NO: 38207 - protein, 51 aa, Homo sapiens
  MAP TO AL121748.2; EXPRESSED IN HEART, SIGNAL = 1.4; EST_HUMAN HIT: R13020.1, EVALUE 1.10e+00
GMVHIQVEMNGRHGCESVSQAVYIQIEMGNCLIALTERGGTKAPLPLPCVL

SEQ ID NO: 38208 - protein, 17 aa, Homo sapiens
  MAP TO AL121748.2; EXPRESSED IN HEART, SIGNAL = 1.4
DGTYSSGNEWTAWLRVS

SEQ ID NO: 38209 - protein, 783 aa, Homo sapiens
  MAP TO AC005740.1; EXPRESSED IN BONE MARROW, SIGNAL = 0.98; EXPRESSED IN BRAIN, SIGNAL =   1; EXPRESSED IN LUNG, SIGNAL = 5.6; EXPRESSED IN HELA, SIGNAL = 0.99; EXPRESSED IN PLACENTA, SIGNAL = 1.8; EXPRESSED IN HEART, SIGNAL = 1.8; EXPRESSED IN FETAL LIVER, SIGNAL = 1.2; SWISSPROT HIT: P33450, EVALUE 4.00e-53; EST_HUMAN HIT: AU140396.1, EVALUE 0.00e+00
EHFALDVIVGPDETKHAELIVVKELDREIHSFFDLVLTAYDNGNPPKSGTSLVKVNVLDSNDNSPAFAESSLALEIQEDAAPGTLLIKLTATDPDQGPNGEVEFFLSKHMPPEVLDTFSIDAKTGQVILRRPLDYEKNPAYEVDVQARDLGPNPIPAHCKVLIKVLDVNDNIPSIHVTWASQPSLVSEALPKDSFIALVMADDLDSGHNGLVHCWLSQELGHFRLKRTNGNTYMLLTNATLDREQWPKYTLTLLAQDQGLQPLSAKKQLSIQISDINDNAPVFEKSRYEVSTRENNLPSLHLITIKAHDADLGINGKVSYRIQDSPVAHLVAIDSNTGEVTAQRSLNYEEMAGFEFQVIAEDSGQPMLASSVSVWVSLLDANDNAPEVVQPVLSDGKASLSVLVNASTGHLLVPIETPNGLGPAGTDTPPLATHSSRPFLLTTIVARDADSGANGEPLYSIRSGNEAHLFILNPHTGQLFVNVTNASSLIGSEWELEIVVEDQGSPPLQTRALLRVMFVTSVDHLRDSARKPGALSMSMLTVICLAVLLGIFGLILALFMSICRTEKKDNRAYNCREAESTYRQQPKRPQKHIQKADIHLVPVLRGQAGEPCEVGQSHKDVDKEAMMEAGWDPCLQAPFHLTPTLYRTLRNQGNQGAPAESREVLQDTVNLLFNHPRQRNASRENLNLPEPQPATGQPRSRPLKVAGSPTGRLAGDQGSEEAPQRPPASSATLRRQRHLNGKVSPEKESGPRQILRSLVRLSVAAFAERNPVEELTVDSPPVQ

SEQ ID NO: 38210 - protein, 78 aa, Homo sapiens
  MAP TO AC005740.1; EXPRESSED IN BONE MARROW, SIGNAL = 0.98; EXPRESSED IN BRAIN, SIGNAL =   1; EXPRESSED IN LUNG, SIGNAL = 5.6; EXPRESSED IN HELA, SIGNAL = 0.99; EXPRESSED IN PLACENTA, SIGNAL = 1.8; EXPRESSED IN HEART, SIGNAL = 1.8; EXPRESSED IN FETAL LIVER, SIGNAL = 1.2; EST_HUMAN HIT: AU140154.1, EVALUE 7.00e-44; SWISSPROT HIT: P25054, EVALUE 8.00e+00
SMWRSKCWTSMTTSHGFPKASRSWKSLRAPLCEPGSPWTELLTQTQALTPCTPTLCLPVSTLPWMSLWALMRPNMQNS

SEQ ID NO: 38211 - protein, 79 aa, Homo sapiens
  MAP TO AL109809.14; EXPRESSED IN BT474, SIGNAL =   1; EXPRESSED IN HEART, SIGNAL = 1.1; EST_HUMAN HIT: BF686468.1, EVALUE 3.30e-01; SWISSPROT HIT: Q61850, EVALUE 1.30e+00
RESAQLPDLLLSDNAQSLTYLGSTCVCLESLKAQGQGFQGCKQRERVLAQGSAHLCIPAAESAAGKDQEGGARRLGWVS

SEQ ID NO: 38212 - protein, 18 aa, Homo sapiens
  MAP TO AL109809.14; EXPRESSED IN BT474, SIGNAL =   1; EXPRESSED IN HEART, SIGNAL = 1.1
TEKVLSSLIFCSQTMPSP

SEQ ID NO: 38213 - protein, 524 aa, Homo sapiens
  MAP TO AL021331.1; EXPRESSED IN HEART, SIGNAL = 2.7; EST_HUMAN HIT: AI204535.1, EVALUE 3.00e-36; SWISSPROT HIT: P38584, EVALUE 3.00e-19
KKPHLMAEDEPSGALLKPLVFRVDETTPAVVQSVLLERGWNKFDKQEQNAEDWNLYWRTSSFRMTEHNSVKPWQQLNHHPGTTKLTRKDCLAKHLKHMRRMYGTSLYQFIPLTFVMPNDYTKFVAEYFQERQMLGTKHSYWICKPAELSRGRGILIFSDFKDFIFDDMYIVQKYISNPLLIGRYKCDLRIYVCVTGFKPLTIYVYQEGLVRFATEKFDLSNLQNNYAHLTNSSINKSGASYEKIKEVIGHGCKWTLSRFFSYLRSWDVDDLLLWKKIHRMVILTILAIAPSVPFAANCFELFGFDILIDDNLKPWLLEVNYSPALTLDCSTDVLVKRKLVHDIIDLIYLNGLRNEGREASNATHGNSNIDAAKSDRGGLDAPDCLPYDSLSFTSRMYNEDDSVVEKAVSVRPEAAPASQLEGEMSGQDFHLSTREMPQSKPKLRSRHTPHKTLMPYASLFQSHSCKTKTSPCVLSDRGKAPDPQAGNFVLVFPFNEATLGASRNGLNVKRIIQELQKLMNKQHS

SEQ ID NO: 38214 - protein, 54 aa, Homo sapiens
  MAP TO AL030995.1; EXPRESSED IN LUNG, SIGNAL = 1.1; EXPRESSED IN BONE MARROW, SIGNAL = 0.95; EXPRESSED IN HBL100, SIGNAL = 1.1; EXPRESSED IN HELA, SIGNAL = 1.2; EXPRESSED IN PLACENTA, SIGNAL = 1.2; EXPRESSED IN ADULT LIVER, SIGNAL =   1; EXPRESSED IN HEART, SIGNAL =   1; EXPRESSED IN FETAL LIVER, SIGNAL = 0.96; EST_HUMAN HIT: AA401841.1, EVALUE 1.00e-16; SWISSPROT HIT: P16237, EVALUE 3.40e+00
ISPHREITICTLALLLVPVGTFSIFLISRSPSVIFPNTTCFPSRPLHLERVIKN

SEQ ID NO: 38215 - protein, 36 aa, Homo sapiens
  MAP TO AL078624.22; EXPRESSED IN ADULT LIVER, SIGNAL = 0.95; EXPRESSED IN BT474, SIGNAL = 0.98; EXPRESSED IN LUNG, SIGNAL = 1.2; EXPRESSED IN BONE MARROW, SIGNAL = 0.97; EXPRESSED IN HELA, SIGNAL =   1; EXPRESSED IN HEART, SIGNAL = 1.1; EXPRESSED IN HBL100, SIGNAL = 0.93
LPLAGYIPRELTYLTSKAAHFIRLVYTEEKGDFRSS

SEQ ID NO: 38216 - protein, 43 aa, Homo sapiens
  MAP TO AL033530.1; EXPRESSED IN PLACENTA, SIGNAL = 1.2; EXPRESSED IN HBL100, SIGNAL = 1.2; EXPRESSED IN ADULT LIVER, SIGNAL = 1.1; EXPRESSED IN HEART, SIGNAL = 1.4; EXPRESSED IN BT474, SIGNAL =   1; EXPRESSED IN FETAL LIVER, SIGNAL = 0.99; EXPRESSED IN BONE MARROW, SIGNAL = 1.2; EXPRESSED IN LUNG, SIGNAL = 0.98; EST_HUMAN HIT: W27187.1, EVALUE 4.10e-01
GDSQCFGSLLEFAVASHIFQRVCERVTQFFQYVLVVVLEQKFT

SEQ ID NO: 38217 - protein, 22 aa, Homo sapiens
  MAP TO AL033530.1; EXPRESSED IN PLACENTA, SIGNAL = 1.2; EXPRESSED IN HBL100, SIGNAL = 1.2; EXPRESSED IN ADULT LIVER, SIGNAL = 1.1; EXPRESSED IN HEART, SIGNAL = 1.4; EXPRESSED IN BT474, SIGNAL =   1; EXPRESSED IN FETAL LIVER, SIGNAL = 0.99; EXPRESSED IN BONE MARROW, SIGNAL = 1.2; EXPRESSED IN LUNG, SIGNAL = 0.98
GLTVFWISSGVCSGKPHFSKGL

SEQ ID NO: 38218 - protein, 64 aa, Homo sapiens
  MAP TO AL078582.7; EXPRESSED IN BT474, SIGNAL = 0.91; EXPRESSED IN LUNG, SIGNAL = 1.4; EXPRESSED IN BRAIN, SIGNAL = 1.2; EXPRESSED IN BONE MARROW, SIGNAL = 1.2; EXPRESSED IN HEART, SIGNAL = 0.95; EXPRESSED IN ADULT LIVER, SIGNAL = 1.1; EXPRESSED IN HELA, SIGNAL = 0.98; EXPRESSED IN HBL100, SIGNAL = 0.92; EST_HUMAN HIT: T08591.1, EVALUE 8.00e-29; SWISSPROT HIT: P11532, EVALUE 4.40e-02
AFQQEISLNHNKIEQIIAQGEQLIEKSEPLDAAIIEEELDELRRYCQEVFGRVERYHKKLIRLP

SEQ ID NO: 38219 - protein, 32 aa, Homo sapiens; identical to SEQ ID NO: 35317
  MAP TO AL033539.17; EXPRESSED IN LUNG, SIGNAL = 1.1; EXPRESSED IN HBL100, SIGNAL = 0.99; EXPRESSED IN PLACENTA, SIGNAL = 1.2; EXPRESSED IN HEART, SIGNAL =   1; EXPRESSED IN FETAL LIVER, SIGNAL = 1.1; EXPRESSED IN ADULT LIVER, SIGNAL = 0.98

SEQ ID NO: 38220 - protein, 38 aa, Homo sapiens
  MAP TO AC007968.2; EXPRESSED IN FETAL LIVER, SIGNAL = 0.99; EXPRESSED IN HEART, SIGNAL = 0.98; EXPRESSED IN LUNG, SIGNAL = 4.8; SWISSPROT HIT: P33180, EVALUE 4.70e+00; EST_HUMAN HIT: BF183165.1, EVALUE 7.30e+00
STVPGRAFRTMKSKNNQTSPIGFQTMPRTKVEACVRGV

SEQ ID NO: 38221 - protein, 70 aa, Homo sapiens
  MAP TO AC010731.1; EXPRESSED IN FETAL LIVER, SIGNAL = 1.5; EXPRESSED IN HEART, SIGNAL = 0.98; EXPRESSED IN BRAIN, SIGNAL = 1.1; EST_HUMAN HIT: AL135156.1, EVALUE 8.00e-18; SWISSPROT HIT: Q03376, EVALUE 1.40e+00
VCSNEATCICDFTWAGTDCSIRDPVRNLHPPKDEGPKGLCDFGFNSWNTEFVDTVPMHQYNILIDLRGDT

SEQ ID NO: 38222 - protein, 29 aa, Homo sapiens
  MAP TO AC010731.1; EXPRESSED IN FETAL LIVER, SIGNAL = 1.5; EXPRESSED IN HEART, SIGNAL = 0.98; EXPRESSED IN BRAIN, SIGNAL = 1.1; EST_HUMAN HIT: AL135156.1, EVALUE 5.00e-09
CVVMKPPAFVISPGQGQIAVSGIQLGTFT

SEQ ID NO: 38223 - protein, 113 aa, Homo sapiens
  MAP TO AC008132.19; EXPRESSED IN HELA, SIGNAL = 1.2; EXPRESSED IN HEART, SIGNAL =   1; EST_HUMAN HIT: AI904151.1, EVALUE 3.00e-36; SWISSPROT HIT: P18899, EVALUE 3.00e-03
DTVQDITNEDAVYDIANEDVVYDIANEDALQDIANEVAVYDIANEDIVYDIANEDALYDITNEDAVYNIANEDAVYGIANEDAVYEFANKDAVYDIANEDTVQDICKKEDAAN

SEQ ID NO: 38224 - protein, 114 aa, Homo sapiens
  MAP TO AL034384.1; EXPRESSED IN ADULT LIVER, SIGNAL =   1; EXPRESSED IN HEART, SIGNAL = 0.86; SWISSPROT HIT: P08503, EVALUE 2.70e-01; EST_HUMAN HIT: AV703581.1, EVALUE 2.10e+00
FLFLIRPVWSKLRGLRARRALRGHLLCLALSIPAPWLDCQPLNARTQTSLVHCLMLTSIPPQHREWTESALGTSVPISCCGMNLKTLNRCLLTLKIHYPPPRLKRVATGLSVSF

SEQ ID NO: 38225 - protein, 29 aa, Homo sapiens
  MAP TO AC007336.2; EXPRESSED IN PLACENTA, SIGNAL = 0.89; EXPRESSED IN HBL100, SIGNAL =   1; EXPRESSED IN HELA, SIGNAL = 1.3; EXPRESSED IN HEART, SIGNAL = 1.3; EXPRESSED IN FETAL LIVER, SIGNAL = 1.1; EXPRESSED IN BT474, SIGNAL = 0.91; EXPRESSED IN ADULT LIVER, SIGNAL = 1.2; EXPRESSED IN LUNG, SIGNAL =   1
GGKTVGVYYQGDSGNPFISAEQTMKLREE

SEQ ID NO: 38226 - protein, 241 aa, Homo sapiens
  MAP TO AL033532.15; EXPRESSED IN HEART, SIGNAL = 1.2; EXPRESSED IN FETAL LIVER, SIGNAL = 0.95; EXPRESSED IN LUNG, SIGNAL = 0.94; EST_HUMAN HIT: BE744017.1, EVALUE 1.00e-103; SWISSPROT HIT: P18130, EVALUE 6.00e-15
YYAVLYPMVYPMKITGNRAVMALVYIWLHSLIGCLPPLFGWSSVEFDEFKWMCVAAWHREPGYTAFWQIWCALFPFLVMLVCYGFIFRVARVKARKVHCGTVVIVEEDAQRTGRKNSSTSTSSSGSRRNAFQGVVYSANQCKALITILVVLGAFMVTWGPYMVVIASEALWGKSSVSPSLETWATWLSFASAVCHPLIYGLWNKTVRKELLGMCFGDRYYREPFVQRQRTSRLFSISNRIT

SEQ ID NO: 38227 - protein, 317 aa, Homo sapiens
  MAP TO AE000658.1; EXPRESSED IN FETAL LIVER, SIGNAL = 1.1; EXPRESSED IN ADULT LIVER, SIGNAL = 0.98; EXPRESSED IN BONE MARROW, SIGNAL =   2; EXPRESSED IN HEART, SIGNAL =   1; EST_HUMAN HIT: AI148854.1, EVALUE 1.00e-32; SWISSPROT HIT: P23274, EVALUE 3.00e-56
ILWDMERINSTLLTAFILTGIPYPLRLRTLFFVFFFLIYILTQLGNLLILITVWADPRLHARPMYIFLGVLSVIDMSISSIIVPRLMMNFTLGVKPIPFGGCVAQLYFYHFLGSTQCFLYTLMAYDRYLAICQPLRYPVLMTAKLSALLVAGAWMAGSIHGALQAILTFRLPYCGPNQVDYFFCDIPAVLRLACADTTVNELVTFVDIGVVVASCFSLILLSYIQIIQAILRIHTADGRRRAFSTCGAHVTVVTVYYVPCAFIYLRPETNSPLDGAAALVPTAITPFLNPLIYTLRNQEVKLALKRMLRSPRTPSEV

SEQ ID NO: 38228 - protein, 127 aa, Homo sapiens
  MAP TO AC009819.2; EXPRESSED IN HEART, SIGNAL = 1.8; EXPRESSED IN FETAL LIVER, SIGNAL = 0.94; EXPRESSED IN BRAIN, SIGNAL = 0.98; SWISSPROT HIT: P54681, EVALUE 2.10e-02; EST_HUMAN HIT: BF689612.1, EVALUE 5.40e-01
SPWAQRSAVSNGSFCFQITGSGSAADLFTKTASPLTTSRGRSQEYDSGNDTSSPPSTQTSSARSRGQEKGSPSGGLSKSRELNSGNTSDSGNSFTTSSPQNKGAMLENLSPTSRGRESRSVHHTGSG

SEQ ID NO: 38229 - protein, 54 aa, Homo sapiens
  MAP TO AF069291.1; EXPRESSED IN HEART, SIGNAL = 1.3; SWISSPROT HIT: Q16698, EVALUE 8.00e-12; EST_HUMAN HIT: BF574343.1, EVALUE 1.00e-10
VHAIQCDVRDPDMVQNTVSELIKVAGHPNVSVAMMKPKCKTLDVDNTHQHVQRK

SEQ ID NO: 38230 - protein, 74 aa, Homo sapiens
  MAP TO AC007640.1; EXPRESSED IN BT474, SIGNAL = 0.9; EXPRESSED IN BRAIN, SIGNAL =   1; EXPRESSED IN PLACENTA, SIGNAL = 0.68; EXPRESSED IN HBL100, SIGNAL = 0.76; EXPRESSED IN LUNG, SIGNAL = 0.64; EXPRESSED IN BONE MARROW, SIGNAL = 0.64; EXPRESSED IN HEART, SIGNAL = 0.81; SWISSPROT HIT: P13671, EVALUE 9.10e+00; EST_HUMAN HIT: BF059261.1, EVALUE 2.00e-13
ADSIEAVFQNCSIKRKFQLCEMKAHIQRSFSECFCVVLSEDISFSAIGLKAPQISICSYYTKSVSKLLNQNIQL

SEQ ID NO: 38231 - protein, 20 aa, Homo sapiens
  MAP TO AC007640.1; EXPRESSED IN BT474, SIGNAL = 0.9; EXPRESSED IN BRAIN, SIGNAL =   1; EXPRESSED IN PLACENTA, SIGNAL = 0.68; EXPRESSED IN HBL100, SIGNAL = 0.76; EXPRESSED IN LUNG, SIGNAL = 0.64; EXPRESSED IN BONE MARROW, SIGNAL = 0.64; EXPRESSED IN HEART, SIGNAL = 0.81; EST_HUMAN HIT: T07845.1, EVALUE 1.50e-02
CRFYRSSVSKLLNQKKVSTL

SEQ ID NO: 38232 - protein, 17 aa, Homo sapiens
  MAP TO AC009576.2; EXPRESSED IN FETAL LIVER, SIGNAL = 1.1; EXPRESSED IN HBL100, SIGNAL = 0.93; EXPRESSED IN HEART, SIGNAL = 0.87; EXPRESSED IN LUNG, SIGNAL =  10
SYHILQRTRPRNIREWC

SEQ ID NO: 38233 - protein, 79 aa, Homo sapiens
  MAP TO AL078634.20; EXPRESSED IN PLACENTA, SIGNAL = 1.3; EXPRESSED IN ADULT LIVER, SIGNAL = 1.6; EXPRESSED IN BT474, SIGNAL =   1; EXPRESSED IN HBL100, SIGNAL = 1.2; EXPRESSED IN HELA, SIGNAL = 0.97; EXPRESSED IN HEART, SIGNAL = 1.1; EXPRESSED IN FETAL LIVER, SIGNAL = 1.2; EXPRESSED IN LUNG, SIGNAL = 1.4; EXPRESSED IN BONE MARROW, SIGNAL =   1; EST_HUMAN HIT: R66488.1, EVALUE 5.00e-35; SWISSPROT HIT: O58698, EVALUE 1.00e+00
TLMVAWIRANLCVYISRELWDDFLGVLSSLTEWEELINEWANIMDSLTAVLARTVYGVEMTNLPLDKLSEQKEKKQRGK

SEQ ID NO: 38234 - protein, 45 aa, Homo sapiens
  MAP TO AL035685.17; EXPRESSED IN BT474, SIGNAL = 1.1; EXPRESSED IN LUNG, SIGNAL =   9; EXPRESSED IN BONE MARROW, SIGNAL = 1.6; EXPRESSED IN PLACENTA, SIGNAL = 1.1; EXPRESSED IN HBL100, SIGNAL = 1.4; EXPRESSED IN HEART, SIGNAL = 1.2; EXPRESSED IN ADULT LIVER, SIGNAL = 1.3; SWISSPROT HIT: O10339, EVALUE 2.70e+00
VAQQSGLDHQAGFRYGKEPADVMESCQLGQELRGDDVIIKFQKTW

SEQ ID NO: 38235 - protein, 33 aa, Homo sapiens
  MAP TO AL035685.17; EXPRESSED IN BT474, SIGNAL = 1.1; EXPRESSED IN LUNG, SIGNAL =   9; EXPRESSED IN BONE MARROW, SIGNAL = 1.6; EXPRESSED IN PLACENTA, SIGNAL = 1.1; EXPRESSED IN HBL100, SIGNAL = 1.4; EXPRESSED IN HEART, SIGNAL = 1.2; EXPRESSED IN ADULT LIVER, SIGNAL = 1.3; EST_HUMAN HIT: AI014570.1, EVALUE 3.00e+00
CGPAVGSGPPGWVPLWERTSRCNGIMPIRPGAA

SEQ ID NO: 38236 - protein, 97 aa, Homo sapiens
  MAP TO AL022067.1; EXPRESSED IN HBL100, SIGNAL = 0.95; EXPRESSED IN HEART, SIGNAL = 1.3; EXPRESSED IN BT474, SIGNAL = 1.2; EXPRESSED IN BRAIN, SIGNAL =   1; SWISSPROT HIT: P57071, EVALUE 2.00e-09; EST_HUMAN HIT: AW085715.1, EVALUE 7.00e-49
IYSRGELHHFIDGFNEEKSNWMRYVNPAHSPREQNLAACQNGMNIYFYTIKPIPANQELLVWYCRDFAERLHYPYPGELTMMNLSKWITEQKNKKCQ

SEQ ID NO: 38237 - protein, 60 aa, Homo sapiens
  MAP TO AC008417.2; EXPRESSED IN HEART, SIGNAL = 2.5; EST_HUMAN HIT: AU132708.1, EVALUE 8.00e-27; SWISSPROT HIT: Q16706, EVALUE 7.00e-30
AAEILYYFALRQAHKYKINKFLSSSLYTALTEARRNLGLFQHHDAITGTAKDWVVVDYGT

SEQ ID NO: 38238 - protein, 48 aa, Homo sapiens
  MAP TO AC008430.2; EXPRESSED IN BRAIN, SIGNAL = 1.5; EXPRESSED IN HELA, SIGNAL =   1; EXPRESSED IN HEART, SIGNAL = 1.2; EST_HUMAN HIT: AA455377.1, EVALUE 7.00e-11; SWISSPROT HIT: P21956, EVALUE 3.00e-12
VFRGNIDNNTPYANSFTPPIKAQYVRLYPQVCRRHCTLRMELLGCELS

SEQ ID NO: 38239 - protein, 60 aa, Homo sapiens
  MAP TO AC010740.3; EXPRESSED IN HEART, SIGNAL = 6.4; EST_HUMAN HIT: BF515499.1, EVALUE 1.00e-14; SWISSPROT HIT: P98157, EVALUE 1.00e-15
IHSPAGCNGNEFQCHPDGNCVPDLWRCDGEKDCEDGSDEKGCNGTIRLCDHKTKFSCWST

SEQ ID NO: 38240 - protein, 33 aa, Homo sapiens
  MAP TO AC010740.3; EXPRESSED IN HEART, SIGNAL = 6.4
LTCTPTGKLGFVVTQSYGTIATFFITTIFTVFF

SEQ ID NO: 38241 - protein, 81 aa, Homo sapiens
  MAP TO AC012668.1; EXPRESSED IN LUNG, SIGNAL = 2.2; EXPRESSED IN HEART, SIGNAL =   1; EXPRESSED IN PLACENTA, SIGNAL = 4.6; EXPRESSED IN FETAL LIVER, SIGNAL =   1; EST_HUMAN HIT: AI752040.1, EVALUE 1.00e-41; SWISSPROT HIT: P02751, EVALUE 1.00e-42
FTDVDVDSIKIAWESPQGQVSRYRVTYSSPEDGIHELFPAPDGEEDTAELQGLRPGSEYTVSVVALHDDMESQPLIGTQST

SEQ ID NO: 38242 - protein, 25 aa, Homo sapiens
  MAP TO AC012668.1; EXPRESSED IN LUNG, SIGNAL = 2.2; EXPRESSED IN HEART, SIGNAL =   1; EXPRESSED IN PLACENTA, SIGNAL = 4.6; EXPRESSED IN FETAL LIVER, SIGNAL =   1; EST_HUMAN HIT: AW068606.1, EVALUE 3.00e-08
HSLMWMSIPSKLLGKAHRGKFPGTG

SEQ ID NO: 38243 - protein, 136 aa, Homo sapiens
  MAP TO AC012145.1; EXPRESSED IN FETAL LIVER, SIGNAL = 0.93; EXPRESSED IN HEART, SIGNAL = 1.1; EST_HUMAN HIT: AW440148.1, EVALUE 7.00e-25; SWISSPROT HIT: P43276, EVALUE 2.00e-26
WCAVLVTMSETVPPAPAASAAPEKPLAGKKAKKPAKAAAASKKKPAGPSVSELIVQAASSSKERGGVSLAALKKALAAAGYDVEKNNSRIKLGIKSLVSKGTLVQIKGTGASGSFKLNKKASSVETKPGASKVATK

SEQ ID NO: 38244 - protein, 27 aa, Homo sapiens
  MAP TO AL031132.1; EXPRESSED IN HEART, SIGNAL = 0.94
NHFQILCSLKAAHFPQHQVAQDDHRKV

SEQ ID NO: 38245 - protein, 45 aa, Homo sapiens
  MAP TO AL031407.3; EXPRESSED IN HEART, SIGNAL = 0.99; SWISSPROT HIT: P23852, EVALUE 7.90e+00
HTDLHQFYPRTSCPITITVLFPGDLVFSHNINHIYSKYSQIYISN

SEQ ID NO: 38246 - protein, 25 aa, Homo sapiens
  MAP TO AC010904.1; EXPRESSED IN HEART, SIGNAL = 1.2; EXPRESSED IN LUNG, SIGNAL = 2.6; EST_HUMAN HIT: BE145366.1, EVALUE 6.30e-01
LVCWCMSDCHSTKGKTLPPLWVFWK

SEQ ID NO: 38247 - protein, 25 aa, Homo sapiens
  MAP TO AC010904.1; EXPRESSED IN HEART, SIGNAL = 1.2; EXPRESSED IN LUNG, SIGNAL = 2.6
FSRIPRVEAESCLLLNGSLTCTNTP

SEQ ID NO: 38248 - protein, 35 aa, Homo sapiens
  MAP TO AL049692.11; EXPRESSED IN HEART, SIGNAL = 0.84; EXPRESSED IN PLACENTA, SIGNAL = 0.93; EXPRESSED IN LUNG, SIGNAL = 8.6
GKRQRVGKSQVLQQKYSHIDCFNCTGKNRDSQTTL

SEQ ID NO: 38249 - protein, 18 aa, Homo sapiens
  MAP TO AL049692.11; EXPRESSED IN HEART, SIGNAL = 0.84; EXPRESSED IN PLACENTA, SIGNAL = 0.93; EXPRESSED IN LUNG, SIGNAL = 8.6
QTSASRKEPGLTTKVQPH

SEQ ID NO: 38250 - protein, 35 aa, Homo sapiens
  MAP TO AC007253.2; EXPRESSED IN BT474, SIGNAL = 0.61; EXPRESSED IN BONE MARROW, SIGNAL = 0.63; EXPRESSED IN HEART, SIGNAL = 1.3; EXPRESSED IN PLACENTA, SIGNAL = 0.98; EXPRESSED IN FETAL LIVER, SIGNAL = 0.67; EXPRESSED IN LUNG, SIGNAL = 0.71; EXPRESSED IN HELA, SIGNAL = 0.63; EXPRESSED IN ADULT LIVER, SIGNAL = 0.86
MKTLSGAMPIGEMKGRKSYLKANYQVYFHLPHASK

SEQ ID NO: 38251 - protein, 55 aa, Homo sapiens
  MAP TO AL049759.10; EXPRESSED IN LUNG, SIGNAL = 0.66; EXPRESSED IN BRAIN, SIGNAL = 0.84; EXPRESSED IN HEART, SIGNAL = 0.97; EST_HUMAN HIT: H17151.1, EVALUE 3.00e-20; SWISSPROT HIT: P09379, EVALUE 3.00e-06
LVYDDVFLVWETIWAAKHVSSAHYVLFIALALVEVYRDIILENNMDFTDIIKFFN

SEQ ID NO: 38252 - protein, 29 aa, Homo sapiens
  MAP TO AL049759.10; EXPRESSED IN LUNG, SIGNAL = 0.66; EXPRESSED IN BRAIN, SIGNAL = 0.84; EXPRESSED IN HEART, SIGNAL = 0.97
GGLPKAGQHCEPRHQFSPHVCWCLGRTRL

SEQ ID NO: 38253 - protein, 53 aa, Homo sapiens
  MAP TO AC010906.2; EXPRESSED IN HEART, SIGNAL = 0.99; EXPRESSED IN BONE MARROW, SIGNAL = 0.94
SAPIPSAVCAACLQGQQQDGIGSPGKPPGGISKHSAGAAGVCAGVGGRDTQGS

SEQ ID NO: 38254 - protein, 99 aa, Homo sapiens
  MAP TO AC010680.3; EXPRESSED IN HEART, SIGNAL =   3; EXPRESSED IN BONE MARROW, SIGNAL = 1.3; EST_HUMAN HIT: F35989.1, EVALUE 1.00e-23; SWISSPROT HIT: Q00872, EVALUE 1.00e-11
KPGPPGGPIEFKTVTAEKITLLWRPPADDGGAKITHYIVEKRETSRVVWSMVSEHLEECIITTTKIIKGNEYIFRVRAVNKYGIGEPLESDSVVAKNAF

SEQ ID NO: 38255 - protein, 36 aa, Homo sapiens
  MAP TO AL034408.2; EXPRESSED IN BONE MARROW, SIGNAL = 1.3; EXPRESSED IN HBL100, SIGNAL = 1.1; EXPRESSED IN HELA, SIGNAL = 0.97; EXPRESSED IN HEART, SIGNAL = 1.2; EXPRESSED IN BT474, SIGNAL = 1.1; EXPRESSED IN FETAL LIVER, SIGNAL =   1; SWISSPROT HIT: Q9Y216, EVALUE 4.00e-12; EST_HUMAN HIT: AI923031.1, EVALUE 8.00e-11
CELKTPTMSEFLSGLESSGWLRHIKAIMDAGIFITK

SEQ ID NO: 38256 - protein, 106 aa, Homo sapiens
  MAP TO AF042089.1; EXPRESSED IN HEART, SIGNAL = 1.1; EXPRESSED IN BT474, SIGNAL = 1.2; EXPRESSED IN FETAL LIVER, SIGNAL = 1.4; EXPRESSED IN LUNG, SIGNAL = 1.4; EXPRESSED IN BRAIN, SIGNAL = 1.6; EXPRESSED IN HBL100, SIGNAL = 0.91; EXPRESSED IN PLACENTA, SIGNAL = 1.1; EXPRESSED IN HELA, SIGNAL = 1.3; SWISSPROT HIT: P38142, EVALUE 7.20e-01; EST_HUMAN HIT: AW853949.1, EVALUE 6.00e-26
MSSAFWAEVAWGNDLVSTTVSRVPTAYPAPLSPWGLKKLLPSTYSSQSTDAQAWSRRSGLLESIESNTSTQSGSTGLSDTGSKVAGCRVLQTSMVIRGFSQSSLVL

SEQ ID NO: 38257 - protein, 41 aa, Homo sapiens
  MAP TO AC009786.1; EXPRESSED IN HEART, SIGNAL = 0.92; EXPRESSED IN BONE MARROW, SIGNAL = 0.9
WQTILDFLTDNPRLSELHEAQRIANVTSFDMYYPLPISATV

SEQ ID NO: 38258 - protein, 67 aa, Homo sapiens; identical to SEQ ID NO: 33605
  MAP TO AP000123.1; EXPRESSED IN HELA, SIGNAL = 1.4; EXPRESSED IN ADULT LIVER, SIGNAL = 0.65; EXPRESSED IN HEART, SIGNAL = 0.99; EXPRESSED IN PLACENTA, SIGNAL = 1.8; EXPRESSED IN BONE MARROW, SIGNAL =   3; EXPRESSED IN FETAL LIVER, SIGNAL = 1.9; EXPRESSED IN LUNG, SIGNAL = 0.64; EXPRESSED IN BRAIN, SIGNAL = 1.9; SWISSPROT HIT: P35543, EVALUE 2.60e+00; EST_HUMAN HIT: AI003369.1, EVALUE 5.00e-06

SEQ ID NO: 38259 - protein, 38 aa, Homo sapiens
  MAP TO AF189005.1; EXPRESSED IN HBL100, SIGNAL = 0.93; EXPRESSED IN HEART, SIGNAL = 1.2; EXPRESSED IN BONE MARROW, SIGNAL = 1.1; EXPRESSED IN LUNG, SIGNAL = 3.3; EST_HUMAN HIT: AI984928.1, EVALUE 4.30e-01
ITLLPMPRTVPRTHTMNQGMKSCIKYRITVYTPQGSNC

SEQ ID NO: 38260 - protein, 57 aa, Homo sapiens
  MAP TO AL049652.16; EXPRESSED IN HBL100, SIGNAL =   1; EXPRESSED IN HELA, SIGNAL = 0.97; EXPRESSED IN PLACENTA, SIGNAL = 1.2; EXPRESSED IN HEART, SIGNAL =   1; SWISSPROT HIT: P53914, EVALUE 4.00e-11; EST_HUMAN HIT: BE252982.1, EVALUE 2.00e-25
LSREELEALFLPYDLKRLEMYSRNMVDYHLIMDMIPAISRIYFLNQLGDLALSAAQS

SEQ ID NO: 38261 - protein, 123 aa, Homo sapiens
  MAP TO AL121580.6; EXPRESSED IN BT474, SIGNAL =   1; EXPRESSED IN PLACENTA, SIGNAL = 0.9; EXPRESSED IN HBL100, SIGNAL = 0.92; EXPRESSED IN HEART, SIGNAL = 1.1; EXPRESSED IN ADULT LIVER, SIGNAL = 1.1; SWISSPROT HIT: P46090, EVALUE 5.70e+00; EST_HUMAN HIT: BE699717.1, EVALUE 7.70e-01
RQVPAEWAWLGGLPRVTQQIREGMRFVGSCGNAAWALSVLHSKQMEFEPFFRKEAPGVFKVEVWWAGCTVKKNHIGCREKDGLEGERMKAVRQRGHNRMNSSGDRRGGPGSAGQQQPDAHLLR

SEQ ID NO: 38262 - protein, 21 aa, Homo sapiens
  MAP TO AL121580.6; EXPRESSED IN BT474, SIGNAL =   1; EXPRESSED IN PLACENTA, SIGNAL = 0.9; EXPRESSED IN HBL100, SIGNAL = 0.92; EXPRESSED IN HEART, SIGNAL = 1.1; EXPRESSED IN ADULT LIVER, SIGNAL = 1.1
ATSTSRVGMAWWLAQSHTADP

SEQ ID NO: 38263 - protein, 35 aa, Homo sapiens
  MAP TO AF064862.1; EXPRESSED IN HEART, SIGNAL = 1.1; EXPRESSED IN BONE MARROW, SIGNAL = 0.96; EST_HUMAN HIT: AU140167.1, EVALUE 7.50e+00; SWISSPROT HIT: P16621, EVALUE 1.00e-03
DGLEKYTNYSIQVLAFTRAGDGVRSEQIFTRTKED

SEQ ID NO: 38264 - protein, 35 aa, Homo sapiens
  MAP TO AF064862.1; EXPRESSED IN HEART, SIGNAL = 1.1; EXPRESSED IN BONE MARROW, SIGNAL = 0.96; EST_HUMAN HIT: H71217.1, EVALUE 1.50e+00
TGWKSTPTTASRCWPSPAQETGSGVSRSSPGPKRM

SEQ ID NO: 38265 - protein, 98 aa, Homo sapiens
  MAP TO AL109654.16; EXPRESSED IN PLACENTA, SIGNAL = 0.91; EXPRESSED IN HEART, SIGNAL =   1; EXPRESSED IN ADULT LIVER, SIGNAL = 1.1; EST_HUMAN HIT: AL119323.1, EVALUE 3.00e-16; SWISSPROT HIT: P11369, EVALUE 4.00e-16
LNLMNVIYENPKAHIILNGERLNAFILWSGRRQGCLLSSILFNIVLKYLASSIRQEKDIQIGKEVKPYFLVNNIIISVENAMNSTKVLELIRECIKVI

SEQ ID NO: 38266 - protein, 66 aa, Homo sapiens
  MAP TO AC007642.4; EXPRESSED IN HBL100, SIGNAL = 0.97; EXPRESSED IN HEART, SIGNAL = 0.8; EXPRESSED IN ADULT LIVER, SIGNAL = 0.74; EST_HUMAN HIT: AA355224.1, EVALUE 4.30e-01; SWISSPROT HIT: Q28651, EVALUE 1.90e+00
LENPTGASYHPQEKPKALWPESLMVYDVVIMKKKLSQISGLGDFLYVNAISTSLGIKGITFKEAGE

SEQ ID NO: 38267 - protein, 53 aa, Homo sapiens
  MAP TO AC008283.3; EXPRESSED IN LUNG, SIGNAL = 1.1; EXPRESSED IN HEART, SIGNAL = 0.86; EST_HUMAN HIT: AL134437.1, EVALUE 3.00e-24; SWISSPROT HIT: P54289, EVALUE 4.00e-25
FNSNAQDVSCFQHLVQANVRNKKVLKDAVNNITAKGITDYKKGFSFAFEQLLN

SEQ ID NO: 38268 - protein, 67 aa, Homo sapiens
  MAP TO AF001548.1; EXPRESSED IN BT474, SIGNAL = 1.4; EXPRESSED IN LUNG, SIGNAL = 2.7; EXPRESSED IN PLACENTA, SIGNAL = 1.1; EXPRESSED IN HBL100, SIGNAL = 1.1; EXPRESSED IN HEART, SIGNAL = 2.2; EST_HUMAN HIT: BE836549.1, EVALUE 1.00e-30; SWISSPROT HIT: P35749, EVALUE 9.00e-32
DRIVGLDQMAKMTESSLPSASKTKKGMFRTVGQLYKEQLGKLMTTLRNTTPNFVRCIIPNHEKRVRP

SEQ ID NO: 38269 - protein, 67 aa, Homo sapiens
  MAP TO AL080312.8; EXPRESSED IN FETAL LIVER, SIGNAL = 0.93; EXPRESSED IN HEART, SIGNAL = 1.3; SWISSPROT HIT: P52479, EVALUE 2.80e+00; EST_HUMAN HIT: BF132993.1, EVALUE 1.10e+00
CTPWWCFLQTPVNGIFGLRAHKLTWQLGVPESECLALRCTSLIPQVDAPQRDNLQVGLPSGGFPSDG

SEQ ID NO: 38270 - protein, 150 aa, Homo sapiens
  MAP TO AL080312.8; EXPRESSED IN FETAL LIVER, SIGNAL = 0.93; EXPRESSED IN HEART, SIGNAL = 1.3; EST_HUMAN HIT: AW803026.1, EVALUE 2.00e-15; SWISSPROT HIT: P13993, EVALUE 1.00e-15
MDSPQVDAPQVDSPQVDAPQVDSPQVDSPQVDAPQVDSPQVDAPQVDSPQVNAPQVCVPQVDAPQVDSPQVDSPQVDSPQVDSPQVDSHQVDTPQVDSPQVCAPQVDSPQVESPQVESPQVDTHQVDSHQVSVPQVDAPQVDTHQVDTPQ

SEQ ID NO: 38271 - protein, 257 aa, Homo sapiens
  MAP TO AL031983.1; EXPRESSED IN HEART, SIGNAL = 1.3; EXPRESSED IN FETAL LIVER, SIGNAL = 1.1; SWISSPROT HIT: Q15062, EVALUE 1.00e-130; EST_HUMAN HIT: AI023490.1, EVALUE 5.00e-61
MVNQSSTPGFLLLGFSEHPGLERTLFVVVFTSYLLTLVGNTLIILLSALDPKLHSPMYFFLSNLSFLDLCFTTSCVPQMLVNLWGPKKTISFLDCSVQIFIFLSLGTTECILLTVMAFDRYVAVCQPLHYATIIHPRLCWQLASVAWVIGLVESVVQTPSTLHLPFCPDRQVDDFVCEVPALIRLSCEDTSYNEIQVAVASVFILVVPLSLILVSYGAITWAVLRINSAKGRRKAFGTCSSHLTVVTLFYSSVIAVY

SEQ ID NO: 38272 - protein, 51 aa, Homo sapiens
  MAP TO AL031983.1; EXPRESSED IN HEART, SIGNAL = 1.3; EXPRESSED IN FETAL LIVER, SIGNAL = 1.1; EST_HUMAN HIT: AI678102.1, EVALUE 4.40e+00
SHWGDSLIPPGTNKNRPWLTKAPHRASSFWASLNTQGWKGLSSWLSSLPTS

SEQ ID NO: 38273 - protein, 22 aa, Homo sapiens
  MAP TO AL109853.3; EXPRESSED IN BONE MARROW, SIGNAL = 0.91; EXPRESSED IN HEART, SIGNAL = 0.98
LIQGLVISVFTLPLPFTFILIS

SEQ ID NO: 38274 - protein, 50 aa, Homo sapiens
  MAP TO AL022171.1; EXPRESSED IN HEART, SIGNAL =   1; EXPRESSED IN BONE MARROW, SIGNAL = 0.91; SWISSPROT HIT: P53258, EVALUE 1.50e+00; EST_HUMAN HIT: AW867850.1, EVALUE 7.00e-22
HSNLGARPKGLSTLVKSGVPEALRAEVWQLLAGCHDNQAMLDRYRILITK

SEQ ID NO: 38275 - protein, 25 aa, Homo sapiens
  MAP TO AC009946.1; EXPRESSED IN BONE MARROW, SIGNAL =   1; EXPRESSED IN HEART, SIGNAL = 0.93
LSCMPDNRKRLRKPQPWTKGHHKLT

SEQ ID NO: 38276 - protein, 35 aa, Homo sapiens
  MAP TO AL050342.36; EXPRESSED IN HELA, SIGNAL =   1; EXPRESSED IN PLACENTA, SIGNAL = 0.9; EXPRESSED IN HEART, SIGNAL = 0.98; EXPRESSED IN BT474, SIGNAL =   1; EXPRESSED IN FETAL LIVER, SIGNAL = 1.1; EXPRESSED IN LUNG, SIGNAL = 0.97; EST_HUMAN HIT: BF204009.1, EVALUE 9.80e+00; SWISSPROT HIT: P35258, EVALUE 2.10e+00
MAKELRQLGRQRSGQFKRRLWQGWSLRGVPGSLKR

SEQ ID NO: 38277 - protein, 72 aa, Homo sapiens
  MAP TO AL050342.36; EXPRESSED IN HELA, SIGNAL =   1; EXPRESSED IN PLACENTA, SIGNAL = 0.9; EXPRESSED IN HEART, SIGNAL = 0.98; EXPRESSED IN BT474, SIGNAL =   1; EXPRESSED IN FETAL LIVER, SIGNAL = 1.1; EXPRESSED IN LUNG, SIGNAL = 0.97; EST_HUMAN HIT: BF344409.1, EVALUE 1.60e-01; SWISSPROT HIT: P53235, EVALUE 1.10e+00
LRADDLPEVTQSWEVEQSVVSPTRPAPKVPLQCEDRTEKDVAQTWPSVSQELSPRSHPSRSAGGNGQGAKAA

SEQ ID NO: 38278 - protein, 37 aa, Homo sapiens
  MAP TO AC011456.2; EXPRESSED IN HEART, SIGNAL = 0.96; EST_HUMAN HIT: AA824408.1, EVALUE 7.00e-15
FPINSPAVKIQGFRDKYFMSTDCDEEKQAIPSLSGSR

SEQ ID NO: 38279 - protein, 37 aa, Homo sapiens
  MAP TO AC011561.2; EXPRESSED IN HEART, SIGNAL =   1; EST_HUMAN HIT: AI656939.1, EVALUE 1.50e-01
SSQRLPVFLCLRALSGCQSPCPRTAVPENYQVPGAAL

SEQ ID NO: 38280 - protein, 57 aa, Homo sapiens
  MAP TO AC011700.3; EXPRESSED IN HEART, SIGNAL = 1.4; EXPRESSED IN FETAL LIVER, SIGNAL = 1.1; EXPRESSED IN ADULT LIVER, SIGNAL =   1; EXPRESSED IN HELA, SIGNAL = 0.95; EXPRESSED IN PLACENTA, SIGNAL = 0.98; EST_HUMAN HIT: BE062952.1, EVALUE 4.00e-09; SWISSPROT HIT: Q92786, EVALUE 5.00e-29
LIKWFSNFREFYYIQMEKYARQAINDGVTSTEELSITRDCELYRALNMHYNKANDFE

SEQ ID NO: 38281 - protein, 115 aa, Homo sapiens
  MAP TO AC005481.2; EXPRESSED IN HEART, SIGNAL = 0.95; SWISSPROT HIT: Q61982, EVALUE 5.80e-01; EST_HUMAN HIT: AA077394.1, EVALUE 2.00e-54
AYWVLAEPSPSTHAYWILAEPSPSTHAYWVFAEPSLSTHAYWILAEPSPSTHAYWVLAEPSPSTHAYWVLAEPSPSTHAYWILAEPSPSTHAYWVLAEPSPSTHAYWKQSLSHRT

SEQ ID NO: 38282 - protein, 47 aa, Homo sapiens
  MAP TO AP000009.2; EXPRESSED IN BONE MARROW, SIGNAL = 1.4; EXPRESSED IN HEART, SIGNAL = 1.2; EXPRESSED IN FETAL LIVER, SIGNAL = 1.7; SWISSPROT HIT: P53804, EVALUE 9.00e-22; EST_HUMAN HIT: AU143698.1, EVALUE 1.00e-20
ALSMLGEYDWALQANIKAQKLCKNDPEGIKDLIQQHVKLQKQIEDLQ

SEQ ID NO: 38283 - protein, 34 aa, Homo sapiens
  MAP TO AC012109.1; EXPRESSED IN HEART, SIGNAL = 0.99
IKQCTLNQSGIRVKGRMNAGNISLRPSCLRKSPK

SEQ ID NO: 38284 - protein, 44 aa, Homo sapiens
  MAP TO AC012443.1; EXPRESSED IN HEART, SIGNAL =   1
DSPESDAEREKDKKEKDRESEKDRTRQRSESKHKSPKKKTGKDS

SEQ ID NO: 38285 - protein, 35 aa, Homo sapiens
  MAP TO AC012443.1; EXPRESSED IN HEART, SIGNAL =   1; EST_HUMAN HIT: BF478164.1, EVALUE 2.00e-05
TLQNPMLSERRIKKKKIGKVKKTELDKDQNQNTNR

SEQ ID NO: 38286 - protein, 46 aa, Homo sapiens
  MAP TO AL109838.8; EXPRESSED IN HEART, SIGNAL = 1.8; EST_HUMAN HIT: AA042902.1, EVALUE 6.00e+00; SWISSPROT HIT: P70096, EVALUE 2.70e+00
FPKTMKEKKNQRQKCGISNNELESMEAGEDGNIPGWEKFPERVSRK

SEQ ID NO: 38287 - protein, 37 aa, Homo sapiens
  MAP TO AP000075.1; EXPRESSED IN HEART, SIGNAL =   1; EST_HUMAN HIT: AI670742.1, EVALUE 4.40e-02; SWISSPROT HIT: P15509, EVALUE 8.10e+00
VMPKQTWKKHFLNSMKNKILTQRLSDDFAGMSFPEVA

SEQ ID NO: 38288 - protein, 94 aa, Homo sapiens
  MAP TO AL122003.7; EXPRESSED IN BT474, SIGNAL = 1.6; EXPRESSED IN HEART, SIGNAL = 1.2; EST_HUMAN HIT: AW963611.1, EVALUE 5.00e-07; SWISSPROT HIT: P54156, EVALUE 4.40e+00
PSLNTWEFKMRFGWGHSQTISVSQEVMSKLNLSEQSRRWSGKVGRSRGHSDYPGLHRKHLEAWWSCCKSPNAVSEDGAKNEAMEKSRGQLLKAV

SEQ ID NO: 38289 - protein, 33 aa, Homo sapiens
  MAP TO AL122003.7; EXPRESSED IN BT474, SIGNAL = 1.6; EXPRESSED IN HEART, SIGNAL = 1.2; EST_HUMAN HIT: AW978448.1, EVALUE 6.00e-07; SWISSPROT HIT: Q55637, EVALUE 8.20e+00
SLPQHMGIQDEIWVGTQPNHISIPGGDVKAEPE

SEQ ID NO: 38290 - protein, 175 aa, Homo sapiens
  MAP TO AL008726.1; EXPRESSED IN BONE MARROW, SIGNAL = 0.99; EXPRESSED IN HEART, SIGNAL = 1.2; EXPRESSED IN FETAL LIVER, SIGNAL = 0.93; EST_HUMAN HIT: BE064530.1, EVALUE 3.00e-11; SWISSPROT HIT: P30427, EVALUE 1.70e+00
SLPAEETKPDAQQVQVQQQSQVPPSQVGMLDTLHQSGSELAYKLCHNEWEVVQNSTHLVDMAGSSVDVQLLEDSHQVSKDGCSCSCSFQQWYHLPCRHILALLHTSQQPVGEAMVCRRWQKKYQYLLGPNGELQDRGMVPNTGQPEKQGRNDMIQDLSRELANLLMQTEGPELEE

SEQ ID NO: 38291 - protein, 158 aa, Homo sapiens
  MAP TO AL122015.1; EXPRESSED IN HELA, SIGNAL = 0.94; EXPRESSED IN LUNG, SIGNAL = 2.3; EXPRESSED IN HEART, SIGNAL = 2.3; EST_HUMAN HIT: AI435196.1, EVALUE 4.00e-90; SWISSPROT HIT: P55200, EVALUE 2.00e-04
VQHFGSGHQEWNGNFGHRRQQAYIPTSVTSNPFTLSHGSPNHTAVHAHLAGNTHLGGQPTLLPYPSSATLSSAAPVAHLLASPCTSRPMLQHPTYNISHPSGIVHQVPVGLNPRLLPSPTIHQTQYKPIFPPHSYIAASPAYTGFPLSPTKLSQYPYM

SEQ ID NO: 38292 - protein, 58 aa, Homo sapiens
  MAP TO AC011390.1; EXPRESSED IN FETAL LIVER, SIGNAL = 0.88; EXPRESSED IN HBL100, SIGNAL = 0.95; EXPRESSED IN HEART, SIGNAL = 1.2; EXPRESSED IN BONE MARROW, SIGNAL = 0.92; SWISSPROT HIT: O70528, EVALUE 2.00e-26; EST_HUMAN HIT: AW663056.1, EVALUE 5.00e-09
KIKTNYFIVSLAFADLLVSVLVMPFGAIELVQDIWIYGEVFCLVRTSLDVLLTTASIF

SEQ ID NO: 38293 - protein, 312 aa, Homo sapiens
  MAP TO AC006530.4; EXPRESSED IN BT474, SIGNAL = 0.98; EXPRESSED IN LUNG, SIGNAL = 1.7; EXPRESSED IN HELA, SIGNAL = 1.2; EXPRESSED IN HEART, SIGNAL = 0.94; EST_HUMAN HIT: AU121422.1, EVALUE 4.00e-80; SWISSPROT HIT: P15312, EVALUE 8.90e-01
EPDILLKDKNRLENSDVCKITTMEHSDSDSSCQPASHILDSEKFPFSKDEDCLEQQMLSLRESPMTLKELSLFNRKPLDLEKSSESLASKLSRLKGSERETQTMGMMSRFNELPNSDSSRKDSKLCSVLTQDFCMLFNNKHEKTENGVIPTSDSATQDNSFNKNSKTHSNSNTTENCVISETPLVLPYNNSKVTGKDSDVLIRASEQQIGSLDSPSGMLMNPVEDATGDQNGICFQSEESKARACSETEESNTCCSDWQRHFDVALGRMVYVNKMTGLSTFIAPTEDIQAACTKDLTTVAVDVVLENGKYVV

SEQ ID NO: 38294 - protein, 233 aa, Homo sapiens
  MAP TO AL009174.1; EXPRESSED IN LUNG, SIGNAL = 2.1; EXPRESSED IN HEART, SIGNAL = 1.4; EXPRESSED IN PLACENTA, SIGNAL =  24; EXPRESSED IN FETAL LIVER, SIGNAL =  11; EST_HUMAN HIT: AU119297.1, EVALUE 1.00e-127; SWISSPROT HIT: P51654, EVALUE 1.00e-128
ICTHFCVSFFFFFTEAFEIVVRHAKNYTNAMFKNNYPSLTPQAFEFVGEFFTDVSLYILGSDINVDDMVNELFDSLFPVIYTQLMNPGLPDSALDINECLRGARRDLKVFGNFPKLIMTQVSKSLQVTRIFLQALNLGIEVINTTDHLKFSKDCGRMLTRMWYCSYCQGLMMVKPCGGYCNVVMQGCMAGVVEIDKYWREYILSLEELVNGMYRIYDMENVLLGLFSTIHDSI

SEQ ID NO: 38295 - protein, 37 aa, Homo sapiens
  MAP TO AC007394.2; EXPRESSED IN LUNG, SIGNAL = 0.71; EXPRESSED IN PLACENTA, SIGNAL = 0.6; EXPRESSED IN ADULT LIVER, SIGNAL = 0.86; EXPRESSED IN HEART, SIGNAL = 0.89
KVTNTMPPYPLILQHFLRTKIFSIITRMQLQKSRNLT

SEQ ID NO: 38296 - protein, 119 aa, Homo sapiens
  MAP TO AC006111.2; EXPRESSED IN ADULT LIVER, SIGNAL =   1; EXPRESSED IN HEART, SIGNAL = 0.8; EXPRESSED IN FETAL LIVER, SIGNAL = 0.68; EST_HUMAN HIT: AA485538.1, EVALUE 2.50e+00; SWISSPROT HIT: P08409, EVALUE 2.00e-68
VTGCTSGKRLRLVDGTAISAPGGGSAEWRLHMGYDPHTCQFTDFELTDSRDAERLDRFAQTADEIRIADRGFGSRPECIRSLAFGEADYIVRVHWRGLRWLTAEGMRFDMMGFLRGLDC

SEQ ID NO: 38297 - protein, 38 aa, Homo sapiens
  MAP TO AL049744.7; EXPRESSED IN HELA, SIGNAL = 1.3; EXPRESSED IN ADULT LIVER, SIGNAL =   2; EXPRESSED IN HEART, SIGNAL = 0.81; EST_HUMAN HIT: W61381.1, EVALUE 2.00e-04
KTWMNLVDIMLSKIKSTQRKILHDLIDMWNLRNSNLQK

SEQ ID NO: 38298 - protein, 50 aa, Homo sapiens
  MAP TO AC009941.2; EXPRESSED IN HBL100, SIGNAL =   1; EXPRESSED IN HEART, SIGNAL = 0.9
KIFYIELYHSKVLKVLKFLKTLYYLLGQPMLALMMTSKRLKRSSLKVLHQ

SEQ ID NO: 38299 - protein, 47 aa, Homo sapiens
  MAP TO AC006441.13; EXPRESSED IN HEART, SIGNAL = 0.98; EXPRESSED IN BONE MARROW, SIGNAL = 0.96; EXPRESSED IN FETAL LIVER, SIGNAL = 0.93
VPREWLLENNARLLMLSGNNICFSFMASKAVNGRTIELARLVVFLAL

SEQ ID NO: 38300 - protein, 29 aa, Homo sapiens
  MAP TO AC008174.1; EXPRESSED IN HEART, SIGNAL = 0.99
EYFWKNAQALLFLIKGLFQRKHQQKNVNF

SEQ ID NO: 38301 - protein, 24 aa, Homo sapiens
  MAP TO AC006455.2; EXPRESSED IN PLACENTA, SIGNAL = 0.67; EXPRESSED IN BONE MARROW, SIGNAL = 2.3; EXPRESSED IN HEART, SIGNAL = 0.84
TWKQMFGRACQQILFCIKKACLSA

SEQ ID NO: 38302 - protein, 53 aa, Homo sapiens
  MAP TO AC007313.3; EXPRESSED IN HEART, SIGNAL = 0.85; EST_HUMAN HIT: AA463327.1, EVALUE 1.00e-09; SWISSPROT HIT: Q24815, EVALUE 4.50e+00
SSNSIFSGFLRIFSLYKIMSSANRDTFTSCFSIWLPFISFTCPNALARTFGTM

SEQ ID NO: 38303 - protein, 41 aa, Homo sapiens
  MAP TO AC010740.3; EXPRESSED IN HEART, SIGNAL = 0.95; EXPRESSED IN BT474, SIGNAL = 0.92; EXPRESSED IN BRAIN, SIGNAL =   1; SWISSPROT HIT: P98157, EVALUE 4.00e-17; EST_HUMAN HIT: AA347238.1, EVALUE 8.00e-15
NHSCPDDQFKCQNNRCIPKRWLCDGANDCGSNEDESNQTCT

SEQ ID NO: 38304 - protein, 31 aa, Homo sapiens
  MAP TO AC010740.3; EXPRESSED IN HEART, SIGNAL = 0.95; EXPRESSED IN BT474, SIGNAL = 0.92; EXPRESSED IN BRAIN, SIGNAL =   1
PSQSIIAVLMISLNARIIAASPRDGFVMELM

SEQ ID NO: 38305 - protein, 44 aa, Homo sapiens
  MAP TO AC007653.1; EXPRESSED IN HEART, SIGNAL = 0.87
  unsure 3
  unsure 5
MAXRXRKFPVGGTAYVKARRRITGPILGTDYDDASVDLKAEGVR

SEQ ID NO: 38306 - protein, 276 aa, Homo sapiens
  MAP TO AL022152.1; EXPRESSED IN HEART, SIGNAL = 1.1; EXPRESSED IN FETAL LIVER, SIGNAL =   1; SWISSPROT HIT: P43361, EVALUE 2.00e-11; EST_HUMAN HIT: BE727610.1, EVALUE 6.00e-30
SPESAPEGEDSLSPLQIPQSPLEGEDSLSSLHFPQSPPEWEDSLSPLHFPQFPPQGEDFQSSLQSPVSICSSSTSLSLPQSFPESPQSPPEGPAQSPLQRPVSSFFSYTLASLLQSSHESPQSPPEGPAQSPLQSPVSSFPSSTSSSLSQSSPVSSFPSSTSSSLSKSSPESPLQSPVISFSSSTSLSPFSEESSSPVDEYTSSSDTLLESDSLTDSESLIESEPLFTYTLDEKVDELARFLLLKYQVKQPITKAEMLTNVISRYTGYFPVIFRKA

SEQ ID NO: 38307 - protein, 24 aa, Homo sapiens
  MAP TO AF152365.1; EXPRESSED IN HEART, SIGNAL = 0.92
VWVFKKTRIKVMASCRPKQDLTLV

SEQ ID NO: 38308 - protein, 45 aa, Homo sapiens
  MAP TO AF152364.1; EXPRESSED IN FETAL LIVER, SIGNAL = 1.1; EXPRESSED IN HBL100, SIGNAL =   1; EXPRESSED IN HEART, SIGNAL = 1.1; EXPRESSED IN BONE MARROW, SIGNAL = 0.93
DLNEPATDTNPQEKELELLPIEANMVLGTENIQIIPLTLIMPNSA

SEQ ID NO: 38309 - protein, 34 aa, Homo sapiens
  MAP TO AC010085.1; EXPRESSED IN HEART, SIGNAL = 1.4; SWISSPROT HIT: P34413, EVALUE 3.00e-05; EST_HUMAN HIT: AV753940.1, EVALUE 2.00e-13
AHIGNLLTSKFFSYKDFDTLLYTCAAEFDFMEKE

SEQ ID NO: 38310 - protein, 45 aa, Homo sapiens
  MAP TO AC007773.1; EXPRESSED IN HEART, SIGNAL = 3.2; EST_HUMAN HIT: AI829496.1, EVALUE 3.00e-18; SWISSPROT HIT: P34413, EVALUE 9.20e-01
RLTLLAIFISTFLFSLTWQFNQFMMLMQALVLFTLDSLDMLPAVK

SEQ ID NO: 38311 - protein, 39 aa, Homo sapiens
  MAP TO AC009421.1; EXPRESSED IN FETAL LIVER, SIGNAL = 0.9; EXPRESSED IN BT474, SIGNAL =   1; EXPRESSED IN HEART, SIGNAL =  27; EST_HUMAN HIT: AU132029.1, EVALUE 1.90e+00; SWISSPROT HIT: Q08642, EVALUE 4.70e+00
  unsure 27
SLPYQPGVKGKGTLAGMDIEVSNPKQXSWRWCSQACGAK

SEQ ID NO: 38312 - protein, 35 aa, Homo sapiens
  MAP TO AC009223.1; EXPRESSED IN PLACENTA, SIGNAL = 0.62; EXPRESSED IN HEART, SIGNAL = 0.81; EST_HUMAN HIT: BF692200.1, EVALUE 7.50e+00
TSPSRKRTYKCPRLTGESHLHLFLLALGYILVLVT

SEQ ID NO: 38313 - protein, 42 aa, Homo sapiens
  MAP TO AC007563.1; EXPRESSED IN HEART, SIGNAL =   1
PPLLGCQSSFSLSPPQSSFSTESIPWYTAIWAFTLGGWTTSI

SEQ ID NO: 38314 - protein, 50 aa, Homo sapiens
  MAP TO AC007631.3; EXPRESSED IN HEART, SIGNAL = 0.97; EST_HUMAN HIT: BF381927.1, EVALUE 3.90e+00; SWISSPROT HIT: P48324, EVALUE 6.90e-01
PFMSDLALMCSSTHWLFIIMASFQNFLGCLKVLLFILAQMRKEVGEILFW

SEQ ID NO: 38315 - protein, 35 aa, Homo sapiens
  MAP TO AP000130.1; EXPRESSED IN HEART, SIGNAL = 0.8; SWISSPROT HIT: Q13009, EVALUE 4.00e-15
THQLDHSAHYLRLKFLIENKMQLYVPQPEEDIYEL

SEQ ID NO: 38316 - protein, 26 aa, Homo sapiens
  MAP TO AP000130.1; EXPRESSED IN HEART, SIGNAL = 0.8
LNRHFLSFFLFCPRHINWIILLITCA

SEQ ID NO: 38317 - protein, 34 aa, Homo sapiens
  MAP TO AP000207.1; EXPRESSED IN HEART, SIGNAL = 0.99
YKIQVPGHIITVSAEEARPSPGCESIGITSARGE

SEQ ID NO: 38318 - protein, 35 aa, Homo sapiens
  MAP TO AC008283.2; EXPRESSED IN HEART, SIGNAL = 0.84; EST_HUMAN HIT: AW051755.1, EVALUE 1.00e-14; SWISSPROT HIT: P54289, EVALUE 2.00e-15
WTSALDEVFKKNREEDPSLLWQVFGSATGLARYYP

SEQ ID NO: 38319 - protein, 198 aa, Homo sapiens
  MAP TO AL008628.1; EXPRESSED IN HEART, SIGNAL = 1.5; SWISSPROT HIT: Q02910, EVALUE 6.40e-02; EST_HUMAN HIT: BE161345.1, EVALUE 7.80e-02
PDGCRTYPIPFPQMAARCDPYYFTQIAAVHSPHFLSLMAAEHAPHSLLLMAAEHVSHFLSLMATEHALPFLPLMAVGHAPHFLPLMAAGHVPHFLPLMAAEHAPHSLPLMAAEHVPYFLSLMAAGHAPTFLPLMAAGHVPHFLPLMAAEHAPHSLLLMAAQHVPHFLPLMAAEHAPHSLLLMAAQHVPHFLPLMAAGH

SEQ ID NO: 38320 - protein, 66 aa, Homo sapiens
  MAP TO AC009301.1; EXPRESSED IN HEART, SIGNAL = 0.87; EST_HUMAN HIT: AW963078.1, EVALUE 5.60e-01; SWISSPROT HIT: Q9PB02, EVALUE 7.10e+00
WHHVLLVPHLPAPASQGSKHPLCSRLLHLRPGATTLQTFTQALICGIILLSPHSHFVVSSEISLAP

SEQ ID NO: 38321 - protein, 473 aa, Homo sapiens
  MAP TO AL023279.1; EXPRESSED IN HEART, SIGNAL = 0.96; SWISSPROT HIT: P43363, EVALUE 2.00e-48; EST_HUMAN HIT: BE895761.1, EVALUE 4.00e-71
QGEEFQSSLQSPVSICSSSTPSSLPQSFPESSQSPPEGPVQSPLHSPQSPPEGMHSQSPLQSPESAPEGEDSLSPLQIPQSPLEGEDSLSSLHFPQSPPEWEDSLSPLHFPQFPPQGEDFQSSLQSPVSICSSSTSLSLPQSFPESPQSPPEGPAQSPLQRPVSSFFSYTLASLLQSSHESPQSPPEGPAQSPLQSPVSSFPSSTSSSLSQSSPVSSFPSSTSSSLSKSSPESPLQSPVISFSSSTSLSPFSEESSSPVDEYTSSSDTLLESDSLTDSESLIESEPLFTYTLDEKVDELARFLLLKYQVKQPITKAEMLTNVISRYTGYFPVIFRKAREFIEILFGISLREVDPDDSYVFVNTLDLTSEGCLSDEQGMSQNRLLILILSIIFIKGTYASEEVIWDVLSGIGVRAGREHFAFGEPRELLTKVWVQEHYLEYREVPNSSPPRYEFLWGPRAHSEVIKRKVVEFLA

SEQ ID NO: 38322 - protein, 85 aa, Homo sapiens
  MAP TO AC008417.2; EXPRESSED IN HEART, SIGNAL = 1.6; EST_HUMAN HIT: AA332304.1, EVALUE 9.00e-42; SWISSPROT HIT: Q16706, EVALUE 2.00e-42
GQLSMLQEKIDHLERLLAENNEIISNIRDSVINLSESVEDGPKSSQSNFSQGAGSHLLPSQLSLSVDTADCLFASQSGSHNSDVQ

SEQ ID NO: 38323 - protein, 59 aa, Homo sapiens
  MAP TO AC010856.2; EXPRESSED IN LUNG, SIGNAL = 1.4; EXPRESSED IN BRAIN, SIGNAL = 1.4; EXPRESSED IN HEART, SIGNAL = 1.1; EST_HUMAN HIT: AI056615.1, EVALUE 5.00e-30; SWISSPROT HIT: Q14289, EVALUE 6.00e-31
EIITSILLSGRIGPNIRLAECYGLRLKHMKSDEIHWLHPQMTVGEVQDKYECLHVEAEW

SEQ ID NO: 38324 - protein, 47 aa, Homo sapiens
  MAP TO AC009232.1; EXPRESSED IN HEART, SIGNAL =  13; EXPRESSED IN BONE MARROW, SIGNAL = 0.93; SWISSPROT HIT: O14357, EVALUE 7.90e+00; EST_HUMAN HIT: AA994677.1, EVALUE 5.20e-01
DTSRTGATSCCPRAPCVPLVKRSWWMVSAWRHHTVHCVRSKPCLFVG

SEQ ID NO: 38325 - protein, 1040 aa, Homo sapiens
  MAP TO AC005859.1; EXPRESSED IN HEART, SIGNAL = 1.1; EXPRESSED IN PLACENTA, SIGNAL = 0.96; EXPRESSED IN LUNG, SIGNAL = 1.3; EST_HUMAN HIT: AW401674.1, EVALUE 2.00e-16; EST_HUMAN HIT: AW401674.1, EVALUE 2.00e-16; SWISSPROT HIT: O02833, EVALUE 9.00e-22
ENMFLQSSMLTCIFLLISGSCELCAEENFSRSYPCDEKKQNDSVIAECSNRRLQEVPQTVGKYVTELDLSDNFITHITNESFQGLQNLTKINLNHNPNVQHQNGNPGIQSNGLNITDGAFLNLKNLRELLLEDNQLPQIPSGLPESLTELSLIQNNIYNITKEGISRLINLKNLYLAWNCYFNKVCEKTNIEDGVFETLTNLELLSLSFNSLSHVPPKLPSSLRKLFLSNTQIKYISEEDFKGLINLTLLDLSGNCPRCFNAPFPCVPCDGGASINIDRFAFQNLTQLRYLNLSSTSLRKINAAWFKNMPHLKVLDLEFNYLVGEIASGAFLTMLPRLEILDLSFNYIKGSYPQHINISRNFSKLLSLRALHLRGYVFQELREDDFQPLMQLPNLSTINLGINFIKQIDFKLFQNFSNLEIIYLSENRISPLVKDTRQSYANSSSFQRHIRKRRSTDFEFDPHSNFYHFTRPLIKPQCAAYGKALDLSLNSIFFIGPNQFENLPDIACLNLSANSNAQVLSGTEFSAIPHVKYLDLTNNRLDFDNASALTELSDLEVLDLSYNSHYFRIAGVTHHLEFIQNFTNLKVLNLSHNNIYTLTDKYNLESKSLVELVFSGNRLDILWNDDDNRYISIFKGLKNLTRLDLSLNRLKHIPNEAFLNLPASLTELHINDNMLKFFNWTLLQQFPRLELLDLRGNKLLFLTDSLSDFTSSLRTLLLSHNRISHLPSGFLSEVSSLKHLDLSSNLLKTINKSALETKTTTKLSMLELHGNPFECTCDIGDFRRWMDEHLNVKIPRLVDVICASPGDQRGKSIVSLELTTCVSDVTAVILFFFTFFITTMVMLAALAHHLFYWDVWFIYNVCLAKVKGYRSLSTSQTFYDAYISYDTKDASVTDWVINELRYHLEESRDKNVLLCLEERDWDPGLAIIDNLMQSINQSKKTVFVLTKKYAKSWNFKTAFYLALQRLMDENMDVIIFILLEPVLQHSQYLRLRQRICKSSILQWPDNPKAEGLFWQTLRNVVLTENDSRYNNMYVDSIKQY

SEQ ID NO: 38326 - protein, 42 aa, Homo sapiens
  MAP TO AC005859.1; EXPRESSED IN HEART, SIGNAL = 1.1; EXPRESSED IN PLACENTA, SIGNAL = 0.96; EXPRESSED IN LUNG, SIGNAL = 1.3
SYAPKKIFLEAILVMRKSKMTQLLQSAAIVDYRKFPKRWANM

SEQ ID NO: 38327 - protein, 71 aa, Homo sapiens; identical to SEQ ID NO: 35175
  MAP TO AL121675.8; EXPRESSED IN HEART, SIGNAL = 0.95; SWISSPROT HIT: Q08163, EVALUE 5.70e-02; EST_HUMAN HIT: BE877915.1, EVALUE 6.00e-03

SEQ ID NO: 38328 - protein, 19 aa, Homo sapiens
  MAP TO AC009576.2; EXPRESSED IN HEART, SIGNAL = 1.3
HLHHNGLHHYHQEKNLLQT

SEQ ID NO: 38329 - protein, 145 aa, Homo sapiens
  MAP TO AC009651.2; EXPRESSED IN BRAIN, SIGNAL = 0.9; EXPRESSED IN HEART, SIGNAL = 0.89; EST_HUMAN HIT: AI190903.1, EVALUE 1.00e-33; SWISSPROT HIT: Q90501, EVALUE 2.00e-02
  unsure 144
MNLPVVLQDVKTAQVELFSQMTDIVHMIPKVQEKTDLYQKQMEVLETRMNVNEDKQCTTTKDILSMKEDIKALKKKVTELEIQNSCSTIHCLEILEGERGKEITELLYKLIQPATLKNTLASTDMEISSAEPEKVPSYPKSTDXS

SEQ ID NO: 38330 - protein, 37 aa, Homo sapiens
  MAP TO AF107885.2; EXPRESSED IN HEART, SIGNAL = 0.86; SWISSPROT HIT: P37088, EVALUE 8.10e+00; EST_HUMAN HIT: AA827348.1, EVALUE 7.50e-01
TLPRIRAFCSGIGVEQQASTIGKSPPAGATVQPLSLA

SEQ ID NO: 38331 - protein, 32 aa, Homo sapiens
  MAP TO AF107885.2; EXPRESSED IN HEART, SIGNAL = 0.86
PPERAAARWPLLEGTFLWWKPAAPRQSRCRML

SEQ ID NO: 38332 - protein, 67 aa, Homo sapiens
  MAP TO AC010740.2; EXPRESSED IN HEART, SIGNAL = 0.94; SWISSPROT HIT: P98157, EVALUE 9.00e-28; EST_HUMAN HIT: AI750586.1, EVALUE 5.00e-13
VSAIEVVVEHGLATPEGLTVDWIAGNIYWIDSNLDQIEVAKLDGSLRTTLIAGAMEHPRAIALDPRY

SEQ ID NO: 38333 - protein, 49 aa, Homo sapiens
  MAP TO AF176315.1; EXPRESSED IN HEART, SIGNAL = 0.9; EST_HUMAN HIT: AA577015.1, EVALUE 3.00e-01
MTRFELDDIHLHVILNLDPKRCPFLWLSFRFLVVDSLSPSGCGAGSGSQ

SEQ ID NO: 38334 - protein, 33 aa, Homo sapiens
  MAP TO AF176315.1; EXPRESSED IN HEART, SIGNAL = 0.9
GFQSQLHIHLEKENPQPKTEMIATRMDTFLDLN

SEQ ID NO: 38335 - protein, 30 aa, Homo sapiens
  MAP TO AC010974.3; EXPRESSED IN HEART, SIGNAL = 1.5; EXPRESSED IN LUNG, SIGNAL =   1
RLLDLSSGDLLSEVERNRSLTQSRTDAEVH

SEQ ID NO: 38336 - protein, 63 aa, Homo sapiens
  MAP TO AC010974.3; EXPRESSED IN HEART, SIGNAL = 1.5; EXPRESSED IN LUNG, SIGNAL =   1; EST_HUMAN HIT: AA378850.1, EVALUE 1.70e+00; SWISSPROT HIT: Q10441, EVALUE 2.90e-01
ENTRKEGIFICLTMLQGCTLWFACDIIFDGRKITTKTSVLKATGKLTCTSASVRDCVRLRFLS

SEQ ID NO: 38337 - protein, 19 aa, Homo sapiens
  MAP TO AC007163.2; EXPRESSED IN HEART, SIGNAL = 1.1
HKSGEDCVPRRGAYNCEHS

SEQ ID NO: 38338 - protein, 48 aa, Homo sapiens
  MAP TO AC008496.2; EXPRESSED IN HEART, SIGNAL = 2.9; SWISSPROT HIT: P22648, EVALUE 2.00e+00; EST_HUMAN HIT: C05212.1, EVALUE 2.00e-22
LVEEYRLTVKESYCIFEDLEPDRCYQVWVMAVNFTGCSLPSERAIFRT

SEQ ID NO: 38339 - protein, 28 aa, Homo sapiens
  MAP TO AC006148.3; EXPRESSED IN HEART, SIGNAL = 0.89
SGKAQGYLPAHALLLMLLHYRLQAMCVN

SEQ ID NO: 38340 - protein, 54 aa, Homo sapiens
  MAP TO AC008844.2; EXPRESSED IN HEART, SIGNAL = 7.2; EST_HUMAN HIT: BE892266.1, EVALUE 5.60e-01
RYAVGYSLEVLDSGSEMQLPVRHMMTVCCVASNFWISCFRIHHVYKMPICVSCF

SEQ ID NO: 38341 - protein, 23 aa, Homo sapiens
  MAP TO AC008844.2; EXPRESSED IN HEART, SIGNAL = 7.2
DMQWDTLLRCWTAAVKCSSQSGT

SEQ ID NO: 38342 - protein, 65 aa, Homo sapiens
  MAP TO J03071.1; EXPRESSED IN PLACENTA, SIGNAL = 1.1e+02; EXPRESSED IN HEART, SIGNAL = 1.7; EST_HUMAN HIT: T29469.1, EVALUE 2.00e-33; SWISSPROT HIT: P01242, EVALUE 3.00e-34
RLEDGSPRTGQIFNQSYSKFDTKSHNDDALLKNYGLLYCFRKDMDKVETFLRIVQCRSVEGSCGF

SEQ ID NO: 38343 - protein, 41 aa, Homo sapiens
  MAP TO AC009891.1; EXPRESSED IN HEART, SIGNAL = 1.4; SWISSPROT HIT: P52705, EVALUE 6.10e+00
YIKNEEVYSASGGDKYNEENKTEKLDRKCQAMGDAFDEWSE

SEQ ID NO: 38344 - protein, 101 aa, Homo sapiens
  MAP TO AC010680.3; EXPRESSED IN HEART, SIGNAL = 6.7; EST_HUMAN HIT: F00055.1, EVALUE 2.00e-43; SWISSPROT HIT: P52179, EVALUE 2.00e-14
PPGPPAKIRIADSTKSSITLGWSKPVYDGGSAVTGYVVEIRQGEEEEWTTVSTKGEVRTTEYVVSNLKPGVNYYFRVSAVNCAGQGEPIEMNEPVQAKDIL

SEQ ID NO: 38345 - protein, 39 aa, Homo sapiens
  MAP TO AC011082.1; EXPRESSED IN HEART, SIGNAL = 0.84
NQVTMLTAMKVIHELNKMDFPLSRSLEPLFEHVHKKDQP

SEQ ID NO: 38346 - protein, 36 aa, Homo sapiens
  MAP TO AC011145.1; EXPRESSED IN HEART, SIGNAL = 1.4; EST_HUMAN HIT: AA485218.1, EVALUE 3.00e-04
KTAPGRSSPSWGIQKKALLSWRTTPCLLLPLKIFQW

SEQ ID NO: 38347 - protein, 50 aa, Homo sapiens
  MAP TO AF064858.1; EXPRESSED IN HEART, SIGNAL = 0.97; EST_HUMAN HIT: BF204237.1, EVALUE 3.40e-01
LSGEGKVSRQSEQCVCRPRGEPQQLRWLEKFRRVVEKSKRRWGGLQRGLE

SEQ ID NO: 38348 - protein, 62 aa, Homo sapiens
  MAP TO AC007312.1; EXPRESSED IN HEART, SIGNAL =   1; SWISSPROT HIT: O32922, EVALUE 3.40e+00
LLPMIFIGQTQLEARGKGILGCSGQLLAWSRLETDGKFAGQTENIQFTDAVLRKYFLNVKAS

SEQ ID NO: 38349 - protein, 59 aa, Homo sapiens
  MAP TO AC007312.1; EXPRESSED IN HEART, SIGNAL =   1; EST_HUMAN HIT: AA204956.1, EVALUE 6.10e-01; SWISSPROT HIT: O84250, EVALUE 3.90e-01
SLANDFHWPNSTGSQRERDPWMQWSASGMEQIGNRWEVCRANRKYPVHRCCTEKILSQC

SEQ ID NO: 38350 - protein, 131 aa, Homo sapiens
  MAP TO AC010680.3; EXPRESSED IN HEART, SIGNAL =   4; EST_HUMAN HIT: BF380897.1, EVALUE 6.00e-13; SWISSPROT HIT: Q90688, EVALUE 1.00e-15
EDLRIVEPLKDIETMEKKSVTFWCKVNRLNVTLKWTKNGEEVPFDNRVSYRVDKYKHMLTIKDCGFPDEGEYIVTAGQDKSVAELLIIEAPTEFVEHLEDQTVTEFDDAVFSCQLSREKANVKWYRNGREI

SEQ ID NO: 38351 - protein, 18 aa, Homo sapiens
  MAP TO AC010680.3; EXPRESSED IN HEART, SIGNAL =   4
LLKILKQWRRNLSHSGAR

SEQ ID NO: 38352 - protein, 136 aa, Homo sapiens
  MAP TO AC010083.2; EXPRESSED IN HEART, SIGNAL = 0.96; SWISSPROT HIT: Q12934, EVALUE 2.00e-50; EST_HUMAN HIT: BE895400.1, EVALUE 1.00e-41
EKEDGQPIDQQPIDKEIEPDGAELEGPEEKREGEERDEESRRPCAMVTPGAEEPSIPEPPKPAADQDGAEVLGTRSRSLPEKGPPKALAYKTVEVVESIEKISTESIQTYEETAVIVETMIGKTKSDKKKSGEKSS

SEQ ID NO: 38353 - protein, 57 aa, Homo sapiens
  MAP TO AL049553.15; EXPRESSED IN HEART, SIGNAL =   1; EXPRESSED IN HBL100, SIGNAL =   1
MSCEHHESVTFRPWHLIPGESETFQRSLLPSVTASLSASALSDCHEHSLLLTHDEHG

SEQ ID NO: 38354 - protein, 46 aa, Homo sapiens
  MAP TO AC012352.1; EXPRESSED IN HEART, SIGNAL = 0.95; SWISSPROT HIT: Q08365, EVALUE 1.80e-01; EST_HUMAN HIT: AA167461.1, EVALUE 9.00e-03
LLQSTVECDDIFKVLKENTLSIKNMIPTKWSFKYKGKRKTSPEEQK

SEQ ID NO: 38355 - protein, 27 aa, Homo sapiens
  MAP TO AB020869.1; EXPRESSED IN HEART, SIGNAL = 2.2
FVIDKPPPSRNHKFILTEPFFALNQRS

SEQ ID NO: 38356 - protein, 40 aa, Homo sapiens
  MAP TO AC007282.2; EXPRESSED IN LUNG, SIGNAL = 3.1; EXPRESSED IN FETAL LIVER, SIGNAL = 2.2; EXPRESSED IN PLACENTA, SIGNAL = 0.66; EXPRESSED IN BRAIN, SIGNAL = 4.3; EXPRESSED IN HEART, SIGNAL = 2.5; EXPRESSED IN ADULT LIVER, SIGNAL = 1.1; EXPRESSED IN HBL100, SIGNAL = 1.1; EXPRESSED IN BONE MARROW, SIGNAL = 2.4; EXPRESSED IN HELA, SIGNAL = 2.7; EST_HUMAN HIT: AW965417.1, EVALUE 1.00e-16; EST_HUMAN HIT: AA334324.1, EVALUE 8.00e-16; SWISSPROT HIT: Q05512, EVALUE 2.70e+00
RGFDNLTSVHLARHTPTGTLVTIKITNLENCNEERLKALQ

SEQ ID NO: 38357 - protein, 65 aa, Homo sapiens
  MAP TO AC006548.19; EXPRESSED IN LUNG, SIGNAL =   1; EXPRESSED IN PLACENTA, SIGNAL = 0.94; EXPRESSED IN BT474, SIGNAL = 1.3; EXPRESSED IN HBL100, SIGNAL = 0.69; EXPRESSED IN BRAIN, SIGNAL = 1.7; EXPRESSED IN HELA, SIGNAL =   1; EXPRESSED IN FETAL LIVER, SIGNAL = 0.63; EXPRESSED IN HEART, SIGNAL = 1.6; EST_HUMAN HIT: F07702.1, EVALUE 2.00e-28; SWISSPROT HIT: P17664, EVALUE 4.70e+00
SRSLMPCISWTCFSSINPLVKVPVESGQCEQAYTFLMPLCLIRLCQHSLWDELKGLSHWRQGCFF

SEQ ID NO: 38358 - protein, 73 aa, Homo sapiens
  MAP TO AC004231.1; EXPRESSED IN PLACENTA, SIGNAL = 2.2; EXPRESSED IN LUNG, SIGNAL = 4.7; EXPRESSED IN HELA, SIGNAL = 2.2; EXPRESSED IN FETAL LIVER, SIGNAL = 2.3; EXPRESSED IN ADULT LIVER, SIGNAL = 2.3; EXPRESSED IN HEART, SIGNAL = 2.3; EXPRESSED IN BRAIN, SIGNAL = 2.5; EXPRESSED IN BONE MARROW, SIGNAL =   2; SWISSPROT HIT: Q99456, EVALUE 7.00e-35; EST_HUMAN HIT: AA635956.1, EVALUE 7.00e-17
KKSLEDSLAEAEGDYCAQLSQVQQLISNLEAQLLQVRADAERQNVDHQRLLNVKARLELEIETYRRLLDGEAQ

SEQ ID NO: 38359 - protein, 54 aa, Homo sapiens
  MAP TO AC004231.1; EXPRESSED IN PLACENTA, SIGNAL = 2.2; EXPRESSED IN LUNG, SIGNAL = 4.7; EXPRESSED IN HELA, SIGNAL = 2.2; EXPRESSED IN FETAL LIVER, SIGNAL = 2.3; EXPRESSED IN ADULT LIVER, SIGNAL = 2.3; EXPRESSED IN HEART, SIGNAL = 2.3; EXPRESSED IN BRAIN, SIGNAL = 2.5; EXPRESSED IN BONE MARROW, SIGNAL =   2
LGRSRGRLLRAAVPGAAAHQQPGGTAAPGARGRRAPERGPPAAAECQGPPGAGD

SEQ ID NO: 38360 - protein, 84 aa, Homo sapiens
  MAP TO AC002542.1; EXPRESSED IN PLACENTA, SIGNAL =   2; EXPRESSED IN HEART, SIGNAL = 2.1; EXPRESSED IN ADULT LIVER, SIGNAL = 1.8; EXPRESSED IN LUNG, SIGNAL = 2.3; EXPRESSED IN FETAL LIVER, SIGNAL = 1.8; EXPRESSED IN BRAIN, SIGNAL = 2.2; EXPRESSED IN BONE MARROW, SIGNAL = 2.1; EXPRESSED IN HELA, SIGNAL = 2.1; SWISSPROT HIT: P57247, EVALUE 6.30e-01; EST_HUMAN HIT: AA779964.1, EVALUE 3.00e-20
ASNSFPSSGVSATIKTSPESAVYSSPDISLLVFSTAFHEVSVYPKKELPFFILFTAGLCSFTAMLALLTHQFPELMGVFAKAVS

SEQ ID NO: 38361 - protein, 55 aa, Homo sapiens
  MAP TO AC005571.1; EXPRESSED IN BRAIN, SIGNAL = 2.2; EXPRESSED IN PLACENTA, SIGNAL = 1.9; EXPRESSED IN LUNG, SIGNAL = 2.3; EXPRESSED IN HEART, SIGNAL =   2; EXPRESSED IN BONE MARROW, SIGNAL = 2.5; EXPRESSED IN ADULT LIVER, SIGNAL = 2.1; EXPRESSED IN HELA, SIGNAL = 2.1; EXPRESSED IN FETAL LIVER, SIGNAL =   2; EST_HUMAN HIT: AW028174.1, EVALUE 9.60e-01; SWISSPROT HIT: Q27969, EVALUE 6.10e+00
KGNPARSMGIREILLYKVTAKPRLEGHNFFTCGASSKDWPYLLPSCWPQAPCILW

SEQ ID NO: 38362 - protein, 36 aa, Homo sapiens
  MAP TO AC003092.1; EXPRESSED IN BRAIN, SIGNAL = 1.6; EXPRESSED IN ADULT LIVER, SIGNAL = 2.5; EXPRESSED IN HEART, SIGNAL = 1.9; EXPRESSED IN PLACENTA, SIGNAL = 1.8; EXPRESSED IN LUNG, SIGNAL = 1.6; EXPRESSED IN FETAL LIVER, SIGNAL = 2.1; EXPRESSED IN BONE MARROW, SIGNAL = 1.8
RPYAEEEEEEKERKTKKRKRKRRRRRKKRRRKKRRR

SEQ ID NO: 38363 - protein, 31 aa, Homo sapiens
  MAP TO AC003092.1; EXPRESSED IN BRAIN, SIGNAL = 1.6; EXPRESSED IN ADULT LIVER, SIGNAL = 2.5; EXPRESSED IN HEART, SIGNAL = 1.9; EXPRESSED IN PLACENTA, SIGNAL = 1.8; EXPRESSED IN LUNG, SIGNAL = 1.6; EXPRESSED IN FETAL LIVER, SIGNAL = 2.1; EXPRESSED IN BONE MARROW, SIGNAL = 1.8
RRRRGRGRGGEGGRREGGRRGGGVRRRRWRR

SEQ ID NO: 38364 - protein, 131 aa, Homo sapiens
  MAP TO AC005224.1; EXPRESSED IN ADULT LIVER, SIGNAL = 4.9; EXPRESSED IN HELA, SIGNAL = 5.6; EXPRESSED IN HEART, SIGNAL = 4.9; EXPRESSED IN BRAIN, SIGNAL =   6; EXPRESSED IN BONE MARROW, SIGNAL = 5.6; EXPRESSED IN PLACENTA, SIGNAL = 5.5; EXPRESSED IN LUNG, SIGNAL = 5.9; EXPRESSED IN FETAL LIVER, SIGNAL = 4.9; EST_HUMAN HIT: AA446206.1, EVALUE 5.00e-10; SWISSPROT HIT: P50469, EVALUE 3.40e+00
PGPCAEVRALPAPAAEPEPAWEEAPPERALELEGAPAKDQTNEELPEITARTVATSPNPGTESVAGERSGREGVTSTAPASSSHAAPSPGHGGKHAGREQGIWPGLLYLAGERLLSFTRTTVLLLQVRLFS

SEQ ID NO: 38365 - protein, 92 aa, Homo sapiens
  MAP TO AC003678.1; EXPRESSED IN PLACENTA, SIGNAL = 3.4; EXPRESSED IN LUNG, SIGNAL = 4.2; EXPRESSED IN HEART, SIGNAL = 3.2; EXPRESSED IN BRAIN, SIGNAL =   4; EXPRESSED IN BONE MARROW, SIGNAL = 3.4; EXPRESSED IN ADULT LIVER, SIGNAL = 3.6; EXPRESSED IN HELA, SIGNAL = 3.7; EXPRESSED IN FETAL LIVER, SIGNAL = 3.6; SWISSPROT HIT: P23477, EVALUE 2.80e+00; EST_HUMAN HIT: AA884662.1, EVALUE 2.40e-02
YLPKRSESICCYAACTQKLTSALLVNSPKLETTLMSTNGERDEWRYMYIYMCIRISLQYKRSKPLLTQCGLPDHDCEGRRRKRVCSVQFHFY

SEQ ID NO: 38366 - protein, 41 aa, Homo sapiens
  MAP TO AC005592.1; EXPRESSED IN PLACENTA, SIGNAL =   2; EXPRESSED IN LUNG, SIGNAL = 2.8; EXPRESSED IN HELA, SIGNAL = 2.5; EXPRESSED IN HEART, SIGNAL = 3.5; EXPRESSED IN BONE MARROW, SIGNAL = 2.1; EXPRESSED IN FETAL LIVER, SIGNAL = 2.1; EXPRESSED IN BRAIN, SIGNAL = 2.4; EXPRESSED IN ADULT LIVER, SIGNAL = 2.4
DVHRGLLSAECPGRFLGGDGSFECKDQGGGTGQDLGVLGRM

SEQ ID NO: 38367 - protein, 37 aa, Homo sapiens
  MAP TO AC004925.1; EXPRESSED IN LUNG, SIGNAL = 2.4; EXPRESSED IN BRAIN, SIGNAL = 2.4; EXPRESSED IN PLACENTA, SIGNAL = 2.3; EXPRESSED IN HEART, SIGNAL = 2.1; EXPRESSED IN FETAL LIVER, SIGNAL = 2.1; EXPRESSED IN BONE MARROW, SIGNAL = 2.4; EXPRESSED IN ADULT LIVER, SIGNAL = 2.4; EXPRESSED IN HELA, SIGNAL = 2.4
SDSESTDEHRRVNKLGEDSLHRSVHCQPFYQYSATSQ

SEQ ID NO: 38368 - protein, 64 aa, Homo sapiens
  MAP TO AC004084.1; EXPRESSED IN PLACENTA, SIGNAL = 3.8; EXPRESSED IN LUNG, SIGNAL = 3.1; EXPRESSED IN FETAL LIVER, SIGNAL = 3.7; EXPRESSED IN BONE MARROW, SIGNAL = 3.5; EXPRESSED IN HELA, SIGNAL = 3.3; EXPRESSED IN ADULT LIVER, SIGNAL = 3.7; EXPRESSED IN HEART, SIGNAL = 3.1; EXPRESSED IN BRAIN, SIGNAL = 3.7; EST_HUMAN HIT: BE207240.1, EVALUE 1.00e-24; SWISSPROT HIT: P06307, EVALUE 2.60e+00
CSGLHRPQTEAEVLEQSAQTLRAHLGALLSALSRSVRACPAVVRATFRQLFRRVRERFPGAQHE

SEQ ID NO: 38369 - protein, 22 aa, Homo sapiens
  MAP TO AC004084.1; EXPRESSED IN PLACENTA, SIGNAL = 3.8; EXPRESSED IN LUNG, SIGNAL = 3.1; EXPRESSED IN FETAL LIVER, SIGNAL = 3.7; EXPRESSED IN BONE MARROW, SIGNAL = 3.5; EXPRESSED IN HELA, SIGNAL = 3.3; EXPRESSED IN ADULT LIVER, SIGNAL = 3.7; EXPRESSED IN HEART, SIGNAL = 3.1; EXPRESSED IN BRAIN, SIGNAL = 3.7
RRPRPRCWSRARRRCAPTWGPC

SEQ ID NO: 38370 - protein, 89 aa, Homo sapiens
  MAP TO AC004904.1; EXPRESSED IN PLACENTA, SIGNAL = 7.5; EXPRESSED IN HEART, SIGNAL = 5.6; EXPRESSED IN FETAL LIVER, SIGNAL = 4.9; EXPRESSED IN BRAIN, SIGNAL = 8.1; EXPRESSED IN BONE MARROW, SIGNAL =   5; EXPRESSED IN LUNG, SIGNAL = 6.3; EXPRESSED IN HELA, SIGNAL = 6.3; EXPRESSED IN ADULT LIVER, SIGNAL = 5.4; SWISSPROT HIT: P50997, EVALUE 5.00e-36; EST_HUMAN HIT: AU124927.1, EVALUE 1.00e-34
TARGIVVYTGDRTVMGRIATLASGLEGGQTPIAAEIEHFIHIITGVAVFLGVSFFILSLILEYTWLEAVIFLIGIIVANVPEGLLATVT

SEQ ID NO: 38371 - protein, 123 aa, Homo sapiens
  MAP TO AC005479.2; EXPRESSED IN LUNG, SIGNAL =   3; EXPRESSED IN HELA, SIGNAL = 2.2; EXPRESSED IN HEART, SIGNAL = 2.3; EXPRESSED IN FETAL LIVER, SIGNAL = 2.1; EXPRESSED IN BRAIN, SIGNAL = 2.3; EXPRESSED IN PLACENTA, SIGNAL = 2.7; EXPRESSED IN BONE MARROW, SIGNAL = 2.3; EXPRESSED IN ADULT LIVER, SIGNAL = 2.6; SWISSPROT HIT: P39688, EVALUE 1.30e-01; EST_HUMAN HIT: BE965213.2, EVALUE 3.40e-01
VYAQLCNVARIEAEREAGVHFRPGYEYGPGPDDLHYSIYGPDGAPFYNYLGPEDTVPEPAFPNTAGHSADRTPILESPLQPSELQPHYVASHPGLCCCKTGEEVGTKAVSLPSPPPASHIASR

SEQ ID NO: 38372 - protein, 108 aa, Homo sapiens
  MAP TO AC005479.2; EXPRESSED IN LUNG, SIGNAL =   3; EXPRESSED IN HELA, SIGNAL = 2.2; EXPRESSED IN HEART, SIGNAL = 2.3; EXPRESSED IN FETAL LIVER, SIGNAL = 2.1; EXPRESSED IN BRAIN, SIGNAL = 2.3; EXPRESSED IN PLACENTA, SIGNAL = 2.7; EXPRESSED IN BONE MARROW, SIGNAL = 2.3; EXPRESSED IN ADULT LIVER, SIGNAL = 2.6; SWISSPROT HIT: Q02817, EVALUE 1.10e+00; EST_HUMAN HIT: AU139483.1, EVALUE 4.70e-02
SMLSCATWLALRQSGRPGSTSGQAMSMAPGPMTCTTASMAQMGPPSTTTWAPRTPSLSLPSPTQPVTQRTAHPSLSLLCSPQNSSPTTWPAIQVCVAAKLGKRWAPKL

SEQ ID NO: 38373 - protein, 78 aa, Homo sapiens
  MAP TO AC005209.1; EXPRESSED IN ADULT LIVER, SIGNAL = 2.7; EXPRESSED IN PLACENTA, SIGNAL =   3; EXPRESSED IN HELA, SIGNAL =   3; EXPRESSED IN HEART, SIGNAL = 2.8; EXPRESSED IN FETAL LIVER, SIGNAL = 2.7; EXPRESSED IN BRAIN, SIGNAL = 3.3; EXPRESSED IN LUNG, SIGNAL = 3.4; EXPRESSED IN BONE MARROW, SIGNAL = 3.3; SWISSPROT HIT: P39057, EVALUE 3.00e-23; EST_HUMAN HIT: AU140758.1, EVALUE 3.00e-04
PTVKQSISKFMAFVHTSVNQTSQSYLSNEQRYNYTTPKSFLEFIRLYQSLLHRHRKELKCKTERLENGLLKLHSTSAQ

SEQ ID NO: 38374 - protein, 17 aa, Homo sapiens
  MAP TO AC005209.1; EXPRESSED IN ADULT LIVER, SIGNAL = 2.7; EXPRESSED IN PLACENTA, SIGNAL =   3; EXPRESSED IN HELA, SIGNAL =   3; EXPRESSED IN HEART, SIGNAL = 2.8; EXPRESSED IN FETAL LIVER, SIGNAL = 2.7; EXPRESSED IN BRAIN, SIGNAL = 3.3; EXPRESSED IN LUNG, SIGNAL = 3.4; EXPRESSED IN BONE MARROW, SIGNAL = 3.3
NSWPLSTQVSTKHPSLI

SEQ ID NO: 38375 - protein, 43 aa, Homo sapiens
  MAP TO AC004552.1; EXPRESSED IN PLACENTA, SIGNAL = 1.4; EXPRESSED IN LUNG, SIGNAL = 1.8; EXPRESSED IN FETAL LIVER, SIGNAL = 1.3; EXPRESSED IN ADULT LIVER, SIGNAL = 1.6; EXPRESSED IN HEART, SIGNAL = 1.5; EXPRESSED IN BRAIN, SIGNAL = 1.5; EXPRESSED IN BONE MARROW, SIGNAL = 1.6; EST_HUMAN HIT: BE748801.1, EVALUE 9.20e+00
VLAQMTIGHEDLKKLQPTTCNQHHKSHSTCVPQTQVMPDALSP

SEQ ID NO: 38376 - protein, 36 aa, Homo sapiens
  MAP TO AC005005.1; EXPRESSED IN PLACENTA, SIGNAL = 2.9; EXPRESSED IN LUNG, SIGNAL = 2.9; EXPRESSED IN HELA, SIGNAL = 2.9; EXPRESSED IN FETAL LIVER, SIGNAL = 2.7; EXPRESSED IN ADULT LIVER, SIGNAL = 2.4; EXPRESSED IN HEART, SIGNAL = 2.9; EXPRESSED IN BRAIN, SIGNAL = 3.1; EXPRESSED IN BONE MARROW, SIGNAL = 2.8
AGLGLGAIDSLWESNSQDRMKRVGGQGALKEDQEAQ

SEQ ID NO: 38377 - protein, 19 aa, Homo sapiens
  MAP TO AC005005.1; EXPRESSED IN PLACENTA, SIGNAL = 2.9; EXPRESSED IN LUNG, SIGNAL = 2.9; EXPRESSED IN HELA, SIGNAL = 2.9; EXPRESSED IN FETAL LIVER, SIGNAL = 2.7; EXPRESSED IN ADULT LIVER, SIGNAL = 2.4; EXPRESSED IN HEART, SIGNAL = 2.9; EXPRESSED IN BRAIN, SIGNAL = 3.1; EXPRESSED IN BONE MARROW, SIGNAL = 2.8
LAWALGPLTVSGSLTHKIE

SEQ ID NO: 38378 - protein, 38 aa, Homo sapiens
  MAP TO AC005630.1; EXPRESSED IN PLACENTA, SIGNAL = 8.2; EXPRESSED IN HEART, SIGNAL = 7.5; EXPRESSED IN BONE MARROW, SIGNAL = 7.9; EXPRESSED IN ADULT LIVER, SIGNAL = 8.7; EXPRESSED IN LUNG, SIGNAL = 9.7; EXPRESSED IN HELA, SIGNAL = 8.6; EXPRESSED IN FETAL LIVER, SIGNAL = 8.3; EXPRESSED IN BRAIN, SIGNAL = 7.5; EST_HUMAN HIT: AW162304.1, EVALUE 3.00e-05
GLPAGGAEEPRGSESAAAARPVAGAPVPQGAWMCGQAG

SEQ ID NO: 38379 - protein, 78 aa, Homo sapiens
  MAP TO AC001237.1; EXPRESSED IN PLACENTA, SIGNAL = 1.3; EXPRESSED IN LUNG, SIGNAL = 1.4; EXPRESSED IN FETAL LIVER, SIGNAL = 1.4; EXPRESSED IN BRAIN, SIGNAL = 1.1; EXPRESSED IN BONE MARROW, SIGNAL = 1.3; EXPRESSED IN ADULT LIVER, SIGNAL = 1.4; EXPRESSED IN HEART, SIGNAL = 1.4; EST_HUMAN HIT: AA299517.1, EVALUE 2.20e-02; SWISSPROT HIT: Q9ZCN1, EVALUE 2.00e+00
GRNLMQWVPSLQLLLQPHSLESLHCLYETRNKTFLTQVMAHFEEMGMCVETDMELLVCTFCIKFSRHVKKLQLIEGRQ

SEQ ID NO: 38380 - protein, 25 aa, Homo sapiens
  MAP TO AC004451.1; EXPRESSED IN PLACENTA, SIGNAL = 5.7; EXPRESSED IN LUNG, SIGNAL = 7.1; EXPRESSED IN HEART, SIGNAL = 5.5; EXPRESSED IN FETAL LIVER, SIGNAL = 5.6; EXPRESSED IN BONE MARROW, SIGNAL = 5.6; EXPRESSED IN ADULT LIVER, SIGNAL = 5.5; EXPRESSED IN HELA, SIGNAL = 6.1; EXPRESSED IN BRAIN, SIGNAL = 6.3; EST_HUMAN HIT: AL138120.1, EVALUE 4.00e-05; SWISSPROT HIT: P11369, EVALUE 3.90e+00
TWMSLEDIMLSEVSQAQNDKYYIFT

SEQ ID NO: 38381 - protein, 45 aa, Homo sapiens
  MAP TO AC005038.1; EXPRESSED IN PLACENTA, SIGNAL = 1.5; EXPRESSED IN HEART, SIGNAL = 1.7; EXPRESSED IN BRAIN, SIGNAL = 1.7; EXPRESSED IN BONE MARROW, SIGNAL = 1.4; EXPRESSED IN ADULT LIVER, SIGNAL = 1.8; EXPRESSED IN LUNG, SIGNAL =   2; EXPRESSED IN HELA, SIGNAL = 1.7; EXPRESSED IN FETAL LIVER, SIGNAL = 1.6; SWISSPROT HIT: Q11203, EVALUE 3.00e-21; EST_HUMAN HIT: AL042984.2, EVALUE 4.00e-20
NIPTLGSVAVTMALHGCDEVAVAGFGYDMSTPNAPLHYYETVRMA

SEQ ID NO: 38382 - protein, 30 aa, Homo sapiens
  MAP TO AC005831.1; EXPRESSED IN PLACENTA, SIGNAL = 1.6; EXPRESSED IN LUNG, SIGNAL = 1.4; EXPRESSED IN HEART, SIGNAL = 1.4; EXPRESSED IN BRAIN, SIGNAL = 1.3; EXPRESSED IN BONE MARROW, SIGNAL = 1.8; EXPRESSED IN ADULT LIVER, SIGNAL = 1.3; EXPRESSED IN FETAL LIVER, SIGNAL = 1.5
RVHGPMSMDLCWRGFPFPFLLSDEPSMIPG

SEQ ID NO: 38383 - protein, 27 aa, Homo sapiens
  MAP TO AC005831.1; EXPRESSED IN PLACENTA, SIGNAL = 1.6; EXPRESSED IN LUNG, SIGNAL = 1.4; EXPRESSED IN HEART, SIGNAL = 1.4; EXPRESSED IN BRAIN, SIGNAL = 1.3; EXPRESSED IN BONE MARROW, SIGNAL = 1.8; EXPRESSED IN ADULT LIVER, SIGNAL = 1.3; EXPRESSED IN FETAL LIVER, SIGNAL = 1.5
NVSTDPCPWIFAGGAFPSLSFSQMNLQ

SEQ ID NO: 38384 - protein, 31 aa, Homo sapiens
  MAP TO AC004069.1; EXPRESSED IN BRAIN, SIGNAL = 1.3; EXPRESSED IN LUNG, SIGNAL = 1.6; EXPRESSED IN FETAL LIVER, SIGNAL = 1.3; EXPRESSED IN BONE MARROW, SIGNAL = 1.3; EXPRESSED IN ADULT LIVER, SIGNAL = 1.6; EXPRESSED IN PLACENTA, SIGNAL = 1.3; EXPRESSED IN HEART, SIGNAL = 1.4
MPGQSEKQGQNDDGSPSLLHMAASIYKYQQN

SEQ ID NO: 38385 - protein, 31 aa, Homo sapiens
  MAP TO AC004069.1; EXPRESSED IN BRAIN, SIGNAL = 1.3; EXPRESSED IN LUNG, SIGNAL = 1.6; EXPRESSED IN FETAL LIVER, SIGNAL = 1.3; EXPRESSED IN BONE MARROW, SIGNAL = 1.3; EXPRESSED IN ADULT LIVER, SIGNAL = 1.6; EXPRESSED IN PLACENTA, SIGNAL = 1.3; EXPRESSED IN HEART, SIGNAL = 1.4
CQDKVRNRVRMMMALHLCYTWLQVFTNTSRT

SEQ ID NO: 38386 - protein, 59 aa, Homo sapiens
  MAP TO AC002525.1; EXPRESSED IN PLACENTA, SIGNAL = 4.1; EXPRESSED IN HELA, SIGNAL = 4.3; EXPRESSED IN HEART, SIGNAL = 3.7; EXPRESSED IN BONE MARROW, SIGNAL = 4.6; EXPRESSED IN ADULT LIVER, SIGNAL = 4.2; EXPRESSED IN BRAIN, SIGNAL = 5.3; EXPRESSED IN FETAL LIVER, SIGNAL = 3.5; EXPRESSED IN LUNG, SIGNAL = 5.3; SWISSPROT HIT: P00955, EVALUE 4.60e+00; EST_HUMAN HIT: AA074071.1, EVALUE 6.10e+00
EPYHFPFREQYVTLCTKVHGQHYRFARIFAMLTEAGRAGVSNIWASCRLCSINSTNIKT

SEQ ID NO: 38387 - protein, 33 aa, Homo sapiens
  MAP TO AC006312.8; EXPRESSED IN PLACENTA, SIGNAL = 2.1; EXPRESSED IN LUNG, SIGNAL = 2.3; EXPRESSED IN HEART, SIGNAL = 2.2; EXPRESSED IN BONE MARROW, SIGNAL = 2.3; EXPRESSED IN ADULT LIVER, SIGNAL = 1.9; EXPRESSED IN HELA, SIGNAL = 2.5; EXPRESSED IN FETAL LIVER, SIGNAL = 2.2; EXPRESSED IN BRAIN, SIGNAL = 2.2; EST_HUMAN HIT: T48912.1, EVALUE 1.00e-13
VSVHVCNEHRYGYMNVPVKSHQGLEDERVNFIH

SEQ ID NO: 38388 - protein, 30 aa, Homo sapiens
  MAP TO AC005815.1; EXPRESSED IN PLACENTA, SIGNAL = 1.2; EXPRESSED IN LUNG, SIGNAL = 1.2; EXPRESSED IN HELA, SIGNAL = 1.8; EXPRESSED IN HEART, SIGNAL = 1.6; EXPRESSED IN BRAIN, SIGNAL = 1.4; EXPRESSED IN FETAL LIVER, SIGNAL = 1.8; EXPRESSED IN BONE MARROW, SIGNAL = 1.7; EXPRESSED IN ADULT LIVER, SIGNAL = 1.4; EST_HUMAN HIT: R19751.1, EVALUE 2.00e-09
VLRSWTAMGVLLTGRKERMLLSKPSRKSRS

SEQ ID NO: 38389 - protein, 32 aa, Homo sapiens
  MAP TO AC006443.1; EXPRESSED IN BRAIN, SIGNAL = 2.4; EXPRESSED IN ADULT LIVER, SIGNAL = 2.3; EXPRESSED IN PLACENTA, SIGNAL = 2.3; EXPRESSED IN LUNG, SIGNAL = 2.7; EXPRESSED IN HELA, SIGNAL = 2.7; EXPRESSED IN HEART, SIGNAL = 2.4; EXPRESSED IN BONE MARROW, SIGNAL = 2.5; EXPRESSED IN FETAL LIVER, SIGNAL = 2.4
SHHPPSTSSGSPLSLSSLAARPAAPRGSKATG

SEQ ID NO: 38390 - protein, 55 aa, Homo sapiens
  MAP TO AC005684.1; EXPRESSED IN PLACENTA, SIGNAL =   9; EXPRESSED IN BONE MARROW, SIGNAL = 7.8; EXPRESSED IN ADULT LIVER, SIGNAL = 8.2; EXPRESSED IN LUNG, SIGNAL = 7.8; EXPRESSED IN HELA, SIGNAL = 8.1; EXPRESSED IN HEART, SIGNAL =   8; EXPRESSED IN FETAL LIVER, SIGNAL = 9.1; EXPRESSED IN BRAIN, SIGNAL = 9.2
AFQGRMQIEKQVLCPTIVSPEKVGWDVVEGREDAWVAFDSPLMERLFQMDEHPQT

SEQ ID NO: 38391 - protein, 72 aa, Homo sapiens
  MAP TO AC004390.1; EXPRESSED IN PLACENTA, SIGNAL = 1.5; EXPRESSED IN LUNG, SIGNAL = 1.7; EXPRESSED IN FETAL LIVER, SIGNAL = 1.4; EXPRESSED IN BONE MARROW, SIGNAL = 1.5; EXPRESSED IN ADULT LIVER, SIGNAL = 1.8; EXPRESSED IN HEART, SIGNAL = 1.7; EXPRESSED IN BRAIN, SIGNAL = 1.7; EST_HUMAN HIT: AI003369.1, EVALUE 1.40e+00; SWISSPROT HIT: O00330, EVALUE 3.50e+00
HSDDWFRDDPITMRLRTFIQLLREEMTYLPLDKNKEACSLVAAVSHLVNMWKAYLRMELKNGGGRAKRITEM

SEQ ID NO: 38392 - protein, 46 aa, Homo sapiens
  MAP TO AC005196.1; EXPRESSED IN HEART, SIGNAL = 3.6; EXPRESSED IN ADULT LIVER, SIGNAL =   4; EXPRESSED IN PLACENTA, SIGNAL =   6; EXPRESSED IN FETAL LIVER, SIGNAL = 3.8; EXPRESSED IN BRAIN, SIGNAL = 4.2; EXPRESSED IN BONE MARROW, SIGNAL = 4.2; EXPRESSED IN LUNG, SIGNAL = 4.6; EXPRESSED IN HELA, SIGNAL = 3.7; EST_HUMAN HIT: AI792737.1, EVALUE 2.00e-08
LQVILEKAQVRTMYDSVKNQLEAEVKSWPGTLAPDQSGIEVMTHPM

SEQ ID NO: 38393 - protein, 48 aa, Homo sapiens
  MAP TO AC004549.1; EXPRESSED IN PLACENTA, SIGNAL = 6.4; EXPRESSED IN LUNG, SIGNAL = 7.5; EXPRESSED IN HEART, SIGNAL = 6.9; EXPRESSED IN FETAL LIVER, SIGNAL = 5.8; EXPRESSED IN BONE MARROW, SIGNAL = 6.1; EXPRESSED IN ADULT LIVER, SIGNAL = 6.6; EXPRESSED IN HELA, SIGNAL = 6.4; EXPRESSED IN BRAIN, SIGNAL = 6.6; SWISSPROT HIT: Q11107, EVALUE 8.20e-02; EST_HUMAN HIT: AU160400.1, EVALUE 6.00e-26
FDVHKKCPLCELMFPPNYDQSKFEEHVESHWKVCPMCSEQFPPDYDQQ

SEQ ID NO: 38394 - protein, 57 aa, Homo sapiens
  MAP TO AC005610.1; EXPRESSED IN ADULT LIVER, SIGNAL = 6.5; EXPRESSED IN PLACENTA, SIGNAL =   6; EXPRESSED IN LUNG, SIGNAL = 5.8; EXPRESSED IN HELA, SIGNAL = 5.9; EXPRESSED IN HEART, SIGNAL = 5.6; EXPRESSED IN BRAIN, SIGNAL = 6.8; EXPRESSED IN BONE MARROW, SIGNAL = 5.2; EXPRESSED IN FETAL LIVER, SIGNAL = 6.4
LGASKEPKEAHERTEAKSSNTATAMKHEDNDGSELTQGLPSSNYYSKYSLCLQWLLT

SEQ ID NO: 38395 - protein, 93 aa, Homo sapiens
  MAP TO AC005332.1; EXPRESSED IN HEART, SIGNAL =   2; EXPRESSED IN ADULT LIVER, SIGNAL = 1.2; EXPRESSED IN PLACENTA, SIGNAL = 1.3; EXPRESSED IN LUNG, SIGNAL = 1.5; EXPRESSED IN FETAL LIVER, SIGNAL = 1.2; EXPRESSED IN BRAIN, SIGNAL = 1.7; EXPRESSED IN BONE MARROW, SIGNAL = 1.2; SWISSPROT HIT: O83571, EVALUE 5.40e+00; EST_HUMAN HIT: BE566381.1, EVALUE 4.00e-49
MQIIRHSEQTLKTALISKNPVLVSQYEKLNAGEQRLMNEAFQPASDLFGPITLHSPSDWITSHPEAPQDFEQFFSDPYRKTPSPNKRSIYIQS

SEQ ID NO: 38396 - protein, 74 aa, Homo sapiens
  MAP TO AC004585.1; EXPRESSED IN PLACENTA, SIGNAL = 4.7; EXPRESSED IN LUNG, SIGNAL = 5.1; EXPRESSED IN HELA, SIGNAL = 4.3; EXPRESSED IN HEART, SIGNAL = 4.2; EXPRESSED IN BRAIN, SIGNAL = 4.7; EXPRESSED IN BONE MARROW, SIGNAL =   4; EXPRESSED IN FETAL LIVER, SIGNAL = 4.6; EXPRESSED IN ADULT LIVER, SIGNAL =   5; SWISSPROT HIT: P41828, EVALUE 2.90e+00; EST_HUMAN HIT: AW581433.1, EVALUE 7.00e-02
TPRSSVPGTELRNSAEETTGISFEEEFGPWSPLPTHWWEGAKTSVAAATPANPKPQECNGVTWGQREMDGQRVG

SEQ ID NO: 38397 - protein, 42 aa, Homo sapiens
  MAP TO AC004381.1; EXPRESSED IN HELA, SIGNAL =   4; EXPRESSED IN BRAIN, SIGNAL = 4.8; EXPRESSED IN BONE MARROW, SIGNAL = 4.7; EXPRESSED IN ADULT LIVER, SIGNAL = 5.3; EXPRESSED IN HEART, SIGNAL = 4.7; EXPRESSED IN PLACENTA, SIGNAL = 4.9; EXPRESSED IN LUNG, SIGNAL = 5.2; EXPRESSED IN FETAL LIVER, SIGNAL = 4.6; EST_HUMAN HIT: AW965473.1, EVALUE 3.00e-16; SWISSPROT HIT: Q10124, EVALUE 1.90e-01
TKKILNPVTTKLKDVQRQLKALLPPDAVLVGHSLDLDLRALK

SEQ ID NO: 38398 - protein, 30 aa, Homo sapiens
  MAP TO AC004883.2; EXPRESSED IN HEART, SIGNAL = 1.5; EXPRESSED IN BRAIN, SIGNAL = 3.3; EXPRESSED IN BONE MARROW, SIGNAL = 1.7; EXPRESSED IN PLACENTA, SIGNAL = 2.2; EXPRESSED IN LUNG, SIGNAL = 2.4; EXPRESSED IN FETAL LIVER, SIGNAL =   1; EXPRESSED IN ADULT LIVER, SIGNAL = 1.1; EST_HUMAN HIT: AU130318.1, EVALUE 6.00e-11
SKRPKANELPQPPVPEPANAGKRKVREFNF

SEQ ID NO: 38399 - protein, 74 aa, Homo sapiens
  MAP TO AC005926.1; EXPRESSED IN BONE MARROW, SIGNAL = 1.8; EXPRESSED IN PLACENTA, SIGNAL = 1.7; EXPRESSED IN LUNG, SIGNAL = 1.8; EXPRESSED IN HELA, SIGNAL = 1.8; EXPRESSED IN HEART, SIGNAL = 1.6; EXPRESSED IN FETAL LIVER, SIGNAL = 1.6; EXPRESSED IN ADULT LIVER, SIGNAL = 1.4; EXPRESSED IN BRAIN, SIGNAL = 1.4; EST_HUMAN HIT: AI962451.1, EVALUE 3.10e+00; SWISSPROT HIT: O18303, EVALUE 5.70e+00
KIRIMFHIVKASQVKSSLLRKGQFYNFTQLYPYLYFTPTSFSKNCITLKLKVAFRQAEQLYSHPELEQIMDSAE

SEQ ID NO: 38400 - protein, 33 aa, Homo sapiens
  MAP TO AC004923.2; EXPRESSED IN PLACENTA, SIGNAL =  14; EXPRESSED IN LUNG, SIGNAL =  16; EXPRESSED IN HELA, SIGNAL =  13; EXPRESSED IN HEART, SIGNAL =  13; EXPRESSED IN BRAIN, SIGNAL =  12; EXPRESSED IN BONE MARROW, SIGNAL =  13; EXPRESSED IN FETAL LIVER, SIGNAL =  13; EXPRESSED IN ADULT LIVER, SIGNAL =  14; EST_HUMAN HIT: BE867889.1, EVALUE 3.00e-15; SWISSPROT HIT: P47928, EVALUE 1.30e+00
HHHPFLWRRPPELPKPGPHHQPETVPAAAGIAG

SEQ ID NO: 38401 - protein, 114 aa, Homo sapiens
  MAP TO AC004923.2; EXPRESSED IN PLACENTA, SIGNAL =  14; EXPRESSED IN LUNG, SIGNAL =  16; EXPRESSED IN HELA, SIGNAL =  13; EXPRESSED IN HEART, SIGNAL =  13; EXPRESSED IN BRAIN, SIGNAL =  12; EXPRESSED IN BONE MARROW, SIGNAL =  13; EXPRESSED IN FETAL LIVER, SIGNAL =  13; EXPRESSED IN ADULT LIVER, SIGNAL =  14; SWISSPROT HIT: P43353, EVALUE 7.00e-63; EST_HUMAN HIT: AI188718.1, EVALUE 2.00e-60
CPGSPRVGKIVMTAAAKHLTPVTLELGGKNPCYVDDNCDPQTVANRVAWFRYFNAGQTCVAPDYVLCSPEMQERLLPALQSTITRFYGDDPQSSPNLGRIINQKQFQRLRALLG

SEQ ID NO: 38402 - protein, 27 aa, Homo sapiens
  MAP TO AC006288.1; EXPRESSED IN PLACENTA, SIGNAL = 1.2; EXPRESSED IN BRAIN, SIGNAL = 1.3; EXPRESSED IN ADULT LIVER, SIGNAL = 1.2; EXPRESSED IN LUNG, SIGNAL = 1.6; EXPRESSED IN HEART, SIGNAL = 1.4; EXPRESSED IN FETAL LIVER, SIGNAL = 1.3; EXPRESSED IN BONE MARROW, SIGNAL = 1.3
SVTAGKIQNVDVSCSVQVQNQIGKEGK

SEQ ID NO: 38403 - protein, 39 aa, Homo sapiens
  MAP TO AC005539.1; EXPRESSED IN LUNG, SIGNAL = 1.1; EXPRESSED IN FETAL LIVER, SIGNAL =   1; EXPRESSED IN BRAIN, SIGNAL =   1; EXPRESSED IN BONE MARROW, SIGNAL = 0.95; EXPRESSED IN ADULT LIVER, SIGNAL = 1.3; EXPRESSED IN HEART, SIGNAL = 1.3; EXPRESSED IN PLACENTA, SIGNAL = 1.1; SWISSPROT HIT: P52624, EVALUE 9.00e-08; EST_HUMAN HIT: AI792814.1, EVALUE 5.00e-17
KRFVHVKNPYLDLMDEDILYHLDLGTKTHNLPAMFGDVK

SEQ ID NO: 38404 - protein, 89 aa, Homo sapiens
  MAP TO AC005185.1; EXPRESSED IN ADULT LIVER, SIGNAL = 3.2; EXPRESSED IN PLACENTA, SIGNAL = 3.6; EXPRESSED IN HEART, SIGNAL = 2.7; EXPRESSED IN FETAL LIVER, SIGNAL = 2.9; EXPRESSED IN BRAIN, SIGNAL = 3.2; EXPRESSED IN BONE MARROW, SIGNAL =   3; EXPRESSED IN LUNG, SIGNAL = 3.6; EXPRESSED IN HELA, SIGNAL =   3; SWISSPROT HIT: O15479, EVALUE 7.00e-06
MPRGQKSKLRAREKRRKARDETRGLNVPQVTEAEEEEAPCCSSSVSGGAASSSPAAGIPQEPQRAPTTAAAAAAGVSSTKSKKGAKSHQ

SEQ ID NO: 38405 - protein, 46 aa, Homo sapiens
  MAP TO AC005226.1; EXPRESSED IN HEART, SIGNAL =   6; EXPRESSED IN BRAIN, SIGNAL = 7.4; EXPRESSED IN PLACENTA, SIGNAL = 7.2; EXPRESSED IN LUNG, SIGNAL = 8.1; EXPRESSED IN FETAL LIVER, SIGNAL = 6.4; EXPRESSED IN BONE MARROW, SIGNAL = 7.1; EXPRESSED IN ADULT LIVER, SIGNAL = 6.5; EXPRESSED IN HELA, SIGNAL = 6.8; SWISSPROT HIT: Q57366, EVALUE 4.80e+00
SGRRKSDVKKTPSELGSQEEQGACHVIAVILGPHSMHHSNCGEAQL

SEQ ID NO: 38406 - protein, 63 aa, Homo sapiens
  MAP TO AC004468.1; EXPRESSED IN PLACENTA, SIGNAL = 1.8; EXPRESSED IN LUNG, SIGNAL = 1.8; EXPRESSED IN HEART, SIGNAL = 1.7; EXPRESSED IN BRAIN, SIGNAL = 1.5; EXPRESSED IN BONE MARROW, SIGNAL = 1.7; EXPRESSED IN ADULT LIVER, SIGNAL = 1.9; EXPRESSED IN HELA, SIGNAL = 1.6; EXPRESSED IN FETAL LIVER, SIGNAL = 1.7; SWISSPROT HIT: P11532, EVALUE 9.00e-31; EST_HUMAN HIT: AW500517.1, EVALUE 1.30e-01
HLEAPEDKSFGSSLMESEVNLDRYQTALEEVLSWLLSAEDTLQAQGEISNDVEVVKDQFHTHE

SEQ ID NO: 38407 - protein, 18 aa, Homo sapiens
  MAP TO AC004468.1; EXPRESSED IN PLACENTA, SIGNAL = 1.8; EXPRESSED IN LUNG, SIGNAL = 1.8; EXPRESSED IN HEART, SIGNAL = 1.7; EXPRESSED IN BRAIN, SIGNAL = 1.5; EXPRESSED IN BONE MARROW, SIGNAL = 1.7; EXPRESSED IN ADULT LIVER, SIGNAL = 1.9; EXPRESSED IN HELA, SIGNAL = 1.6; EXPRESSED IN FETAL LIVER, SIGNAL = 1.7
PGPLSNSFRRSIIVASFC

SEQ ID NO: 38408 - protein, 39 aa, Homo sapiens
  MAP TO AC004976.1; EXPRESSED IN LUNG, SIGNAL = 2.4; EXPRESSED IN PLACENTA, SIGNAL = 2.2; EXPRESSED IN HEART, SIGNAL = 2.4; EXPRESSED IN FETAL LIVER, SIGNAL = 2.1; EXPRESSED IN BRAIN, SIGNAL = 2.4; EXPRESSED IN BONE MARROW, SIGNAL = 2.1; EXPRESSED IN HELA, SIGNAL = 2.2; EXPRESSED IN ADULT LIVER, SIGNAL = 2.1; SWISSPROT HIT: Q13324, EVALUE 6.00e-18; EST_HUMAN HIT: AA947407.1, EVALUE 1.00e-14
SIRCLRNVIHWNLITTFILRNVMWFLLQLVDHEVHESNE

SEQ ID NO: 38409 - protein, 30 aa, Homo sapiens
  MAP TO AC004976.1; EXPRESSED IN LUNG, SIGNAL = 2.4; EXPRESSED IN PLACENTA, SIGNAL = 2.2; EXPRESSED IN HEART, SIGNAL = 2.4; EXPRESSED IN FETAL LIVER, SIGNAL = 2.1; EXPRESSED IN BRAIN, SIGNAL = 2.4; EXPRESSED IN BONE MARROW, SIGNAL = 2.1; EXPRESSED IN HELA, SIGNAL = 2.2; EXPRESSED IN ADULT LIVER, SIGNAL = 2.1; EST_HUMAN HIT: AA947407.1, EVALUE 6.00e-10
EHSLSAECDSLEPHHHLYPAKCHVVPAAAR

SEQ ID NO: 38410 - protein, 54 aa, Homo sapiens
  MAP TO AB016897.1; EXPRESSED IN ADULT LIVER, SIGNAL = 4.4; EXPRESSED IN HELA, SIGNAL = 3.6; EXPRESSED IN BRAIN, SIGNAL =   3; EXPRESSED IN HEART, SIGNAL = 2.4; EXPRESSED IN BONE MARROW, SIGNAL = 3.5; EXPRESSED IN PLACENTA, SIGNAL = 0.75; EXPRESSED IN BT474, SIGNAL = 0.64; EXPRESSED IN LUNG, SIGNAL = 0.8; EXPRESSED IN FETAL LIVER, SIGNAL = 0.73; EST_HUMAN HIT: AI342218.1, EVALUE 2.00e-06; SWISSPROT HIT: P55196, EVALUE 2.00e-16
KAQSNGPEKQEKEGVIQNFKRTLSKKEKKEKKKREKEALRQASDKDDRPFQGED

SEQ ID NO: 38411 - protein, 27 aa, Homo sapiens
  MAP TO AB016897.1; EXPRESSED IN ADULT LIVER, SIGNAL = 4.4; EXPRESSED IN HELA, SIGNAL = 3.6; EXPRESSED IN BRAIN, SIGNAL =   3; EXPRESSED IN HEART, SIGNAL = 2.4; EXPRESSED IN BONE MARROW, SIGNAL = 3.5; EXPRESSED IN PLACENTA, SIGNAL = 0.75; EXPRESSED IN BT474, SIGNAL = 0.64; EXPRESSED IN LUNG, SIGNAL = 0.8; EXPRESSED IN FETAL LIVER, SIGNAL = 0.73
PELQENSLKERKEGKKEERKRGIATGI

SEQ ID NO: 38412 - protein, 51 aa, Homo sapiens
  MAP TO AC007687.16; EXPRESSED IN LUNG, SIGNAL = 1.9; EXPRESSED IN ADULT LIVER, SIGNAL = 1.8; EXPRESSED IN BRAIN, SIGNAL = 3.1; EXPRESSED IN PLACENTA, SIGNAL = 1.6; EXPRESSED IN HELA, SIGNAL = 2.9; EXPRESSED IN HEART, SIGNAL = 1.9; EXPRESSED IN BONE MARROW, SIGNAL = 2.6; EXPRESSED IN FETAL LIVER, SIGNAL = 1.1; SWISSPROT HIT: Q92995, EVALUE 4.00e-14; EST_HUMAN HIT: BE550614.1, EVALUE 5.00e-13
FAEPLTMPGYGGAASAGASVFGASGLDNQPPEEIVAIITSMGFQRNQAIQA

SEQ ID NO: 38413 - protein, 23 aa, Homo sapiens
  MAP TO AC007687.16; EXPRESSED IN LUNG, SIGNAL = 1.9; EXPRESSED IN ADULT LIVER, SIGNAL = 1.8; EXPRESSED IN BRAIN, SIGNAL = 3.1; EXPRESSED IN PLACENTA, SIGNAL = 1.6; EXPRESSED IN HELA, SIGNAL = 2.9; EXPRESSED IN HEART, SIGNAL = 1.9; EXPRESSED IN BONE MARROW, SIGNAL = 2.6; EXPRESSED IN FETAL LIVER, SIGNAL = 1.1
DKKKKKKRKRLGCGYFSQILLSR

SEQ ID NO: 38414 - protein, 239 aa, Homo sapiens
  MAP TO Z86090.10; EXPRESSED IN BT474, SIGNAL = 0.67; EXPRESSED IN FETAL LIVER, SIGNAL =   1; EXPRESSED IN LUNG, SIGNAL = 0.78; EXPRESSED IN HELA, SIGNAL = 0.74; EXPRESSED IN ADULT LIVER, SIGNAL = 1.3; EXPRESSED IN BRAIN, SIGNAL = 1.2; EXPRESSED IN PLACENTA, SIGNAL = 0.72; EXPRESSED IN HEART, SIGNAL = 3.2; EXPRESSED IN BONE MARROW, SIGNAL = 3.1; EST_HUMAN HIT: BE701073.1, EVALUE 6.00e-44; SWISSPROT HIT: Q99705, EVALUE 0.00e+00
MCTLITAMDANSQFTSTYILTAMAIDRYLATVHPISSTKFRKPSVATLVICLLWALSFISITPVWLYARLIPFPGGAVGCGIRLPNPDTDLYWFTLYQFFLAFALPFVVITAAYVRILQRMTSSVAPASQRSIRLRTKRVTRTAIAICLVFFVCWAPYYVLQLTQLSISRPTLTFVYLYNAAISLGYANSCLNPFVYIVLCETFRKRLVLSVKPAAQGQLRAVSNAQTADEERTESKGT

SEQ ID NO: 38415 - protein, 33 aa, Homo sapiens
  MAP TO Z86090.10; EXPRESSED IN BRAIN, SIGNAL = 3.9; EXPRESSED IN BONE MARROW, SIGNAL =  23; EXPRESSED IN PLACENTA, SIGNAL = 1.9; EXPRESSED IN HELA, SIGNAL = 3.2; EXPRESSED IN HEART, SIGNAL = 2.6; EXPRESSED IN FETAL LIVER, SIGNAL = 1.7; EXPRESSED IN ADULT LIVER, SIGNAL = 3.9; EXPRESSED IN LUNG, SIGNAL = 0.72
THLPSSLAKLKNEGEIDKITTPEFFKAVMILLI

SEQ ID NO: 38416 - protein, 49 aa, Homo sapiens
  MAP TO AL035701.13; EXPRESSED IN BONE MARROW, SIGNAL = 3.2; EXPRESSED IN LUNG, SIGNAL = 0.69; EXPRESSED IN HEART, SIGNAL = 2.6; EXPRESSED IN FETAL LIVER, SIGNAL = 5.6; EXPRESSED IN ADULT LIVER, SIGNAL = 4.7; EXPRESSED IN PLACENTA, SIGNAL = 4.3; EXPRESSED IN HELA, SIGNAL =   3; EXPRESSED IN BRAIN, SIGNAL = 2.2; EST_HUMAN HIT: AW270089.1, EVALUE 1.00e-15; SWISSPROT HIT: P22413, EVALUE 4.60e-02
RTEVYNKLKNCSPHMNVYLKEDIPNRFYYQHNDRIQPIILVADEGWTIV

SEQ ID NO: 38417 - protein, 49 aa, Homo sapiens
  MAP TO Z98884.11; EXPRESSED IN HEART, SIGNAL = 1.4; EXPRESSED IN LUNG, SIGNAL = 1.2; EXPRESSED IN FETAL LIVER, SIGNAL = 1.3; EXPRESSED IN BT474, SIGNAL = 0.67; EXPRESSED IN BONE MARROW, SIGNAL = 0.66; EXPRESSED IN BRAIN, SIGNAL = 1.8; EST_HUMAN HIT: BE843827.1, EVALUE 1.00e-24; SWISSPROT HIT: P56645, EVALUE 7.00e-24
GGEDRKQEKCHSPFRIIPYLIHVHHPAQPELESEPCCLTVVEKIHSGYE

SEQ ID NO: 38418 - protein, 75 aa, Homo sapiens; identical to SEQ ID NO: 33306
  MAP TO AC007363.3; EXPRESSED IN PLACENTA, SIGNAL = 6.5; EXPRESSED IN HEART, SIGNAL = 4.4; EXPRESSED IN LUNG, SIGNAL = 3.9; EXPRESSED IN BONE MARROW, SIGNAL = 7.8; EXPRESSED IN ADULT LIVER, SIGNAL = 6.5; EXPRESSED IN BRAIN, SIGNAL = 0.81; EXPRESSED IN FETAL LIVER, SIGNAL = 6.8; EXPRESSED IN HELA, SIGNAL = 0.61; SWISSPROT HIT: O42163, EVALUE 3.00e-12; EST_HUMAN HIT: BE743922.1, EVALUE 5.00e-37

SEQ ID NO: 38419 - protein, 751 aa, Homo sapiens
  MAP TO AL049872.3; EXPRESSED IN BRAIN, SIGNAL =   2; EXPRESSED IN ADULT LIVER, SIGNAL = 2.1; EXPRESSED IN HEART, SIGNAL = 2.8; EXPRESSED IN HELA, SIGNAL = 1.1; EXPRESSED IN PLACENTA, SIGNAL = 2.7; EXPRESSED IN LUNG, SIGNAL =   5; EXPRESSED IN FETAL LIVER, SIGNAL = 2.1; EXPRESSED IN BONE MARROW, SIGNAL = 1.6; EXPRESSED IN HBL100, SIGNAL = 0.72; EXPRESSED IN BT474, SIGNAL = 1.2; EST_HUMAN HIT: AU138211.1, EVALUE 2.00e-83; SWISSPROT HIT: Q10411, EVALUE 3.00e-18
KKDMEIAELKKNIEQMDTDHKETKDVLSSSLEEQKQLTQLINKKEIFIEKLKERSSKLQEELDKYSQALRKNEILRQTIEEKDRSLGSMKEENNHLQEELERLREEQSRTAPVADPKTLDSVTELASEVSQLNTIKEHLEEEIKHHQKIIEDQNQSKMQLLQSLQEQKKEMDEFRYQHEQMNATHTQLFLEKDEEIKSLQKTIEQIKTQLHEERQDIQTDNSDIFQETKVQSLNIENGSEKHDLSKAETERLVKGIKERELEIKLLNEKNISLTKQIDQLSKDEVGKLTQIIQQKDLEIQALHARISSTSHTQDVVYLQQQLQAYAMEREKVFAVLNEKTRENSHLKTEYHKMMDIVAAKEAALIKLQDENKKLSTRFESSGQDMFRETIQNLSRIIREKDIEIDALSQKCQTLLAVLQTSSTGNEAGGVNSNQFEELLQERDKLKQQVKKMEEWKQQVMTTVQNMQHESAQLQEELHQLQAQVLVDSDNNSKLQVDYTGLIQSYEQNETKLKNFGQELAQVQHSIGQLCNTKDLLLGKLDIISPQLSSASLLTPQSAECLRASKSEVLSESSELLQQELEELRKSLQEKDATIRTLQENNHRLSDSIAATSELERKEHEQTDSEIKQLKEKQDVLQKLLKEKDLLIKAKSDQLLSSNENFTNKVNENELLRQAVTNLKERILILEMDIGKLKGENEKIVETYRGKETEYQALQETNMKFSMMLREKEFECHSMKEKALAFEQLLKEKEQV

SEQ ID NO: 38420 - protein, 65 aa, Homo sapiens
  MAP TO AC007564.9; EXPRESSED IN ADULT LIVER, SIGNAL = 2.2; EXPRESSED IN BONE MARROW, SIGNAL = 0.7; EXPRESSED IN HBL100, SIGNAL = 1.2; EXPRESSED IN FETAL LIVER, SIGNAL = 0.57; EXPRESSED IN PLACENTA, SIGNAL =   2; EXPRESSED IN HELA, SIGNAL = 2.4; EXPRESSED IN BRAIN, SIGNAL = 1.6; EXPRESSED IN LUNG, SIGNAL = 2.2; EXPRESSED IN HEART, SIGNAL = 1.9; SWISSPROT HIT: P33215, EVALUE 4.00e-19; EST_HUMAN HIT: BE894192.1, EVALUE 7.00e-30
SSLNKGCSNKPTTVNKRSVNVNAASGGVQNSGIVREAPATSIATVLPQPMTSAMGKGTVAVQEKA

SEQ ID NO: 38421 - protein, 91 aa, Homo sapiens
  MAP TO Z86090.10; EXPRESSED IN ADULT LIVER, SIGNAL = 5.3; EXPRESSED IN FETAL LIVER, SIGNAL = 6.2; EXPRESSED IN HELA, SIGNAL = 1.9; EXPRESSED IN PLACENTA, SIGNAL = 9.3; EXPRESSED IN BRAIN, SIGNAL = 2.3; EXPRESSED IN BONE MARROW, SIGNAL = 1.8; EXPRESSED IN HEART, SIGNAL = 2.5; EXPRESSED IN LUNG, SIGNAL = 1.9; EST_HUMAN HIT: BE312542.1, EVALUE 3.00e-41; SWISSPROT HIT: P97639, EVALUE 9.00e-05
MKKGVGRAVGLGGGSGCQATEEDPLPNCGACAPGQGGRRWRLPQPAWVEGSSARLWEQATGTGWMDLEASLLPTGPNASNTSDGPDNLTSA

SEQ ID NO: 38422 - protein, 32 aa, Homo sapiens
  MAP TO Z98884.11; EXPRESSED IN FETAL LIVER, SIGNAL =  14; EXPRESSED IN ADULT LIVER, SIGNAL =  14; EXPRESSED IN PLACENTA, SIGNAL = 5.9; EXPRESSED IN BRAIN, SIGNAL =  24; EXPRESSED IN HELA, SIGNAL =  13; EXPRESSED IN BONE MARROW, SIGNAL =  19; EXPRESSED IN LUNG, SIGNAL =  11; EXPRESSED IN HEART, SIGNAL = 8.9; EST_HUMAN HIT: AW236297.1, EVALUE 7.00e-05
IIIIGELPFSKLIGKVFSMCSQTIDFVYKNSD

SEQ ID NO: 38423 - protein, 48 aa, Homo sapiens
  MAP TO Z83844.5; EXPRESSED IN ADULT LIVER, SIGNAL = 2.7; EXPRESSED IN FETAL LIVER, SIGNAL = 4.9; EXPRESSED IN HELA, SIGNAL =   4; EXPRESSED IN BRAIN, SIGNAL = 4.9; EXPRESSED IN PLACENTA, SIGNAL =   7; EXPRESSED IN LUNG, SIGNAL = 3.5; EXPRESSED IN BONE MARROW, SIGNAL = 4.4; EXPRESSED IN HEART, SIGNAL = 3.7; EST_HUMAN HIT: AA030039.1, EVALUE 5.00e-25; SWISSPROT HIT: O00321, EVALUE 2.10e+00
PTARPYSGAGLVTVPQLCCTWEWAGPLPCHHQNPLMKAGGSLRAAPGY

SEQ ID NO: 38424 - protein, 94 aa, Homo sapiens
  MAP TO AL022238.1; EXPRESSED IN LUNG, SIGNAL = 3.9; EXPRESSED IN BONE MARROW, SIGNAL = 3.5; EXPRESSED IN BRAIN, SIGNAL = 3.2; EXPRESSED IN HELA, SIGNAL = 3.2; EXPRESSED IN ADULT LIVER, SIGNAL = 3.1; EXPRESSED IN FETAL LIVER, SIGNAL = 3.5; EXPRESSED IN PLACENTA, SIGNAL = 1.8; EXPRESSED IN HEART, SIGNAL = 2.6; SWISSPROT HIT: P25985, EVALUE 2.10e+00; EST_HUMAN HIT: AW663987.1, EVALUE 3.00e-06
IACYSAGDVSNFPQQPFMSSCRLSQGNGNSTMSVTEEKKILFLCHHILYTDLGNLDWSTRYVGGVRTPLLPVVIIIETTYWMPSAYQTLVVTGH

SEQ ID NO: 38425 - protein, 41 aa, Homo sapiens
  MAP TO AL022318.2; EXPRESSED IN PLACENTA, SIGNAL =   2; EXPRESSED IN BRAIN, SIGNAL = 2.9; EXPRESSED IN HEART, SIGNAL = 2.6; EXPRESSED IN BONE MARROW, SIGNAL = 6.2; EXPRESSED IN LUNG, SIGNAL = 3.4; EXPRESSED IN FETAL LIVER, SIGNAL = 3.9; EXPRESSED IN ADULT LIVER, SIGNAL = 2.7; EXPRESSED IN HELA, SIGNAL = 3.9; EST_HUMAN HIT: BE965314.2, EVALUE 2.40e+00; SWISSPROT HIT: P30580, EVALUE 1.90e-01
MRGRWFSNAVGRVSVPWVSVGTGPAPTATGSLDTWAGRGGP

SEQ ID NO: 38426 - protein, 33 aa, Homo sapiens
  MAP TO AL022319.2; EXPRESSED IN PLACENTA, SIGNAL = 1.2; EXPRESSED IN HELA, SIGNAL = 1.9; EXPRESSED IN BRAIN, SIGNAL = 1.7; EXPRESSED IN LUNG, SIGNAL = 1.4; EXPRESSED IN HEART, SIGNAL = 1.6; EXPRESSED IN BONE MARROW, SIGNAL = 1.3; EXPRESSED IN FETAL LIVER, SIGNAL =   2; EXPRESSED IN ADULT LIVER, SIGNAL = 1.5; EST_HUMAN HIT: BE395687.1, EVALUE 1.10e+00
MGCPHQHGVSPQSTCSWEAWRGKSQDLWASVGC

SEQ ID NO: 38427 - protein, 26 aa, Homo sapiens
  MAP TO AL022319.2; EXPRESSED IN LUNG, SIGNAL =  12; EXPRESSED IN BONE MARROW, SIGNAL = 5.4; EXPRESSED IN HEART, SIGNAL = 9.2; EXPRESSED IN FETAL LIVER, SIGNAL =  31; EXPRESSED IN ADULT LIVER, SIGNAL =  14; EXPRESSED IN PLACENTA, SIGNAL =  16; EXPRESSED IN HELA, SIGNAL = 8.9; EXPRESSED IN BRAIN, SIGNAL = 4.4
MALEMKFLVLLALGPSHLWSVHCLLP

SEQ ID NO: 38428 - protein, 42 aa, Homo sapiens
  MAP TO AL022319.2; EXPRESSED IN HEART, SIGNAL = 5.4; EXPRESSED IN LUNG, SIGNAL = 2.2; EXPRESSED IN FETAL LIVER, SIGNAL = 1.6; EXPRESSED IN ADULT LIVER, SIGNAL = 1.7; EXPRESSED IN HELA, SIGNAL = 2.3; EXPRESSED IN PLACENTA, SIGNAL = 1.7; EXPRESSED IN BRAIN, SIGNAL = 2.3; EXPRESSED IN BONE MARROW, SIGNAL = 2.8; EST_HUMAN HIT: BF215972.1, EVALUE 4.10e+00
CWRAPSKQPAGGREQMPKANLREPGQPFLLLPSTSECQALNL

SEQ ID NO: 38429 - protein, 55 aa, Homo sapiens
  MAP TO AL022328.21; EXPRESSED IN FETAL LIVER, SIGNAL = 1.6; EXPRESSED IN BRAIN, SIGNAL = 2.1; EXPRESSED IN ADULT LIVER, SIGNAL = 1.8; EXPRESSED IN HELA, SIGNAL = 1.5; EXPRESSED IN PLACENTA, SIGNAL = 1.3; EXPRESSED IN BONE MARROW, SIGNAL =   3; EXPRESSED IN HEART, SIGNAL = 1.3; EXPRESSED IN LUNG, SIGNAL = 1.7; EST_HUMAN HIT: BE277773.1, EVALUE 3.00e-04; SWISSPROT HIT: P23249, EVALUE 2.00e-06
IVLAGDPMQLGPVIKSRLAMAYGLNVSFLERLMSRPAYQRDENAFGACGAHNPLL

SEQ ID NO: 38430 - protein, 38 aa, Homo sapiens
  MAP TO AL022328.21; EXPRESSED IN LUNG, SIGNAL =   3; EXPRESSED IN ADULT LIVER, SIGNAL = 3.3; EXPRESSED IN FETAL LIVER, SIGNAL = 3.7; EXPRESSED IN PLACENTA, SIGNAL = 2.5; EXPRESSED IN HEART, SIGNAL = 2.7; EXPRESSED IN BONE MARROW, SIGNAL = 5.4; EXPRESSED IN BRAIN, SIGNAL =   2; EXPRESSED IN HELA, SIGNAL = 2.2; EST_HUMAN HIT: H55099.1, EVALUE 2.00e-15
NSRRQLPSFLPQYPIPDRLRKCVEQKIDILTFQPLLAE

SEQ ID NO: 38431 - protein, 46 aa, Homo sapiens
  MAP TO AL031587.3; EXPRESSED IN BONE MARROW, SIGNAL = 1.6; EXPRESSED IN HEART, SIGNAL = 2.4; EXPRESSED IN LUNG, SIGNAL =   2; EXPRESSED IN HELA, SIGNAL = 1.5; EXPRESSED IN BRAIN, SIGNAL = 1.4; EST_HUMAN HIT: BF671792.1, EVALUE 1.40e+00; SWISSPROT HIT: Q92628, EVALUE 1.20e+00
LGLVQMRGQELKKNLSRGRWALVPPGSAKGSQVVRHLWACGCLPLQ

SEQ ID NO: 38432 - protein, 29 aa, Homo sapiens
  MAP TO AL031587.3; EXPRESSED IN BONE MARROW, SIGNAL = 7.4; EXPRESSED IN ADULT LIVER, SIGNAL =   4; EXPRESSED IN HELA, SIGNAL =   4; EXPRESSED IN PLACENTA, SIGNAL = 3.8; EXPRESSED IN HEART, SIGNAL = 4.2; EXPRESSED IN LUNG, SIGNAL = 6.5; EXPRESSED IN FETAL LIVER, SIGNAL = 5.7; EXPRESSED IN BRAIN, SIGNAL = 7.1
ELSQTHRGNGIPQSCGVTVGNPWGLSLPC

SEQ ID NO: 38433 - protein, 86 aa, Homo sapiens
  MAP TO AL031588.1; EXPRESSED IN PLACENTA, SIGNAL =   7; EXPRESSED IN HELA, SIGNAL = 5.2; EXPRESSED IN LUNG, SIGNAL = 8.3; EXPRESSED IN HEART, SIGNAL = 4.9; EXPRESSED IN BONE MARROW, SIGNAL =  11; EXPRESSED IN ADULT LIVER, SIGNAL = 9.6; EXPRESSED IN FETAL LIVER, SIGNAL =  11; EXPRESSED IN BRAIN, SIGNAL = 8.6; EST_HUMAN HIT: H23473.1, EVALUE 1.30e+00; SWISSPROT HIT: P44863, EVALUE 2.80e+00
MLCPPIQPSPHLHLITQILSMSPLSGMQARREGGWSERSSGQEEAGGLRKGVPRAQIEDREGTIRSLQEQAMTLYEHVLVCKTVCK

SEQ ID NO: 38434 - protein, 143 aa, Homo sapiens
  MAP TO AL035682.16; EXPRESSED IN LUNG, SIGNAL = 1.4; EXPRESSED IN BONE MARROW, SIGNAL =   2; EXPRESSED IN FETAL LIVER, SIGNAL = 1.3; EXPRESSED IN BRAIN, SIGNAL = 2.1; EXPRESSED IN PLACENTA, SIGNAL = 1.4; EXPRESSED IN HELA, SIGNAL = 1.4; EXPRESSED IN HEART, SIGNAL = 1.5; SWISSPROT HIT: P43683, EVALUE 3.10e+00; EST_HUMAN HIT: BE968155.1, EVALUE 1.40e-01
FLKTSQVLGVEKAEGAPWCSKNKRGQASRRLCAGMQAGRAEIKHRCPMRERGGMPRRDAGITGQGAGNDNSEPGASLDPRAGAGSASKMVCLHLCGGGRTCVSTGDCFLFQPQNLPSTLKTHKPSSYKVSKESPLWQNPKGNK

SEQ ID NO: 38435 - protein, 26 aa, Homo sapiens
  MAP TO AL079295.1; EXPRESSED IN PLACENTA, SIGNAL = 6.4; EXPRESSED IN BRAIN, SIGNAL = 8.4; EXPRESSED IN HELA, SIGNAL =   6; EXPRESSED IN LUNG, SIGNAL = 7.1; EXPRESSED IN BONE MARROW, SIGNAL = 7.5; EXPRESSED IN HEART, SIGNAL = 5.2; EXPRESSED IN FETAL LIVER, SIGNAL =   8; EXPRESSED IN ADULT LIVER, SIGNAL = 4.7; SWISSPROT HIT: P07315, EVALUE 8.70e+00; EST_HUMAN HIT: W23871.1, EVALUE 2.00e-09
VSGSWTAKRHFSEPQERRCQNWGARV

SEQ ID NO: 38436 - protein, 27 aa, Homo sapiens
  MAP TO AP000053.1; EXPRESSED IN HELA, SIGNAL = 2.8; EXPRESSED IN PLACENTA, SIGNAL = 2.4; EXPRESSED IN BRAIN, SIGNAL = 4.8; EXPRESSED IN BONE MARROW, SIGNAL =   4; EXPRESSED IN HEART, SIGNAL = 2.3; EXPRESSED IN LUNG, SIGNAL =   3; EXPRESSED IN FETAL LIVER, SIGNAL = 3.6; EXPRESSED IN ADULT LIVER, SIGNAL = 4.4; EST_HUMAN HIT: AI208216.1, EVALUE 7.00e-01
MKKSRLGKWSTRERHGAKGSPTPAKGR

SEQ ID NO: 38437 - protein, 46 aa, Homo sapiens
  MAP TO AP000127.1; EXPRESSED IN HELA, SIGNAL =   2; EXPRESSED IN BRAIN, SIGNAL =   2; EXPRESSED IN PLACENTA, SIGNAL =   2; EXPRESSED IN BONE MARROW, SIGNAL =   2; EXPRESSED IN HEART, SIGNAL = 1.7; EXPRESSED IN LUNG, SIGNAL = 2.7; EXPRESSED IN ADULT LIVER, SIGNAL = 2.6; EXPRESSED IN FETAL LIVER, SIGNAL = 2.6; EST_HUMAN HIT: BE779029.1, EVALUE 1.80e+00; SWISSPROT HIT: P09248, EVALUE 4.20e-01
MPCITLSSCIWTGPMKMMRYCSYVYVTSYGQWNLADAIKIPNQLTL

SEQ ID NO: 38438 - protein, 30 aa, Homo sapiens
  MAP TO AP000354.1; EXPRESSED IN HEART, SIGNAL = 2.7; EST_HUMAN HIT: AW501427.1, EVALUE 3.00e-10
RHSISGPISTSKPLTALSDKRPNYGEIPVQ

SEQ ID NO: 38439 - protein, 62 aa, Homo sapiens
  MAP TO AP000356.1; EXPRESSED IN PLACENTA, SIGNAL = 3.6; EXPRESSED IN HELA, SIGNAL = 6.2; EXPRESSED IN LUNG, SIGNAL = 7.9; EXPRESSED IN HEART, SIGNAL = 4.7; EXPRESSED IN BONE MARROW, SIGNAL = 6.1; EXPRESSED IN FETAL LIVER, SIGNAL = 4.4; EXPRESSED IN ADULT LIVER, SIGNAL =   4; EXPRESSED IN BRAIN, SIGNAL =  10; EST_HUMAN HIT: T89398.1, EVALUE 1.00e-22; SWISSPROT HIT: Q9XEL8, EVALUE 3.00e+00
SKHGWAMSSLPSGYPLPCSIPMPPDRHVQPQFPHQAPLSSISHSSPHSPRVFILQIFAPTKM

SEQ ID NO: 38440 - protein, 18 aa, Homo sapiens
  MAP TO Z83844.5; EXPRESSED IN LUNG, SIGNAL = 1.6; EXPRESSED IN HELA, SIGNAL = 1.4; EXPRESSED IN HEART, SIGNAL = 1.3
LRVVWSRCRARSSPLPVQ

SEQ ID NO: 38441 - protein, 34 aa, Homo sapiens
  MAP TO AC004928.2; EXPRESSED IN PLACENTA, SIGNAL = 2.9; EXPRESSED IN LUNG, SIGNAL =   3; EXPRESSED IN FETAL LIVER, SIGNAL = 2.5; EXPRESSED IN BRAIN, SIGNAL = 3.3; EXPRESSED IN BONE MARROW, SIGNAL = 2.7; EXPRESSED IN ADULT LIVER, SIGNAL =   3; EXPRESSED IN HELA, SIGNAL = 3.1; EXPRESSED IN HEART, SIGNAL = 2.8
MSYNVICGHNLTPRKTHTPQNLLMKAQRVCGLAA

SEQ ID NO: 38442 - protein, 124 aa, Homo sapiens
  MAP TO AC004074.1; EXPRESSED IN PLACENTA, SIGNAL = 1.3; EXPRESSED IN HELA, SIGNAL =   2; EXPRESSED IN FETAL LIVER, SIGNAL =   1; EXPRESSED IN BRAIN, SIGNAL = 1.2; EXPRESSED IN LUNG, SIGNAL = 1.3; EXPRESSED IN HEART, SIGNAL = 1.4; EXPRESSED IN BONE MARROW, SIGNAL = 0.99; EXPRESSED IN ADULT LIVER, SIGNAL = 1.1; EST_HUMAN HIT: AU156962.1, EVALUE 2.00e-19; SWISSPROT HIT: P03330, EVALUE 2.00e-03
GFVNAPLTSSEVRNLKKELKPLLDDPYGVADQIDQFLRPDIGTWAELMSIRGILFSGEERSMIRRAAVAVWEREHPPGQNVPPVDHEFPAHDPQWDNNNANHWENMQDLREVITKGIRISVPRT

SEQ ID NO: 38443 - protein, 141 aa, Homo sapiens
  MAP TO AC005410.1; EXPRESSED IN PLACENTA, SIGNAL = 1.2; EXPRESSED IN BONE MARROW, SIGNAL = 1.2; EXPRESSED IN FETAL LIVER, SIGNAL = 1.3; EXPRESSED IN HELA, SIGNAL = 3.8; EXPRESSED IN HEART, SIGNAL =   5; EXPRESSED IN LUNG, SIGNAL = 1.3; EXPRESSED IN BRAIN, SIGNAL = 1.3; EXPRESSED IN ADULT LIVER, SIGNAL = 1.5; EST_HUMAN HIT: AI934954.1, EVALUE 1.00e-77; SWISSPROT HIT: P52736, EVALUE 4.00e-04
DRQENDKENLNLENHRDQELLHASCQASGEVPSQASLRGFFTEDEPGCFGEGENLPEALQNIQDEGTGEQLSPQERISEKQLGQHLPNPHSGEMSTMWLEEKRETSQKGQPRAPMAQKLPTCRECGKTFYRNSQLIFHQRT

SEQ ID NO: 38444 - protein, 34 aa, Homo sapiens
  MAP TO AC005028.1; EXPRESSED IN PLACENTA, SIGNAL = 1.6; EXPRESSED IN LUNG, SIGNAL = 1.7; EXPRESSED IN HEART, SIGNAL = 1.7; EXPRESSED IN FETAL LIVER, SIGNAL = 1.4; EXPRESSED IN BRAIN, SIGNAL = 1.8; EXPRESSED IN BONE MARROW, SIGNAL = 1.6; EXPRESSED IN ADULT LIVER, SIGNAL = 1.7; EXPRESSED IN HELA, SIGNAL = 1.7; SWISSPROT HIT: P08122, EVALUE 4.90e+00
QKFQGPDMIHAQKLGCSSSELAGTSLQPFRACKS

SEQ ID NO: 38445 - protein, 85 aa, Homo sapiens
  MAP TO AC005609.1; EXPRESSED IN PLACENTA, SIGNAL = 1.2; EXPRESSED IN LUNG, SIGNAL = 1.5; EXPRESSED IN FETAL LIVER, SIGNAL = 2.2; EXPRESSED IN BRAIN, SIGNAL = 1.8; EXPRESSED IN ADULT LIVER, SIGNAL =   1; EXPRESSED IN HELA, SIGNAL = 1.8; EXPRESSED IN HEART, SIGNAL =   3; EXPRESSED IN BONE MARROW, SIGNAL = 1.2; SWISSPROT HIT: O95865, EVALUE 8.30e+00; EST_HUMAN HIT: AI969295.1, EVALUE 4.00e-41
EAKHGTFVGRIAQDLGLELAELVPRLFRVASKRHGDLLEVNLQNGILFVNSRIDREELCGRSAECSIHLEVIVDRPLQVFHVEVK

SEQ ID NO: 38446 - protein, 46 aa, Homo sapiens
  MAP TO AC003070.1; EXPRESSED IN PLACENTA, SIGNAL =   2; EXPRESSED IN LUNG, SIGNAL = 2.3; EXPRESSED IN HELA, SIGNAL = 1.9; EXPRESSED IN HEART, SIGNAL = 1.6; EXPRESSED IN BONE MARROW, SIGNAL = 2.1; EXPRESSED IN FETAL LIVER, SIGNAL = 1.9; EXPRESSED IN BRAIN, SIGNAL =   2; EXPRESSED IN ADULT LIVER, SIGNAL = 3.6; SWISSPROT HIT: O47026, EVALUE 8.20e+00; EST_HUMAN HIT: BE250052.1, EVALUE 5.20e+00
LKGRSERREISKGRRCWDIGSGMTGPMRSLRKIQFTRRLEDSVERR

SEQ ID NO: 38447 - protein, 38 aa, Homo sapiens
  MAP TO AC003692.1; EXPRESSED IN PLACENTA, SIGNAL = 2.3; EXPRESSED IN BRAIN, SIGNAL = 3.5; EXPRESSED IN ADULT LIVER, SIGNAL = 2.7; EXPRESSED IN LUNG, SIGNAL = 2.9; EXPRESSED IN HELA, SIGNAL = 2.5; EXPRESSED IN HEART, SIGNAL = 2.5; EXPRESSED IN FETAL LIVER, SIGNAL = 2.6; EXPRESSED IN BONE MARROW, SIGNAL = 3.2; SWISSPROT HIT: P37553, EVALUE 2.80e+00
SLETTVISTSMLSLEDLKQEVDNHLLAMLEKGFLHWKI

SEQ ID NO: 38448 - protein, 49 aa, Homo sapiens
  MAP TO AC005212.1; EXPRESSED IN BONE MARROW, SIGNAL = 1.7; EXPRESSED IN HELA, SIGNAL = 1.7; EXPRESSED IN HEART, SIGNAL = 1.9; EXPRESSED IN FETAL LIVER, SIGNAL = 1.7; EXPRESSED IN ADULT LIVER, SIGNAL = 1.8; EXPRESSED IN PLACENTA, SIGNAL = 2.3; EXPRESSED IN LUNG, SIGNAL = 1.7; EXPRESSED IN BRAIN, SIGNAL = 2.1; EST_HUMAN HIT: AI284184.1, EVALUE 2.00e-04; SWISSPROT HIT: Q99758, EVALUE 3.00e-24
AGYHMTLVKEPHCNPEDISQLVHHHVPNATLESSAGAELSFILPRESTH

SEQ ID NO: 38449 - protein, 63 aa, Homo sapiens
  MAP TO AC005212.1; EXPRESSED IN BONE MARROW, SIGNAL = 1.7; EXPRESSED IN HELA, SIGNAL = 1.7; EXPRESSED IN HEART, SIGNAL = 1.9; EXPRESSED IN FETAL LIVER, SIGNAL = 1.7; EXPRESSED IN ADULT LIVER, SIGNAL = 1.8; EXPRESSED IN PLACENTA, SIGNAL = 2.3; EXPRESSED IN LUNG, SIGNAL = 1.7; EXPRESSED IN BRAIN, SIGNAL = 2.1; EST_HUMAN HIT: AI095127.1, EVALUE 3.00e-03; SWISSPROT HIT: P23246, EVALUE 5.00e-01
GEGAALQPGRHLPAGPPPRAQRHAGEQRWGRAVFHPSQREHAQVRLPGRARTGIHPRWDPHGP

SEQ ID NO: 38450 - protein, 42 aa, Homo sapiens
  MAP TO AC003083.1; EXPRESSED IN PLACENTA, SIGNAL = 2.7; EXPRESSED IN HEART, SIGNAL =   3; EXPRESSED IN BONE MARROW, SIGNAL = 2.8; EXPRESSED IN ADULT LIVER, SIGNAL = 2.8; EXPRESSED IN HELA, SIGNAL =   3; EXPRESSED IN FETAL LIVER, SIGNAL = 2.8; EXPRESSED IN LUNG, SIGNAL =   3; EXPRESSED IN BRAIN, SIGNAL = 2.9; SWISSPROT HIT: P01267, EVALUE 1.60e+00
IMLKEAGYKPLQMNLMDVGDILVFDLSNTYSPLILEANENLG

SEQ ID NO: 38451 - protein, 38 aa, Homo sapiens
  MAP TO AC003962.1; EXPRESSED IN LUNG, SIGNAL = 8.7; EXPRESSED IN BRAIN, SIGNAL =  10; EXPRESSED IN ADULT LIVER, SIGNAL = 8.5; EXPRESSED IN PLACENTA, SIGNAL = 8.8; EXPRESSED IN HELA, SIGNAL = 8.4; EXPRESSED IN HEART, SIGNAL = 7.6; EXPRESSED IN BONE MARROW, SIGNAL = 9.1; EXPRESSED IN FETAL LIVER, SIGNAL = 8.6; SWISSPROT HIT: P11120, EVALUE 6.50e-02; EST_HUMAN HIT: AI929121.1, EVALUE 2.50e+00
CFKVFDVDRDGVLSRVELRDMVVALLEVWKDNRTDDIP

SEQ ID NO: 38452 - protein, 61 aa, Homo sapiens
  MAP TO AC005755.1; EXPRESSED IN HEART, SIGNAL = 1.8; EXPRESSED IN FETAL LIVER, SIGNAL = 1.6; EXPRESSED IN BONE MARROW, SIGNAL = 1.7; EXPRESSED IN PLACENTA, SIGNAL = 1.7; EXPRESSED IN BRAIN, SIGNAL = 1.6; EXPRESSED IN ADULT LIVER, SIGNAL = 1.6; EXPRESSED IN LUNG, SIGNAL = 1.6; EXPRESSED IN HELA, SIGNAL = 1.7
HYRKRSASRGRSGSRSRSRSPSDKRSKRGDDRRSRSRDRDRRRERSRSRDKRRSRSRDRKR

SEQ ID NO: 38453 - protein, 31 aa, Homo sapiens
  MAP TO AC004674.1; EXPRESSED IN LUNG, SIGNAL = 5.1; EXPRESSED IN HELA, SIGNAL = 5.3; EXPRESSED IN HEART, SIGNAL = 4.7; EXPRESSED IN FETAL LIVER, SIGNAL = 4.6; EXPRESSED IN BONE MARROW, SIGNAL = 4.6; EXPRESSED IN PLACENTA, SIGNAL = 5.1; EXPRESSED IN BRAIN, SIGNAL = 5.1; EXPRESSED IN ADULT LIVER, SIGNAL = 4.8; EST_HUMAN HIT: BF333015.1, EVALUE 7.00e-03
SLAEVSADVGLNHSLHRGTVTETQLSDDVSL

SEQ ID NO: 38454 - protein, 78 aa, Homo sapiens
  MAP TO AC005876.2; EXPRESSED IN PLACENTA, SIGNAL = 3.5; EXPRESSED IN LUNG, SIGNAL = 3.6; EXPRESSED IN ADULT LIVER, SIGNAL = 3.9; EXPRESSED IN HELA, SIGNAL = 3.9; EXPRESSED IN HEART, SIGNAL = 3.8; EXPRESSED IN FETAL LIVER, SIGNAL = 3.7; EXPRESSED IN BRAIN, SIGNAL = 3.8; EXPRESSED IN BONE MARROW, SIGNAL =   4; EST_HUMAN HIT: AW389192.1, EVALUE 8.00e-07
STSGDKPVSHSCTTPSTSSASGLNPTSAPPTSASAVPVSPVPQSPIPPLLQDPNLLRQLLPALQATLQLNNSNVDISK

SEQ ID NO: 38455 - protein, 21 aa, Homo sapiens
  MAP TO AC002069.1; EXPRESSED IN PLACENTA, SIGNAL =   4; EXPRESSED IN BONE MARROW, SIGNAL = 3.7; EXPRESSED IN ADULT LIVER, SIGNAL = 3.5; EXPRESSED IN LUNG, SIGNAL = 4.3; EXPRESSED IN HELA, SIGNAL = 3.5; EXPRESSED IN HEART, SIGNAL = 3.2; EXPRESSED IN FETAL LIVER, SIGNAL = 3.5; EXPRESSED IN BRAIN, SIGNAL = 3.8; SWISSPROT HIT: P52293, EVALUE 1.00e-04; EST_HUMAN HIT: AW391679.1, EVALUE 9.00e-04
VNWSVDDIVKGINNNNVESQL

SEQ ID NO: 38456 - protein, 52 aa, Homo sapiens
  MAP TO AC006238.1; EXPRESSED IN PLACENTA, SIGNAL = 1.7; EXPRESSED IN HELA, SIGNAL = 1.9; EXPRESSED IN HEART, SIGNAL = 1.7; EXPRESSED IN FETAL LIVER, SIGNAL = 2.4; EXPRESSED IN BONE MARROW, SIGNAL = 1.5; EXPRESSED IN LUNG, SIGNAL =   2; EXPRESSED IN BRAIN, SIGNAL =   2; EXPRESSED IN ADULT LIVER, SIGNAL = 3.1; SWISSPROT HIT: O33734, EVALUE 8.00e+00; EST_HUMAN HIT: BF219490.1, EVALUE 6.00e-24
NDMEPSKAVPLNASKQDGPMPKPHSVSLNDTETRKLMEECKRLQGEMMKLSE

SEQ ID NO: 38457 - protein, 66 aa, Homo sapiens
  MAP TO AC002073.1; EXPRESSED IN PLACENTA, SIGNAL = 2.2; EXPRESSED IN LUNG, SIGNAL = 2.5; EXPRESSED IN HELA, SIGNAL = 2.3; EXPRESSED IN HEART, SIGNAL = 1.9; EXPRESSED IN BONE MARROW, SIGNAL = 2.2; EXPRESSED IN FETAL LIVER, SIGNAL = 2.2; EXPRESSED IN BRAIN, SIGNAL = 2.6; EXPRESSED IN ADULT LIVER, SIGNAL = 2.2; SWISSPROT HIT: P39881, EVALUE 3.40e+00; EST_HUMAN HIT: BE299406.1, EVALUE 5.00e-30
TTSQALPAFTTEIQEASEGPGADEVQVFAPANALPARSEAAAVQPVIGISQRVRMNSKEKKDLGTL

SEQ ID NO: 38458 - protein, 84 aa, Homo sapiens
  MAP TO AC004820.2; EXPRESSED IN PLACENTA, SIGNAL = 3.5; EXPRESSED IN LUNG, SIGNAL = 3.2; EXPRESSED IN HELA, SIGNAL = 3.4; EXPRESSED IN HEART, SIGNAL = 3.1; EXPRESSED IN BONE MARROW, SIGNAL = 2.9; EXPRESSED IN FETAL LIVER, SIGNAL = 3.3; EXPRESSED IN BRAIN, SIGNAL =   3; EXPRESSED IN ADULT LIVER, SIGNAL = 3.3; SWISSPROT HIT: Q13563, EVALUE 9.00e-16; EST_HUMAN HIT: BF666906.1, EVALUE 8.80e+00
FMEGPLLEGLYWDSWYNNQQLYNLKNSSRIYYENILLGVPRVRQLKVRNNTCKVYSSFQSLMSECYGKYTSANEDLSNFGLQIN

SEQ ID NO: 38459 - protein, 23 aa, Homo sapiens
  MAP TO AC004820.2; EXPRESSED IN PLACENTA, SIGNAL = 3.5; EXPRESSED IN LUNG, SIGNAL = 3.2; EXPRESSED IN HELA, SIGNAL = 3.4; EXPRESSED IN HEART, SIGNAL = 3.1; EXPRESSED IN BONE MARROW, SIGNAL = 2.9; EXPRESSED IN FETAL LIVER, SIGNAL = 3.3; EXPRESSED IN BRAIN, SIGNAL =   3; EXPRESSED IN ADULT LIVER, SIGNAL = 3.3
LWKDPFWKVCTGIHGTITSSCII

SEQ ID NO: 38460 - protein, 24 aa, Homo sapiens
  MAP TO AC006159.2; EXPRESSED IN PLACENTA, SIGNAL = 2.6; EXPRESSED IN LUNG, SIGNAL = 2.7; EXPRESSED IN HEART, SIGNAL = 2.1; EXPRESSED IN FETAL LIVER, SIGNAL = 2.8; EXPRESSED IN BRAIN, SIGNAL = 2.5; EXPRESSED IN BONE MARROW, SIGNAL = 2.7; EXPRESSED IN ADULT LIVER, SIGNAL = 2.5; EXPRESSED IN HELA, SIGNAL = 2.5
LPTNLLLLFLPFPFLGTAYSFTKL

SEQ ID NO: 38461 - protein, 22 aa, Homo sapiens
  MAP TO AC006159.2; EXPRESSED IN PLACENTA, SIGNAL = 2.6; EXPRESSED IN LUNG, SIGNAL = 2.7; EXPRESSED IN HEART, SIGNAL = 2.1; EXPRESSED IN FETAL LIVER, SIGNAL = 2.8; EXPRESSED IN BRAIN, SIGNAL = 2.5; EXPRESSED IN BONE MARROW, SIGNAL = 2.7; EXPRESSED IN ADULT LIVER, SIGNAL = 2.5; EXPRESSED IN HELA, SIGNAL = 2.5
SANEPAPAVSTLSILGHSILIY

SEQ ID NO: 38462 - protein, 123 aa, Homo sapiens
  MAP TO AC004863.1; EXPRESSED IN PLACENTA, SIGNAL =  10; EXPRESSED IN HELA, SIGNAL = 9.3; EXPRESSED IN HEART, SIGNAL =   9; EXPRESSED IN BONE MARROW, SIGNAL =  10; EXPRESSED IN FETAL LIVER, SIGNAL =  11; EXPRESSED IN LUNG, SIGNAL =  13; EXPRESSED IN BRAIN, SIGNAL =  12; EXPRESSED IN ADULT LIVER, SIGNAL =  11; EST_HUMAN HIT: AA446697.1, EVALUE 7.00e-38; SWISSPROT HIT: P54703, EVALUE 3.00e-04
AGCSDGSIRLHQLSSAFPLLQWDSSTDSHAVTGLQWSPTRPAVFLVQDDTSNIYIWDLLQSDLGPVAKQQVSPNRQVGKLWTSCWLWGGFGHGCHLRSFFINFCMRLLHFKMWPYVNLNNMFS

SEQ ID NO: 38463 - protein, 82 aa, Homo sapiens
  MAP TO AC005585.1; EXPRESSED IN LUNG, SIGNAL = 0.43; EXPRESSED IN HEART, SIGNAL = 1.5; SWISSPROT HIT: O00763, EVALUE 2.80e+00
MAHLLGSQACMESLRTDLTDLQGAIVDVFSRAGPVRFPSWKFPDRMACDLDMVALLEHYDHVPGDPEFTQLSHAVLLELVID

SEQ ID NO: 38464 - protein, 23 aa, Homo sapiens
  MAP TO AC005585.1; EXPRESSED IN LUNG, SIGNAL = 0.43; EXPRESSED IN HEART, SIGNAL = 1.5
TCWAARPAWRACAQTSPTCRVPS

SEQ ID NO: 38465 - protein, 55 aa, Homo sapiens
  MAP TO AC004472.1; EXPRESSED IN PLACENTA, SIGNAL = 2.8; EXPRESSED IN LUNG, SIGNAL = 2.8; EXPRESSED IN HELA, SIGNAL = 2.8; EXPRESSED IN HEART, SIGNAL = 4.1; EXPRESSED IN FETAL LIVER, SIGNAL =   3; EXPRESSED IN BRAIN, SIGNAL = 2.9; EXPRESSED IN BONE MARROW, SIGNAL = 2.4; EXPRESSED IN ADULT LIVER, SIGNAL = 2.9; EST_HUMAN HIT: BE273006.1, EVALUE 3.00e-24; SWISSPROT HIT: P55072, EVALUE 3.00e-25
VANETHGHVGADLAALCSEAALQAIRKKMDLIDLEDETIDAEVMNSLAVTMDDFR

SEQ ID NO: 38466 - protein, 76 aa, Homo sapiens
  MAP TO AC004954.1; EXPRESSED IN PLACENTA, SIGNAL = 6.3; EXPRESSED IN LUNG, SIGNAL =  18; EXPRESSED IN FETAL LIVER, SIGNAL = 6.5; EXPRESSED IN BRAIN, SIGNAL = 6.2; EXPRESSED IN ADULT LIVER, SIGNAL = 6.2; EXPRESSED IN HELA, SIGNAL =   6; EXPRESSED IN HEART, SIGNAL =   6; EXPRESSED IN BONE MARROW, SIGNAL = 5.5
LHLVKQLGPPGTLLTHQLNSFIYILSSTFFSTSFLLFFFLLFLFLFFLSSSSFYLSCVILVISGLSLYPLLPFCFY

SEQ ID NO: 38467 - protein, 42 aa, Homo sapiens
  MAP TO AC004587.1; EXPRESSED IN FETAL LIVER, SIGNAL = 5.3; EXPRESSED IN BRAIN, SIGNAL = 6.2; EXPRESSED IN BONE MARROW, SIGNAL = 5.1; EXPRESSED IN ADULT LIVER, SIGNAL = 5.6; EXPRESSED IN PLACENTA, SIGNAL = 5.9; EXPRESSED IN LUNG, SIGNAL = 6.2; EXPRESSED IN HEART, SIGNAL = 4.7; EXPRESSED IN HELA, SIGNAL = 5.3; SWISSPROT HIT: P46940, EVALUE 8.00e-19; EST_HUMAN HIT: BF673726.1, EVALUE 1.00e-17
PPTTELEEGLRNGVYLAKLGNFFSPKVVSLKKIYDREQTRYK

SEQ ID NO: 38468 - protein, 101 aa, Homo sapiens
  MAP TO AC006352.3; EXPRESSED IN PLACENTA, SIGNAL = 8.6; EXPRESSED IN HELA, SIGNAL = 1.9; EXPRESSED IN HEART, SIGNAL = 1.9; EXPRESSED IN ADULT LIVER, SIGNAL = 5.3; EXPRESSED IN BONE MARROW, SIGNAL =  32; EXPRESSED IN BRAIN, SIGNAL = 1.7; EXPRESSED IN FETAL LIVER, SIGNAL = 2.1; EXPRESSED IN LUNG, SIGNAL = 2.7; SWISSPROT HIT: P01764, EVALUE 5.00e-47; EST_HUMAN HIT: AW408304.1, EVALUE 1.00e-45
QCEVQLVQSGGGLVQPGGSLRLSCAGSGFTFSSYAMHWVRQAPGKGLEWVSAIGTGGGTYYADSVKGRFTISRDNAKNSLYLQMNSLRAEDMAVYYCARDT

SEQ ID NO: 38469 - protein, 20 aa, Homo sapiens
  MAP TO AC006352.3; EXPRESSED IN PLACENTA, SIGNAL = 8.6; EXPRESSED IN HELA, SIGNAL = 1.9; EXPRESSED IN HEART, SIGNAL = 1.9; EXPRESSED IN ADULT LIVER, SIGNAL = 5.3; EXPRESSED IN BONE MARROW, SIGNAL =  32; EXPRESSED IN BRAIN, SIGNAL = 1.7; EXPRESSED IN FETAL LIVER, SIGNAL = 2.1; EXPRESSED IN LUNG, SIGNAL = 2.7; EST_HUMAN HIT: AW800162.1, EVALUE 3.00e-03
SSVRFSWCSLGEAWYSLGGP

SEQ ID NO: 38470 - protein, 35 aa, Homo sapiens
  MAP TO AC004874.1; EXPRESSED IN PLACENTA, SIGNAL = 2.5; EXPRESSED IN LUNG, SIGNAL = 2.4; EXPRESSED IN HEART, SIGNAL = 2.6; EXPRESSED IN FETAL LIVER, SIGNAL = 2.4; EXPRESSED IN BRAIN, SIGNAL = 2.5; EXPRESSED IN BONE MARROW, SIGNAL = 2.2; EXPRESSED IN ADULT LIVER, SIGNAL = 2.4; EXPRESSED IN HELA, SIGNAL = 2.4
NQPQSGLNILVEVINELHVAKSAERFWHLTIAHHQ

SEQ ID NO: 38471 - protein, 71 aa, Homo sapiens
  MAP TO AC006084.1; EXPRESSED IN HELA, SIGNAL = 3.2; EXPRESSED IN FETAL LIVER, SIGNAL = 2.6; EXPRESSED IN ADULT LIVER, SIGNAL = 3.2; EXPRESSED IN PLACENTA, SIGNAL = 3.2; EXPRESSED IN HEART, SIGNAL = 2.9; EXPRESSED IN BRAIN, SIGNAL = 2.9; EXPRESSED IN BONE MARROW, SIGNAL = 3.2; EXPRESSED IN LUNG, SIGNAL = 3.6; SWISSPROT HIT: Q12732, EVALUE 2.00e+00; EST_HUMAN HIT: AW978157.1, EVALUE 4.00e-23
ILYFKIQDSSSKICDLNANTESEVPGGQSVGVQGEAACVSIPHLDLKNVSDGDKWEGNFTHTHYFPDNVTC

SEQ ID NO: 38472 - protein, 54 aa, Homo sapiens
  MAP TO AC004486.1; EXPRESSED IN BRAIN, SIGNAL = 5.5; EXPRESSED IN ADULT LIVER, SIGNAL = 4.8; EXPRESSED IN LUNG, SIGNAL = 6.1; EXPRESSED IN FETAL LIVER, SIGNAL = 4.5; EXPRESSED IN BONE MARROW, SIGNAL = 4.7; EXPRESSED IN PLACENTA, SIGNAL = 5.2; EXPRESSED IN HELA, SIGNAL = 4.9; EXPRESSED IN HEART, SIGNAL = 4.5; SWISSPROT HIT: P76542, EVALUE 3.10e-01; EST_HUMAN HIT: AV701543.1, EVALUE 8.40e+00
SKTKTNEGNVVGNAVESAKPQDLPYQLFEHLKMGVFLRLKQTPFPFTGDVISKI

SEQ ID NO: 38473 - protein, 41 aa, Homo sapiens
  MAP TO AC006524.1; EXPRESSED IN FETAL LIVER, SIGNAL = 1.5; EXPRESSED IN BONE MARROW, SIGNAL = 1.5; EXPRESSED IN LUNG, SIGNAL = 1.4; EXPRESSED IN BRAIN, SIGNAL = 1.4; EXPRESSED IN ADULT LIVER, SIGNAL = 1.5; EXPRESSED IN PLACENTA, SIGNAL = 1.5; EXPRESSED IN HELA, SIGNAL = 1.9; EXPRESSED IN HEART, SIGNAL = 1.6
MSTLGAISLVVVLVNTTSPEVICFVTKPLFAATLKLAVEAT

SEQ ID NO: 38474 - protein, 35 aa, Homo sapiens
  MAP TO AC005153.1; EXPRESSED IN BONE MARROW, SIGNAL = 1.7; EXPRESSED IN PLACENTA, SIGNAL =   2; EXPRESSED IN LUNG, SIGNAL = 2.2; EXPRESSED IN HELA, SIGNAL = 1.9; EXPRESSED IN HEART, SIGNAL =   2; EXPRESSED IN FETAL LIVER, SIGNAL =   2; EXPRESSED IN ADULT LIVER, SIGNAL = 1.8; EXPRESSED IN BRAIN, SIGNAL = 1.9
SRRYIKMMKINMLCAFKKEKQSMSDKERSGRYKMT

SEQ ID NO: 38475 - protein, 48 aa, Homo sapiens
  MAP TO AC005553.1; EXPRESSED IN LUNG, SIGNAL = 2.5; EXPRESSED IN FETAL LIVER, SIGNAL = 2.3; EXPRESSED IN BRAIN, SIGNAL = 2.6; EXPRESSED IN BONE MARROW, SIGNAL = 2.3; EXPRESSED IN HELA, SIGNAL = 2.6; EXPRESSED IN PLACENTA, SIGNAL = 2.5; EXPRESSED IN HEART, SIGNAL = 2.6; EXPRESSED IN ADULT LIVER, SIGNAL = 2.5; EST_HUMAN HIT: BE092178.1, EVALUE 6.70e+00
MQEGQQMTVRIKPRLSPLQLSNFRGICCHQEANIWGKKNPQRRFLCCH

SEQ ID NO: 38476 - protein, 29 aa, Homo sapiens
  MAP TO AC004149.1; EXPRESSED IN LUNG, SIGNAL =  26; EXPRESSED IN FETAL LIVER, SIGNAL =  22; EXPRESSED IN BRAIN, SIGNAL =  25; EXPRESSED IN BONE MARROW, SIGNAL =  24; EXPRESSED IN ADULT LIVER, SIGNAL =  23; EXPRESSED IN HELA, SIGNAL =  23; EXPRESSED IN PLACENTA, SIGNAL =  24; EXPRESSED IN HEART, SIGNAL =  21
KRWCVPARAKMRGRWCQEKDELIACGDVR

SEQ ID NO: 38477 - protein, 28 aa, Homo sapiens
  MAP TO AC004592.1; EXPRESSED IN PLACENTA, SIGNAL = 9.8; EXPRESSED IN LUNG, SIGNAL =  11; EXPRESSED IN BONE MARROW, SIGNAL = 8.7; EXPRESSED IN HELA, SIGNAL = 9.5; EXPRESSED IN HEART, SIGNAL = 7.8; EXPRESSED IN FETAL LIVER, SIGNAL = 9.5; EXPRESSED IN BRAIN, SIGNAL = 9.8; EXPRESSED IN ADULT LIVER, SIGNAL = 9.5; SWISSPROT HIT: Q99044, EVALUE 8.60e+00
CTVPRGNLHPLIGGVLPGAKVAGDTSPR

SEQ ID NO: 38478 - protein, 66 aa, Homo sapiens
  MAP TO AC004241.1; EXPRESSED IN PLACENTA, SIGNAL = 2.9; EXPRESSED IN LUNG, SIGNAL = 3.1; EXPRESSED IN FETAL LIVER, SIGNAL = 2.6; EXPRESSED IN BRAIN, SIGNAL = 3.1; EXPRESSED IN ADULT LIVER, SIGNAL = 2.6; EXPRESSED IN HELA, SIGNAL = 3.5; EXPRESSED IN HEART, SIGNAL = 2.3; EXPRESSED IN BONE MARROW, SIGNAL = 2.3; SWISSPROT HIT: P21128, EVALUE 2.00e-33; EST_HUMAN HIT: AA985373.1, EVALUE 2.00e-24
LFTYVNEKLFSKPTYAAFINLLNNYQRATGHGEHFSAQELAEQDAFLREIMKTAVMKELYSFLHHQ

SEQ ID NO: 38479 - protein, 123 aa, Homo sapiens
  MAP TO AC006385.3; EXPRESSED IN PLACENTA, SIGNAL = 5.5; EXPRESSED IN BRAIN, SIGNAL = 5.9; EXPRESSED IN ADULT LIVER, SIGNAL = 5.5; EXPRESSED IN LUNG, SIGNAL = 5.7; EXPRESSED IN HELA, SIGNAL = 5.6; EXPRESSED IN HEART, SIGNAL = 5.4; EXPRESSED IN FETAL LIVER, SIGNAL = 5.2; EXPRESSED IN BONE MARROW, SIGNAL =   6
VVLKAVYLVLNHDISSRICDVALNIVECLLQLGVVPCVEKNRKKSENKENETLEKRPSEGAFQFKGVSGSSTCGFGGPAVSGAGDGGGEEGGGGDGGGGGGDGGGGGGGGGGPYEKNDKNQEK

SEQ ID NO: 38480 - protein, 19 aa, Homo sapiens
  MAP TO AC006385.3; EXPRESSED IN PLACENTA, SIGNAL = 5.5; EXPRESSED IN BRAIN, SIGNAL = 5.9; EXPRESSED IN ADULT LIVER, SIGNAL = 5.5; EXPRESSED IN LUNG, SIGNAL = 5.7; EXPRESSED IN HELA, SIGNAL = 5.6; EXPRESSED IN HEART, SIGNAL = 5.4; EXPRESSED IN FETAL LIVER, SIGNAL = 5.2; EXPRESSED IN BONE MARROW, SIGNAL =   6
SWRWWRRRRRRWRWRRWRR

SEQ ID NO: 38481 - protein, 66 aa, Homo sapiens
  MAP TO AC006097.1; EXPRESSED IN BONE MARROW, SIGNAL = 3.5; EXPRESSED IN HELA, SIGNAL = 3.6; EXPRESSED IN HEART, SIGNAL =   7; EXPRESSED IN FETAL LIVER, SIGNAL = 3.1; EXPRESSED IN BRAIN, SIGNAL = 3.4; EXPRESSED IN ADULT LIVER, SIGNAL = 3.2; EXPRESSED IN PLACENTA, SIGNAL = 3.3; EXPRESSED IN LUNG, SIGNAL = 4.4; SWISSPROT HIT: gi127998, EVALUE 7.00e-13; EST_HUMAN HIT: AA195854.1, EVALUE 1.00e-31
VEYKKGFEESKTRFHLPMDMVNIRHAKKAQTLASDLDYRKKLHEYTVLPEDMKTQWAKKAYGLQSE

SEQ ID NO: 38482 - protein, 62 aa, Homo sapiens
  MAP TO AC004049.1; EXPRESSED IN ADULT LIVER, SIGNAL =   1; EXPRESSED IN PLACENTA, SIGNAL = 1.9; EXPRESSED IN LUNG, SIGNAL = 1.4; EXPRESSED IN HEART, SIGNAL = 1.4; EXPRESSED IN BRAIN, SIGNAL = 1.2; EXPRESSED IN FETAL LIVER, SIGNAL = 1.3; EXPRESSED IN BONE MARROW, SIGNAL = 2.1; EST_HUMAN HIT: AW965139.1, EVALUE 4.00e-30; SWISSPROT HIT: P90648, EVALUE 3.00e-05
ILEDKTIKGCISVEPYILGEFVKLSNNTKVVKTEYKATEYGLAYGHFSYEFSNHRDVVVDLQ

SEQ ID NO: 38483 - protein, 37 aa, Homo sapiens
  MAP TO AC004499.1; EXPRESSED IN FETAL LIVER, SIGNAL =   2; EXPRESSED IN BRAIN, SIGNAL =   2; EXPRESSED IN BONE MARROW, SIGNAL = 1.8; EXPRESSED IN ADULT LIVER, SIGNAL =   2; EXPRESSED IN PLACENTA, SIGNAL = 2.4; EXPRESSED IN LUNG, SIGNAL = 2.3; EXPRESSED IN HEART, SIGNAL = 1.8; EXPRESSED IN HELA, SIGNAL = 1.9; SWISSPROT HIT: P38968, EVALUE 8.40e+00
TLRGQKLVQLWLGEFTRLEEELNPADNTVFVSNKAQK

SEQ ID NO: 38484 - protein, 25 aa, Homo sapiens
  MAP TO AC004499.1; EXPRESSED IN FETAL LIVER, SIGNAL =   2; EXPRESSED IN BRAIN, SIGNAL =   2; EXPRESSED IN BONE MARROW, SIGNAL = 1.8; EXPRESSED IN ADULT LIVER, SIGNAL =   2; EXPRESSED IN PLACENTA, SIGNAL = 2.4; EXPRESSED IN LUNG, SIGNAL = 2.3; EXPRESSED IN HEART, SIGNAL = 1.8; EXPRESSED IN HELA, SIGNAL = 1.9
DVERPEAGTIMAWRVYQIGGRAEPS

SEQ ID NO: 38485 - protein, 44 aa, Homo sapiens
  MAP TO AC006208.3; EXPRESSED IN PLACENTA, SIGNAL = 7.2; EXPRESSED IN ADULT LIVER, SIGNAL = 6.6; EXPRESSED IN LUNG, SIGNAL = 8.4; EXPRESSED IN HEART, SIGNAL =   7; EXPRESSED IN FETAL LIVER, SIGNAL = 6.9; EXPRESSED IN BRAIN, SIGNAL = 8.2; EXPRESSED IN BONE MARROW, SIGNAL = 8.4; EXPRESSED IN HELA, SIGNAL = 7.6; EST_HUMAN HIT: BE535499.1, EVALUE 7.00e-09
EEEDLAAGVGRSRVPVRPPQQYSDDEDDYEDDEEDDVQNTNSAL

SEQ ID NO: 38486 - protein, 44 aa, Homo sapiens
  MAP TO AC006208.3; EXPRESSED IN PLACENTA, SIGNAL = 7.2; EXPRESSED IN ADULT LIVER, SIGNAL = 6.6; EXPRESSED IN LUNG, SIGNAL = 8.4; EXPRESSED IN HEART, SIGNAL =   7; EXPRESSED IN FETAL LIVER, SIGNAL = 6.9; EXPRESSED IN BRAIN, SIGNAL = 8.2; EXPRESSED IN BONE MARROW, SIGNAL = 8.4; EXPRESSED IN HELA, SIGNAL = 7.6; SWISSPROT HIT: P21729, EVALUE 3.70e+00; EST_HUMAN HIT: AU120582.1, EVALUE 4.00e-09
LSLGRAALVCNCPGLCPRRKKTWRQVWAAAEFQSAHPSSTQMMR

SEQ ID NO: 38487 - protein, 49 aa, Homo sapiens
  MAP TO AC006004.1; EXPRESSED IN HELA, SIGNAL = 1.7; EXPRESSED IN FETAL LIVER, SIGNAL = 1.5; EXPRESSED IN BONE MARROW, SIGNAL = 1.6; EXPRESSED IN ADULT LIVER, SIGNAL = 1.6; EXPRESSED IN PLACENTA, SIGNAL = 1.9; EXPRESSED IN HEART, SIGNAL = 1.6; EXPRESSED IN BRAIN, SIGNAL = 1.4; EXPRESSED IN LUNG, SIGNAL =   2; SWISSPROT HIT: P79795, EVALUE 2.00e-04; EST_HUMAN HIT: T27170.1, EVALUE 8.00e-09
NSDGVVRHELQHPIIARYVRIVPLDWNGEGRIGLRIEVYGCSYCEYRIV

SEQ ID NO: 38488 - protein, 48 aa, Homo sapiens
  MAP TO AC006360.2; EXPRESSED IN LUNG, SIGNAL = 2.8; EXPRESSED IN FETAL LIVER, SIGNAL = 2.7; EXPRESSED IN BRAIN, SIGNAL = 2.6; EXPRESSED IN BONE MARROW, SIGNAL = 2.5; EXPRESSED IN HELA, SIGNAL = 2.5; EXPRESSED IN PLACENTA, SIGNAL = 2.6; EXPRESSED IN HEART, SIGNAL = 2.7; EXPRESSED IN ADULT LIVER, SIGNAL = 2.3; EST_HUMAN HIT: BF343908.1, EVALUE 7.80e-01
HPGVLTSLFQDQSLTDTFVDIGLQFFHVQTPKPSACILCSFFCFCGCL

SEQ ID NO: 38489 - protein, 38 aa, Homo sapiens
  MAP TO AC006360.2; EXPRESSED IN LUNG, SIGNAL = 2.8; EXPRESSED IN FETAL LIVER, SIGNAL = 2.7; EXPRESSED IN BRAIN, SIGNAL = 2.6; EXPRESSED IN BONE MARROW, SIGNAL = 2.5; EXPRESSED IN HELA, SIGNAL = 2.5; EXPRESSED IN PLACENTA, SIGNAL = 2.6; EXPRESSED IN HEART, SIGNAL = 2.7; EXPRESSED IN ADULT LIVER, SIGNAL = 2.3; SWISSPROT HIT: O00270, EVALUE 8.40e+00
RQPQKQKKLQRMQALGFGVWTWKNCRPISTNVSVRLWS

SEQ ID NO: 38490 - protein, 38 aa, Homo sapiens
  MAP TO AC005282.1; EXPRESSED IN LUNG, SIGNAL =  13; EXPRESSED IN HELA, SIGNAL =  13; EXPRESSED IN BRAIN, SIGNAL =  13; EXPRESSED IN BONE MARROW, SIGNAL =  14; EXPRESSED IN ADULT LIVER, SIGNAL =  11; EXPRESSED IN PLACENTA, SIGNAL =  12; EXPRESSED IN HEART, SIGNAL =  12; EXPRESSED IN FETAL LIVER, SIGNAL =  13
SLDPLCAGLVPGVGGPVENKIRLLPWDFRLVGSPEEDV

SEQ ID NO: 38491 - protein, 63 aa, Homo sapiens
  MAP TO AC005588.1; EXPRESSED IN PLACENTA, SIGNAL = 4.3; EXPRESSED IN LUNG, SIGNAL = 5.1; EXPRESSED IN HEART, SIGNAL = 4.3; EXPRESSED IN BRAIN, SIGNAL = 4.6; EXPRESSED IN BONE MARROW, SIGNAL = 4.1; EXPRESSED IN ADULT LIVER, SIGNAL = 4.3; EXPRESSED IN HELA, SIGNAL = 4.2; EXPRESSED IN FETAL LIVER, SIGNAL = 4.2; EST_HUMAN HIT: N78278.1, EVALUE 5.90e+00
MLTPSLIFRFDLYVPDLESQLFTASTTDMFLAIVHVHVCISIFSALCSFLFSLNEVSIHPTGK

SEQ ID NO: 38492 - protein, 62 aa, Homo sapiens
  MAP TO AC005588.1; EXPRESSED IN PLACENTA, SIGNAL = 4.3; EXPRESSED IN LUNG, SIGNAL = 5.1; EXPRESSED IN HEART, SIGNAL = 4.3; EXPRESSED IN BRAIN, SIGNAL = 4.6; EXPRESSED IN BONE MARROW, SIGNAL = 4.1; EXPRESSED IN ADULT LIVER, SIGNAL = 4.3; EXPRESSED IN HELA, SIGNAL = 4.2; EXPRESSED IN FETAL LIVER, SIGNAL = 4.2; EST_HUMAN HIT: R74420.1, EVALUE 7.80e+00
LRGLHSTRHVDPQLDLQVRPLCSRPREPTLYCIHHRYVPCHCTCPCLHLHLLCPLLLLIFLE

SEQ ID NO: 38493 - protein, 26 aa, Homo sapiens
  MAP TO AC006368.2; EXPRESSED IN PLACENTA, SIGNAL = 7.2; EXPRESSED IN ADULT LIVER, SIGNAL = 8.6; EXPRESSED IN LUNG, SIGNAL = 5.1; EXPRESSED IN HEART, SIGNAL =  20; EXPRESSED IN FETAL LIVER, SIGNAL = 9.8; EXPRESSED IN BRAIN, SIGNAL = 3.5; EXPRESSED IN HELA, SIGNAL = 6.3; EXPRESSED IN BONE MARROW, SIGNAL = 5.7; EST_HUMAN HIT: AI435169.1, EVALUE 2.00e-07
VPLETGGAVVSCDFEQVVSFLQASAP

SEQ ID NO: 38494 - protein, 91 aa, Homo sapiens
  MAP TO AC004892.2; EXPRESSED IN PLACENTA, SIGNAL =  15; EXPRESSED IN HELA, SIGNAL =  14; EXPRESSED IN HEART, SIGNAL =  14; EXPRESSED IN ADULT LIVER, SIGNAL =  15; EXPRESSED IN BONE MARROW, SIGNAL =  14; EXPRESSED IN BRAIN, SIGNAL =  17; EXPRESSED IN FETAL LIVER, SIGNAL =  15; EXPRESSED IN LUNG, SIGNAL =  17; SWISSPROT HIT: P49006, EVALUE 9.20e-02
KCTSNSASKGLFLLGALYFSCFSAFSILTGDPSTAAQVSTGSHPSSKLPPATTTNVSAAWLTQNQWGPKAHSPQYPAGYTKCQVPAQAEDR

SEQ ID NO: 38495 - protein, 27 aa, Homo sapiens
  MAP TO AC002457.1; EXPRESSED IN BRAIN, SIGNAL = 4.4; EXPRESSED IN ADULT LIVER, SIGNAL = 4.5; EXPRESSED IN PLACENTA, SIGNAL = 4.4; EXPRESSED IN LUNG, SIGNAL =   5; EXPRESSED IN HELA, SIGNAL = 3.9; EXPRESSED IN HEART, SIGNAL = 3.6; EXPRESSED IN BONE MARROW, SIGNAL = 4.2; EXPRESSED IN FETAL LIVER, SIGNAL = 4.6; SWISSPROT HIT: P08183, EVALUE 4.00e-09
MLVFGEMTDIFANAGNLEDLMSNITNR

SEQ ID NO: 38496 - protein, 30 aa, Homo sapiens
  MAP TO AC004518.1; EXPRESSED IN HEART, SIGNAL = 1.4; EXPRESSED IN BRAIN, SIGNAL = 1.5; EXPRESSED IN PLACENTA, SIGNAL = 1.5; EXPRESSED IN LUNG, SIGNAL = 1.7; EXPRESSED IN FETAL LIVER, SIGNAL = 1.6; EXPRESSED IN BONE MARROW, SIGNAL = 1.5; EXPRESSED IN ADULT LIVER, SIGNAL = 1.7
CEKHFGDPKEGAIVKKFHQSRGKNGERACL

SEQ ID NO: 38497 - protein, 72 aa, Homo sapiens
  MAP TO AC005598.6; EXPRESSED IN LUNG, SIGNAL = 4.4; EXPRESSED IN HELA, SIGNAL = 2.8; EXPRESSED IN HEART, SIGNAL = 2.5; EXPRESSED IN FETAL LIVER, SIGNAL = 3.5; EXPRESSED IN BRAIN, SIGNAL = 2.5; EXPRESSED IN PLACENTA, SIGNAL =   4; EXPRESSED IN BONE MARROW, SIGNAL = 2.8; EXPRESSED IN ADULT LIVER, SIGNAL =   3; EST_HUMAN HIT: AU133399.1, EVALUE 3.00e-17
IKETKEALENMNSTLKSLHQQSTQLSSSLTSVKTSLRSSLNDPLCLVHPSSETCNSIRLSLSQLNSNPELRQ

SEQ ID NO: 38498 - protein, 31 aa, Homo sapiens
  MAP TO AC004606.1; EXPRESSED IN PLACENTA, SIGNAL = 1.3; EXPRESSED IN LUNG, SIGNAL = 1.4; EXPRESSED IN FETAL LIVER, SIGNAL = 1.7; EXPRESSED IN BONE MARROW, SIGNAL = 1.3; EXPRESSED IN ADULT LIVER, SIGNAL = 1.4; EXPRESSED IN HEART, SIGNAL = 1.6; EXPRESSED IN BRAIN, SIGNAL = 1.3
LTDWNKVDLANEKPEVYAGIFFDMGITFQLK

SEQ ID NO: 38499 - protein, 25 aa, Homo sapiens
  MAP TO AC005288.1; EXPRESSED IN BONE MARROW, SIGNAL =  28; EXPRESSED IN PLACENTA, SIGNAL =  23; EXPRESSED IN LUNG, SIGNAL =  25; EXPRESSED IN HELA, SIGNAL =  25; EXPRESSED IN HEART, SIGNAL =  23; EXPRESSED IN FETAL LIVER, SIGNAL =  23; EXPRESSED IN BRAIN, SIGNAL =  31; EXPRESSED IN ADULT LIVER, SIGNAL =  24; SWISSPROT HIT: P34284, EVALUE 1.00e-06
AWNVLALDGSNWQRIDLFDFQRDIE

SEQ ID NO: 38500 - protein, 26 aa, Homo sapiens
  MAP TO AC005288.1; EXPRESSED IN BONE MARROW, SIGNAL =  28; EXPRESSED IN PLACENTA, SIGNAL =  23; EXPRESSED IN LUNG, SIGNAL =  25; EXPRESSED IN HELA, SIGNAL =  25; EXPRESSED IN HEART, SIGNAL =  23; EXPRESSED IN FETAL LIVER, SIGNAL =  23; EXPRESSED IN BRAIN, SIGNAL =  31; EXPRESSED IN ADULT LIVER, SIGNAL =  24; EST_HUMAN HIT: BF433100.1, EVALUE 2.00e-03
WMAVTGSELTYLISRGILRYNYVVCG

SEQ ID NO: 38501 - protein, 58 aa, Homo sapiens
  MAP TO AC005231.2; EXPRESSED IN LUNG, SIGNAL =  11; EXPRESSED IN FETAL LIVER, SIGNAL =  12; EXPRESSED IN PLACENTA, SIGNAL =  11; EXPRESSED IN HELA, SIGNAL =  10; EXPRESSED IN BRAIN, SIGNAL =  13; EXPRESSED IN BONE MARROW, SIGNAL =  11; EXPRESSED IN ADULT LIVER, SIGNAL =  12; EXPRESSED IN HEART, SIGNAL =  10; SWISSPROT HIT: O88307, EVALUE 2.00e+00
MKALSSKELLTKKTWIMCKHGHMVLFVTGHTPGSCVPQPSSAACKMGSSHHLRAPEQG

SEQ ID NO: 38502 - protein, 19 aa, Homo sapiens
  MAP TO AC005231.2; EXPRESSED IN LUNG, SIGNAL =  11; EXPRESSED IN FETAL LIVER, SIGNAL =  12; EXPRESSED IN PLACENTA, SIGNAL =  11; EXPRESSED IN HELA, SIGNAL =  10; EXPRESSED IN BRAIN, SIGNAL =  13; EXPRESSED IN BONE MARROW, SIGNAL =  11; EXPRESSED IN ADULT LIVER, SIGNAL =  12; EXPRESSED IN HEART, SIGNAL =  10
HHVASQGRRHEGSEQQRAA

SEQ ID NO: 38503 - protein, 31 aa, Homo sapiens
  MAP TO AC006531.1; EXPRESSED IN PLACENTA, SIGNAL = 1.5; EXPRESSED IN LUNG, SIGNAL = 1.4; EXPRESSED IN BONE MARROW, SIGNAL = 1.7; EXPRESSED IN HEART, SIGNAL = 1.7; EXPRESSED IN FETAL LIVER, SIGNAL = 1.8; EXPRESSED IN BRAIN, SIGNAL = 1.2; EXPRESSED IN ADULT LIVER, SIGNAL = 1.8
YLRWSVLVHTPLISLLSLSSPPPSPSSSSSS

SEQ ID NO: 38504 - protein, 51 aa, Homo sapiens
  MAP TO AC004927.2; EXPRESSED IN LUNG, SIGNAL = 7.7; EXPRESSED IN BONE MARROW, SIGNAL = 5.7; EXPRESSED IN PLACENTA, SIGNAL = 6.8; EXPRESSED IN HELA, SIGNAL = 6.3; EXPRESSED IN HEART, SIGNAL = 5.1; EXPRESSED IN FETAL LIVER, SIGNAL = 6.2; EXPRESSED IN BRAIN, SIGNAL = 6.2; EXPRESSED IN ADULT LIVER, SIGNAL = 6.4; EST_HUMAN HIT: AA077705.1, EVALUE 9.00e-06
LVPRISTDDMDLVPRISTDDIHLVPRINADDMDLVPRIILTQPSPFTSIRQ

SEQ ID NO: 38505 - protein, 70 aa, Homo sapiens
  MAP TO AC005393.1; EXPRESSED IN PLACENTA, SIGNAL = 2.8; EXPRESSED IN LUNG, SIGNAL = 2.2; EXPRESSED IN HEART, SIGNAL = 1.8; EXPRESSED IN BRAIN, SIGNAL = 1.6; EXPRESSED IN BONE MARROW, SIGNAL = 9.8; EXPRESSED IN ADULT LIVER, SIGNAL = 1.7; EXPRESSED IN HELA, SIGNAL = 1.7; EXPRESSED IN FETAL LIVER, SIGNAL = 2.4; SWISSPROT HIT: Q05315, EVALUE 3.00e-37
NEPYLQVDFHTEMKEESDIVFHFQVCFGRRVVMNSREYGAWKQQVESKNMPFQDGQEFELSISVLPDKYQ

SEQ ID NO: 38506 - protein, 76 aa, Homo sapiens
  MAP TO AC004161.1; EXPRESSED IN PLACENTA, SIGNAL = 3.8; EXPRESSED IN LUNG, SIGNAL = 4.1; EXPRESSED IN FETAL LIVER, SIGNAL = 3.8; EXPRESSED IN BONE MARROW, SIGNAL = 3.3; EXPRESSED IN HELA, SIGNAL = 3.1; EXPRESSED IN BRAIN, SIGNAL =   3; EXPRESSED IN ADULT LIVER, SIGNAL = 4.1; EXPRESSED IN HEART, SIGNAL = 2.5; SWISSPROT HIT: O00501, EVALUE 1.40e+00
GWASTWAIPELCGMWTLTGTPSMSSPIQLTTIFGPVKQGNSWPYSRPIQLCGSAVLTLGAISSRSPWRSRKAISAL

SEQ ID NO: 38507 - protein, 42 aa, Homo sapiens
  MAP TO AC006144.1; EXPRESSED IN BONE MARROW, SIGNAL = 1.4; EXPRESSED IN HEART, SIGNAL = 1.5; EXPRESSED IN FETAL LIVER, SIGNAL = 1.3; EXPRESSED IN ADULT LIVER, SIGNAL = 1.4; EXPRESSED IN PLACENTA, SIGNAL = 2.3; EXPRESSED IN BRAIN, SIGNAL = 1.3; EXPRESSED IN LUNG, SIGNAL = 1.5
PAQNSIIIGNMVCILSDPDDVSQEVGFEKVDSAFIEEGVAVQ

SEQ ID NO: 38508 - protein, 75 aa, Homo sapiens
  MAP TO AC004526.1; EXPRESSED IN ADULT LIVER, SIGNAL =  17; EXPRESSED IN PLACENTA, SIGNAL =  15; EXPRESSED IN HEART, SIGNAL =  15; EXPRESSED IN FETAL LIVER, SIGNAL =  16; EXPRESSED IN BRAIN, SIGNAL =  22; EXPRESSED IN BONE MARROW, SIGNAL =  15; EXPRESSED IN LUNG, SIGNAL =  13; EXPRESSED IN HELA, SIGNAL =  11; SWISSPROT HIT: P21359, EVALUE 4.00e-40
TPPICRQAQTKLEVALYMFLWNPDTEAVLVAMSCFRHLCEEADIRCGVDEVSVHNLLPNYNTFMEFASVSNMMST

SEQ ID NO: 38509 - protein, 46 aa, Homo sapiens
  MAP TO AC004991.1; EXPRESSED IN PLACENTA, SIGNAL = 5.1; EXPRESSED IN ADULT LIVER, SIGNAL = 5.1; EXPRESSED IN LUNG, SIGNAL = 5.3; EXPRESSED IN HEART, SIGNAL = 5.3; EXPRESSED IN FETAL LIVER, SIGNAL = 5.3; EXPRESSED IN BRAIN, SIGNAL = 7.2; EXPRESSED IN HELA, SIGNAL = 5.6; EXPRESSED IN BONE MARROW, SIGNAL = 5.2; SWISSPROT HIT: O04857, EVALUE 8.20e+00
MEKGLSSTIRVVGHVPGEFPVSVWVTAADCWMCQPVARGFVVLPIT

SEQ ID NO: 38510 - protein, 50 aa, Homo sapiens
  MAP TO AC005316.1; EXPRESSED IN PLACENTA, SIGNAL = 3.8; EXPRESSED IN LUNG, SIGNAL = 5.7; EXPRESSED IN FETAL LIVER, SIGNAL = 3.6; EXPRESSED IN ADULT LIVER, SIGNAL = 3.7; EXPRESSED IN HELA, SIGNAL = 3.9; EXPRESSED IN HEART, SIGNAL =   4; EXPRESSED IN BRAIN, SIGNAL = 4.1; EXPRESSED IN BONE MARROW, SIGNAL = 3.6; SWISSPROT HIT: P54098, EVALUE 5.00e-19
YKEDPWLWDLEWDLQEFKQKKAKKVKKEPATASKLPIEGAGAPGDPMDQE

SEQ ID NO: 38511 - protein, 30 aa, Homo sapiens
  MAP TO AC005316.1; EXPRESSED IN PLACENTA, SIGNAL = 3.8; EXPRESSED IN LUNG, SIGNAL = 5.7; EXPRESSED IN FETAL LIVER, SIGNAL = 3.6; EXPRESSED IN ADULT LIVER, SIGNAL = 3.7; EXPRESSED IN HELA, SIGNAL = 3.9; EXPRESSED IN HEART, SIGNAL =   4; EXPRESSED IN BRAIN, SIGNAL = 4.1; EXPRESSED IN BONE MARROW, SIGNAL = 3.6; EST_HUMAN HIT: BE903223.1, EVALUE 4.00e-08
WTGSVGTKKTPGSGTWSGTCKNLSRRKLRR

SEQ ID NO: 38512 - protein, 79 aa, Homo sapiens
  MAP TO AC004222.1; EXPRESSED IN ADULT LIVER, SIGNAL =   3; EXPRESSED IN PLACENTA, SIGNAL = 3.3; EXPRESSED IN LUNG, SIGNAL = 3.6; EXPRESSED IN HELA, SIGNAL = 3.5; EXPRESSED IN HEART, SIGNAL = 3.3; EXPRESSED IN BRAIN, SIGNAL = 3.1; EXPRESSED IN FETAL LIVER, SIGNAL =   3; EXPRESSED IN BONE MARROW, SIGNAL = 2.9; SWISSPROT HIT: P21359, EVALUE 7.00e-43
DSAAGCSGTPPICRQAQTKLEVALYMFLWNPDTEAVLVAMSCFRHLCEEADIRCGVDEVSVHNLLPNYNTFMEFASVSN

SEQ ID NO: 38513 - protein, 29 aa, Homo sapiens
  MAP TO AC004615.1; EXPRESSED IN HEART, SIGNAL = 2.4; EXPRESSED IN ADULT LIVER, SIGNAL = 2.6; EXPRESSED IN PLACENTA, SIGNAL = 2.6; EXPRESSED IN FETAL LIVER, SIGNAL = 1.9; EXPRESSED IN BRAIN, SIGNAL = 3.6; EXPRESSED IN BONE MARROW, SIGNAL = 2.7; EXPRESSED IN LUNG, SIGNAL = 3.1; EXPRESSED IN HELA, SIGNAL = 2.6; EST_HUMAN HIT: AV653405.1, EVALUE 2.00e-03
MAKGAKVQLRLRLQRVQAPSLSSIYVVLG

SEQ ID NO: 38514 - protein, 37 aa, Homo sapiens
  MAP TO AC006538.1; EXPRESSED IN BRAIN, SIGNAL = 3.4; EXPRESSED IN LUNG, SIGNAL = 2.9; EXPRESSED IN FETAL LIVER, SIGNAL =   4; EXPRESSED IN BONE MARROW, SIGNAL = 3.2; EXPRESSED IN ADULT LIVER, SIGNAL = 3.3; EXPRESSED IN PLACENTA, SIGNAL = 2.5; EXPRESSED IN HEART, SIGNAL = 4.4; EXPRESSED IN HELA, SIGNAL = 3.4; SWISSPROT HIT: O43765, EVALUE 2.00e-08
GQQFAQQMQQQNPELIEQLRSQIRSRTPSASNDDQQE

SEQ ID NO: 38515 - protein, 46 aa, Homo sapiens
  MAP TO AC006427.13; EXPRESSED IN HEART, SIGNAL = 1.8
GHQQHPPGGGGHGFICCPLLADQSTFFNDLLSFKPLSTRYLLNFSD

SEQ ID NO: 38516 - protein, 58 aa, Homo sapiens
  MAP TO AC007092.4; EXPRESSED IN FETAL LIVER, SIGNAL = 2.8; EXPRESSED IN PLACENTA, SIGNAL = 3.4; EXPRESSED IN BRAIN, SIGNAL = 1.7; EXPRESSED IN HELA, SIGNAL = 2.8; EXPRESSED IN BONE MARROW, SIGNAL = 2.1; EXPRESSED IN HEART, SIGNAL =   2; EXPRESSED IN LUNG, SIGNAL = 2.5; EXPRESSED IN ADULT LIVER, SIGNAL = 2.4; EST_HUMAN HIT: AW078621.1, EVALUE 1.00e-06
VGMAGEALGNLQSWQKGKANTSFLTWQQQGEVQSEVGEVPCKTIRSRENSLTIMRTAC

SEQ ID NO: 38517 - protein, 36 aa, Homo sapiens
  MAP TO AC004624.6; EXPRESSED IN HELA, SIGNAL = 2.3; EXPRESSED IN BRAIN, SIGNAL = 2.2; EXPRESSED IN PLACENTA, SIGNAL = 1.7; EXPRESSED IN LUNG, SIGNAL = 1.8; EXPRESSED IN BONE MARROW, SIGNAL =   3; EXPRESSED IN HEART, SIGNAL = 1.5; EXPRESSED IN ADULT LIVER, SIGNAL = 1.9; EXPRESSED IN FETAL LIVER, SIGNAL = 2.8; EST_HUMAN HIT: AA011047.1, EVALUE 3.30e+00
WSHPEALNKNQCRSLNPNLLTLRAWAATSCPDSHLP

SEQ ID NO: 38518 - protein, 83 aa, Homo sapiens
  MAP TO AC007463.3; EXPRESSED IN BONE MARROW, SIGNAL = 2.8; EXPRESSED IN LUNG, SIGNAL = 3.2; EXPRESSED IN HEART, SIGNAL = 2.1; EXPRESSED IN FETAL LIVER, SIGNAL = 3.1; EXPRESSED IN ADULT LIVER, SIGNAL = 3.2; EXPRESSED IN PLACENTA, SIGNAL = 4.1; EXPRESSED IN HELA, SIGNAL = 3.3; EXPRESSED IN BRAIN, SIGNAL = 2.9; SWISSPROT HIT: P26509, EVALUE 1.20e+00
SYQIARPMQVPSALRAMGHQATSWAETERQFSSTRHRGCSHLFLKLFLSMACALVQKLCKRADQGHLVRVCAGTLTPPPAVVT

SEQ ID NO: 38519 - protein, 43 aa, Homo sapiens
  MAP TO AC007556.2; EXPRESSED IN ADULT LIVER, SIGNAL = 1.8; EXPRESSED IN HELA, SIGNAL = 1.7; EXPRESSED IN BRAIN, SIGNAL = 2.1; EXPRESSED IN PLACENTA, SIGNAL = 3.1; EXPRESSED IN HEART, SIGNAL = 1.4; EXPRESSED IN LUNG, SIGNAL = 1.4; EXPRESSED IN BONE MARROW, SIGNAL = 2.1; SWISSPROT HIT: P98164, EVALUE 1.00e-21
KGKERTCAENICEQNCTQLNEGGFICSCTAGFETNVFDRTSCL

SEQ ID NO: 38520 - protein, 18 aa, Homo sapiens
  MAP TO AC007719.1; EXPRESSED IN LUNG, SIGNAL = 3.1; EXPRESSED IN ADULT LIVER, SIGNAL =   3; EXPRESSED IN FETAL LIVER, SIGNAL = 2.8; EXPRESSED IN HELA, SIGNAL = 5.8; EXPRESSED IN PLACENTA, SIGNAL = 3.6; EXPRESSED IN BRAIN, SIGNAL = 2.9; EXPRESSED IN HEART, SIGNAL = 1.3; EST_HUMAN HIT: AW852494.1, EVALUE 2.80e+00
  unsure 2
VXGPRQASLRGLTPLKPG

SEQ ID NO: 38521 - protein, 36 aa, Homo sapiens
  MAP TO AC008009.4; EXPRESSED IN HEART, SIGNAL = 1.4; EXPRESSED IN BONE MARROW, SIGNAL = 1.4
AERRCKNTNPQESEPTGLCPGECDSPITETSRPQSH

SEQ ID NO: 38522 - protein, 26 aa, Homo sapiens
  MAP TO AC008272.1; EXPRESSED IN BONE MARROW, SIGNAL = 4.5; EXPRESSED IN PLACENTA, SIGNAL = 9.9; EXPRESSED IN HEART, SIGNAL =  13; EXPRESSED IN LUNG, SIGNAL =  16; EXPRESSED IN ADULT LIVER, SIGNAL =  12; EXPRESSED IN FETAL LIVER, SIGNAL =  25; EXPRESSED IN BRAIN, SIGNAL = 4.1; EXPRESSED IN HELA, SIGNAL =  23; SWISSPROT HIT: P29226, EVALUE 5.00e+00
NQPNDNNKINKIHNQEIHKKGNQKSI

SEQ ID NO: 38523 - protein, 26 aa, Homo sapiens [sequence omitted]

SEQ ID NO: 38524 - protein, 47 aa, Homo sapiens
  MAP TO AL021707.2; EXPRESSED IN PLACENTA, SIGNAL = 1.7; EXPRESSED IN HEART, SIGNAL = 2.1; EXPRESSED IN FETAL LIVER, SIGNAL = 3.3; EXPRESSED IN BRAIN, SIGNAL = 2.2; EXPRESSED IN HELA, SIGNAL = 2.3; EXPRESSED IN BONE MARROW, SIGNAL =   2; EXPRESSED IN LUNG, SIGNAL = 2.8; EXPRESSED IN ADULT LIVER, SIGNAL = 1.5; SWISSPROT HIT: O75106, EVALUE 2.80e+00
PGKWLWAGSWVGTSYSGIRGWVCAGDALMRPGSSPWQGVGTVVSGTT

SEQ ID NO: 38525 - protein, 22 aa, Homo sapiens
  MAP TO AC002472.3; EXPRESSED IN LUNG, SIGNAL = 4.1; EXPRESSED IN HELA, SIGNAL = 4.1; EXPRESSED IN PLACENTA, SIGNAL = 3.9; EXPRESSED IN BONE MARROW, SIGNAL =   4; EXPRESSED IN HEART, SIGNAL = 2.7; EXPRESSED IN ADULT LIVER, SIGNAL = 1.8; EXPRESSED IN FETAL LIVER, SIGNAL = 2.9; EXPRESSED IN BRAIN, SIGNAL = 4.6; EST_HUMAN HIT: BF677497.1, EVALUE 8.20e+00
DHRQGLVVNAHLPEKGKKAVRE

SEQ ID NO: 38526 - protein, 33 aa, Homo sapiens
  MAP TO AP000344.1; EXPRESSED IN BRAIN, SIGNAL = 7.3; EXPRESSED IN LUNG, SIGNAL = 6.7; EXPRESSED IN ADULT LIVER, SIGNAL = 6.5; EXPRESSED IN HELA, SIGNAL = 6.4; EXPRESSED IN PLACENTA, SIGNAL = 6.8; EXPRESSED IN BONE MARROW, SIGNAL = 4.5; EXPRESSED IN HEART, SIGNAL = 5.8; EXPRESSED IN FETAL LIVER, SIGNAL = 7.8
SNPLWACQHGTMTVLMTVVRMGSVTATIVTEVW

SEQ ID NO: 38527 - protein, 36 aa, Homo sapiens
  MAP TO AC004832.3; EXPRESSED IN PLACENTA, SIGNAL = 3.2; EXPRESSED IN BRAIN, SIGNAL = 3.3; EXPRESSED IN BONE MARROW, SIGNAL = 3.4; EXPRESSED IN LUNG, SIGNAL = 2.4; EXPRESSED IN HEART, SIGNAL = 2.2; EXPRESSED IN FETAL LIVER, SIGNAL = 2.6; EXPRESSED IN ADULT LIVER, SIGNAL = 2.8; EXPRESSED IN HELA, SIGNAL = 2.4
CLVNGKNFHSHFVPQEVPKRLELSFQAFSFTGTPAD

SEQ ID NO: 38528 - protein, 34 aa, Homo sapiens
  MAP TO AC004832.3; EXPRESSED IN PLACENTA, SIGNAL = 3.2; EXPRESSED IN BRAIN, SIGNAL = 3.3; EXPRESSED IN BONE MARROW, SIGNAL = 3.4; EXPRESSED IN LUNG, SIGNAL = 2.4; EXPRESSED IN HEART, SIGNAL = 2.2; EXPRESSED IN FETAL LIVER, SIGNAL = 2.6; EXPRESSED IN ADULT LIVER, SIGNAL = 2.8; EXPRESSED IN HELA, SIGNAL = 2.4; SWISSPROT HIT: P49788, EVALUE 1.70e+00
PGERQELPLPLRAPRGPQETGALLPGLQLYWYSC

SEQ ID NO: 38529 - protein, 31 aa, Homo sapiens
  MAP TO AC004832.3; EXPRESSED IN PLACENTA, SIGNAL = 1.6; EXPRESSED IN HEART, SIGNAL = 1.8; EXPRESSED IN BONE MARROW, SIGNAL = 2.2; EXPRESSED IN ADULT LIVER, SIGNAL = 3.6; EXPRESSED IN FETAL LIVER, SIGNAL = 3.6; EXPRESSED IN BRAIN, SIGNAL =   2; EXPRESSED IN HELA, SIGNAL = 1.9; EXPRESSED IN LUNG, SIGNAL = 1.6; SWISSPROT HIT: Q92503, EVALUE 1.00e-02
GRKVETITIIYDCEGLGLKHLWKPAVEAYGE

SEQ ID NO: 38530 - protein, 39 aa, Homo sapiens
  MAP TO AC007556.2; EXPRESSED IN LUNG, SIGNAL = 4.1; EXPRESSED IN HEART, SIGNAL =   3; EXPRESSED IN BONE MARROW, SIGNAL = 4.2; EXPRESSED IN FETAL LIVER, SIGNAL = 3.2; EXPRESSED IN ADULT LIVER, SIGNAL = 3.9; EXPRESSED IN BRAIN, SIGNAL =   3; EXPRESSED IN PLACENTA, SIGNAL =   4; EXPRESSED IN HELA, SIGNAL = 3.1; SWISSPROT HIT: P98164, EVALUE 1.00e-11
VPCNSPNRFRCDNNRCIYSHEVCNGVDDCGDGTDETEEH

SEQ ID NO: 38531 - protein, 40 aa, Homo sapiens
  MAP TO AC007556.2; EXPRESSED IN LUNG, SIGNAL = 4.1; EXPRESSED IN HEART, SIGNAL =   3; EXPRESSED IN BONE MARROW, SIGNAL = 4.2; EXPRESSED IN FETAL LIVER, SIGNAL = 3.2; EXPRESSED IN ADULT LIVER, SIGNAL = 3.9; EXPRESSED IN BRAIN, SIGNAL =   3; EXPRESSED IN PLACENTA, SIGNAL =   4; EXPRESSED IN HELA, SIGNAL = 3.1
MFPVIHQTVSGVTTIAAFIVMRCAMVWMTVEMELMRQRST

SEQ ID NO: 38532 - protein, 37 aa, Homo sapiens
  MAP TO AL023553.5; EXPRESSED IN HEART, SIGNAL = 6.4; EXPRESSED IN BONE MARROW, SIGNAL = 1.7; EXPRESSED IN FETAL LIVER, SIGNAL = 3.2; EXPRESSED IN PLACENTA, SIGNAL = 1.9; EXPRESSED IN LUNG, SIGNAL = 2.5; EXPRESSED IN ADULT LIVER, SIGNAL = 1.6; EXPRESSED IN BRAIN, SIGNAL = 3.3; EXPRESSED IN HELA, SIGNAL = 2.7; SWISSPROT HIT: Q99798, EVALUE 2.00e-16
KDIKKGEKNTIVTSYNRNFTGRNDANPETHAFVTSPE

SEQ ID NO: 38533 - protein, 75 aa, Homo sapiens
  MAP TO AP000352.2; EXPRESSED IN FETAL LIVER, SIGNAL = 2.4; EXPRESSED IN PLACENTA, SIGNAL = 2.4; EXPRESSED IN BRAIN, SIGNAL = 1.4; EXPRESSED IN HELA, SIGNAL = 1.6; EXPRESSED IN HEART, SIGNAL =   2; EXPRESSED IN BONE MARROW, SIGNAL = 1.7; EXPRESSED IN LUNG, SIGNAL = 1.8; SWISSPROT HIT: Q9Y6J0, EVALUE 8.00e-38
LGESLLAMYNHLTTCEPPRPSLGKRIDLSDYQDPSQPLESSMVVTPVNVIQPSTVSTNPAVAVAEPVVSYTSVAT

SEQ ID NO: 38534 - protein, 43 aa, Homo sapiens
  MAP TO AP000352.2; EXPRESSED IN FETAL LIVER, SIGNAL = 2.4; EXPRESSED IN PLACENTA, SIGNAL = 2.4; EXPRESSED IN BRAIN, SIGNAL = 1.4; EXPRESSED IN HELA, SIGNAL = 1.6; EXPRESSED IN HEART, SIGNAL =   2; EXPRESSED IN BONE MARROW, SIGNAL = 1.7; EXPRESSED IN LUNG, SIGNAL = 1.8; SWISSPROT HIT: P28942, EVALUE 2.50e-01
SERACWPCTIISPPVSPHVPALAKGLICRTTRTPASLLSPPWW

SEQ ID NO: 38535 - protein, 51 aa, Homo sapiens
  MAP TO AP000352.2; EXPRESSED IN FETAL LIVER, SIGNAL =  12; EXPRESSED IN BRAIN, SIGNAL = 3.6; EXPRESSED IN HELA, SIGNAL = 4.5; EXPRESSED IN PLACENTA, SIGNAL = 8.4; EXPRESSED IN BONE MARROW, SIGNAL = 3.4; EXPRESSED IN LUNG, SIGNAL = 4.8; EXPRESSED IN HEART, SIGNAL = 3.8; EXPRESSED IN ADULT LIVER, SIGNAL = 8.6; SWISSPROT HIT: Q9Y6J0, EVALUE 1.00e-25
GRFGPDFPGTHCLGDLLQLSFASSQRDLFEDGWLEFVVRVYWLKARFLALQ

SEQ ID NO: 38536 - protein, 42 aa, Homo sapiens
  MAP TO AP000352.2; EXPRESSED IN FETAL LIVER, SIGNAL =  12; EXPRESSED IN BRAIN, SIGNAL = 3.6; EXPRESSED IN HELA, SIGNAL = 4.5; EXPRESSED IN PLACENTA, SIGNAL = 8.4; EXPRESSED IN BONE MARROW, SIGNAL = 3.4; EXPRESSED IN LUNG, SIGNAL = 4.8; EXPRESSED IN HEART, SIGNAL = 3.8; EXPRESSED IN ADULT LIVER, SIGNAL = 8.6; SWISSPROT HIT: Q9UKP4, EVALUE 6.30e+00
ADLDLTSQGPTAWVTSYSCHLPRPSATCSRMVGWSLWSVFTG

SEQ ID NO: 38537 - protein, 67 aa, Homo sapiens
  MAP TO AC004032.7; EXPRESSED IN LUNG, SIGNAL = 4.6; EXPRESSED IN HEART, SIGNAL = 3.4; EXPRESSED IN BONE MARROW, SIGNAL = 7.3; EXPRESSED IN ADULT LIVER, SIGNAL = 4.2; EXPRESSED IN BRAIN, SIGNAL = 6.9; EXPRESSED IN PLACENTA, SIGNAL = 3.8; EXPRESSED IN FETAL LIVER, SIGNAL = 6.3; EXPRESSED IN HELA, SIGNAL = 5.9; EST_HUMAN HIT: AA128800.1, EVALUE 4.30e+00
MAELGGPSRPWSHDLLSLKSSFWRCSVPWFVESGFSSSPGKGGLLLGSLQRSEAKQGRRLQLGLQDT

SEQ ID NO: 38538 - protein, 36 aa, Homo sapiens
  MAP TO AC006538.1; EXPRESSED IN BRAIN, SIGNAL = 3.4; EXPRESSED IN LUNG, SIGNAL = 2.9; EXPRESSED IN FETAL LIVER, SIGNAL =   4; EXPRESSED IN BONE MARROW, SIGNAL = 3.2; EXPRESSED IN ADULT LIVER, SIGNAL = 3.3; EXPRESSED IN PLACENTA, SIGNAL = 2.5; EXPRESSED IN HEART, SIGNAL = 4.4; EXPRESSED IN HELA, SIGNAL = 3.4; SWISSPROT HIT: P22531, EVALUE 1.70e+00
MCPSPQGPAVCPADAAAEPRVDRAAQEPDPESDAQR

SEQ ID NO: 38539 - protein, 32 aa, Homo sapiens
  MAP TO AC006379.2; EXPRESSED IN LUNG, SIGNAL = 3.3; EXPRESSED IN HELA, SIGNAL = 4.6; EXPRESSED IN HEART, SIGNAL =   5; EXPRESSED IN FETAL LIVER, SIGNAL = 8.3; EXPRESSED IN BRAIN, SIGNAL = 6.8; EXPRESSED IN PLACENTA, SIGNAL = 4.7; EXPRESSED IN BONE MARROW, SIGNAL = 5.7; EXPRESSED IN ADULT LIVER, SIGNAL =   6; SWISSPROT HIT: P34413, EVALUE 1.00e-06
AVFAGAMPTMASVKLSTLHPIVNHPLYEDADL

SEQ ID NO: 38540 - protein, 54 aa, Homo sapiens
  MAP TO AC004477.1; EXPRESSED IN PLACENTA, SIGNAL =   7; EXPRESSED IN LUNG, SIGNAL = 5.6; EXPRESSED IN HEART, SIGNAL = 4.5; EXPRESSED IN HELA, SIGNAL = 4.6; EXPRESSED IN FETAL LIVER, SIGNAL = 8.8; EXPRESSED IN BRAIN, SIGNAL = 5.2; EXPRESSED IN BONE MARROW, SIGNAL = 6.1; EXPRESSED IN ADULT LIVER, SIGNAL = 6.9; SWISSPROT HIT: P09959, EVALUE 1.10e-01
NYEIPSLKKQIAKCQQLQQEYSRKEEECQAGAAEMREQFYHSCKQYGITVSGGS

SEQ ID NO: 38541 - protein, 47 aa, Homo sapiens
  MAP TO AC002467.1; EXPRESSED IN LUNG, SIGNAL = 2.1; EXPRESSED IN HELA, SIGNAL = 1.9; EXPRESSED IN HEART, SIGNAL = 2.5; EXPRESSED IN FETAL LIVER, SIGNAL = 2.8; EXPRESSED IN BONE MARROW, SIGNAL =   2; EXPRESSED IN PLACENTA, SIGNAL = 1.8; EXPRESSED IN BRAIN, SIGNAL = 2.2; EXPRESSED IN ADULT LIVER, SIGNAL =   2; SWISSPROT HIT: Q03053, EVALUE 8.10e+00
VSPRAPPWLRWLWAKMKLQRKSMSSLEAHQKSLQMNSTTEYSVFNLP

SEQ ID NO: 38542 - protein, 79 aa, Homo sapiens
  MAP TO AC004932.1; EXPRESSED IN PLACENTA, SIGNAL = 2.5; EXPRESSED IN LUNG, SIGNAL = 2.5; EXPRESSED IN HELA, SIGNAL = 2.3; EXPRESSED IN FETAL LIVER, SIGNAL = 2.3; EXPRESSED IN ADULT LIVER, SIGNAL = 2.3; EXPRESSED IN HEART, SIGNAL = 2.6; EXPRESSED IN BRAIN, SIGNAL = 2.2; EXPRESSED IN BONE MARROW, SIGNAL = 2.3; SWISSPROT HIT: P73162, EVALUE 1.40e+00
VCVIALTGAAAGMSQASLLTMQVSTDPTVCMFIEEEETFPWEPTNYTENKVVSILGLAPLSVQLQLDFSGFFLCLKEFY

SEQ ID NO: 38543 - protein, 25 aa, Homo sapiens
  MAP TO AC004932.1; EXPRESSED IN PLACENTA, SIGNAL = 2.5; EXPRESSED IN LUNG, SIGNAL = 2.5; EXPRESSED IN HELA, SIGNAL = 2.3; EXPRESSED IN FETAL LIVER, SIGNAL = 2.3; EXPRESSED IN ADULT LIVER, SIGNAL = 2.3; EXPRESSED IN HEART, SIGNAL = 2.6; EXPRESSED IN BRAIN, SIGNAL = 2.2; EXPRESSED IN BONE MARROW, SIGNAL = 2.3; EST_HUMAN HIT: AA779270.1, EVALUE 8.00e+00
VQLQACLRQASLPCKFPRIPLCACS

SEQ ID NO: 38544 - protein, 19 aa, Homo sapiens
  MAP TO AC004169.3; EXPRESSED IN PLACENTA, SIGNAL = 3.5; EXPRESSED IN HELA, SIGNAL = 3.2; EXPRESSED IN HEART, SIGNAL = 2.5; EXPRESSED IN FETAL LIVER, SIGNAL = 3.3; EXPRESSED IN BRAIN, SIGNAL =   3; EXPRESSED IN BONE MARROW, SIGNAL = 3.1; EXPRESSED IN LUNG, SIGNAL = 4.7; EXPRESSED IN ADULT LIVER, SIGNAL = 3.1; EST_HUMAN HIT: AW161935.1, EVALUE 6.00e-05
WKTRPSPAVTPVTPRAPCR

SEQ ID NO: 38545 - protein, 121 aa, Homo sapiens
  MAP TO AC006070.1; EXPRESSED IN PLACENTA, SIGNAL = 1.8; EXPRESSED IN HEART, SIGNAL = 1.9; EXPRESSED IN LUNG, SIGNAL = 1.9; EXPRESSED IN HELA, SIGNAL = 1.9; EXPRESSED IN FETAL LIVER, SIGNAL = 1.6; EXPRESSED IN BRAIN, SIGNAL = 1.9; EXPRESSED IN BONE MARROW, SIGNAL = 1.8; EXPRESSED IN ADULT LIVER, SIGNAL = 1.8
CTGAALATAGPTAGLATAAGPTADGLVAGCAAAGRLAAAGHTGGLAAGGPAAGVLTASWVAVRLAAAGHTAGGLAAGCAAAGGHNGGLPAGSPAASGPAAGRLTARGATVGHVVRGGGWAS

SEQ ID NO: 38546 - protein, 80 aa, Homo sapiens
  MAP TO AC006070.1; EXPRESSED IN PLACENTA, SIGNAL = 1.8; EXPRESSED IN HEART, SIGNAL = 1.9; EXPRESSED IN LUNG, SIGNAL = 1.9; EXPRESSED IN HELA, SIGNAL = 1.9; EXPRESSED IN FETAL LIVER, SIGNAL = 1.6; EXPRESSED IN BRAIN, SIGNAL = 1.9; EXPRESSED IN BONE MARROW, SIGNAL = 1.8; EXPRESSED IN ADULT LIVER, SIGNAL = 1.8
QPTCCRTTCCRTTCWQPTIVTTCSSTPCCQPSCCVSSCCQPYCHPTCCQNTCCRTTCCQPTCVTSCCQPSCCSTPCYQPI

SEQ ID NO: 38547 - protein, 83 aa, Homo sapiens
  MAP TO AC004687.1; EXPRESSED IN PLACENTA, SIGNAL = 3.5; EXPRESSED IN LUNG, SIGNAL = 3.7; EXPRESSED IN FETAL LIVER, SIGNAL = 3.7; EXPRESSED IN BONE MARROW, SIGNAL = 3.2; EXPRESSED IN HELA, SIGNAL = 4.1; EXPRESSED IN ADULT LIVER, SIGNAL = 3.9; EXPRESSED IN HEART, SIGNAL =   3; EXPRESSED IN BRAIN, SIGNAL = 4.2; SWISSPROT HIT: P97459, EVALUE 4.20e-01
SKKHHPISWSLLRPQTPSPRAIFSLDLDLPPGSPGRCTPKSSEPAPATLTGVPRRTAKKAESLSNSSHSESIHNSPKSCPTPE

SEQ ID NO: 38548 - protein, 27 aa, Homo sapiens
  MAP TO AC004687.1; EXPRESSED IN PLACENTA, SIGNAL = 3.5; EXPRESSED IN LUNG, SIGNAL = 3.7; EXPRESSED IN FETAL LIVER, SIGNAL = 3.7; EXPRESSED IN BONE MARROW, SIGNAL = 3.2; EXPRESSED IN HELA, SIGNAL = 4.1; EXPRESSED IN ADULT LIVER, SIGNAL = 3.9; EXPRESSED IN HEART, SIGNAL =   3; EXPRESSED IN BRAIN, SIGNAL = 4.2; SWISSPROT HIT: P17587, EVALUE 3.80e+00
IQEAPPYLLVPPQATDPKPTCHLLFRP

SEQ ID NO: 38549 - protein, 64 aa, Homo sapiens
  MAP TO AC006487.7; EXPRESSED IN PLACENTA, SIGNAL = 1.6; EXPRESSED IN LUNG, SIGNAL = 1.3; EXPRESSED IN HEART, SIGNAL = 1.9; EXPRESSED IN BRAIN, SIGNAL = 2.3; EXPRESSED IN HELA, SIGNAL = 3.2; EXPRESSED IN FETAL LIVER, SIGNAL = 2.3; EXPRESSED IN BONE MARROW, SIGNAL = 2.1; EXPRESSED IN ADULT LIVER, SIGNAL = 2.7
ETPTITMTRSIYTKTSTTMTIIIMTTTSTITIITTTATITTTSNNTSTIMTIIIMPLPSVSLPE

SEQ ID NO: 38550 - protein, 70 aa, Homo sapiens
  MAP TO AC005318.1; EXPRESSED IN LUNG, SIGNAL = 3.2; EXPRESSED IN PLACENTA, SIGNAL =   3; EXPRESSED IN HEART, SIGNAL =   3; EXPRESSED IN FETAL LIVER, SIGNAL = 2.8; EXPRESSED IN BRAIN, SIGNAL = 2.6; EXPRESSED IN BONE MARROW, SIGNAL = 2.5; EXPRESSED IN ADULT LIVER, SIGNAL = 3.1; EXPRESSED IN HELA, SIGNAL = 2.3; SWISSPROT HIT: P08910, EVALUE 3.00e-34
SCVSPAEKRENVMFVLPLHGGHLGFFEGSVLFPEPLTWMDKLVVEYANAICQWERNKLQCSDTEQVEADL

SEQ ID NO: 38551 - protein, 30 aa, Homo sapiens
  MAP TO AC005099.1; EXPRESSED IN LUNG, SIGNAL = 1.6; EXPRESSED IN FETAL LIVER, SIGNAL = 1.9; EXPRESSED IN BONE MARROW, SIGNAL = 1.7; EXPRESSED IN PLACENTA, SIGNAL = 1.6; EXPRESSED IN HELA, SIGNAL = 1.8; EXPRESSED IN HEART, SIGNAL = 1.9; EXPRESSED IN BRAIN, SIGNAL = 1.9; EXPRESSED IN ADULT LIVER, SIGNAL = 1.8
TCRAHPVSPTPTVTHICYVSERKVKVRLLR

SEQ ID NO: 38552 - protein, 20 aa, Homo sapiens
  MAP TO AC005099.1; EXPRESSED IN LUNG, SIGNAL = 1.6; EXPRESSED IN FETAL LIVER, SIGNAL = 1.9; EXPRESSED IN BONE MARROW, SIGNAL = 1.7; EXPRESSED IN PLACENTA, SIGNAL = 1.6; EXPRESSED IN HELA, SIGNAL = 1.8; EXPRESSED IN HEART, SIGNAL = 1.9; EXPRESSED IN BRAIN, SIGNAL = 1.9; EXPRESSED IN ADULT LIVER, SIGNAL = 1.8; SWISSPROT HIT: P53820, EVALUE 8.80e+00
DLQSPSRLPHPHSHTHLLCQ

SEQ ID NO: 38553 - protein, 39 aa, Homo sapiens
  MAP TO AC005237.2; EXPRESSED IN FETAL LIVER, SIGNAL = 1.7; EXPRESSED IN BRAIN, SIGNAL = 1.9; EXPRESSED IN BONE MARROW, SIGNAL = 1.5; EXPRESSED IN PLACENTA, SIGNAL = 1.6; EXPRESSED IN HEART, SIGNAL = 1.9; EXPRESSED IN ADULT LIVER, SIGNAL = 1.7; EXPRESSED IN LUNG, SIGNAL = 1.9; SWISSPROT HIT: P22194, EVALUE 2.00e-07
AIENIDTLTNLESLFLGKNKITKLQNLDALTNLTVLSMQ

SEQ ID NO: 38554 - protein, 35 aa, Homo sapiens
  MAP TO AC005138.1; EXPRESSED IN LUNG, SIGNAL = 1.7; EXPRESSED IN FETAL LIVER, SIGNAL = 1.8; EXPRESSED IN PLACENTA, SIGNAL = 1.7; EXPRESSED IN BRAIN, SIGNAL = 1.6; EXPRESSED IN BONE MARROW, SIGNAL = 1.6; EXPRESSED IN ADULT LIVER, SIGNAL = 1.6; EXPRESSED IN HEART, SIGNAL = 1.5
IVGKKTLFDSGGVQLNDDSHRDDIDDDDDIYLLGV

SEQ ID NO: 38555 - protein, 52 aa, Homo sapiens
  MAP TO AC005951.1; EXPRESSED IN BONE MARROW, SIGNAL = 3.4; EXPRESSED IN PLACENTA, SIGNAL = 3.9; EXPRESSED IN ADULT LIVER, SIGNAL = 3.7; EXPRESSED IN BRAIN, SIGNAL = 3.6; EXPRESSED IN FETAL LIVER, SIGNAL = 3.3; EXPRESSED IN HEART, SIGNAL = 3.6; EXPRESSED IN HELA, SIGNAL = 3.7; EXPRESSED IN LUNG, SIGNAL =   4; EST_HUMAN HIT: AI027004.1, EVALUE 1.70e+00
YPWPPLLPSPPPSGQAGELGSCPVQLLQRARRSASWEQASWPRLPPRSLPGQ

SEQ ID NO: 38556 - protein, 60 aa, Homo sapiens
  MAP TO AC004227.1; EXPRESSED IN PLACENTA, SIGNAL = 4.8; EXPRESSED IN HEART, SIGNAL = 4.7; EXPRESSED IN BONE MARROW, SIGNAL = 4.3; EXPRESSED IN ADULT LIVER, SIGNAL = 5.7; EXPRESSED IN LUNG, SIGNAL = 5.2; EXPRESSED IN HELA, SIGNAL = 5.5; EXPRESSED IN FETAL LIVER, SIGNAL = 4.6; EXPRESSED IN BRAIN, SIGNAL =   4; SWISSPROT HIT: Q13796, EVALUE 1.20e+00
KMNGHLRLLNIACAAKAKWRQVVLQKASRESPLQFSLNGGSEKGFGIFVEGVEPGSKAAD

SEQ ID NO: 38557 - protein, 85 aa, Homo sapiens
  MAP TO AC004491.1; EXPRESSED IN BRAIN, SIGNAL = 5.4; EXPRESSED IN BONE MARROW, SIGNAL = 5.4; EXPRESSED IN ADULT LIVER, SIGNAL = 5.9; EXPRESSED IN LUNG, SIGNAL =   6; EXPRESSED IN HELA, SIGNAL = 5.4; EXPRESSED IN HEART, SIGNAL = 4.9; EXPRESSED IN FETAL LIVER, SIGNAL = 5.5; EXPRESSED IN PLACENTA, SIGNAL = 5.3; SWISSPROT HIT: P16557, EVALUE 1.30e+00
PLDHHPEVYSTVDPAVSQRVYRALNTHPLLPDFLVVGGKMLPLISNKSPVREARSNGQFSGHGPGCGLDATHNKQGPLSPTQVTS

SEQ ID NO: 38558 - protein, 34 aa, Homo sapiens
  MAP TO AC004937.1; EXPRESSED IN LUNG, SIGNAL = 7.9; EXPRESSED IN HELA, SIGNAL =   7; EXPRESSED IN BONE MARROW, SIGNAL = 9.5; EXPRESSED IN ADULT LIVER, SIGNAL = 8.9; EXPRESSED IN PLACENTA, SIGNAL = 9.3; EXPRESSED IN HEART, SIGNAL = 8.2; EXPRESSED IN FETAL LIVER, SIGNAL =  12; EXPRESSED IN BRAIN, SIGNAL =  12; EST_HUMAN HIT: BF675888.1, EVALUE 8.00e-04
MNMPSSVEWLRNANLCEHQHDVQKKCLLEHFEFQ

SEQ ID NO: 38559 - protein, 41 aa, Homo sapiens
  MAP TO AC005478.1; EXPRESSED IN BRAIN, SIGNAL =   6; EXPRESSED IN ADULT LIVER, SIGNAL = 5.4; EXPRESSED IN PLACENTA, SIGNAL =   6; EXPRESSED IN LUNG, SIGNAL = 5.7; EXPRESSED IN HELA, SIGNAL = 5.7; EXPRESSED IN HEART, SIGNAL = 5.4; EXPRESSED IN BONE MARROW, SIGNAL = 5.8; EXPRESSED IN FETAL LIVER, SIGNAL = 5.5
MARTQKNKATAHHLGLLKARLAKLRRELITPKGGGGGGPGE

SEQ ID NO: 38560 - protein, 89 aa, Homo sapiens
  MAP TO AC004217.1; EXPRESSED IN PLACENTA, SIGNAL = 6.4; EXPRESSED IN LUNG, SIGNAL = 7.3; EXPRESSED IN HEART, SIGNAL = 5.8; EXPRESSED IN FETAL LIVER, SIGNAL = 5.9; EXPRESSED IN BONE MARROW, SIGNAL = 6.4; EXPRESSED IN ADULT LIVER, SIGNAL = 5.8; EXPRESSED IN HELA, SIGNAL = 6.4; EXPRESSED IN BRAIN, SIGNAL = 6.6; SWISSPROT HIT: P47819, EVALUE 7.40e-01
VCGNQSNAYARLLEYRLNALRGLWNAQRQLALEEQHERESSGDEETLALLKRQGLLQQPEQAPFTSRMGLLLVFPLIQSQSRTDPSLCN

SEQ ID NO: 38561 - protein, 61 aa, Homo sapiens
  MAP TO AC005544.1; EXPRESSED IN ADULT LIVER, SIGNAL = 1.5; EXPRESSED IN PLACENTA, SIGNAL = 1.7; EXPRESSED IN LUNG, SIGNAL = 1.9; EXPRESSED IN HEART, SIGNAL = 1.8; EXPRESSED IN BRAIN, SIGNAL = 1.8; EXPRESSED IN HELA, SIGNAL = 1.7; EXPRESSED IN FETAL LIVER, SIGNAL = 1.7; EXPRESSED IN BONE MARROW, SIGNAL = 1.7; SWISSPROT HIT: P42694, EVALUE 1.00e-22
PPKTVKPPEDQLKSENLEVSSSFNYSVLQHLGQFPPLMPNKQIAESANSSSPQSSAGGKPA

SEQ ID NO: 38562 - protein, 92 aa, Homo sapiens
  MAP TO AC004774.1; EXPRESSED IN LUNG, SIGNAL = 1.8; EXPRESSED IN HELA, SIGNAL = 1.7; EXPRESSED IN FETAL LIVER, SIGNAL = 1.6; EXPRESSED IN BRAIN, SIGNAL = 1.9; EXPRESSED IN BONE MARROW, SIGNAL = 1.7; EXPRESSED IN ADULT LIVER, SIGNAL = 1.4; EXPRESSED IN PLACENTA, SIGNAL = 1.6; EXPRESSED IN HEART, SIGNAL = 1.7; SWISSPROT HIT: P70396, EVALUE 5.00e-39
MHHPSQESPTLPESSATDSDYYSPTGGAPHGYCSPTSASYGKALNPYQYQYHGVNGSAGSYPAKAYADYSYASSYHQYGGAYNRVPSATNQP

SEQ ID NO: 38563 - protein, 53 aa, Homo sapiens
  MAP TO AC004774.1; EXPRESSED IN LUNG, SIGNAL = 1.8; EXPRESSED IN HELA, SIGNAL = 1.7; EXPRESSED IN FETAL LIVER, SIGNAL = 1.6; EXPRESSED IN BRAIN, SIGNAL = 1.9; EXPRESSED IN BONE MARROW, SIGNAL = 1.7; EXPRESSED IN ADULT LIVER, SIGNAL = 1.4; EXPRESSED IN PLACENTA, SIGNAL = 1.6; EXPRESSED IN HEART, SIGNAL = 1.7; EST_HUMAN HIT: AI683183.1, EVALUE 4.00e-23
CTIRLRNRQLCPSLQLPILTTTALRGEPRTATALLPRLPMAKLSTPTSISITA

SEQ ID NO: 38564 - protein, 55 aa, Homo sapiens
  MAP TO AC002042.1; EXPRESSED IN HELA, SIGNAL = 3.4; EXPRESSED IN HEART, SIGNAL = 3.1; EXPRESSED IN BRAIN, SIGNAL = 4.1; EXPRESSED IN PLACENTA, SIGNAL = 3.7; EXPRESSED IN LUNG, SIGNAL = 3.8; EXPRESSED IN FETAL LIVER, SIGNAL = 2.7; EXPRESSED IN BONE MARROW, SIGNAL = 3.9; EXPRESSED IN ADULT LIVER, SIGNAL = 3.2; EST_HUMAN HIT: T18862.1, EVALUE 1.00e-12
QRRWPRRQQCGQSGGAGHRRELLHVCLLSARACGPLACLTVVDGGGDRDCSTTRV

SEQ ID NO: 38565 - protein, 127 aa, Homo sapiens
  MAP TO AC005962.1; EXPRESSED IN PLACENTA, SIGNAL = 5.2; EXPRESSED IN HEART, SIGNAL = 5.5; EXPRESSED IN LUNG, SIGNAL = 6.5; EXPRESSED IN HELA, SIGNAL = 5.3; EXPRESSED IN FETAL LIVER, SIGNAL = 7.4; EXPRESSED IN BRAIN, SIGNAL = 6.2; EXPRESSED IN BONE MARROW, SIGNAL =  19; EXPRESSED IN ADULT LIVER, SIGNAL = 5.2; SWISSPROT HIT: P21139, EVALUE 6.30e+00
ASRTSVTASLSSARHPHAPKTRTESATRSTRSPPLWTPAWCMAVRSPSRCGSATGPTTWGCWPSTSAFKTTAGPCCPSTTCTMTPVSSPTARRASPASWQVRQGGRWCLPRKQPSLGSQLGSNGGMW

SEQ ID NO: 38566 - protein, 92 aa, Homo sapiens
  MAP TO AB019441.1; EXPRESSED IN LUNG, SIGNAL = 0.96; EXPRESSED IN PLACENTA, SIGNAL = 1.3; EXPRESSED IN HEART, SIGNAL = 1.8; EXPRESSED IN BONE MARROW, SIGNAL = 0.56; EXPRESSED IN ADULT LIVER, SIGNAL = 0.48; EXPRESSED IN HELA, SIGNAL = 3.5; SWISSPROT HIT: P01743, EVALUE 4.00e-38
EVKKPGASVKVSCKASGYTFTSYAMHWVRQAPGQRLEWMGWSNAGNGNTKYSQEFQGRVTITRDTSASTAYMELSSLRSEDMAVYYCARDTV

SEQ ID NO: 38567 - protein, 36 aa, Homo sapiens
  MAP TO AC004702.1; EXPRESSED IN ADULT LIVER, SIGNAL =  21; EXPRESSED IN PLACENTA, SIGNAL =  27; EXPRESSED IN HELA, SIGNAL =  22; EXPRESSED IN HEART, SIGNAL =  20; EXPRESSED IN FETAL LIVER, SIGNAL =  21; EXPRESSED IN BRAIN, SIGNAL =  24; EXPRESSED IN LUNG, SIGNAL =  29; EXPRESSED IN BONE MARROW, SIGNAL =  23
YTGVKIMNQDKELIMKSKTAAALLPYPFPFLVPLLK

SEQ ID NO: 38568 - protein, 68 aa, Homo sapiens
  MAP TO AC004615.1; EXPRESSED IN PLACENTA, SIGNAL = 1.7; EXPRESSED IN LUNG, SIGNAL = 1.6; EXPRESSED IN FETAL LIVER, SIGNAL = 1.4; EXPRESSED IN BRAIN, SIGNAL = 1.3; EXPRESSED IN BONE MARROW, SIGNAL = 1.5; EXPRESSED IN ADULT LIVER, SIGNAL = 1.4; EXPRESSED IN HEART, SIGNAL = 1.4; SWISSPROT HIT: Q13591, EVALUE 8.00e-34
YGTIKKVRVPLNQTSSSCLLEEIELFPERRREPIRSLQILHSQSVLFVGLREHVVKIPLKRCQFYRTR

SEQ ID NO: 38569 - protein, 18 aa, Homo sapiens
  MAP TO AC004615.1; EXPRESSED IN PLACENTA, SIGNAL = 1.7; EXPRESSED IN LUNG, SIGNAL = 1.6; EXPRESSED IN FETAL LIVER, SIGNAL = 1.4; EXPRESSED IN BRAIN, SIGNAL = 1.3; EXPRESSED IN BONE MARROW, SIGNAL = 1.5; EXPRESSED IN ADULT LIVER, SIGNAL = 1.4; EXPRESSED IN HEART, SIGNAL = 1.4
ESAGTPESDLKQLFAGRD

SEQ ID NO: 38570 - protein, 18 aa, Homo sapiens
  MAP TO AC004957.1; EXPRESSED IN ADULT LIVER, SIGNAL = 3.2; EXPRESSED IN PLACENTA, SIGNAL = 3.6; EXPRESSED IN LUNG, SIGNAL = 3.6; EXPRESSED IN HELA, SIGNAL = 3.1; EXPRESSED IN HEART, SIGNAL = 3.1; EXPRESSED IN BRAIN, SIGNAL = 3.1; EXPRESSED IN FETAL LIVER, SIGNAL = 2.7; EXPRESSED IN BONE MARROW, SIGNAL =   3
GNHRKNKVNRYFQGSKSS

SEQ ID NO: 38571 - protein, 39 aa, Homo sapiens
  MAP TO AC006324.2; EXPRESSED IN PLACENTA, SIGNAL =  25; EXPRESSED IN HELA, SIGNAL =  24; EXPRESSED IN HEART, SIGNAL =  21; EXPRESSED IN BONE MARROW, SIGNAL =  22; EXPRESSED IN ADULT LIVER, SIGNAL =  20; EXPRESSED IN BRAIN, SIGNAL =  25; EXPRESSED IN FETAL LIVER, SIGNAL =  22; EXPRESSED IN LUNG, SIGNAL =  25; EST_HUMAN HIT: AA194649.1, EVALUE 1.40e+00
MEVVDRVIETRAVAMVGVAAITAVSVEEVEVTLVVVVKA

SEQ ID NO: 38572 - protein, 82 aa, Homo sapiens
  MAP TO AC004595.1; EXPRESSED IN BRAIN, SIGNAL = 4.7; EXPRESSED IN ADULT LIVER, SIGNAL = 4.5; EXPRESSED IN PLACENTA, SIGNAL = 4.5; EXPRESSED IN BONE MARROW, SIGNAL = 4.2; EXPRESSED IN LUNG, SIGNAL = 4.9; EXPRESSED IN HELA, SIGNAL = 4.3; EXPRESSED IN HEART, SIGNAL = 5.4; EXPRESSED IN FETAL LIVER, SIGNAL = 4.4; SWISSPROT HIT: Q09829, EVALUE 8.40e+00
ARNVLKGLCGVIISPNMSKRTRIKKVVGQLLPLLPRENWTHLLQRCLAPQELSQLQPFLKIRIQQLPMFQPTWKNSEKLFIT

SEQ ID NO: 38573 - protein, 46 aa, Homo sapiens
  MAP TO AC005971.5; EXPRESSED IN BRAIN, SIGNAL = 1.9; EXPRESSED IN BONE MARROW, SIGNAL = 1.8; EXPRESSED IN PLACENTA, SIGNAL = 1.9; EXPRESSED IN LUNG, SIGNAL = 2.2; EXPRESSED IN ADULT LIVER, SIGNAL = 2.1; EXPRESSED IN FETAL LIVER, SIGNAL =   2; EXPRESSED IN HEART, SIGNAL = 2.2; EXPRESSED IN HELA, SIGNAL = 2.1; SWISSPROT HIT: P23797, EVALUE 4.80e-02
RMKSREQGGRLGAESRTLLVIAHPDDEAMFFAPTVLGLARLRHWVY

SEQ ID NO: 38574 - protein, 61 aa, Homo sapiens
  MAP TO AC002091.1; EXPRESSED IN PLACENTA, SIGNAL = 1.9; EXPRESSED IN LUNG, SIGNAL =   2; EXPRESSED IN HEART, SIGNAL = 1.8; EXPRESSED IN BRAIN, SIGNAL =   2; EXPRESSED IN BONE MARROW, SIGNAL = 1.9; EXPRESSED IN ADULT LIVER, SIGNAL = 1.9; EXPRESSED IN FETAL LIVER, SIGNAL = 1.9; EST_HUMAN HIT: Z42044.1, EVALUE 7.80e+00
LQGGDGPEAVAADGWHSGSWTYHAAERRGRELNNGPLDLGLPLDLGDKEREKKKWRDGRGH

SEQ ID NO: 38575 - protein, 46 aa, Homo sapiens
  MAP TO AC002091.1; EXPRESSED IN PLACENTA, SIGNAL = 1.9; EXPRESSED IN LUNG, SIGNAL =   2; EXPRESSED IN HEART, SIGNAL = 1.8; EXPRESSED IN BRAIN, SIGNAL =   2; EXPRESSED IN BONE MARROW, SIGNAL = 1.9; EXPRESSED IN ADULT LIVER, SIGNAL = 1.9; EXPRESSED IN FETAL LIVER, SIGNAL = 1.9; SWISSPROT HIT: P46707, EVALUE 7.20e-01
CTPSSREGTGLRPLLRMGGTVDPGPTMQLRGGEESSIMALWIWDCL

SEQ ID NO: 38576 - protein, 48 aa, Homo sapiens
  MAP TO AC004228.2; EXPRESSED IN PLACENTA, SIGNAL = 2.7; EXPRESSED IN HEART, SIGNAL = 2.4; EXPRESSED IN FETAL LIVER, SIGNAL = 2.3; EXPRESSED IN BRAIN, SIGNAL = 2.3; EXPRESSED IN BONE MARROW, SIGNAL = 2.4; EXPRESSED IN ADULT LIVER, SIGNAL = 2.3; EXPRESSED IN HELA, SIGNAL = 2.5; EXPRESSED IN LUNG, SIGNAL = 2.9; SWISSPROT HIT: Q17533, EVALUE 8.10e+00
VPDTVFHHGRVGINTDRPDEALVVHGNVKVMGSLMHPSDLRAKEHVQE

SEQ ID NO: 38577 - protein, 57 aa, Homo sapiens
  MAP TO AC005154.1; EXPRESSED IN PLACENTA, SIGNAL = 5.1; EXPRESSED IN LUNG, SIGNAL = 4.3; EXPRESSED IN FETAL LIVER, SIGNAL = 6.1; EXPRESSED IN BONE MARROW, SIGNAL =   5; EXPRESSED IN HELA, SIGNAL = 4.3; EXPRESSED IN BRAIN, SIGNAL = 5.4; EXPRESSED IN ADULT LIVER, SIGNAL = 5.3; EXPRESSED IN HEART, SIGNAL = 4.6; SWISSPROT HIT: P40908, EVALUE 4.60e+00
WMPSRRVRPWNGRLEGPMDPKHGLGSPVRAMSQLNLNEKMERGPTGVLMLNRPMLSG

SEQ ID NO: 38578 - protein, 44 aa, Homo sapiens
  MAP TO AC005690.7; EXPRESSED IN PLACENTA, SIGNAL = 1.3; EXPRESSED IN HEART, SIGNAL =   2; EXPRESSED IN ADULT LIVER, SIGNAL = 1.4; EXPRESSED IN LUNG, SIGNAL = 0.69; EXPRESSED IN FETAL LIVER, SIGNAL = 4.1; EXPRESSED IN BRAIN, SIGNAL = 1.2; EXPRESSED IN BONE MARROW, SIGNAL = 1.6; EST_HUMAN HIT: BF103492.1, EVALUE 9.10e+00
IQQEMNTDLVFLKAEGEDRHKNTNSQTLLMVVVISGEMVAVVVG

SEQ ID NO: 38579 - protein, 17 aa, Homo sapiens
  MAP TO AC005690.7; EXPRESSED IN PLACENTA, SIGNAL = 1.3; EXPRESSED IN HEART, SIGNAL =   2; EXPRESSED IN ADULT LIVER, SIGNAL = 1.4; EXPRESSED IN LUNG, SIGNAL = 0.69; EXPRESSED IN FETAL LIVER, SIGNAL = 4.1; EXPRESSED IN BRAIN, SIGNAL = 1.2; EXPRESSED IN BONE MARROW, SIGNAL = 1.6
YQQVVIGLLLCIKLCSK

SEQ ID NO: 38580 - protein, 61 aa, Homo sapiens
  MAP TO AC005826.1; EXPRESSED IN LUNG, SIGNAL = 0.89; EXPRESSED IN FETAL LIVER, SIGNAL = 0.8; EXPRESSED IN BRAIN, SIGNAL =   1; EXPRESSED IN BONE MARROW, SIGNAL = 0.64; EXPRESSED IN ADULT LIVER, SIGNAL = 0.55; EXPRESSED IN PLACENTA, SIGNAL = 0.61; EXPRESSED IN HEART, SIGNAL = 1.9; SWISSPROT HIT: P23813, EVALUE 7.90e-02
AAVRGLPRPGAGGGKVGPRRRETARGRQEVLPGEDPKSEKAKRLGAKGGGQDPSRPLPVRP

SEQ ID NO: 38581 - protein, 46 aa, Homo sapiens
  MAP TO AC005544.1; EXPRESSED IN PLACENTA, SIGNAL = 1.9; EXPRESSED IN LUNG, SIGNAL = 2.2; EXPRESSED IN FETAL LIVER, SIGNAL = 1.9; EXPRESSED IN HELA, SIGNAL = 1.9; EXPRESSED IN BRAIN, SIGNAL = 1.9; EXPRESSED IN BONE MARROW, SIGNAL = 1.9; EXPRESSED IN ADULT LIVER, SIGNAL = 2.1; EXPRESSED IN HEART, SIGNAL =   2; SWISSPROT HIT: Q9UBN1, EVALUE 4.00e-06
IVRASSVFPILSTILLLLGGLCIGAGRIYSRKNNIVLSAGILFVAA

SEQ ID NO: 38582 - protein, 42 aa, Homo sapiens
  MAP TO AC005544.1; EXPRESSED IN PLACENTA, SIGNAL = 1.9; EXPRESSED IN LUNG, SIGNAL = 2.2; EXPRESSED IN FETAL LIVER, SIGNAL = 1.9; EXPRESSED IN HELA, SIGNAL = 1.9; EXPRESSED IN BRAIN, SIGNAL = 1.9; EXPRESSED IN BONE MARROW, SIGNAL = 1.9; EXPRESSED IN ADULT LIVER, SIGNAL = 2.1; EXPRESSED IN HEART, SIGNAL =   2
WGPHETGTPVSPAPGPAPARAGGSPAATKRMPALRTMLFLRL

SEQ ID NO: 38583 - protein, 104 aa, Homo sapiens
  MAP TO AC005316.1; EXPRESSED IN PLACENTA, SIGNAL = 0.97; EXPRESSED IN HEART, SIGNAL = 7.2; EXPRESSED IN ADULT LIVER, SIGNAL =   1; EXPRESSED IN LUNG, SIGNAL =   1; EXPRESSED IN FETAL LIVER, SIGNAL = 1.1; EXPRESSED IN BRAIN, SIGNAL = 0.78; EXPRESSED IN BONE MARROW, SIGNAL = 1.1; SWISSPROT HIT: P54098, EVALUE 7.00e-35
FMTSRVNWVVQSSAVDYLHLMLVAMKWLFEEFAIDGRFCISIHDEVRYLVREEDRYRAALALQITNLLTRYAGPMASSLAMCSYVGLWVSVPWARLVSFDFSSP

SEQ ID NO: 38584 - protein, 44 aa, Homo sapiens
  MAP TO AC002036.1; EXPRESSED IN PLACENTA, SIGNAL = 2.5; EXPRESSED IN LUNG, SIGNAL = 2.6; EXPRESSED IN FETAL LIVER, SIGNAL = 3.3; EXPRESSED IN BRAIN, SIGNAL = 2.7; EXPRESSED IN ADULT LIVER, SIGNAL = 2.3; EXPRESSED IN HELA, SIGNAL = 2.3; EXPRESSED IN HEART, SIGNAL = 3.1; EXPRESSED IN BONE MARROW, SIGNAL = 3.3; EST_HUMAN HIT: BF334740.1, EVALUE 3.00e-12
ASNGDITQAVSLLTDERVKEPSQDTVATEPSEVEGSAANKEVLA

SEQ ID NO: 38585 - protein, 26 aa, Homo sapiens
  MAP TO AC002036.1; EXPRESSED IN PLACENTA, SIGNAL = 2.5; EXPRESSED IN LUNG, SIGNAL = 2.6; EXPRESSED IN FETAL LIVER, SIGNAL = 3.3; EXPRESSED IN BRAIN, SIGNAL = 2.7; EXPRESSED IN ADULT LIVER, SIGNAL = 2.3; EXPRESSED IN HELA, SIGNAL = 2.3; EXPRESSED IN HEART, SIGNAL = 3.1; EXPRESSED IN BONE MARROW, SIGNAL = 3.3; EST_HUMAN HIT: BF334740.1, EVALUE 1.00e-06
LRQSAFSLMRELRSPVKTLLLQNHLK

SEQ ID NO: 38586 - protein, 41 aa, Homo sapiens
  MAP TO AL023553.5; EXPRESSED IN HELA, SIGNAL = 5.2; EXPRESSED IN LUNG, SIGNAL = 7.1; EXPRESSED IN BONE MARROW, SIGNAL =   6; EXPRESSED IN HEART, SIGNAL =  11; EXPRESSED IN FETAL LIVER, SIGNAL = 6.9; EXPRESSED IN ADULT LIVER, SIGNAL = 5.2; EXPRESSED IN PLACENTA, SIGNAL = 3.6; EXPRESSED IN BRAIN, SIGNAL =   6; SWISSPROT HIT: Q99798, EVALUE 6.00e-18
IVTALAIAGTLKFNPETDYLTGTDGKKFRLEAPDADELPKG

SEQ ID NO: 38587 - protein, 29 aa, Homo sapiens
  MAP TO AL031587.3; EXPRESSED IN ADULT LIVER, SIGNAL = 1.7; EXPRESSED IN PLACENTA, SIGNAL = 1.8; EXPRESSED IN BRAIN, SIGNAL = 2.5; EXPRESSED IN HELA, SIGNAL = 2.3; EXPRESSED IN BONE MARROW, SIGNAL = 2.7; EXPRESSED IN LUNG, SIGNAL = 2.5; EXPRESSED IN HEART, SIGNAL = 1.8; EXPRESSED IN FETAL LIVER, SIGNAL = 2.4; EST_HUMAN HIT: BE389960.1, EVALUE 7.00e-09
LKKVKHRLVENMSSGTADALGLSRAILCN

SEQ ID NO: 38588 - protein, 40 aa, Homo sapiens
  MAP TO AL031588.1; EXPRESSED IN ADULT LIVER, SIGNAL = 2.9; EXPRESSED IN PLACENTA, SIGNAL = 3.4; EXPRESSED IN HEART, SIGNAL = 3.7; EXPRESSED IN FETAL LIVER, SIGNAL = 2.4; EXPRESSED IN BRAIN, SIGNAL = 3.8; EXPRESSED IN HELA, SIGNAL = 3.1; EXPRESSED IN BONE MARROW, SIGNAL =   4; EXPRESSED IN LUNG, SIGNAL = 3.9
LGLPPNLPLPPKPAPPRQTCPSSNLLSLPPNLSPPQTKSS

SEQ ID NO: 38589 - protein, 59 aa, Homo sapiens
  MAP TO AL031588.1; EXPRESSED IN PLACENTA, SIGNAL = 3.6; EXPRESSED IN HEART, SIGNAL =   3; EXPRESSED IN FETAL LIVER, SIGNAL = 4.6; EXPRESSED IN ADULT LIVER, SIGNAL = 3.1; EXPRESSED IN BRAIN, SIGNAL = 3.8; EXPRESSED IN HELA, SIGNAL = 4.3; EXPRESSED IN BONE MARROW, SIGNAL = 3.9; EXPRESSED IN LUNG, SIGNAL = 3.5; SWISSPROT HIT: P28665, EVALUE 4.60e+00
MIEYFYLNPKAMISRKILEASEREKAVQVARSRPVHQPGQDVHVRTTKCSAEHPQQTVT

SEQ ID NO: 38590 - protein, 48 aa, Homo sapiens
  MAP TO AL031588.1; EXPRESSED IN ADULT LIVER, SIGNAL = 2.3; EXPRESSED IN HELA, SIGNAL = 1.8; EXPRESSED IN BRAIN, SIGNAL = 1.9; EXPRESSED IN PLACENTA, SIGNAL = 2.1; EXPRESSED IN BONE MARROW, SIGNAL = 2.4; EXPRESSED IN HEART, SIGNAL = 2.1; EXPRESSED IN LUNG, SIGNAL = 1.9; EXPRESSED IN FETAL LIVER, SIGNAL = 1.7; SWISSPROT HIT: O27140, EVALUE 8.10e+00
GKVIRGRPTVGGSSPNGQFSEYLHCPNLSVGGTGSDKYTKGHPAAGSH

SEQ ID NO: 38591 - protein, 80 aa, Homo sapiens
  MAP TO AL035681.13; EXPRESSED IN PLACENTA, SIGNAL = 3.7; EXPRESSED IN HEART, SIGNAL = 1.6; EXPRESSED IN FETAL LIVER, SIGNAL =   3; EXPRESSED IN ADULT LIVER, SIGNAL = 2.3; EXPRESSED IN BRAIN, SIGNAL = 1.9; EXPRESSED IN HELA, SIGNAL =  13; EXPRESSED IN BONE MARROW, SIGNAL = 2.3; EXPRESSED IN LUNG, SIGNAL = 1.8; SWISSPROT HIT: P17674, EVALUE 2.90e+00
LGLIESVWIFLGVIRRLPFPILLLETFLGPHTETSQREEEGGQGNILADPVLIQLIGHWVFGTGREFLDNRNSVAFKDLG

SEQ ID NO: 38592 - protein, 153 aa, Homo sapiens
  MAP TO AL035682.16; EXPRESSED IN BRAIN, SIGNAL = 2.6; EXPRESSED IN PLACENTA, SIGNAL = 1.6; EXPRESSED IN HELA, SIGNAL =   3; EXPRESSED IN HEART, SIGNAL = 3.2; EXPRESSED IN LUNG, SIGNAL = 3.7; EXPRESSED IN BONE MARROW, SIGNAL = 3.5; EXPRESSED IN FETAL LIVER, SIGNAL =  24; EXPRESSED IN ADULT LIVER, SIGNAL = 2.6; SWISSPROT HIT: O43896, EVALUE 8.00e-02
TVEASLWPSRPCTTWLLPSFLPLQALFLPLSLMSAHYMPGITLSTSYTWACLICTAPIGGRSPHPILQGRTPGTERQEHRPRSHSQTLWGSRIGTQAAWPQSQHSLCSFRSLCLAAPPSSSSPLSSSHSNQPFLGTPQSEAVSRHIPQPPQSL

SEQ ID NO: 38593 - protein, 24 aa, Homo sapiens
  MAP TO AP000041.1; EXPRESSED IN HEART, SIGNAL = 2.1; EXPRESSED IN ADULT LIVER, SIGNAL = 2.3; EXPRESSED IN BRAIN, SIGNAL =   3; EXPRESSED IN HELA, SIGNAL = 1.7; EXPRESSED IN PLACENTA, SIGNAL = 5.5; EXPRESSED IN BONE MARROW, SIGNAL = 4.7; EXPRESSED IN LUNG, SIGNAL = 3.1; EXPRESSED IN FETAL LIVER, SIGNAL = 2.5
KVMVGKSHSIDTFAPWVCSALTRK

SEQ ID NO: 38594 - protein, 105 aa, Homo sapiens
  MAP TO AP000352.2; EXPRESSED IN PLACENTA, SIGNAL = 1.5; EXPRESSED IN LUNG, SIGNAL = 1.2; EXPRESSED IN HEART, SIGNAL = 1.6; EXPRESSED IN BONE MARROW, SIGNAL = 2.1; EXPRESSED IN FETAL LIVER, SIGNAL = 1.5; EXPRESSED IN BRAIN, SIGNAL = 2.6; EXPRESSED IN HELA, SIGNAL = 1.2; SWISSPROT HIT: Q24432, EVALUE 4.60e+00
MPLWVLDHPVIPGSECESSSTKEALCGLGKGRHHAATNLEAGFGFHFSHPPPTLQHTLQLEFQEKSEPTITPPTLHHHHLGLGLQRCMPDDCSGFLTPARGILYD

SEQ ID NO: 38595 - protein, 26 aa, Homo sapiens
  MAP TO AP000359.1; EXPRESSED IN FETAL LIVER, SIGNAL =  32; EXPRESSED IN BRAIN, SIGNAL =  17; EXPRESSED IN PLACENTA, SIGNAL =  18; EXPRESSED IN HELA, SIGNAL =  21; EXPRESSED IN LUNG, SIGNAL =  21; EXPRESSED IN HEART, SIGNAL =  15; EXPRESSED IN BONE MARROW, SIGNAL =  18; EXPRESSED IN ADULT LIVER, SIGNAL =  36
NLDLRLGCIQRPCRREGLVEFFKTWW

SEQ ID NO: 38596 - protein, 42 aa, Homo sapiens
  MAP TO Z82188.2; EXPRESSED IN FETAL LIVER, SIGNAL = 4.3; EXPRESSED IN ADULT LIVER, SIGNAL = 2.8; EXPRESSED IN PLACENTA, SIGNAL = 2.5; EXPRESSED IN BONE MARROW, SIGNAL = 5.3; EXPRESSED IN LUNG, SIGNAL = 4.3; EXPRESSED IN BRAIN, SIGNAL = 3.1; EXPRESSED IN HELA, SIGNAL = 2.9; EXPRESSED IN HEART, SIGNAL = 4.3; EST_HUMAN HIT: AU148264.1, EVALUE 1.40e+00
MTTQKSQPNSGLEPWPATEDSLNLSFLVCQMGNSHLQMTGLQ

SEQ ID NO: 38597 - protein, 42 aa, Homo sapiens
  MAP TO Z83840.7; EXPRESSED IN FETAL LIVER, SIGNAL = 2.5; EXPRESSED IN PLACENTA, SIGNAL = 2.5; EXPRESSED IN BRAIN, SIGNAL = 1.4; EXPRESSED IN HELA, SIGNAL =   3; EXPRESSED IN HEART, SIGNAL = 2.6; EXPRESSED IN LUNG, SIGNAL = 2.2; EXPRESSED IN ADULT LIVER, SIGNAL = 1.6; SWISSPROT HIT: P12956, EVALUE 2.00e-18
FQLVFLPFADDKRKMPFTEKIMATPEQVGKMKAIVEKLRFTY

SEQ ID NO: 38598 - protein, 35 aa, Homo sapiens
  MAP TO Z83844.5; EXPRESSED IN PLACENTA, SIGNAL = 1.3; EXPRESSED IN LUNG, SIGNAL = 1.4; EXPRESSED IN HEART, SIGNAL = 1.6; EXPRESSED IN ADULT LIVER, SIGNAL =   2; EXPRESSED IN HELA, SIGNAL = 1.5; EXPRESSED IN BRAIN, SIGNAL = 1.9; SWISSPROT HIT: P53692, EVALUE 6.40e+00
VEQRLEPAKRAAHNIHKRLQACLQGQSGADMDKRV

SEQ ID NO: 38599 - protein, 25 aa, Homo sapiens
  MAP TO Z83844.5; EXPRESSED IN HEART, SIGNAL = 1.7; EXPRESSED IN LUNG, SIGNAL = 1.5; EXPRESSED IN BONE MARROW, SIGNAL = 1.9; SWISSPROT HIT: P55194, EVALUE 2.00e-01
KKLPLMALSTTMAESFKELDPDSSM

SEQ ID NO: 38600 - protein, 38 aa, Homo sapiens
  MAP TO Z83844.5; EXPRESSED IN BONE MARROW, SIGNAL = 1.5; EXPRESSED IN BRAIN, SIGNAL = 1.4; EXPRESSED IN HELA, SIGNAL = 1.3; EXPRESSED IN HEART, SIGNAL = 1.3
KSEAAGAFQAQDEGRSQQPSQGQSQLLRRQSSPAPSRQ

SEQ ID NO: 38601 - protein, 25 aa, Homo sapiens
  MAP TO Z97055.1; EXPRESSED IN PLACENTA, SIGNAL = 9.4; EXPRESSED IN HELA, SIGNAL = 8.6; EXPRESSED IN BRAIN, SIGNAL =  14; EXPRESSED IN BONE MARROW, SIGNAL =  16; EXPRESSED IN HEART, SIGNAL = 8.4; EXPRESSED IN LUNG, SIGNAL =  11; EXPRESSED IN ADULT LIVER, SIGNAL = 9.5; EXPRESSED IN FETAL LIVER, SIGNAL =  10
QASIHLKGLKLSEYNLQPYRMKTEI

SEQ ID NO: 38602 - protein, 85 aa, Homo sapiens
  MAP TO AC004915.1; EXPRESSED IN LUNG, SIGNAL = 2.6; EXPRESSED IN BRAIN, SIGNAL = 2.1; EXPRESSED IN BONE MARROW, SIGNAL = 2.5; EXPRESSED IN PLACENTA, SIGNAL =   2; EXPRESSED IN HELA, SIGNAL = 2.1; EXPRESSED IN HEART, SIGNAL = 1.7; EXPRESSED IN FETAL LIVER, SIGNAL =   2; EXPRESSED IN ADULT LIVER, SIGNAL = 2.1; SWISSPROT HIT: P03340, EVALUE 3.50e-01
GQAQGDIRWKLQKLEDFAGMIATQLLEVASKVYVNHNQEAKREAERRLRKKADLLVAALTERETSITRDADADADAERARLDRDL

SEQ ID NO: 38603 - protein, 81 aa, Homo sapiens
  MAP TO AC005369.1; EXPRESSED IN LUNG, SIGNAL = 1.3; EXPRESSED IN BRAIN, SIGNAL = 1.1; EXPRESSED IN PLACENTA, SIGNAL = 1.6; EXPRESSED IN HEART, SIGNAL = 1.3; EXPRESSED IN BONE MARROW, SIGNAL = 1.2; EXPRESSED IN ADULT LIVER, SIGNAL = 1.3; EXPRESSED IN FETAL LIVER, SIGNAL = 1.5; SWISSPROT HIT: P49590, EVALUE 5.00e-42
ISFDLSLARGLDYYTGVIYEAVLLQTPTQAGEEPLNVGSVAAGGRYDGLVGMFDPKGHKVPCVGLSIGVERIFYIVEQRMK

SEQ ID NO: 38604 - protein, 37 aa, Homo sapiens
  MAP TO AC002544.1; EXPRESSED IN PLACENTA, SIGNAL = 1.2; EXPRESSED IN LUNG, SIGNAL = 1.3; EXPRESSED IN HEART, SIGNAL = 1.3; EXPRESSED IN BRAIN, SIGNAL = 1.3; EXPRESSED IN BONE MARROW, SIGNAL = 1.2; EXPRESSED IN ADULT LIVER, SIGNAL = 1.2; EXPRESSED IN FETAL LIVER, SIGNAL = 1.3; SWISSPROT HIT: Q13286, EVALUE 6.00e-16
VWFGFLPSIYLVFLIILYEGLLGGAAYVNTFHNIALE

SEQ ID NO: 38605 - protein, 31 aa, Homo sapiens
  MAP TO AC002544.1; EXPRESSED IN PLACENTA, SIGNAL = 1.2; EXPRESSED IN LUNG, SIGNAL = 1.3; EXPRESSED IN HEART, SIGNAL = 1.3; EXPRESSED IN BRAIN, SIGNAL = 1.3; EXPRESSED IN BONE MARROW, SIGNAL = 1.2; EXPRESSED IN ADULT LIVER, SIGNAL = 1.2; EXPRESSED IN FETAL LIVER, SIGNAL = 1.3; EST_HUMAN HIT: BE382695.1, EVALUE 2.00e-09
LFTVPQPGVPAGRRVVRLSAKHLPRLPDHSV

SEQ ID NO: 38606 - protein, 49 aa, Homo sapiens
  MAP TO AC004958.1; EXPRESSED IN ADULT LIVER, SIGNAL =  14; EXPRESSED IN PLACENTA, SIGNAL =  17; EXPRESSED IN LUNG, SIGNAL =  19; EXPRESSED IN HEART, SIGNAL =  12; EXPRESSED IN BRAIN, SIGNAL =  17; EXPRESSED IN FETAL LIVER, SIGNAL =  14; EXPRESSED IN BONE MARROW, SIGNAL =  16; EXPRESSED IN HELA, SIGNAL =  15; SWISSPROT HIT: O67085, EVALUE 7.10e-01
NRPSLKSLKTDNRPEKSKCKPLWGKVFYLDLPSVTISEKLQKDIKDLGG

SEQ ID NO: 38607 - protein, 72 aa, Homo sapiens
  MAP TO AC006101.2; EXPRESSED IN LUNG, SIGNAL = 1.5; EXPRESSED IN FETAL LIVER, SIGNAL = 1.5; EXPRESSED IN BONE MARROW, SIGNAL = 1.6; EXPRESSED IN PLACENTA, SIGNAL = 1.6; EXPRESSED IN ADULT LIVER, SIGNAL = 1.2; EXPRESSED IN BRAIN, SIGNAL = 1.6; EXPRESSED IN HEART, SIGNAL = 2.2; EXPRESSED IN HELA, SIGNAL = 1.8; SWISSPROT HIT: P33176, EVALUE 1.00e-34
LVRDNADLRCELPKLEKRLRATAERVKALESALKEAKENASRDRKRYQQEVDRIKEAVRSKNMARRGHSAQI

SEQ ID NO: 38608 - protein, 160 aa, Homo sapiens
  MAP TO AC000134.14; EXPRESSED IN BRAIN, SIGNAL = 1.7; EXPRESSED IN PLACENTA, SIGNAL = 1.6; EXPRESSED IN LUNG, SIGNAL = 1.2; EXPRESSED IN HEART, SIGNAL = 1.8; EXPRESSED IN BONE MARROW, SIGNAL =   2; EXPRESSED IN ADULT LIVER, SIGNAL = 1.5; EXPRESSED IN HELA, SIGNAL = 2.1; EXPRESSED IN FETAL LIVER, SIGNAL = 2.5; SWISSPROT HIT: O00255, EVALUE 2.00e-43
VRQKVRIVSREAEAAEAEEPWGEEAREGRRRGPRRESKPEEPPPPKKPALDKGLGTGQGAVSGPPRKPPGTVAGTARGPEGGSTAQVPAPAASPPPEGPVLTFQSEKMKGMKELLVATKINSSAIKLQLTAQSQVQMKKQKVSTPSDYTLSFLKRQRKGL

SEQ ID NO: 38609 - protein, 58 aa, Homo sapiens [sequence omitted]

SEQ ID NO: 38610 - protein, 33 aa, Homo sapiens
  MAP TO AB019437.1; EXPRESSED IN PLACENTA, SIGNAL = 2.1; EXPRESSED IN LUNG, SIGNAL = 2.5; EXPRESSED IN HEART, SIGNAL = 1.8; EXPRESSED IN FETAL LIVER, SIGNAL = 2.1; EXPRESSED IN BRAIN, SIGNAL = 2.4; EXPRESSED IN BONE MARROW, SIGNAL = 2.1; EXPRESSED IN ADULT LIVER, SIGNAL = 3.2; EXPRESSED IN HELA, SIGNAL = 2.3; SWISSPROT HIT: P35190, EVALUE 3.30e-01
FQLTWEILSESPGPPVQEHETPVVLPPPGGSSQ

SEQ ID NO: 38611 - protein, 21 aa, Homo sapiens
  MAP TO AB019437.1; EXPRESSED IN PLACENTA, SIGNAL = 2.1; EXPRESSED IN LUNG, SIGNAL = 2.5; EXPRESSED IN HEART, SIGNAL = 1.8; EXPRESSED IN FETAL LIVER, SIGNAL = 2.1; EXPRESSED IN BRAIN, SIGNAL = 2.4; EXPRESSED IN BONE MARROW, SIGNAL = 2.1; EXPRESSED IN ADULT LIVER, SIGNAL = 3.2; EXPRESSED IN HELA, SIGNAL = 2.3; EST_HUMAN HIT: T27727.1, EVALUE 1.00e-05
DLLCKNMKHLWFFLLLVAAPR

SEQ ID NO: 38612 - protein, 34 aa, Homo sapiens
  MAP TO AC006531.1; EXPRESSED IN PLACENTA, SIGNAL = 5.8; EXPRESSED IN BONE MARROW, SIGNAL = 0.57; EXPRESSED IN HELA, SIGNAL =   9; EXPRESSED IN LUNG, SIGNAL = 0.49; EXPRESSED IN FETAL LIVER, SIGNAL = 0.76; EXPRESSED IN BRAIN, SIGNAL = 0.7; EXPRESSED IN ADULT LIVER, SIGNAL = 0.48; EXPRESSED IN HEART, SIGNAL = 8.6; SWISSPROT HIT: Q00959, EVALUE 2.00e-14
FMVNVTWDGKDLSFTEEGYQVHPRLVVIVLNKDR

SEQ ID NO: 38613 - protein, 26 aa, Homo sapiens
  MAP TO AC006531.1; EXPRESSED IN PLACENTA, SIGNAL = 5.8; EXPRESSED IN BONE MARROW, SIGNAL = 0.57; EXPRESSED IN HELA, SIGNAL =   9; EXPRESSED IN LUNG, SIGNAL = 0.49; EXPRESSED IN FETAL LIVER, SIGNAL = 0.76; EXPRESSED IN BRAIN, SIGNAL = 0.7; EXPRESSED IN ADULT LIVER, SIGNAL = 0.48; EXPRESSED IN HEART, SIGNAL = 8.6; EST_HUMAN HIT: AI732851.1, EVALUE 2.00e-10
LWSMLHGMAKTYPSLRKATRCTPGWW

SEQ ID NO: 38614 - protein, 58 aa, Homo sapiens
  MAP TO AC004804.1; EXPRESSED IN LUNG, SIGNAL = 2.5; EXPRESSED IN PLACENTA, SIGNAL = 2.5; EXPRESSED IN HEART, SIGNAL = 2.6; EXPRESSED IN FETAL LIVER, SIGNAL = 2.3; EXPRESSED IN BRAIN, SIGNAL = 2.9; EXPRESSED IN BONE MARROW, SIGNAL = 2.2; EXPRESSED IN ADULT LIVER, SIGNAL = 2.4; EXPRESSED IN HELA, SIGNAL = 2.6; SWISSPROT HIT: Q37897, EVALUE 7.90e+00
FFHFLNTDHSPSSKNTYYIITLSHHPQPQSSLFHSNHIKSIFSDTILHGLKMHIHKFK

SEQ ID NO: 38615 - protein, 32 aa, Homo sapiens
  MAP TO AC003025.1; EXPRESSED IN LUNG, SIGNAL = 1.7; EXPRESSED IN HEART, SIGNAL = 1.8; EXPRESSED IN FETAL LIVER, SIGNAL = 1.7; EXPRESSED IN BRAIN, SIGNAL = 1.6; EXPRESSED IN BONE MARROW, SIGNAL = 1.6; EXPRESSED IN PLACENTA, SIGNAL = 1.5; EXPRESSED IN ADULT LIVER, SIGNAL = 1.9; SWISSPROT HIT: Q09466, EVALUE 9.80e-01
DLLWAASFYARFFLSYLPFYGVPGVLLFFVAV

SEQ ID NO: 38616 - protein, 85 aa, Homo sapiens
  MAP TO AC004872.1; EXPRESSED IN LUNG, SIGNAL = 4.5; EXPRESSED IN HEART, SIGNAL = 3.5; EXPRESSED IN FETAL LIVER, SIGNAL = 5.8; EXPRESSED IN BRAIN, SIGNAL = 4.1; EXPRESSED IN PLACENTA, SIGNAL =   4; EXPRESSED IN BONE MARROW, SIGNAL =   4; EXPRESSED IN HELA, SIGNAL = 4.3; EXPRESSED IN ADULT LIVER, SIGNAL = 3.3; SWISSPROT HIT: P50451, EVALUE 1.20e+00
DLKQSLLLTCLLGRLEQQAYGVLSSCFFLKYPSTQKNEFTAQIHQFHTGLRILFGINQNFTEETNSHFYHSFNRLHRETKASNLT

SEQ ID NO: 38617 - protein, 30 aa, Homo sapiens
  MAP TO AC006010.2; EXPRESSED IN HEART, SIGNAL = 2.5; EXPRESSED IN HELA, SIGNAL = 2.4; EXPRESSED IN FETAL LIVER, SIGNAL = 2.4; EXPRESSED IN BRAIN, SIGNAL = 2.6; EXPRESSED IN BONE MARROW, SIGNAL = 2.3; EXPRESSED IN ADULT LIVER, SIGNAL = 2.4; EXPRESSED IN PLACENTA, SIGNAL = 2.5; EXPRESSED IN LUNG, SIGNAL = 2.5
EMYLRKSEHFVAMLILMYTVPFHFEVSVSG

SEQ ID NO: 38618 - protein, 174 aa, Homo sapiens
  MAP TO AC002115.1; EXPRESSED IN PLACENTA, SIGNAL = 4.6; EXPRESSED IN LUNG, SIGNAL = 7.5; EXPRESSED IN HELA, SIGNAL = 6.4; EXPRESSED IN HEART, SIGNAL = 6.5; EXPRESSED IN BONE MARROW, SIGNAL = 5.9; EXPRESSED IN FETAL LIVER, SIGNAL =  11; EXPRESSED IN BRAIN, SIGNAL = 2.8; EXPRESSED IN ADULT LIVER, SIGNAL =  14; SWISSPROT HIT: O00321, EVALUE 4.00e-87
PDSQALPWSGDWTDMACTAWDSWSGASQTLGPAPLGPGPIPAAGSEGAAGQNCVPVAGEATSWSRAQAAGSNTSWDCSVGPDGDTYWGSGLGGEPRTDCTISWGGPAGPDCTTSWNPGLHAGGTTSLKRYQSSALTVCSEPSPQSDRASLARCPKTNHRGERAAKTAGRAKLES

SEQ ID NO: 38619 - protein, 68 aa, Homo sapiens
  MAP TO AC005318.1; EXPRESSED IN LUNG, SIGNAL = 1.5; EXPRESSED IN HELA, SIGNAL = 1.6; EXPRESSED IN HEART, SIGNAL = 1.8; EXPRESSED IN FETAL LIVER, SIGNAL = 1.6; EXPRESSED IN BRAIN, SIGNAL = 1.6; EXPRESSED IN BONE MARROW, SIGNAL = 1.6; EXPRESSED IN PLACENTA, SIGNAL = 1.6; EXPRESSED IN ADULT LIVER, SIGNAL = 1.6; SWISSPROT HIT: P12271, EVALUE 9.00e-20
AKDELNEREETREEAVRELQEMVQAQAASGEELAVAVAERVQEKDSGFFLRFIRARKFNVGRAYELLR

SEQ ID NO: 38620 - protein, 55 aa, Homo sapiens
  MAP TO AC005318.1; EXPRESSED IN LUNG, SIGNAL = 1.5; EXPRESSED IN HELA, SIGNAL = 1.6; EXPRESSED IN HEART, SIGNAL = 1.8; EXPRESSED IN FETAL LIVER, SIGNAL = 1.6; EXPRESSED IN BRAIN, SIGNAL = 1.6; EXPRESSED IN BONE MARROW, SIGNAL = 1.6; EXPRESSED IN PLACENTA, SIGNAL = 1.6; EXPRESSED IN ADULT LIVER, SIGNAL = 1.6; EST_HUMAN HIT: W28826.1, EVALUE 3.00e-04
GDPGGGSARAAGDGAGAGGLGGGAGGGRGGEGAREGQRLLPALHPRTEVQRGPCL

SEQ ID NO: 38621 - protein, 47 aa, Homo sapiens
  MAP TO AC004845.1; EXPRESSED IN PLACENTA, SIGNAL = 5.9; EXPRESSED IN HELA, SIGNAL = 5.5; EXPRESSED IN FETAL LIVER, SIGNAL = 5.5; EXPRESSED IN BRAIN, SIGNAL = 6.1; EXPRESSED IN LUNG, SIGNAL = 7.1; EXPRESSED IN HEART, SIGNAL = 5.3; EXPRESSED IN BONE MARROW, SIGNAL = 5.7; EXPRESSED IN ADULT LIVER, SIGNAL = 6.1; SWISSPROT HIT: P50117, EVALUE 4.70e+00
NPRGLSGSGPGWERLHLQAGAGHGHALFGVHAKRGGAGHHHAALGHG

SEQ ID NO: 38622 - protein, 27 aa, Homo sapiens
  MAP TO AC004671.1; EXPRESSED IN HEART, SIGNAL = 1.4; EXPRESSED IN BRAIN, SIGNAL = 1.7; EXPRESSED IN BONE MARROW, SIGNAL = 1.2; EXPRESSED IN PLACENTA, SIGNAL = 1.1; EXPRESSED IN LUNG, SIGNAL =   1; EXPRESSED IN FETAL LIVER, SIGNAL = 1.2; EXPRESSED IN ADULT LIVER, SIGNAL =   1; SWISSPROT HIT: O77245, EVALUE 2.20e+00
MESPERMRERTTGGQPWEDPTSAWEEP

SEQ ID NO: 38623 - protein, 55 aa, Homo sapiens
  MAP TO AC006120.1; EXPRESSED IN LUNG, SIGNAL = 1.6; EXPRESSED IN FETAL LIVER, SIGNAL = 2.9; EXPRESSED IN HELA, SIGNAL = 2.6; EXPRESSED IN BRAIN, SIGNAL = 1.7; EXPRESSED IN BONE MARROW, SIGNAL = 1.8; EXPRESSED IN ADULT LIVER, SIGNAL =   3; EXPRESSED IN PLACENTA, SIGNAL = 1.4; EXPRESSED IN HEART, SIGNAL = 2.5; EST_HUMAN HIT: AU143315.1, EVALUE 3.00e-10
CLVTSVQLQLPQLTLLQFHWSHVQMFSRLEFHHLGFLPLKCMLLWAALGPLDSRQ

SEQ ID NO: 38624 - protein, 47 aa, Homo sapiens
  MAP TO AC003662.1; EXPRESSED IN LUNG, SIGNAL = 2.1; EXPRESSED IN PLACENTA, SIGNAL = 1.6; EXPRESSED IN HEART, SIGNAL =   2; EXPRESSED IN FETAL LIVER, SIGNAL = 1.7; EXPRESSED IN BRAIN, SIGNAL = 1.9; EXPRESSED IN BONE MARROW, SIGNAL = 1.8; EXPRESSED IN ADULT LIVER, SIGNAL = 2.1; EXPRESSED IN HELA, SIGNAL =   2; SWISSPROT HIT: P20114, EVALUE 2.80e+00
IPFPHVLLRTGAWASGTAWESTPWWDMKRILGVWFVDQGSLLTVWGE

SEQ ID NO: 38625 - protein, 47 aa, Homo sapiens
  MAP TO AC003662.1; EXPRESSED IN LUNG, SIGNAL = 2.1; EXPRESSED IN PLACENTA, SIGNAL = 1.6; EXPRESSED IN HEART, SIGNAL =   2; EXPRESSED IN FETAL LIVER, SIGNAL = 1.7; EXPRESSED IN BRAIN, SIGNAL = 1.9; EXPRESSED IN BONE MARROW, SIGNAL = 1.8; EXPRESSED IN ADULT LIVER, SIGNAL = 2.1; EXPRESSED IN HELA, SIGNAL =   2; EST_HUMAN HIT: BE545254.1, EVALUE 1.30e+00
SPHTVSSEPWSTNQTPRIRFMSHHGVLSQAVPEAQAPVRSRTWGKGI

SEQ ID NO: 38626 - protein, 41 aa, Homo sapiens
  MAP TO AC000053.1; EXPRESSED IN PLACENTA, SIGNAL = 1.6; EXPRESSED IN HELA, SIGNAL = 1.8; EXPRESSED IN HEART, SIGNAL = 1.8; EXPRESSED IN FETAL LIVER, SIGNAL = 1.9; EXPRESSED IN ADULT LIVER, SIGNAL = 1.4; EXPRESSED IN LUNG, SIGNAL = 1.7; EXPRESSED IN BRAIN, SIGNAL =   2; EXPRESSED IN BONE MARROW, SIGNAL = 2.1
DDDDGEGEEEGGGGGKKEEEEEEEEEEEDEGKKKKDEEEEE

SEQ ID NO: 38627 - protein, 43 aa, Homo sapiens
  MAP TO AC000053.1; EXPRESSED IN PLACENTA, SIGNAL = 1.6; EXPRESSED IN HELA, SIGNAL = 1.8; EXPRESSED IN HEART, SIGNAL = 1.8; EXPRESSED IN FETAL LIVER, SIGNAL = 1.9; EXPRESSED IN ADULT LIVER, SIGNAL = 1.4; EXPRESSED IN LUNG, SIGNAL = 1.7; EXPRESSED IN BRAIN, SIGNAL =   2; EXPRESSED IN BONE MARROW, SIGNAL = 2.1
KKEEEEERRKKKKKRRRKKKTKGRRRRMRRRRNRQTDKDSLLL

SEQ ID NO: 38628 - protein, 37 aa, Homo sapiens
  MAP TO AC006461.2; EXPRESSED IN BRAIN, SIGNAL = 2.1; EXPRESSED IN ADULT LIVER, SIGNAL = 1.7; EXPRESSED IN PLACENTA, SIGNAL = 2.3; EXPRESSED IN LUNG, SIGNAL = 1.8; EXPRESSED IN HELA, SIGNAL = 1.6; EXPRESSED IN HEART, SIGNAL = 1.9; EXPRESSED IN BONE MARROW, SIGNAL = 1.6; EXPRESSED IN FETAL LIVER, SIGNAL =   2; SWISSPROT HIT: O43747, EVALUE 8.40e+00
SRKNNMFAQFRKNERDKQKLIDTVAKQLRGLISSHHS

SEQ ID NO: 38629 - protein, 141 aa, Homo sapiens
  MAP TO AC005701.1; EXPRESSED IN HELA, SIGNAL = 4.7; EXPRESSED IN BRAIN, SIGNAL = 4.9; EXPRESSED IN ADULT LIVER, SIGNAL = 4.4; EXPRESSED IN PLACENTA, SIGNAL = 8.9; EXPRESSED IN LUNG, SIGNAL = 5.1; EXPRESSED IN HEART, SIGNAL = 5.2; EXPRESSED IN FETAL LIVER, SIGNAL = 4.9; EXPRESSED IN BONE MARROW, SIGNAL = 4.3; SWISSPROT HIT: P39057, EVALUE 4.00e-47
VDLDGIPDLANMRRTLMERVQRMMGLCCGYQSTFSQYSYLYVEDRKEVLGQFLLYGHILTPEEIEDHVEDGIPENPPLLSQFKVQIDSYETLYEEVCRLEPIKVFDGWMKIDIRPFKASLLNIIKRWSLLFKQHLVDHVTH

SEQ ID NO: 38630 - protein, 28 aa, Homo sapiens
  MAP TO AC005701.1; EXPRESSED IN HELA, SIGNAL = 4.7; EXPRESSED IN BRAIN, SIGNAL = 4.9; EXPRESSED IN ADULT LIVER, SIGNAL = 4.4; EXPRESSED IN PLACENTA, SIGNAL = 8.9; EXPRESSED IN LUNG, SIGNAL = 5.1; EXPRESSED IN HEART, SIGNAL = 5.2; EXPRESSED IN FETAL LIVER, SIGNAL = 4.9; EXPRESSED IN BONE MARROW, SIGNAL = 4.3; SWISSPROT HIT: Q10599, EVALUE 8.60e+00
LSRFPRSTWTVYQIWQTCGAHSWRESRE

SEQ ID NO: 38631 - protein, 56 aa, Homo sapiens
  MAP TO AC004904.1; EXPRESSED IN ADULT LIVER, SIGNAL = 3.7; EXPRESSED IN PLACENTA, SIGNAL = 5.9; EXPRESSED IN HEART, SIGNAL = 3.6; EXPRESSED IN LUNG, SIGNAL = 4.3; EXPRESSED IN FETAL LIVER, SIGNAL = 4.2; EXPRESSED IN BRAIN, SIGNAL = 4.9; EXPRESSED IN BONE MARROW, SIGNAL = 2.9; EXPRESSED IN HELA, SIGNAL = 3.8; SWISSPROT HIT: Q92030, EVALUE 5.00e-25
GAIVAVTGDGVNDSPALKKADIGVAMGIAGSDVSKQAADMILLDDNFASIVTGVEE

SEQ ID NO: 38632 - protein, 40 aa, Homo sapiens
  MAP TO AC005591.1; EXPRESSED IN PLACENTA, SIGNAL = 1.4; EXPRESSED IN LUNG, SIGNAL = 1.4; EXPRESSED IN HEART, SIGNAL = 1.3; EXPRESSED IN FETAL LIVER, SIGNAL = 1.5; EXPRESSED IN BRAIN, SIGNAL = 1.6; EXPRESSED IN BONE MARROW, SIGNAL = 1.3; EXPRESSED IN ADULT LIVER, SIGNAL = 1.5; SWISSPROT HIT: Q12236, EVALUE 3.00e-09
NGELLKYIRKIGSFDETCTRFYTAEIVSALEYLHGKGIIH

SEQ ID NO: 38633 - protein, 33 aa, Homo sapiens
  MAP TO AC005510.3; EXPRESSED IN PLACENTA, SIGNAL = 1.7; EXPRESSED IN LUNG, SIGNAL = 1.7; EXPRESSED IN FETAL LIVER, SIGNAL = 1.5; EXPRESSED IN BONE MARROW, SIGNAL = 1.6; EXPRESSED IN ADULT LIVER, SIGNAL = 1.4; EXPRESSED IN HEART, SIGNAL = 1.8; EXPRESSED IN BRAIN, SIGNAL = 1.6; EST_HUMAN HIT: AU142079.1, EVALUE 2.00e-05
KSIWEAWLRFRRLWSISRTIAQTAQNTHLSSAA

SEQ ID NO: 38634 - protein, 43 aa, Homo sapiens
  MAP TO AC005477.1; EXPRESSED IN PLACENTA, SIGNAL = 1.3; EXPRESSED IN LUNG, SIGNAL = 1.6; EXPRESSED IN HEART, SIGNAL = 1.3; EXPRESSED IN FETAL LIVER, SIGNAL = 1.4; EXPRESSED IN BRAIN, SIGNAL = 1.4; EXPRESSED IN BONE MARROW, SIGNAL = 1.3; EXPRESSED IN ADULT LIVER, SIGNAL = 1.4; SWISSPROT HIT: P11956, EVALUE 4.80e+00
QCKDYHIFLCCFGDCECLCMDGASHQCQHGVFNSNEQFPVDLH

SEQ ID NO: 38635 - protein, 39 aa, Homo sapiens
  MAP TO AC006015.2; EXPRESSED IN LUNG, SIGNAL = 1.5; EXPRESSED IN FETAL LIVER, SIGNAL = 1.1; EXPRESSED IN BONE MARROW, SIGNAL = 1.3; EXPRESSED IN HEART, SIGNAL = 1.3; EXPRESSED IN BRAIN, SIGNAL = 1.5; EXPRESSED IN ADULT LIVER, SIGNAL = 1.1; EXPRESSED IN PLACENTA, SIGNAL = 1.3; SWISSPROT HIT: P54102, EVALUE 1.70e+00
NLSKGGAVSKLMESMAAEEDFEPNQDSSFSEDEHLPRGG

SEQ ID NO: 38636 - protein, 50 aa, Homo sapiens
  MAP TO AC002119.1; EXPRESSED IN PLACENTA, SIGNAL = 2.9; EXPRESSED IN HEART, SIGNAL = 2.4; EXPRESSED IN BRAIN, SIGNAL = 5.7; EXPRESSED IN BONE MARROW, SIGNAL = 3.5; EXPRESSED IN ADULT LIVER, SIGNAL = 2.6; EXPRESSED IN LUNG, SIGNAL = 4.3; EXPRESSED IN HELA, SIGNAL = 2.6; EXPRESSED IN FETAL LIVER, SIGNAL = 3.8; SWISSPROT HIT: Q96528, EVALUE 3.60e+00
KRHLQVNVTNPVQCSLHGKKCTVSVETRLNQPQPDFTKNRSGFILSVPGN

SEQ ID NO: 38637 - protein, 52 aa, Homo sapiens
  MAP TO AC005323.1; EXPRESSED IN LUNG, SIGNAL = 0.8; EXPRESSED IN HEART, SIGNAL =  23; EXPRESSED IN BONE MARROW, SIGNAL = 1.1; EXPRESSED IN ADULT LIVER, SIGNAL = 0.44; SWISSPROT HIT: P02565, EVALUE 4.00e-26
TYSGLFCVTVNPYKWLPVYNPEVVTAYRGKKRQEAPPHIFSISDNAYQFMLT

SEQ ID NO: 38638 - protein, 29 aa, Homo sapiens
  MAP TO AC005323.1; EXPRESSED IN LUNG, SIGNAL = 0.8; EXPRESSED IN HEART, SIGNAL =  23; EXPRESSED IN BONE MARROW, SIGNAL = 1.1; EXPRESSED IN ADULT LIVER, SIGNAL = 0.44; EST_HUMAN HIT: R34655.1, EVALUE 1.00e-01
PVLSHRPTRASSVSPSTPTSGCRCTTLRW

SEQ ID NO: 38639 - protein, 48 aa, Homo sapiens
  MAP TO AC005912.1; EXPRESSED IN PLACENTA, SIGNAL = 3.5; EXPRESSED IN ADULT LIVER, SIGNAL = 3.5; EXPRESSED IN LUNG, SIGNAL =   4; EXPRESSED IN HEART, SIGNAL = 3.4; EXPRESSED IN FETAL LIVER, SIGNAL = 3.3; EXPRESSED IN BRAIN, SIGNAL = 3.1; EXPRESSED IN BONE MARROW, SIGNAL = 3.3; EXPRESSED IN HELA, SIGNAL = 3.6; SWISSPROT HIT: P23768, EVALUE 7.10e-01
VVTGCLFWRECGQCVPGNVLSAVRGPGGVPSWPGISSTCGCLEAPEPQ

SEQ ID NO: 38640 - protein, 53 aa, Homo sapiens
  MAP TO AC005912.1; EXPRESSED IN PLACENTA, SIGNAL = 3.5; EXPRESSED IN ADULT LIVER, SIGNAL = 3.5; EXPRESSED IN LUNG, SIGNAL =   4; EXPRESSED IN HEART, SIGNAL = 3.4; EXPRESSED IN FETAL LIVER, SIGNAL = 3.3; EXPRESSED IN BRAIN, SIGNAL = 3.1; EXPRESSED IN BONE MARROW, SIGNAL = 3.3; EXPRESSED IN HELA, SIGNAL = 3.6; EST_HUMAN HIT: BE566907.1, EVALUE 6.40e+00
GGDRVFVLEGMWAVCPWECSVCCAWAWWCALLARHQQHLWMFGSPRTPGAWLQ

SEQ ID NO: 38641 - protein, 69 aa, Homo sapiens
  MAP TO AC002044.1; EXPRESSED IN PLACENTA, SIGNAL = 2.5; EXPRESSED IN LUNG, SIGNAL = 2.9; EXPRESSED IN FETAL LIVER, SIGNAL =   2; EXPRESSED IN BRAIN, SIGNAL =   3; EXPRESSED IN BONE MARROW, SIGNAL = 2.4; EXPRESSED IN ADULT LIVER, SIGNAL = 2.6; EXPRESSED IN HELA, SIGNAL = 2.9; EXPRESSED IN HEART, SIGNAL = 2.2; SWISSPROT HIT: O09127, EVALUE 3.90e+00
PDRMSSSIGGGGGGGSSSSSSREKTRSELHVLPPSLPPLKARSCWDLWSGSGEGRGAWSAAGWENVEWR

SEQ ID NO: 38642 - protein, 84 aa, Homo sapiens
  MAP TO AC006530.4; EXPRESSED IN BONE MARROW, SIGNAL = 1.2; EXPRESSED IN ADULT LIVER, SIGNAL = 1.2; EXPRESSED IN PLACENTA, SIGNAL = 1.3; EXPRESSED IN HEART, SIGNAL = 1.5; EXPRESSED IN FETAL LIVER, SIGNAL = 1.4; EXPRESSED IN BRAIN, SIGNAL = 1.1; EXPRESSED IN LUNG, SIGNAL = 0.99; SWISSPROT HIT: P46799, EVALUE 1.90e+00
LLLLRPSRLKLLLLQPQKQNLQQRQFLPLQHPYPLRCHRCPRPHSLLLANLVGFQLPHVMWENISSNMFLQRVNSRLMMVLNRP

SEQ ID NO: 38643 - protein, 38 aa, Homo sapiens
  MAP TO AC006530.4; EXPRESSED IN BONE MARROW, SIGNAL = 1.2; EXPRESSED IN ADULT LIVER, SIGNAL = 1.2; EXPRESSED IN PLACENTA, SIGNAL = 1.3; EXPRESSED IN HEART, SIGNAL = 1.5; EXPRESSED IN FETAL LIVER, SIGNAL = 1.4; EXPRESSED IN BRAIN, SIGNAL = 1.1; EXPRESSED IN LUNG, SIGNAL = 0.99
AEAPAAAAPKAEPTAAAVPPPAAPIPTQMPPVPSPSQP

SEQ ID NO: 38644 - protein, 26 aa, Homo sapiens
  MAP TO AC004675.1; EXPRESSED IN LUNG, SIGNAL = 1.8; EXPRESSED IN PLACENTA, SIGNAL = 2.7; EXPRESSED IN HEART, SIGNAL = 3.8; EXPRESSED IN FETAL LIVER, SIGNAL = 2.2; EXPRESSED IN BRAIN, SIGNAL = 1.6; EXPRESSED IN BONE MARROW, SIGNAL = 1.8; EXPRESSED IN ADULT LIVER, SIGNAL = 7.2; SWISSPROT HIT: Q16627, EVALUE 3.00e-07
MKISVAAIPFFLLITIALGTKTESSS

SEQ ID NO: 38645 - protein, 67 aa, Homo sapiens
  MAP TO AC005392.1; EXPRESSED IN PLACENTA, SIGNAL = 0.75; EXPRESSED IN HEART, SIGNAL = 2.8; EXPRESSED IN BONE MARROW, SIGNAL = 0.66; EXPRESSED IN LUNG, SIGNAL = 0.64; EXPRESSED IN ADULT LIVER, SIGNAL = 0.7; SWISSPROT HIT: Q15238, EVALUE 1.00e-35
FTYYRSGENLYLSCFAESNPPAEYFWTINGKFQQSGQKLSIPQITTKHRGLYTCSVRNSATGKESSK

SEQ ID NO: 38646 - protein, 68 aa, Homo sapiens
  MAP TO AC005392.1; EXPRESSED IN PLACENTA, SIGNAL = 0.75; EXPRESSED IN HEART, SIGNAL = 2.8; EXPRESSED IN BONE MARROW, SIGNAL = 0.66; EXPRESSED IN LUNG, SIGNAL = 0.64; EXPRESSED IN ADULT LIVER, SIGNAL = 0.7; SWISSPROT HIT: P53882, EVALUE 2.00e+00
HSPITVQEKTSTCPASRNLTHRQSIFGQLMGSFSNQDKSSLSPKLLQSIEGSILALFVTQLLARKAPN

SEQ ID NO: 38647 - protein, 45 aa, Homo sapiens
  MAP TO AC005316.1; EXPRESSED IN PLACENTA, SIGNAL = 9.2; EXPRESSED IN HEART, SIGNAL = 8.7; EXPRESSED IN FETAL LIVER, SIGNAL =  11; EXPRESSED IN BRAIN, SIGNAL = 9.7; EXPRESSED IN BONE MARROW, SIGNAL = 9.8; EXPRESSED IN ADULT LIVER, SIGNAL =  10; EXPRESSED IN HELA, SIGNAL = 9.7; EXPRESSED IN LUNG, SIGNAL =  11; EST_HUMAN HIT: AA676615.1, EVALUE 6.90e+00
TYIPPVNTHVALAQTRKLWLTRLFGAAQLQVSLSSRWFHVWWQQQ

SEQ ID NO: 38648 - protein, 65 aa, Homo sapiens
  MAP TO AC005612.1; EXPRESSED IN PLACENTA, SIGNAL = 1.2; EXPRESSED IN HEART, SIGNAL = 1.5; EXPRESSED IN FETAL LIVER, SIGNAL = 1.2; EXPRESSED IN BONE MARROW, SIGNAL = 1.1; EXPRESSED IN ADULT LIVER, SIGNAL = 1.7; EXPRESSED IN LUNG, SIGNAL = 1.3; EXPRESSED IN BRAIN, SIGNAL = 1.2; SWISSPROT HIT: P20591, EVALUE 1.00e-32
ILTKPDLVDKGTEDKVVDVVRNLVFHLKKGYMIVKCRGQQEIQDQLSLSEALQREKIFFENHPYF

SEQ ID NO: 38649 - protein, 58 aa, Homo sapiens
  MAP TO AC006141.2; EXPRESSED IN HELA, SIGNAL = 4.2; EXPRESSED IN HEART, SIGNAL = 3.7; EXPRESSED IN ADULT LIVER, SIGNAL = 5.7; EXPRESSED IN FETAL LIVER, SIGNAL = 5.4; EXPRESSED IN BRAIN, SIGNAL = 4.2; EXPRESSED IN BONE MARROW, SIGNAL = 4.4; EXPRESSED IN PLACENTA, SIGNAL = 4.1; EXPRESSED IN LUNG, SIGNAL = 3.7; SWISSPROT HIT: P44806, EVALUE 2.70e+00
VDGKTNPKIQSIYLERFPIFKACFSANGEEVLATSTHSKVLYVYDMLAGKLIPVHQVR

SEQ ID NO: 38650 - protein, 25 aa, Homo sapiens
  MAP TO AC006141.2; EXPRESSED IN HELA, SIGNAL = 4.2; EXPRESSED IN HEART, SIGNAL = 3.7; EXPRESSED IN ADULT LIVER, SIGNAL = 5.7; EXPRESSED IN FETAL LIVER, SIGNAL = 5.4; EXPRESSED IN BRAIN, SIGNAL = 4.2; EXPRESSED IN BONE MARROW, SIGNAL = 4.4; EXPRESSED IN PLACENTA, SIGNAL = 4.1; EXPRESSED IN LUNG, SIGNAL = 3.7; EST_HUMAN HIT: BF573247.1, EVALUE 1.00e-06
LKFRASIWKGFQSLRLVLVLMGKKF

SEQ ID NO: 38651 - protein, 54 aa, Homo sapiens
  MAP TO AC004763.1; EXPRESSED IN PLACENTA, SIGNAL = 3.6; EXPRESSED IN HELA, SIGNAL = 2.8; EXPRESSED IN FETAL LIVER, SIGNAL = 3.1; EXPRESSED IN BRAIN, SIGNAL = 2.9; EXPRESSED IN LUNG, SIGNAL = 3.6; EXPRESSED IN HEART, SIGNAL = 2.5; EXPRESSED IN BONE MARROW, SIGNAL = 2.8; EXPRESSED IN ADULT LIVER, SIGNAL = 4.8; SWISSPROT HIT: O14960, EVALUE 8.00e-17
FCVKMFYIKPIKYKGPIKKGEKLGTLLPLQKVYPGIQSHVHIENCDSSDPTAYL

SEQ ID NO: 38652 - protein, 46 aa, Homo sapiens
  MAP TO AC005599.5; EXPRESSED IN PLACENTA, SIGNAL = 5.4; EXPRESSED IN LUNG, SIGNAL = 5.3; EXPRESSED IN FETAL LIVER, SIGNAL = 5.6; EXPRESSED IN BRAIN, SIGNAL = 4.9; EXPRESSED IN ADULT LIVER, SIGNAL = 5.4; EXPRESSED IN HELA, SIGNAL = 5.7; EXPRESSED IN HEART, SIGNAL = 5.3; EXPRESSED IN BONE MARROW, SIGNAL = 5.4; SWISSPROT HIT: Q60787, EVALUE 9.00e-10
DGSFLVRDCSTKSKEEPYVLAVFYENKVYNVKIRFLERNQQFALGT

SEQ ID NO: 38653 - protein, 30 aa, Homo sapiens
  MAP TO AC005599.5; EXPRESSED IN PLACENTA, SIGNAL = 5.4; EXPRESSED IN LUNG, SIGNAL = 5.3; EXPRESSED IN FETAL LIVER, SIGNAL = 5.6; EXPRESSED IN BRAIN, SIGNAL = 4.9; EXPRESSED IN ADULT LIVER, SIGNAL = 5.4; EXPRESSED IN HELA, SIGNAL = 5.7; EXPRESSED IN HEART, SIGNAL = 5.3; EXPRESSED IN BONE MARROW, SIGNAL = 5.4
MVVSWSEIVPQNPRKSPMFWLCFMRTKSTM

SEQ ID NO: 38654 - protein, 32 aa, Homo sapiens
  MAP TO AC004957.1; EXPRESSED IN BONE MARROW, SIGNAL = 1.5; EXPRESSED IN ADULT LIVER, SIGNAL =   2; EXPRESSED IN PLACENTA, SIGNAL = 1.7; EXPRESSED IN LUNG, SIGNAL = 1.8; EXPRESSED IN HEART, SIGNAL = 1.8; EXPRESSED IN FETAL LIVER, SIGNAL = 1.8; EXPRESSED IN BRAIN, SIGNAL = 1.6; EST_HUMAN HIT: AI376307.1, EVALUE 3.00e-06
CLWRPHIHSGRQGGASHILPGWQQARRAYAGQ

SEQ ID NO: 38655 - protein, 47 aa, Homo sapiens
  MAP TO AC004883.2; EXPRESSED IN BONE MARROW, SIGNAL = 2.5; EXPRESSED IN ADULT LIVER, SIGNAL = 2.5; EXPRESSED IN LUNG, SIGNAL =   3; EXPRESSED IN HELA, SIGNAL = 2.4; EXPRESSED IN HEART, SIGNAL = 2.2; EXPRESSED IN FETAL LIVER, SIGNAL = 2.5; EXPRESSED IN BRAIN, SIGNAL = 3.1; EXPRESSED IN PLACENTA, SIGNAL = 2.7; EST_HUMAN HIT: AV721616.1, EVALUE 1.00e+00
FSKINFPFCESSNESRNGYMTHFPIEGKVHIYTLSQNSQKPGYCFIG

SEQ ID NO: 38656 - protein, 47 aa, Homo sapiens
  MAP TO AC006024.1; EXPRESSED IN PLACENTA, SIGNAL = 1.6; EXPRESSED IN LUNG, SIGNAL = 1.5; EXPRESSED IN FETAL LIVER, SIGNAL = 1.2; EXPRESSED IN BRAIN, SIGNAL = 1.4; EXPRESSED IN BONE MARROW, SIGNAL = 1.3; EXPRESSED IN ADULT LIVER, SIGNAL = 1.2; EXPRESSED IN HEART, SIGNAL = 1.4; EST_HUMAN HIT: BF241410.1, EVALUE 6.00e-01
STREHTMSGHHMPRGAPNLGAWVLQCLEIFLSMEYRGTYCTTISAQE

SEQ ID NO: 38657 - protein, 76 aa, Homo sapiens [sequence omitted]

SEQ ID NO: 38658 - protein, 72 aa, Homo sapiens [sequence omitted]

SEQ ID NO: 38659 - protein, 26 aa, Homo sapiens
  MAP TO AC007841.1; EXPRESSED IN ADULT LIVER, SIGNAL = 9.7; EXPRESSED IN FETAL LIVER, SIGNAL = 9.3; EXPRESSED IN BRAIN, SIGNAL = 4.7; EXPRESSED IN PLACENTA, SIGNAL =  13; EXPRESSED IN HELA, SIGNAL = 5.7; EXPRESSED IN HEART, SIGNAL = 3.7; EXPRESSED IN LUNG, SIGNAL = 4.4; EXPRESSED IN BONE MARROW, SIGNAL = 9.3; SWISSPROT HIT: P39192, EVALUE 2.00e-03
WATWQNSISTKIGWARWYVPVIPATW

SEQ ID NO: 38660 - protein, 97 aa, Homo sapiens
  MAP TO AC008009.4; EXPRESSED IN ADULT LIVER, SIGNAL = 1.9; EXPRESSED IN FETAL LIVER, SIGNAL = 1.4; EXPRESSED IN HELA, SIGNAL = 2.7; EXPRESSED IN HEART, SIGNAL = 5.9; EXPRESSED IN LUNG, SIGNAL = 2.2; SWISSPROT HIT: P21561, EVALUE 4.30e-01
AWAGGRQEDRKAALTMAPAGLPCFHREHGSSQLRGRGQHLHAFTRERRNPQPQAQAPYATRQEQPQTRPENCRKRGRGGEGKSLKQWTERRKRLRVG

SEQ ID NO: 38661 - protein, 25 aa, Homo sapiens
  MAP TO AC008151.1; EXPRESSED IN PLACENTA, SIGNAL = 7.7; EXPRESSED IN BRAIN, SIGNAL = 9.2; EXPRESSED IN HELA, SIGNAL = 6.2; EXPRESSED IN LUNG, SIGNAL = 6.4; EXPRESSED IN HEART, SIGNAL =   4; EXPRESSED IN BONE MARROW, SIGNAL = 7.9; EXPRESSED IN FETAL LIVER, SIGNAL =  16; EXPRESSED IN ADULT LIVER, SIGNAL = 7.8
MLAAESLKTKPIFPGGPRVTKTGRQ

SEQ ID NO: 38662 - protein, 25 aa, Homo sapiens
  MAP TO AC008272.1; EXPRESSED IN HEART, SIGNAL = 1.5
LPAPAPCSSPACSLLVPKYPSTKPR

SEQ ID NO: 38663 - protein, 25 aa, Homo sapiens
  MAP TO AL021392.5; EXPRESSED IN BRAIN, SIGNAL = 3.3; EXPRESSED IN HELA, SIGNAL = 7.9; EXPRESSED IN FETAL LIVER, SIGNAL =  19; EXPRESSED IN ADULT LIVER, SIGNAL =  14; EXPRESSED IN PLACENTA, SIGNAL =  16; EXPRESSED IN BONE MARROW, SIGNAL = 3.5; EXPRESSED IN HEART, SIGNAL =   5; EXPRESSED IN LUNG, SIGNAL =  11
NQLHFLETHWVDWISVQVQTPWEIS

SEQ ID NO: 38664 - protein, 36 aa, Homo sapiens
  MAP TO AL022328.21; EXPRESSED IN HELA, SIGNAL = 5.9; EXPRESSED IN BONE MARROW, SIGNAL = 3.2; EXPRESSED IN HEART, SIGNAL = 3.8; EXPRESSED IN LUNG, SIGNAL = 4.3; EXPRESSED IN FETAL LIVER, SIGNAL = 5.3; EXPRESSED IN ADULT LIVER, SIGNAL = 4.3; EXPRESSED IN PLACENTA, SIGNAL = 4.3; EXPRESSED IN BRAIN, SIGNAL = 3.4; SWISSPROT HIT: P06511, EVALUE 3.70e+00
AGKGLLSSGHMTHVTLPIIGDDSHSLPCPFCLVSNK

SEQ ID NO: 38665 - protein, 45 aa, Homo sapiens
  MAP TO AL022328.21; EXPRESSED IN PLACENTA, SIGNAL = 4.4; EXPRESSED IN HELA, SIGNAL = 3.1; EXPRESSED IN BONE MARROW, SIGNAL = 3.1; EXPRESSED IN LUNG, SIGNAL = 2.9; EXPRESSED IN HEART, SIGNAL = 2.6; EXPRESSED IN ADULT LIVER, SIGNAL = 3.5; EXPRESSED IN FETAL LIVER, SIGNAL = 4.3; EXPRESSED IN BRAIN, SIGNAL = 2.8; SWISSPROT HIT: P51944, EVALUE 8.20e+00
WLWSSGGDTGASHAEHQVSFMKHVSLWCSHHQAELGKNPQNTEEK

SEQ ID NO: 38666 - protein, 78 aa, Homo sapiens
  MAP TO AL022328.21; EXPRESSED IN HEART, SIGNAL = 1.5; EXPRESSED IN LUNG, SIGNAL = 1.2; EXPRESSED IN HELA, SIGNAL = 1.3; EXPRESSED IN BRAIN, SIGNAL =   2; EST_HUMAN HIT: R25204.1, EVALUE 1.30e-01
AHREGRAKQAPARRGCSVAGNLTEFAAGARSVASHSRDPIFLMVLRTGKWHEAGLPSGKRLWRGREENQACSISRRRG

SEQ ID NO: 38667 - protein, 23 aa, Homo sapiens
  MAP TO AL022329.9; EXPRESSED IN LUNG, SIGNAL = 1.8; EXPRESSED IN HEART, SIGNAL = 1.5; EST_HUMAN HIT: AW950305.1, EVALUE 2.00e-07
APRNREGPRGGHTRVSAFWGERG

SEQ ID NO: 38668 - protein, 43 aa, Homo sapiens
  MAP TO AC002287.1; EXPRESSED IN PLACENTA, SIGNAL =  11; EXPRESSED IN BRAIN, SIGNAL =  12; EXPRESSED IN ADULT LIVER, SIGNAL =  11; EXPRESSED IN LUNG, SIGNAL =  13; EXPRESSED IN HELA, SIGNAL =  12; EXPRESSED IN HEART, SIGNAL =  11; EXPRESSED IN FETAL LIVER, SIGNAL =  11; EXPRESSED IN BONE MARROW, SIGNAL =  11
SICLSMSMLIPLKGLRPDVAPSLLGPLLSVVLMGTELTHPTLG

SEQ ID NO: 38669 - protein, 157 aa, Homo sapiens
  MAP TO AC004853.1; EXPRESSED IN BRAIN, SIGNAL = 1.9; EXPRESSED IN HEART, SIGNAL = 1.7; EXPRESSED IN BONE MARROW, SIGNAL = 1.8; EXPRESSED IN ADULT LIVER, SIGNAL = 1.8; EXPRESSED IN PLACENTA, SIGNAL =   2; EXPRESSED IN LUNG, SIGNAL =   2; EXPRESSED IN HELA, SIGNAL = 1.9; EXPRESSED IN FETAL LIVER, SIGNAL =   2; SWISSPROT HIT: Q13607, EVALUE 3.00e-77
SAIMHGGLCARLAITSWVSGSINSLVQTAITFQLPMCTNKFIDHISCELLAVVRLACVDTSSNEAAIMVSSIVLLMTPFCLVLLSYIRIISTILKIQSREGRKKAFHTCASHLTVVALCYGTTIFTYIQPHSGPSVLQEKLISVFYAIVMPLLNPVI

SEQ ID NO: 38670 - protein, 38 aa, Homo sapiens
  MAP TO AC002064.1; EXPRESSED IN LUNG, SIGNAL = 5.7; EXPRESSED IN BRAIN, SIGNAL = 4.2; EXPRESSED IN ADULT LIVER, SIGNAL = 4.3; EXPRESSED IN PLACENTA, SIGNAL = 4.4; EXPRESSED IN HELA, SIGNAL = 4.3; EXPRESSED IN HEART, SIGNAL = 3.4; EXPRESSED IN FETAL LIVER, SIGNAL = 3.9; EXPRESSED IN BONE MARROW, SIGNAL = 4.2; EST_HUMAN HIT: BE875216.1, EVALUE 5.00e-08
KQLGLLSFFFAMVHVAYSLCLPMRRSERYLFLNMAYQQ

SEQ ID NO: 38671 - protein, 41 aa, Homo sapiens
  MAP TO AC004805.1; EXPRESSED IN ADULT LIVER, SIGNAL =   8; EXPRESSED IN PLACENTA, SIGNAL =  12; EXPRESSED IN LUNG, SIGNAL =  10; EXPRESSED IN HEART, SIGNAL = 7.4; EXPRESSED IN BRAIN, SIGNAL = 7.8; EXPRESSED IN HELA, SIGNAL = 7.7; EXPRESSED IN FETAL LIVER, SIGNAL = 9.6; EXPRESSED IN BONE MARROW, SIGNAL = 9.5; SWISSPROT HIT: Q9Z1Q5, EVALUE 3.00e-16
RLFMVLWLKGVTFNVTIIDTKRQTKIVQKLCPGGQLPFLLY

SEQ ID NO: 38672 - protein, 68 aa, Homo sapiens
  MAP TO AC004682.1; EXPRESSED IN BONE MARROW, SIGNAL = 6.7; EXPRESSED IN PLACENTA, SIGNAL = 6.4; EXPRESSED IN LUNG, SIGNAL = 6.2; EXPRESSED IN HELA, SIGNAL = 6.1; EXPRESSED IN FETAL LIVER, SIGNAL =   6; EXPRESSED IN ADULT LIVER, SIGNAL = 5.8; EXPRESSED IN HEART, SIGNAL = 6.3; EXPRESSED IN BRAIN, SIGNAL = 7.7; SWISSPROT HIT: Q92620, EVALUE 1.00e-34
YTQSAYKNELLTTTVPEIQRTNLANVVLLLKSLGVQDLLQFHFMDPPPEDNMLNSMYQLWILGALDNT

SEQ ID NO: 38673 - protein, 32 aa, Homo sapiens
  MAP TO AC005659.2; EXPRESSED IN PLACENTA, SIGNAL = 2.7; EXPRESSED IN LUNG, SIGNAL =   3; EXPRESSED IN FETAL LIVER, SIGNAL = 3.2; EXPRESSED IN BRAIN, SIGNAL = 2.3; EXPRESSED IN BONE MARROW, SIGNAL = 2.7; EXPRESSED IN ADULT LIVER, SIGNAL = 2.5; EXPRESSED IN HELA, SIGNAL = 2.8; EXPRESSED IN HEART, SIGNAL = 2.7
LKRPFGAVVPSFLLDPSCDQVAKWPGGGHCQD

SEQ ID NO: 38674 - protein, 18 aa, Homo sapiens
  MAP TO AC005659.2; EXPRESSED IN PLACENTA, SIGNAL = 2.7; EXPRESSED IN LUNG, SIGNAL =   3; EXPRESSED IN FETAL LIVER, SIGNAL = 3.2; EXPRESSED IN BRAIN, SIGNAL = 2.3; EXPRESSED IN BONE MARROW, SIGNAL = 2.7; EXPRESSED IN ADULT LIVER, SIGNAL = 2.5; EXPRESSED IN HELA, SIGNAL = 2.8; EXPRESSED IN HEART, SIGNAL = 2.7
FEETLWGCSAFLSAGPQL

SEQ ID NO: 38675 - protein, 31 aa, Homo sapiens
  MAP TO AC004943.1; EXPRESSED IN LUNG, SIGNAL = 4.8; EXPRESSED IN FETAL LIVER, SIGNAL =   4; EXPRESSED IN BONE MARROW, SIGNAL = 3.8; EXPRESSED IN PLACENTA, SIGNAL =   4; EXPRESSED IN HELA, SIGNAL = 3.8; EXPRESSED IN HEART, SIGNAL = 3.2; EXPRESSED IN BRAIN, SIGNAL = 3.9; EXPRESSED IN ADULT LIVER, SIGNAL = 3.7
VTMEINLMLSQSSQTTTSVLITRMYLPSNVP

SEQ ID NO: 38676 - protein, 32 aa, Homo sapiens
  MAP TO AC004943.1; EXPRESSED IN LUNG, SIGNAL = 4.8; EXPRESSED IN FETAL LIVER, SIGNAL =   4; EXPRESSED IN BONE MARROW, SIGNAL = 3.8; EXPRESSED IN PLACENTA, SIGNAL =   4; EXPRESSED IN HELA, SIGNAL = 3.8; EXPRESSED IN HEART, SIGNAL = 3.2; EXPRESSED IN BRAIN, SIGNAL = 3.9; EXPRESSED IN ADULT LIVER, SIGNAL = 3.7
GDNGDKPDAVTKLTDNHFCSDYEDVPSFKCTL

SEQ ID NO: 38677 - protein, 40 aa, Homo sapiens
  MAP TO AC003684.1; EXPRESSED IN PLACENTA, SIGNAL = 3.5; EXPRESSED IN HEART, SIGNAL =   3; EXPRESSED IN BRAIN, SIGNAL = 3.7; EXPRESSED IN BONE MARROW, SIGNAL = 3.4; EXPRESSED IN ADULT LIVER, SIGNAL = 3.1; EXPRESSED IN LUNG, SIGNAL = 3.8; EXPRESSED IN HELA, SIGNAL = 3.2; EXPRESSED IN FETAL LIVER, SIGNAL = 3.2
SVTPETRPAPPLPPPLQPTQQEDDEGEDLRDDPHPLREYK

SEQ ID NO: 38678 - protein, 21 aa, Homo sapiens
  MAP TO AC003684.1; EXPRESSED IN PLACENTA, SIGNAL = 3.5; EXPRESSED IN HEART, SIGNAL =   3; EXPRESSED IN BRAIN, SIGNAL = 3.7; EXPRESSED IN BONE MARROW, SIGNAL = 3.4; EXPRESSED IN ADULT LIVER, SIGNAL = 3.1; EXPRESSED IN LUNG, SIGNAL = 3.8; EXPRESSED IN HELA, SIGNAL = 3.2; EXPRESSED IN FETAL LIVER, SIGNAL = 3.2; EST_HUMAN HIT: AI810096.1, EVALUE 4.20e-01
GMIHIHFVNTKYIFSSLGFSS

SEQ ID NO: 38679 - protein, 39 aa, Homo sapiens
  MAP TO AP000353.1; EXPRESSED IN HEART, SIGNAL = 1.3; EST_HUMAN HIT: BF208840.1, EVALUE 7.20e+00
STGRPSRSSEGSAQAISTQSCMSAHLNLGPQDPKDPVEE

SEQ ID NO: 38680 - protein, 41 aa, Homo sapiens
  MAP TO AC007556.2; EXPRESSED IN HEART, SIGNAL = 1.6; SWISSPROT HIT: P98164, EVALUE 5.00e-21
YLFFTDWFRPAKIMRAWSDGSHLLPVINTTLGWPNGLAIDW

SEQ ID NO: 38681 - protein, 50 aa, Homo sapiens
  MAP TO AC004870.2; EXPRESSED IN BONE MARROW, SIGNAL = 8.8; EXPRESSED IN ADULT LIVER, SIGNAL = 8.5; EXPRESSED IN PLACENTA, SIGNAL = 9.7; EXPRESSED IN LUNG, SIGNAL = 9.6; EXPRESSED IN HEART, SIGNAL = 8.9; EXPRESSED IN BRAIN, SIGNAL =  11; EXPRESSED IN HELA, SIGNAL = 9.1; EXPRESSED IN FETAL LIVER, SIGNAL = 8.6
ISKAMRRNIIIQEWGVERERERQREKEREKKKKRRRRRRRRGGGGRGGEE

SEQ ID NO: 38682 - protein, 25 aa, Homo sapiens
  MAP TO AC000005.1; EXPRESSED IN PLACENTA, SIGNAL = 1.5; EXPRESSED IN LUNG, SIGNAL = 1.6; EXPRESSED IN FETAL LIVER, SIGNAL = 1.3; EXPRESSED IN BRAIN, SIGNAL = 1.4; EXPRESSED IN BONE MARROW, SIGNAL = 1.5; EXPRESSED IN ADULT LIVER, SIGNAL = 1.4; EXPRESSED IN HEART, SIGNAL = 1.4; SWISSPROT HIT: Q13112, EVALUE 2.00e-08
KVNDNKEPEQIAFQDEDEAQLNKEN

SEQ ID NO: 38683 - protein, 63 aa, Homo sapiens
  MAP TO AC006094.1; EXPRESSED IN PLACENTA, SIGNAL =   9; EXPRESSED IN LUNG, SIGNAL = 9.5; EXPRESSED IN FETAL LIVER, SIGNAL = 8.3; EXPRESSED IN BRAIN, SIGNAL = 8.8; EXPRESSED IN BONE MARROW, SIGNAL = 8.4; EXPRESSED IN ADULT LIVER, SIGNAL = 8.5; EXPRESSED IN HELA, SIGNAL = 8.9; EXPRESSED IN HEART, SIGNAL = 8.8; EST_HUMAN HIT: AA906324.1, EVALUE 2.70e-02
IIGFDLKRKQAGRQVMPAMEGGVEMEGGVEMEGGVEMEGGVEMEGGVEMEGGVEMEGGVELLS

SEQ ID NO: 38684 - protein, 45 aa, Homo sapiens
  MAP TO AC005529.7; EXPRESSED IN PLACENTA, SIGNAL = 8.4; EXPRESSED IN LUNG, SIGNAL =  10; EXPRESSED IN HEART, SIGNAL =   8; EXPRESSED IN FETAL LIVER, SIGNAL = 8.5; EXPRESSED IN BONE MARROW, SIGNAL = 9.1; EXPRESSED IN ADULT LIVER, SIGNAL = 8.1; EXPRESSED IN HELA, SIGNAL = 8.1; EXPRESSED IN BRAIN, SIGNAL = 8.7; SWISSPROT HIT: P46662, EVALUE 2.00e-21
NKKGTELLLGVDALGLHIYDPENRLTPKISFPWNEIRNISYSDKE

SEQ ID NO: 38685 - protein, 24 aa, Homo sapiens
  MAP TO AC005529.7; EXPRESSED IN PLACENTA, SIGNAL = 8.4; EXPRESSED IN LUNG, SIGNAL =  10; EXPRESSED IN HEART, SIGNAL =   8; EXPRESSED IN FETAL LIVER, SIGNAL = 8.5; EXPRESSED IN BONE MARROW, SIGNAL = 9.1; EXPRESSED IN ADULT LIVER, SIGNAL = 8.1; EXPRESSED IN HELA, SIGNAL = 8.1; EXPRESSED IN BRAIN, SIGNAL = 8.7; EST_HUMAN HIT: BE740613.1, EVALUE 1.00e-08
IKRAQSCCLEWMPWGFTFMTLRTD

SEQ ID NO: 38686 - protein, 17 aa, Homo sapiens
  MAP TO AC005500.1; EXPRESSED IN PLACENTA, SIGNAL = 2.9; EXPRESSED IN HEART, SIGNAL = 3.3; EXPRESSED IN FETAL LIVER, SIGNAL = 5.1; EXPRESSED IN BONE MARROW, SIGNAL = 3.2; EXPRESSED IN ADULT LIVER, SIGNAL = 2.7; EXPRESSED IN HELA, SIGNAL = 3.3; EXPRESSED IN LUNG, SIGNAL = 3.2; EXPRESSED IN BRAIN, SIGNAL = 2.6
HKIPYNCGLTVGKTGDR

SEQ ID NO: 38687 - protein, 38 aa, Homo sapiens
  MAP TO AC005500.1; EXPRESSED IN PLACENTA, SIGNAL = 2.9; EXPRESSED IN HEART, SIGNAL = 3.3; EXPRESSED IN FETAL LIVER, SIGNAL = 5.1; EXPRESSED IN BONE MARROW, SIGNAL = 3.2; EXPRESSED IN ADULT LIVER, SIGNAL = 2.7; EXPRESSED IN HELA, SIGNAL = 3.3; EXPRESSED IN LUNG, SIGNAL = 3.2; EXPRESSED IN BRAIN, SIGNAL = 2.6; EST_HUMAN HIT: BF529931.1, EVALUE 2.00e-09
MRWASMCLPSTTSTTSKRIPLSRRASSPRSRAWECCAL

SEQ ID NO: 38688 - protein, 52 aa, Homo sapiens
  MAP TO AC004860.1; EXPRESSED IN PLACENTA, SIGNAL = 1.9; EXPRESSED IN HELA, SIGNAL = 1.7; EXPRESSED IN HEART, SIGNAL = 1.7; EXPRESSED IN FETAL LIVER, SIGNAL = 1.7; EXPRESSED IN LUNG, SIGNAL = 1.9; EXPRESSED IN BRAIN, SIGNAL = 1.9; EXPRESSED IN BONE MARROW, SIGNAL = 1.7; EXPRESSED IN ADULT LIVER, SIGNAL = 1.7; SWISSPROT HIT: P12433, EVALUE 3.60e+00
TITELEYNMGHLKRRTKIDAWSSTKLPVHLFPGNLGTPRNQQSNELSLSEHM

SEQ ID NO: 38689 - protein, 81 aa, Homo sapiens
  MAP TO AC004812.1; EXPRESSED IN LUNG, SIGNAL = 2.9; EXPRESSED IN FETAL LIVER, SIGNAL = 2.7; EXPRESSED IN BRAIN, SIGNAL = 2.9; EXPRESSED IN BONE MARROW, SIGNAL = 2.2; EXPRESSED IN HELA, SIGNAL = 2.7; EXPRESSED IN PLACENTA, SIGNAL = 2.6; EXPRESSED IN HEART, SIGNAL = 2.3; EXPRESSED IN ADULT LIVER, SIGNAL = 2.3; SWISSPROT HIT: Q10105, EVALUE 6.60e-02
LSVEDDTGHRIIIEYLLEATRSPEVGMRQAAAIILNIYCSRSKADYTSHLRSLVSGLIRLFNDSSPVVLEESWDALNAITK

SEQ ID NO: 38690 - protein, 59 aa, Homo sapiens
  MAP TO AC004616.1; EXPRESSED IN PLACENTA, SIGNAL = 2.9; EXPRESSED IN HEART, SIGNAL = 3.1; EXPRESSED IN FETAL LIVER, SIGNAL = 2.8; EXPRESSED IN BRAIN, SIGNAL = 2.9; EXPRESSED IN LUNG, SIGNAL = 3.1; EXPRESSED IN HELA, SIGNAL =   3; EXPRESSED IN BONE MARROW, SIGNAL = 2.8; EXPRESSED IN ADULT LIVER, SIGNAL = 2.5; SWISSPROT HIT: P53076, EVALUE 3.50e+00
ISIHEVLVVYQVKPSQSLFLPQSGFTRIPGNPGWLNSLNSQKNFLSFPALRIRREKEPS

SEQ ID NO: 38691 - protein, 34 aa, Homo sapiens
  MAP TO AC004616.1; EXPRESSED IN PLACENTA, SIGNAL = 2.9; EXPRESSED IN HEART, SIGNAL = 3.1; EXPRESSED IN FETAL LIVER, SIGNAL = 2.8; EXPRESSED IN BRAIN, SIGNAL = 2.9; EXPRESSED IN LUNG, SIGNAL = 3.1; EXPRESSED IN HELA, SIGNAL =   3; EXPRESSED IN BONE MARROW, SIGNAL = 2.8; EXPRESSED IN ADULT LIVER, SIGNAL = 2.5
YLFMRYWLSTKSNLLNLCSYPSQASPEFQGIQAG

SEQ ID NO: 38692 - protein, 66 aa, Homo sapiens
  MAP TO AC004485.1; EXPRESSED IN HEART, SIGNAL = 2.7; EXPRESSED IN PLACENTA, SIGNAL = 2.8; EXPRESSED IN FETAL LIVER, SIGNAL = 2.9; EXPRESSED IN BRAIN, SIGNAL = 2.8; EXPRESSED IN BONE MARROW, SIGNAL = 2.7; EXPRESSED IN ADULT LIVER, SIGNAL =   4; EXPRESSED IN LUNG, SIGNAL = 3.1; EXPRESSED IN HELA, SIGNAL = 2.8; SWISSPROT HIT: Q58772, EVALUE 5.90e+00
STDSPPFESQQAQQYLNVILTKLLEINNLTLKQRREMAQQLGEDAGLSCQQLVLFVFWPGDVAWTG

SEQ ID NO: 38693 - protein, 28 aa, Homo sapiens
  MAP TO AC004945.1; EXPRESSED IN LUNG, SIGNAL =  14; EXPRESSED IN FETAL LIVER, SIGNAL =  11; EXPRESSED IN PLACENTA, SIGNAL =  12; EXPRESSED IN HELA, SIGNAL =  12; EXPRESSED IN BRAIN, SIGNAL =  13; EXPRESSED IN BONE MARROW, SIGNAL =  12; EXPRESSED IN ADULT LIVER, SIGNAL =  11; EXPRESSED IN HEART, SIGNAL =   9
VAEVEKVEEGEGEAGGAGTLSVTLLKYM

SEQ ID NO: 38694 - protein, 65 aa, Homo sapiens
  MAP TO AC005663.1; EXPRESSED IN LUNG, SIGNAL = 2.8; EXPRESSED IN BRAIN, SIGNAL = 1.7; EXPRESSED IN ADULT LIVER, SIGNAL = 2.5; EXPRESSED IN PLACENTA, SIGNAL = 2.6; EXPRESSED IN HELA, SIGNAL =   3; EXPRESSED IN HEART, SIGNAL = 2.8; EXPRESSED IN FETAL LIVER, SIGNAL =   3; EXPRESSED IN BONE MARROW, SIGNAL = 2.3; SWISSPROT HIT: P30999, EVALUE 1.00e-04
SYAMAELVRNVRNAQAPPRPGACLEEDTVVAVLNTIHEIVSDSLDNARSLLQARGVPALVALVAS

SEQ ID NO: 38695 - protein, 66 aa, Homo sapiens
  MAP TO AC005663.1; EXPRESSED IN LUNG, SIGNAL = 2.8; EXPRESSED IN BRAIN, SIGNAL = 1.7; EXPRESSED IN ADULT LIVER, SIGNAL = 2.5; EXPRESSED IN PLACENTA, SIGNAL = 2.6; EXPRESSED IN HELA, SIGNAL =   3; EXPRESSED IN HEART, SIGNAL = 2.8; EXPRESSED IN FETAL LIVER, SIGNAL =   3; EXPRESSED IN BONE MARROW, SIGNAL = 2.3; SWISSPROT HIT: P49641, EVALUE 1.50e+00
GATPWLSLCGMCAMHRLRRDRGPAWRKTPWWRCSTPSTKSCPTAWITRARSCRHAGCQRWWLSWPP

SEQ ID NO: 38696 - protein, 35 aa, Homo sapiens
  MAP TO AC006548.19; EXPRESSED IN PLACENTA, SIGNAL = 1.2; EXPRESSED IN BRAIN, SIGNAL = 2.2; EXPRESSED IN BONE MARROW, SIGNAL = 6.5; EXPRESSED IN HEART, SIGNAL = 1.5; EST_HUMAN HIT: BE743467.1, EVALUE 4.40e+00
NPASAFPVSGGTSSSAPPRSTGNIHYAALDFQPSK

SEQ ID NO: 38697 - protein, 39 aa, Homo sapiens
  MAP TO AL022319.2; EXPRESSED IN HEART, SIGNAL = 1.4; SWISSPROT HIT: Q9Z0Y8, EVALUE 1.00e-17
ILGMHIFGCKFSLRTDTGDTVPDRKNFDSLLWAIVTVFQ

SEQ ID NO: 38698 - protein, 44 aa, Homo sapiens
  MAP TO AL022319.2; EXPRESSED IN HEART, SIGNAL = 1.5; SWISSPROT HIT: P08125, EVALUE 9.50e-01
LEHYNQPTVSPGLPPSPRLQGEGGVSAGPHPRDRVGKGLADSRM

SEQ ID NO: 38699 - protein, 67 aa, Homo sapiens
  MAP TO AC007556.2; EXPRESSED IN HEART, SIGNAL = 1.4; SWISSPROT HIT: P98164, EVALUE 3.00e-31
PNGAECQCPHEGNWYLANNRKHCIVDNGERCGASSFTCSNGRCISEEWKCDNDNDCGDGSDEMESVC

SEQ ID NO: 38700 - protein, 76 aa, Homo sapiens
  MAP TO AC007556.2; EXPRESSED IN HEART, SIGNAL = 1.4; SWISSPROT HIT: O18796, EVALUE 4.90e+00
QMVPSASVHMRATGIWPTTGSTALWTMVNDVVHLPSPAPMGAASRKSGSVIMTTTVGMAVMRWKVSVVSWTLGAFG

SEQ ID NO: 38701 - protein, 46 aa, Homo sapiens
  MAP TO AP000356.1; EXPRESSED IN HEART, SIGNAL = 1.8; EXPRESSED IN BONE MARROW, SIGNAL = 2.6; EXPRESSED IN LUNG, SIGNAL = 1.9; EXPRESSED IN FETAL LIVER, SIGNAL = 2.1; EXPRESSED IN ADULT LIVER, SIGNAL =   2; EXPRESSED IN PLACENTA, SIGNAL = 2.3; EXPRESSED IN HELA, SIGNAL =   2; EXPRESSED IN BRAIN, SIGNAL = 2.1; SWISSPROT HIT: Q9UKP4, EVALUE 6.20e+00
ACWPWSWCWSLSASVSGCPQPPRNLTTMCTPGLPWPRMPSSARRLG

SEQ ID NO: 38702 - protein, 76 aa, Homo sapiens
  MAP TO AL022238.1; EXPRESSED IN BRAIN, SIGNAL = 1.8; EXPRESSED IN HELA, SIGNAL = 1.7; EXPRESSED IN LUNG, SIGNAL = 1.7; EXPRESSED IN HEART, SIGNAL = 1.3; EXPRESSED IN BONE MARROW, SIGNAL = 1.6; EXPRESSED IN ADULT LIVER, SIGNAL = 1.5; EXPRESSED IN FETAL LIVER, SIGNAL = 2.1; SWISSPROT HIT: P54629, EVALUE 1.00e+00
MCPSITLGEFSVHMENPPITWASQPFLQPTPVTHTHAHPKLLPTRVTNFSILDHDLLSFQLDPTPLAMLTSSTIPA

SEQ ID NO: 38703 - protein, 25 aa, Homo sapiens
  MAP TO AP000347.1; EXPRESSED IN LUNG, SIGNAL = 1.7; EXPRESSED IN BONE MARROW, SIGNAL = 4.2; EXPRESSED IN FETAL LIVER, SIGNAL = 1.4; EXPRESSED IN PLACENTA, SIGNAL = 1.3; EXPRESSED IN BRAIN, SIGNAL = 2.4; EXPRESSED IN HELA, SIGNAL = 1.5; EXPRESSED IN HEART, SIGNAL = 1.6; EST_HUMAN HIT: AV736449.1, EVALUE 4.00e-06
AGSFKVATQERNPQRVQMRLRRQKK

SEQ ID NO: 38704 - protein, 17 aa, Homo sapiens
  MAP TO AP000347.1; EXPRESSED IN LUNG, SIGNAL = 1.7; EXPRESSED IN BONE MARROW, SIGNAL = 4.2; EXPRESSED IN FETAL LIVER, SIGNAL = 1.4; EXPRESSED IN PLACENTA, SIGNAL = 1.3; EXPRESSED IN BRAIN, SIGNAL = 2.4; EXPRESSED IN HELA, SIGNAL = 1.5; EXPRESSED IN HEART, SIGNAL = 1.6; EST_HUMAN HIT: AV736449.1, EVALUE 1.00e-02
RGALRWPPRRGTPRESR

SEQ ID NO: 38705 - protein, 97 aa, Homo sapiens
  MAP TO Z98884.11; EXPRESSED IN HELA, SIGNAL = 1.4; EXPRESSED IN BONE MARROW, SIGNAL = 1.4; EXPRESSED IN LUNG, SIGNAL = 1.5; EXPRESSED IN HEART, SIGNAL = 2.4; SWISSPROT HIT: O70361, EVALUE 4.00e-08
DSTSKQTRSAGCRKGKHKRKKLPEPPDSSSSNTGSGPRRGAHQNAQPCCPSAASSPHTSSPTFPPAAMVPSQAPYLVPAFPLPAATSPGREYAAPGT

SEQ ID NO: 38706 - protein, 42 aa, Homo sapiens
  MAP TO AP000350.1; EXPRESSED IN BONE MARROW, SIGNAL = 1.5; EXPRESSED IN HEART, SIGNAL = 1.4; EXPRESSED IN PLACENTA, SIGNAL = 1.5; EXPRESSED IN BRAIN, SIGNAL = 1.4; SWISSPROT HIT: P46408, EVALUE 5.00e-08
VSMNIQPMYLGESAPKELRGAVAMSSAIFTALGIVMGQVVGL

SEQ ID NO: 38707 - protein, 24 aa, Homo sapiens
  MAP TO AC007567.1; EXPRESSED IN HELA, SIGNAL = 3.7; EXPRESSED IN PLACENTA, SIGNAL = 6.6; EXPRESSED IN BRAIN, SIGNAL = 1.9; EXPRESSED IN BONE MARROW, SIGNAL = 1.5; EXPRESSED IN LUNG, SIGNAL = 3.5; EXPRESSED IN HEART, SIGNAL =   3; EXPRESSED IN ADULT LIVER, SIGNAL = 6.6; EXPRESSED IN FETAL LIVER, SIGNAL =  11
KQPSKVTPVWLRTSKIKIKNPNIL

SEQ ID NO: 38708 - protein, 29 aa, Homo sapiens
  MAP TO AC007841.1; EXPRESSED IN FETAL LIVER, SIGNAL = 1.2; EXPRESSED IN HELA, SIGNAL = 1.2; EXPRESSED IN PLACENTA, SIGNAL = 1.8; EXPRESSED IN BRAIN, SIGNAL = 1.5; EXPRESSED IN HEART, SIGNAL = 1.3; EXPRESSED IN BONE MARROW, SIGNAL = 1.6; SWISSPROT HIT: Q05860, EVALUE 6.60e+00
PFFQSQPRRDLHRESKPSPSPQLAPWCPF

SEQ ID NO: 38709 - protein, 50 aa, Homo sapiens
  MAP TO AC005006.2; EXPRESSED IN FETAL LIVER, SIGNAL = 3.5; EXPRESSED IN ADULT LIVER, SIGNAL = 5.7; EXPRESSED IN HELA, SIGNAL = 4.2; EXPRESSED IN PLACENTA, SIGNAL = 6.9; EXPRESSED IN BRAIN, SIGNAL = 4.6; EXPRESSED IN LUNG, SIGNAL = 4.3; EXPRESSED IN BONE MARROW, SIGNAL = 8.6; EXPRESSED IN HEART, SIGNAL = 3.4; SWISSPROT HIT: P50697, EVALUE 6.20e+00
PHDFPHAWGRTGNSMSQGEGCFAGQSAGWSLPECSHDFPAAARSEPQDLH

SEQ ID NO: 38710 - protein, 53 aa, Homo sapiens
  MAP TO AC006548.19; EXPRESSED IN FETAL LIVER, SIGNAL = 3.5; EXPRESSED IN ADULT LIVER, SIGNAL = 2.4; EXPRESSED IN PLACENTA, SIGNAL = 4.8; EXPRESSED IN LUNG, SIGNAL = 1.4; EXPRESSED IN BONE MARROW, SIGNAL = 1.4; EXPRESSED IN HEART, SIGNAL = 1.4; SWISSPROT HIT: P50343, EVALUE 9.20e-01
SPAATALVHWPNPVASRPQCEAQRSSSLAVWPWSVSLSDSTCKPPWAWISSSV

SEQ ID NO: 38711 - protein, 79 aa, Homo sapiens
  MAP TO AC007556.2; EXPRESSED IN PLACENTA, SIGNAL = 3.9; EXPRESSED IN HEART, SIGNAL = 2.5; EXPRESSED IN LUNG, SIGNAL = 1.7; EXPRESSED IN FETAL LIVER, SIGNAL = 4.3; EXPRESSED IN ADULT LIVER, SIGNAL = 2.4; EXPRESSED IN HELA, SIGNAL = 1.9; SWISSPROT HIT: P98164, EVALUE 6.00e-50
NTCSSSAFTCGHGECIPAHWRCDKRNDCVDGSDEHNCPTHAPASCLDTQYTCDNHQCISKNWVCDTDNDCGDGSDEKNC

SEQ ID NO: 38712 - protein, 46 aa, Homo sapiens
  MAP TO AL022319.2; EXPRESSED IN ADULT LIVER, SIGNAL =  12; EXPRESSED IN FETAL LIVER, SIGNAL =  17; EXPRESSED IN HELA, SIGNAL = 3.9; EXPRESSED IN PLACENTA, SIGNAL = 3.8; EXPRESSED IN BRAIN, SIGNAL = 5.7; EXPRESSED IN LUNG, SIGNAL = 4.9; EXPRESSED IN HEART, SIGNAL = 3.3; EXPRESSED IN BONE MARROW, SIGNAL = 3.5; EST_HUMAN HIT: T85631.1, EVALUE 5.20e+00
PPSWLEIRAGQPRRQPRPTTACASPDFWQMRDHPSGPQLSPSPSPA

SEQ ID NO: 38713 - protein, 21 aa, Homo sapiens
  MAP TO AC007564.9; EXPRESSED IN LUNG, SIGNAL = 1.8; EXPRESSED IN HEART, SIGNAL = 2.3; EXPRESSED IN FETAL LIVER, SIGNAL = 1.8; EXPRESSED IN BRAIN, SIGNAL = 1.8; EXPRESSED IN HELA, SIGNAL = 2.3
GGRKEEKEEGRGGGGRRGREE

SEQ ID NO: 38714 - protein, 41 aa, Homo sapiens
  MAP TO AL022319.2; EXPRESSED IN PLACENTA, SIGNAL = 1.2; EXPRESSED IN HEART, SIGNAL = 1.4
VQLAETEAFSLNSDRSSSILLGDDLSLEDPTACPPGRKDSK

SEQ ID NO: 38715 - protein, 57 aa, Homo sapiens
  MAP TO AC004832.3; EXPRESSED IN HEART, SIGNAL = 1.3; SWISSPROT HIT: P30189, EVALUE 4.60e+00
MAWAKAWRWESEKHVEGVDYSKQDRLGPSLHRAHSLPLVSIPSVLGALYHYQIIQKQ

SEQ ID NO: 38716 - protein, 42 aa, Homo sapiens
  MAP TO AC007841.1; EXPRESSED IN PLACENTA, SIGNAL = 1.2; EXPRESSED IN HELA, SIGNAL = 1.6; EXPRESSED IN LUNG, SIGNAL = 1.5; EXPRESSED IN HEART, SIGNAL = 4.9; EXPRESSED IN BONE MARROW, SIGNAL = 1.4; EXPRESSED IN FETAL LIVER, SIGNAL = 1.6; EXPRESSED IN BRAIN, SIGNAL = 1.9
VSSSMLSGPHPKALPTASKDWDLPVGIFPQSHFETLTQRLKL

SEQ ID NO: 38717 - protein, 36 aa, Homo sapiens
  MAP TO AC007841.1; EXPRESSED IN PLACENTA, SIGNAL = 1.2; EXPRESSED IN HELA, SIGNAL = 1.6; EXPRESSED IN LUNG, SIGNAL = 1.5; EXPRESSED IN HEART, SIGNAL = 4.9; EXPRESSED IN BONE MARROW, SIGNAL = 1.4; EXPRESSED IN FETAL LIVER, SIGNAL = 1.6; EXPRESSED IN BRAIN, SIGNAL = 1.9; SWISSPROT HIT: Q06364, EVALUE 3.30e-01
LSVAPCCQAHIPKPYQQPARTGTCLWGFSPSPTLRP

SEQ ID NO: 38718 - protein, 29 aa, Homo sapiens
  MAP TO AC007539.8; EXPRESSED IN HELA, SIGNAL = 1.8; EXPRESSED IN LUNG, SIGNAL = 1.4; EXPRESSED IN HEART, SIGNAL = 1.4; EXPRESSED IN BONE MARROW, SIGNAL = 1.6; EXPRESSED IN BRAIN, SIGNAL = 1.5
HYGADKEPCPHHQGGYGLVEKKISRTDRK

SEQ ID NO: 38719 - protein, 30 aa, Homo sapiens
  MAP TO Z83844.5; EXPRESSED IN HELA, SIGNAL = 1.4; EXPRESSED IN BRAIN, SIGNAL = 1.4; EXPRESSED IN PLACENTA, SIGNAL = 2.2; EXPRESSED IN LUNG, SIGNAL = 2.4; EXPRESSED IN BONE MARROW, SIGNAL = 1.5; EXPRESSED IN HEART, SIGNAL = 1.9; EXPRESSED IN ADULT LIVER, SIGNAL = 1.5; SWISSPROT HIT: P97434, EVALUE 1.00e-07
ADELDGEIDLRSCTDVTEYAVQRNYGFQIH

SEQ ID NO: 38720 - protein, 43 aa, Homo sapiens
  MAP TO AL035681.13; EXPRESSED IN LUNG, SIGNAL = 5.5; EXPRESSED IN BONE MARROW, SIGNAL = 1.9; EXPRESSED IN FETAL LIVER, SIGNAL =   2; EXPRESSED IN PLACENTA, SIGNAL =   2; EXPRESSED IN BRAIN, SIGNAL = 3.1; EXPRESSED IN HELA, SIGNAL = 5.9; EXPRESSED IN HEART, SIGNAL = 2.1; SWISSPROT HIT: P05979, EVALUE 1.10e-01
PDLEVDSSELPLLNPAPLLHEPPGADAGRKHCCHFPVAHVTAN

SEQ ID NO: 38721 - protein, 31 aa, Homo sapiens
  MAP TO AL022327.17; EXPRESSED IN HELA, SIGNAL = 1.9; EXPRESSED IN BRAIN, SIGNAL = 1.9; EXPRESSED IN HEART, SIGNAL = 1.5; EXPRESSED IN LUNG, SIGNAL = 1.4
EGAASARGCGERVGRTEMGSEQGSLGSREKT

SEQ ID NO: 38722 - protein, 75 aa, Homo sapiens
  MAP TO Z98884.11; EXPRESSED IN HEART, SIGNAL = 1.4; SWISSPROT HIT: O70361, EVALUE 1.00e-06
IPKSEMPTNGRSIDTGGGAPQILSTAMLSLGSGISQCGYSSTIVHVPPPETGTTLASYFENILNFNYIVMRKQKS

SEQ ID NO: 38723 - protein, 50 aa, Homo sapiens
  MAP TO AL022319.2; EXPRESSED IN PLACENTA, SIGNAL = 2.4; EXPRESSED IN HEART, SIGNAL = 1.8; EXPRESSED IN LUNG, SIGNAL = 2.2; EXPRESSED IN FETAL LIVER, SIGNAL = 1.5; EXPRESSED IN ADULT LIVER, SIGNAL =   2; EXPRESSED IN BRAIN, SIGNAL = 2.3; EXPRESSED IN HELA, SIGNAL = 2.3; EXPRESSED IN BONE MARROW, SIGNAL = 1.7; SWISSPROT HIT: O60241, EVALUE 2.70e+00
TVVQALPQVRATLSGSPPRGHWCQAGPWGMKALISLLLTSARARADAVSG

SEQ ID NO: 38724 - protein, 24 aa, Homo sapiens
  MAP TO Z83844.5; EXPRESSED IN HEART, SIGNAL = 1.3; EXPRESSED IN FETAL LIVER, SIGNAL =   2; EXPRESSED IN ADULT LIVER, SIGNAL = 2.4; EXPRESSED IN HELA, SIGNAL = 1.3
AVPQSRLRGPVLAQLGCPCSPACT

SEQ ID NO: 38725 - protein, 31 aa, Homo sapiens
  MAP TO AC008022.1; EXPRESSED IN BRAIN, SIGNAL = 4.2; EXPRESSED IN PLACENTA, SIGNAL = 2.7; EXPRESSED IN HELA, SIGNAL = 2.7; EXPRESSED IN BONE MARROW, SIGNAL = 3.2; EXPRESSED IN HEART, SIGNAL = 1.9; EXPRESSED IN LUNG, SIGNAL = 2.3; EXPRESSED IN ADULT LIVER, SIGNAL = 2.4; EXPRESSED IN FETAL LIVER, SIGNAL = 2.2
LFMDLQEIFSRTHLRVPANSYVETLNSMGWY

SEQ ID NO: 38726 - protein, 39 aa, Homo sapiens
  MAP TO AP000352.2; EXPRESSED IN LUNG, SIGNAL = 7.1; EXPRESSED IN ADULT LIVER, SIGNAL = 8.6; EXPRESSED IN FETAL LIVER, SIGNAL =  15; EXPRESSED IN PLACENTA, SIGNAL = 6.9; EXPRESSED IN HEART, SIGNAL = 4.2; EXPRESSED IN BONE MARROW, SIGNAL =  20; EXPRESSED IN BRAIN, SIGNAL =  17; EXPRESSED IN HELA, SIGNAL = 7.8; SWISSPROT HIT: Q9Y6J0, EVALUE 3.00e-17
FICKALEKDCRYSKGLVLKEKIFEEQPCLRKDSLRMFLK

SEQ ID NO: 38727 - protein, 40 aa, Homo sapiens
  MAP TO AP000352.2; EXPRESSED IN LUNG, SIGNAL = 7.1; EXPRESSED IN ADULT LIVER, SIGNAL = 8.6; EXPRESSED IN FETAL LIVER, SIGNAL =  15; EXPRESSED IN PLACENTA, SIGNAL = 6.9; EXPRESSED IN HEART, SIGNAL = 4.2; EXPRESSED IN BONE MARROW, SIGNAL =  20; EXPRESSED IN BRAIN, SIGNAL =  17; EXPRESSED IN HELA, SIGNAL = 7.8
TSSAKLWRRIAGTAKGWSSRRRFLRSSLVSGRTLSECSSN

SEQ ID NO: 38728 - protein, 31 aa, Homo sapiens
  MAP TO AC006992.2; EXPRESSED IN PLACENTA, SIGNAL = 2.3; EXPRESSED IN BRAIN, SIGNAL = 3.7; EXPRESSED IN BONE MARROW, SIGNAL = 1.9; EXPRESSED IN LUNG, SIGNAL = 1.7; EXPRESSED IN HEART, SIGNAL = 1.9; EXPRESSED IN ADULT LIVER, SIGNAL = 2.8; EXPRESSED IN FETAL LIVER, SIGNAL = 2.6; EXPRESSED IN HELA, SIGNAL = 1.4
QKMYGNAWMSRQKFAAGAGCSWRTTMHLEEL

SEQ ID NO: 38729 - protein, 39 aa, Homo sapiens
  MAP TO AL031588.1; EXPRESSED IN HEART, SIGNAL =   2; EXPRESSED IN BONE MARROW, SIGNAL =   2; EXPRESSED IN LUNG, SIGNAL = 2.4; EXPRESSED IN FETAL LIVER, SIGNAL = 1.8; EXPRESSED IN ADULT LIVER, SIGNAL = 1.5; EXPRESSED IN PLACENTA, SIGNAL = 1.7; EXPRESSED IN HELA, SIGNAL = 1.7; EXPRESSED IN BRAIN, SIGNAL = 1.3
STFRAPEAGGGTPSVDPATVPSAKALIPTVIRPTASANA

SEQ ID NO: 38730 - protein, 72 aa, Homo sapiens
  MAP TO AL031588.1; EXPRESSED IN LUNG, SIGNAL = 3.8; EXPRESSED IN FETAL LIVER, SIGNAL =   4; EXPRESSED IN ADULT LIVER, SIGNAL = 3.5; EXPRESSED IN PLACENTA, SIGNAL = 1.6; EXPRESSED IN BRAIN, SIGNAL = 3.6; EXPRESSED IN HELA, SIGNAL = 2.4; EXPRESSED IN HEART, SIGNAL = 3.2; EXPRESSED IN BONE MARROW, SIGNAL = 4.1; SWISSPROT HIT: P21561, EVALUE 9.40e-01
TCLEAPTTRYEGLKPSKRKRAKDTGQHRRHLLWSPGAGIRGQRMEQLGPQGEVRRLPWLRLQSTCLSTPGSQ

SEQ ID NO: 38731 - protein, 26 aa, Homo sapiens
  MAP TO AL031588.1; EXPRESSED IN FETAL LIVER, SIGNAL = 1.4; EXPRESSED IN BRAIN, SIGNAL = 1.8; EXPRESSED IN HELA, SIGNAL = 1.7; EXPRESSED IN BONE MARROW, SIGNAL = 1.9; EXPRESSED IN HEART, SIGNAL = 1.5
LCGAGPDERLTGVLWTVTLANTTSVS

SEQ ID NO: 38732 - protein, 32 aa, Homo sapiens
  MAP TO AC007106.6; EXPRESSED IN PLACENTA, SIGNAL = 5.5; EXPRESSED IN HELA, SIGNAL = 3.8; EXPRESSED IN BRAIN, SIGNAL = 2.8; EXPRESSED IN BONE MARROW, SIGNAL = 2.1; EXPRESSED IN HEART, SIGNAL = 4.7; EXPRESSED IN LUNG, SIGNAL = 4.5; EXPRESSED IN ADULT LIVER, SIGNAL = 4.2; EXPRESSED IN FETAL LIVER, SIGNAL =  14
FKLCLYYLTLCWPIRFLLRILNNLIGSFMEVS

SEQ ID NO: 38733 - protein, 39 aa, Homo sapiens
  MAP TO AL021707.2; EXPRESSED IN LUNG, SIGNAL =  10; EXPRESSED IN BONE MARROW, SIGNAL =  10; EXPRESSED IN FETAL LIVER, SIGNAL =  18; EXPRESSED IN BRAIN, SIGNAL =  12; EXPRESSED IN HELA, SIGNAL =   8; EXPRESSED IN HEART, SIGNAL = 8.2; EXPRESSED IN ADULT LIVER, SIGNAL =  10; EXPRESSED IN PLACENTA, SIGNAL =  11; SWISSPROT HIT: O08582, EVALUE 9.00e-16
MAEQIEADVILLRERQEAGGRVRDYLVRKRVGDNDFLEV

SEQ ID NO: 38734 - protein, 42 aa, Homo sapiens
  MAP TO AC007556.2; EXPRESSED IN PLACENTA, SIGNAL = 3.1; EXPRESSED IN LUNG, SIGNAL =   3; EXPRESSED IN ADULT LIVER, SIGNAL = 2.8; EXPRESSED IN FETAL LIVER, SIGNAL =   2; EXPRESSED IN BRAIN, SIGNAL =   3; EXPRESSED IN HELA, SIGNAL = 3.3; EXPRESSED IN BONE MARROW, SIGNAL = 3.3; EXPRESSED IN HEART, SIGNAL = 2.3; SWISSPROT HIT: P98164, EVALUE 2.00e-21
THTCSSSEFQCASGRCIPQHWYCDQETDCFDASDEPASCGKR

SEQ ID NO: 38735 - protein, 31 aa, Homo sapiens
  MAP TO AL022319.2; EXPRESSED IN FETAL LIVER, SIGNAL = 3.5; EXPRESSED IN BRAIN, SIGNAL = 2.6; EXPRESSED IN PLACENTA, SIGNAL =   4; EXPRESSED IN HELA, SIGNAL = 2.8; EXPRESSED IN HEART, SIGNAL = 3.2; EXPRESSED IN LUNG, SIGNAL = 3.4; EXPRESSED IN BONE MARROW, SIGNAL =   4; EXPRESSED IN ADULT LIVER, SIGNAL = 3.2; SWISSPROT HIT: Q9Z0Y8, EVALUE 3.00e-05
VITLEGWVEIMYYVMDAHSFYNFIYFILLII

SEQ ID NO: 38736 - protein, 26 aa, Homo sapiens
  MAP TO AC006427.13; EXPRESSED IN LUNG, SIGNAL = 1.9; EXPRESSED IN BONE MARROW, SIGNAL = 2.2; EXPRESSED IN HEART, SIGNAL = 1.3; EXPRESSED IN FETAL LIVER, SIGNAL = 1.9; EXPRESSED IN ADULT LIVER, SIGNAL = 2.1; EXPRESSED IN PLACENTA, SIGNAL = 1.7; EXPRESSED IN HELA, SIGNAL = 1.7; EXPRESSED IN BRAIN, SIGNAL = 1.7
MLSETHQGKKHGAWGERRRERGSSFE

SEQ ID NO: 38737 - protein, 30 aa, Homo sapiens
  MAP TO AL022328.21; EXPRESSED IN FETAL LIVER, SIGNAL = 1.9; EXPRESSED IN ADULT LIVER, SIGNAL = 1.9; EXPRESSED IN HEART, SIGNAL = 1.9; EXPRESSED IN LUNG, SIGNAL = 1.7
SRSPRARTSPSCQPQIEGMPPTEAGDFSDP

SEQ ID NO: 38738 - protein, 39 aa, Homo sapiens
  MAP TO AC007556.2; EXPRESSED IN LUNG, SIGNAL = 3.2; EXPRESSED IN HEART, SIGNAL = 1.5; EXPRESSED IN ADULT LIVER, SIGNAL = 1.7; EXPRESSED IN FETAL LIVER, SIGNAL = 2.7; EXPRESSED IN HELA, SIGNAL = 2.6; EXPRESSED IN PLACENTA, SIGNAL = 2.2; EXPRESSED IN BRAIN, SIGNAL = 2.7; EXPRESSED IN BONE MARROW, SIGNAL = 3.1; SWISSPROT HIT: P98164, EVALUE 2.00e-05
AVAVLLTILLIVVIGALAIAGFFHYRRTGSLLPALPKLP

SEQ ID NO: 38739 - protein, 59 aa, Homo sapiens
  MAP TO AL022238.1; EXPRESSED IN BONE MARROW, SIGNAL = 5.8; EXPRESSED IN ADULT LIVER, SIGNAL = 5.8; EXPRESSED IN FETAL LIVER, SIGNAL =   8; EXPRESSED IN PLACENTA, SIGNAL = 7.4; EXPRESSED IN HELA, SIGNAL = 5.9; EXPRESSED IN BRAIN, SIGNAL = 4.7; EXPRESSED IN HEART, SIGNAL = 4.3; EXPRESSED IN LUNG, SIGNAL = 6.2; SWISSPROT HIT: P30566, EVALUE 1.00e-28
DCHEKIRVLSQQAASVVKQEGGDNDLIERIQVDAYFSPIHSQLDHLLDPSSFTGRASQQ

SEQ ID NO: 38740 - protein, 31 aa, Homo sapiens
  MAP TO Z83844.5; EXPRESSED IN HEART, SIGNAL = 1.3; EXPRESSED IN BONE MARROW, SIGNAL = 1.5
PIPTICCLFFPGALVSPFLEWVEQLLFLRLP

SEQ ID NO: 38741 - protein, 49 aa, Homo sapiens
  MAP TO AP000356.1; EXPRESSED IN HELA, SIGNAL = 1.5; EXPRESSED IN HEART, SIGNAL = 1.5; EXPRESSED IN BONE MARROW, SIGNAL = 1.6; EXPRESSED IN LUNG, SIGNAL = 1.8; EXPRESSED IN FETAL LIVER, SIGNAL = 2.1; EXPRESSED IN ADULT LIVER, SIGNAL =   2; EXPRESSED IN PLACENTA, SIGNAL = 1.4; SWISSPROT HIT: P19440, EVALUE 7.00e-22
CRDRKVLREGERLTLPQLADTYETLAIEGAQAFYNGSLTAQIVKDIQAA

SEQ ID NO: 38742 - protein, 48 aa, Homo sapiens
  MAP TO AL079300.11; EXPRESSED IN HEART, SIGNAL = 5.2; EXPRESSED IN BONE MARROW, SIGNAL = 1.5
HAVVAHTASSEAVSGVLCGRCGLSRPWKGAACFPEPPVCPPDGGTSRQ

SEQ ID NO: 38743 - protein, 55 aa, Homo sapiens
  MAP TO AC008009.4; EXPRESSED IN HEART, SIGNAL = 1.9; EXPRESSED IN FETAL LIVER, SIGNAL = 1.3; EXPRESSED IN PLACENTA, SIGNAL = 1.8; EXPRESSED IN HELA, SIGNAL = 2.4
LSDWSLAGEDDRDSRHQRDSRRRPGGRGRSVSGGRGRGGPRGGKSSISSGSLFYT

SEQ ID NO: 38744 - protein, 45 aa, Homo sapiens
  MAP TO Z98884.11; EXPRESSED IN FETAL LIVER, SIGNAL = 2.9; EXPRESSED IN PLACENTA, SIGNAL = 4.4; EXPRESSED IN HELA, SIGNAL = 1.6; EXPRESSED IN HEART, SIGNAL = 1.5; EXPRESSED IN LUNG, SIGNAL = 1.7; EXPRESSED IN ADULT LIVER, SIGNAL = 1.9; SWISSPROT HIT: O70361, EVALUE 6.00e-13
MVVQEMKKYFPSERRNKPSTLDALNYALRCVHSVQGKQAGEKFHP

SEQ ID NO: 38745 - protein, 53 aa, Homo sapiens
  MAP TO AP000123.1; EXPRESSED IN LUNG, SIGNAL = 2.8; EXPRESSED IN FETAL LIVER, SIGNAL =   7; EXPRESSED IN ADULT LIVER, SIGNAL = 2.4; EXPRESSED IN HELA, SIGNAL = 2.6; EXPRESSED IN PLACENTA, SIGNAL =   7; EXPRESSED IN BRAIN, SIGNAL =   4; EXPRESSED IN BONE MARROW, SIGNAL = 2.7; EXPRESSED IN HEART, SIGNAL = 1.5; SWISSPROT HIT: O26719, EVALUE 8.00e+00
SAQTYSLLGWFPARREHQRQVLPGSGCWVPPSHVPWVMGVVGCEWKCTWWNDP

SEQ ID NO: 38746 - protein, 89 aa, Homo sapiens
  MAP TO AP000053.1; EXPRESSED IN BONE MARROW, SIGNAL =  14; EXPRESSED IN HEART, SIGNAL = 5.8; EXPRESSED IN FETAL LIVER, SIGNAL =  13; EXPRESSED IN ADULT LIVER, SIGNAL = 8.2; EXPRESSED IN HELA, SIGNAL = 9.1; EXPRESSED IN BRAIN, SIGNAL =  16; EXPRESSED IN PLACENTA, SIGNAL = 7.2; EXPRESSED IN LUNG, SIGNAL =  10; SWISSPROT HIT: P24485, EVALUE 9.10e-01
NAQAAELSGCRIAEDSNATYGSWRPFQGRWQNGGPLYLLGQPSGCPAGRQSSSISGWVRGAAWAHYSIPILYGSRLPEYPKLGGFNNRY

SEQ ID NO: 38747 - protein, 53 aa, Homo sapiens
  MAP TO AC004624.6; EXPRESSED IN BRAIN, SIGNAL = 2.2; EXPRESSED IN HEART, SIGNAL = 1.9; EXPRESSED IN ADULT LIVER, SIGNAL = 3.4; EXPRESSED IN HELA, SIGNAL = 2.1; EXPRESSED IN PLACENTA, SIGNAL = 2.5; EXPRESSED IN BONE MARROW, SIGNAL = 3.2; EXPRESSED IN LUNG, SIGNAL =   2; EXPRESSED IN FETAL LIVER, SIGNAL = 2.2
VSRGWDHLAEGPPLAFCNGAMRLYSKPSCTCVILVTSRCCQAMGAAVSLLGQK

SEQ ID NO: 38748 - protein, 77 aa, Homo sapiens
  MAP TO AC007539.8; EXPRESSED IN HEART, SIGNAL = 1.3; EXPRESSED IN FETAL LIVER, SIGNAL = 1.7; SWISSPROT HIT: Q08520, EVALUE 6.10e+00
SGGYGHTNSDVQGPCSQASLYWSPHWGLLCVFSDLSLSSDYNDACDCIYSPPRYRRIIFPSQDSSSAHIAKNSCFPL

SEQ ID NO: 38749 - protein, 50 aa, Homo sapiens
  MAP TO Z95114.19; EXPRESSED IN HEART, SIGNAL = 2.5; SWISSPROT HIT: O15072, EVALUE 3.60e+00
SSSQVRDTRRHWKPSRHPPRHKCICQCFLCSMLTLSPVDADGLGMRRMQN

SEQ ID NO: 38750 - protein, 69 aa, Homo sapiens
  MAP TO AL022238.1; EXPRESSED IN LUNG, SIGNAL = 4.1; EXPRESSED IN HEART, SIGNAL = 3.1; EXPRESSED IN BONE MARROW, SIGNAL = 3.5; EXPRESSED IN FETAL LIVER, SIGNAL = 2.9; EXPRESSED IN ADULT LIVER, SIGNAL = 3.3; EXPRESSED IN BRAIN, SIGNAL = 4.9; EXPRESSED IN PLACENTA, SIGNAL = 2.8; EXPRESSED IN HELA, SIGNAL = 3.2; SWISSPROT HIT: P13897, EVALUE 7.30e+00
GDEPGSSLLANSPLMEDAPQRLRWQAHLEFTHNHDVGDLTWDKIAVSLPRSEKLRSLVLAGIPHGMRPQ

SEQ ID NO: 38751 - protein, 36 aa, Homo sapiens
  MAP TO AL022238.1; EXPRESSED IN LUNG, SIGNAL = 4.1; EXPRESSED IN HEART, SIGNAL = 3.1; EXPRESSED IN BONE MARROW, SIGNAL = 3.5; EXPRESSED IN FETAL LIVER, SIGNAL = 2.9; EXPRESSED IN ADULT LIVER, SIGNAL = 3.3; EXPRESSED IN BRAIN, SIGNAL = 4.9; EXPRESSED IN PLACENTA, SIGNAL = 2.8; EXPRESSED IN HELA, SIGNAL = 3.2
LWMRLSGALQKKRNSELSYREIVKNSSNDETIAAKQ

SEQ ID NO: 38752 - protein, 32 aa, Homo sapiens
  MAP TO AL022319.2; EXPRESSED IN BRAIN, SIGNAL = 3.3; EXPRESSED IN HELA, SIGNAL = 3.6; EXPRESSED IN HEART, SIGNAL = 5.3; EXPRESSED IN LUNG, SIGNAL = 3.6; EXPRESSED IN BONE MARROW, SIGNAL = 2.8
EVTVVEVMEVEVRVVVVKKVEVMEVEVLKSSI

SEQ ID NO: 38753 - protein, 50 aa, Homo sapiens
  MAP TO AC002472.3; EXPRESSED IN HELA, SIGNAL = 1.5; EXPRESSED IN BRAIN, SIGNAL = 1.5; EXPRESSED IN HEART, SIGNAL = 1.9; EXPRESSED IN LUNG, SIGNAL = 1.9; SWISSPROT HIT: O15547, EVALUE 1.00e-22
WALLAKKGYQERDLEPQISITTKLKGVSVTQIKELGNRLWDVADFVKPPQ

SEQ ID NO: 38754 - protein, 49 aa, Homo sapiens
  MAP TO AC002472.3; EXPRESSED IN HELA, SIGNAL = 1.5; EXPRESSED IN BRAIN, SIGNAL = 1.5; EXPRESSED IN HEART, SIGNAL = 1.9; EXPRESSED IN LUNG, SIGNAL = 1.9; SWISSPROT HIT: P16912, EVALUE 2.10e+00
GPGTPDFHHNQTQRGFRDSDQGAWKPAVGCGRLREATSGGGPDVADGGA

SEQ ID NO: 38755 - protein, 17 aa, Homo sapiens
  MAP TO AL022318.2; EXPRESSED IN HEART, SIGNAL =   2; EXPRESSED IN LUNG, SIGNAL = 2.5; EXPRESSED IN BONE MARROW, SIGNAL = 1.9; EXPRESSED IN ADULT LIVER, SIGNAL = 2.2; EXPRESSED IN FETAL LIVER, SIGNAL = 3.4; EXPRESSED IN BRAIN, SIGNAL = 2.7; EXPRESSED IN PLACENTA, SIGNAL = 1.9; EXPRESSED IN HELA, SIGNAL = 2.2
KIAHFIYSYQLAWPPGS

SEQ ID NO: 38756 - protein, 51 aa, Homo sapiens
  MAP TO AC005006.2; EXPRESSED IN FETAL LIVER, SIGNAL = 4.2; EXPRESSED IN ADULT LIVER, SIGNAL = 3.6; EXPRESSED IN HELA, SIGNAL =   4; EXPRESSED IN PLACENTA, SIGNAL = 4.2; EXPRESSED IN BRAIN, SIGNAL = 4.8; EXPRESSED IN BONE MARROW, SIGNAL = 3.7; EXPRESSED IN LUNG, SIGNAL = 5.1; EXPRESSED IN HEART, SIGNAL = 2.6; SWISSPROT HIT: P03386, EVALUE 8.00e+00
GMITRATPTLATTSMAWAFWPCVSTRSGSMTAWWTNFCMLWNLSTRATILW

SEQ ID NO: 38757 - protein, 63 aa, Homo sapiens
  MAP TO Z98884.11; EXPRESSED IN LUNG, SIGNAL = 1.6; EXPRESSED IN FETAL LIVER, SIGNAL = 2.5; EXPRESSED IN ADULT LIVER, SIGNAL = 2.4; EXPRESSED IN PLACENTA, SIGNAL = 2.2; EXPRESSED IN HELA, SIGNAL = 1.6; EXPRESSED IN BRAIN, SIGNAL = 1.4; EXPRESSED IN HEART, SIGNAL = 1.3; SWISSPROT HIT: Q12933, EVALUE 1.50e+00
KIMRFLRRCRHRYTSPCLYILLRENDEATLTFLTLTNSYVKLIPLQIIRADVPNYNRAVELFN

SEQ ID NO: 38758 - protein, 48 aa, Homo sapiens
  MAP TO AC004032.7; EXPRESSED IN PLACENTA, SIGNAL = 1.5; EXPRESSED IN HELA, SIGNAL = 1.8; EXPRESSED IN BRAIN, SIGNAL = 2.4; EXPRESSED IN BONE MARROW, SIGNAL = 1.3; EXPRESSED IN HEART, SIGNAL = 2.1; EXPRESSED IN LUNG, SIGNAL = 1.8; EXPRESSED IN FETAL LIVER, SIGNAL = 1.6
SAEQTRRRRRRRGKSKRKERQRRRRRKGREGGGSSEIREKREEKKTKS

SEQ ID NO: 38759 - protein, 46 aa, Homo sapiens [sequence omitted]

SEQ ID NO: 38760 - protein, 47 aa, Homo sapiens
  MAP TO AB016897.1; EXPRESSED IN ADULT LIVER, SIGNAL =  25; EXPRESSED IN PLACENTA, SIGNAL =  33; EXPRESSED IN HEART, SIGNAL = 7.2; EXPRESSED IN FETAL LIVER, SIGNAL =  22; EXPRESSED IN BRAIN, SIGNAL =   4; EXPRESSED IN HELA, SIGNAL = 8.5; EXPRESSED IN BONE MARROW, SIGNAL = 4.7; EXPRESSED IN LUNG, SIGNAL =  12; SWISSPROT HIT: O42222, EVALUE 4.70e+00
CTGSMAGEASGNLQSWQKAKGKQTCLTWLEQEEAGEGRYHTLLNNKI

SEQ ID NO: 38761 - protein, 33 aa, Homo sapiens
  MAP TO AL008723.8; EXPRESSED IN LUNG, SIGNAL = 1.6; EXPRESSED IN BONE MARROW, SIGNAL = 2.5; EXPRESSED IN ADULT LIVER, SIGNAL = 1.9; EXPRESSED IN HELA, SIGNAL = 2.4; EXPRESSED IN PLACENTA, SIGNAL = 1.8; EXPRESSED IN HEART, SIGNAL = 1.5; EXPRESSED IN FETAL LIVER, SIGNAL = 1.7; EXPRESSED IN BRAIN, SIGNAL = 2.1
CSKETRSGFKGYAWPPGPASCRRRRRSCPEGGS

SEQ ID NO: 38762 - protein, 46 aa, Homo sapiens
  MAP TO AC002472.3; EXPRESSED IN PLACENTA, SIGNAL = 4.7; EXPRESSED IN BRAIN, SIGNAL = 5.5; EXPRESSED IN BONE MARROW, SIGNAL = 4.8; EXPRESSED IN LUNG, SIGNAL =   4; EXPRESSED IN HEART, SIGNAL = 2.8; EXPRESSED IN ADULT LIVER, SIGNAL = 5.5; EXPRESSED IN FETAL LIVER, SIGNAL = 6.9; EXPRESSED IN HELA, SIGNAL =   4; SWISSPROT HIT: P03179, EVALUE 4.80e+00
GYHRLKEGAVPTIFESFSKLRRTTKTKGHSYPPGPAEVSRLRRCRK

SEQ ID NO: 38763 - protein, 46 aa, Homo sapiens
  MAP TO Z83840.7; EXPRESSED IN HELA, SIGNAL = 5.1; EXPRESSED IN BRAIN, SIGNAL = 3.3; EXPRESSED IN PLACENTA, SIGNAL = 4.6; EXPRESSED IN BONE MARROW, SIGNAL = 3.5; EXPRESSED IN LUNG, SIGNAL = 3.7; EXPRESSED IN HEART, SIGNAL = 2.7; EXPRESSED IN ADULT LIVER, SIGNAL = 4.4; EXPRESSED IN FETAL LIVER, SIGNAL = 7.1; SWISSPROT HIT: P12956, EVALUE 1.00e-20
CIQSVYISKIISSDRDLLAVVFYGTEKDKNSVNFKNIYVLQELDNP

SEQ ID NO: 38764 - protein, 29 aa, Homo sapiens
  MAP TO AC004032.7; EXPRESSED IN HELA, SIGNAL = 4.3; EXPRESSED IN BRAIN, SIGNAL = 4.2; EXPRESSED IN PLACENTA, SIGNAL = 7.6; EXPRESSED IN BONE MARROW, SIGNAL = 3.1; EXPRESSED IN LUNG, SIGNAL = 4.8; EXPRESSED IN HEART, SIGNAL = 3.1; EXPRESSED IN ADULT LIVER, SIGNAL = 6.3; EXPRESSED IN FETAL LIVER, SIGNAL = 8.9
MLAEPFLCARHTLSNCAHIISCDPHSSPI

SEQ ID NO: 38765 - protein, 32 aa, Homo sapiens
  MAP TO AC002472.3; EXPRESSED IN PLACENTA, SIGNAL = 1.4; EXPRESSED IN BRAIN, SIGNAL = 2.7; EXPRESSED IN HEART, SIGNAL = 1.9; EXPRESSED IN BONE MARROW, SIGNAL = 2.5; EXPRESSED IN LUNG, SIGNAL = 1.8; EXPRESSED IN FETAL LIVER, SIGNAL = 1.9; EXPRESSED IN HELA, SIGNAL = 1.9
SICQVAELLGQWALWGRYRGPGRCPEQKQQHL

SEQ ID NO: 38766 - protein, 42 aa, Homo sapiens; identical to SEQ ID NO: 35525
  MAP TO AP000345.1; EXPRESSED IN PLACENTA, SIGNAL = 1.9; EXPRESSED IN HEART, SIGNAL = 1.4; EXPRESSED IN FETAL LIVER, SIGNAL = 2.6; EXPRESSED IN BRAIN, SIGNAL = 1.5; EXPRESSED IN HELA, SIGNAL = 1.6; EXPRESSED IN BONE MARROW, SIGNAL = 2.4; EXPRESSED IN LUNG, SIGNAL = 2.6; EXPRESSED IN ADULT LIVER, SIGNAL = 2.9; SWISSPROT HIT: P10265, EVALUE 1.00e-05

SEQ ID NO: 38767 - protein, 49 aa, Homo sapiens
  MAP TO AB016897.1; EXPRESSED IN BRAIN, SIGNAL = 3.6; EXPRESSED IN PLACENTA, SIGNAL = 3.9; EXPRESSED IN HELA, SIGNAL = 3.2; EXPRESSED IN HEART, SIGNAL = 2.8; EXPRESSED IN LUNG, SIGNAL = 3.5; EXPRESSED IN BONE MARROW, SIGNAL = 3.9; EXPRESSED IN FETAL LIVER, SIGNAL = 4.6; EXPRESSED IN ADULT LIVER, SIGNAL = 3.3
MATSVWLFRSEFKCLFFREFLASHPSLGCSRSCSFSQPYIFHNVCHYFK

SEQ ID NO: 38768 - protein, 33 aa, Homo sapiens
  MAP TO AB016897.1; EXPRESSED IN BONE MARROW, SIGNAL =   2; EXPRESSED IN LUNG, SIGNAL = 2.1; EXPRESSED IN ADULT LIVER, SIGNAL = 1.8; EXPRESSED IN FETAL LIVER, SIGNAL = 2.6; EXPRESSED IN BRAIN, SIGNAL = 2.1; EXPRESSED IN HELA, SIGNAL = 1.6; EXPRESSED IN PLACENTA, SIGNAL = 1.6; EXPRESSED IN HEART, SIGNAL = 1.3; SWISSPROT HIT: P55196, EVALUE 3.00e-12
SDRVSSASSTAERGMVKPMIRVEQQPDYRRQES

SEQ ID NO: 38769 - protein, 41 aa, Homo sapiens
  MAP TO AL022329.9; EXPRESSED IN HEART, SIGNAL = 1.9
LSGVESFRGLIPLPVARAAHFENKSVSVEGFENKMLGQMDI

SEQ ID NO: 38770 - protein, 31 aa, Homo sapiens
  MAP TO AC004832.3; EXPRESSED IN PLACENTA, SIGNAL = 2.6; EXPRESSED IN HELA, SIGNAL = 1.3; EXPRESSED IN HEART, SIGNAL = 1.8; EXPRESSED IN LUNG, SIGNAL = 1.3; EXPRESSED IN FETAL LIVER, SIGNAL = 2.8; EXPRESSED IN ADULT LIVER, SIGNAL = 2.4
EIEAGNISFLQGTEMTSVEETNKLPHLLPST

SEQ ID NO: 38771 - protein, 33 aa, Homo sapiens
  MAP TO AP000041.1; EXPRESSED IN HEART, SIGNAL = 1.3
MCHPSTPSPRGRTNPRSQASPNLSLSPMSSPPE

SEQ ID NO: 38772 - protein, 63 aa, Homo sapiens
  MAP TO Z83840.7; EXPRESSED IN PLACENTA, SIGNAL = 5.4; EXPRESSED IN BRAIN, SIGNAL = 2.5; EXPRESSED IN HELA, SIGNAL = 5.4; EXPRESSED IN LUNG, SIGNAL = 3.3; EXPRESSED IN HEART, SIGNAL =   4; EXPRESSED IN BONE MARROW, SIGNAL = 3.6; EXPRESSED IN FETAL LIVER, SIGNAL = 3.5; EXPRESSED IN ADULT LIVER, SIGNAL = 4.9; SWISSPROT HIT: P12956, EVALUE 3.00e-31
NEGSGSKRPKVEYSEEELKTHISKGTLGKFTVPMLKEACRAYGLKSGLKKQELLEALTKHFQD

SEQ ID NO: 38773 - protein, 31 aa, Homo sapiens
  MAP TO Z83840.7; EXPRESSED IN PLACENTA, SIGNAL = 5.4; EXPRESSED IN BRAIN, SIGNAL = 2.5; EXPRESSED IN HELA, SIGNAL = 5.4; EXPRESSED IN LUNG, SIGNAL = 3.3; EXPRESSED IN HEART, SIGNAL =   4; EXPRESSED IN BONE MARROW, SIGNAL = 3.6; EXPRESSED IN FETAL LIVER, SIGNAL = 3.5; EXPRESSED IN ADULT LIVER, SIGNAL = 4.9
SPSTSRTDQRPRVQLPFRSVARLPGLVLSQL

SEQ ID NO: 38774 - protein, 61 aa, Homo sapiens
  MAP TO AC005006.2; EXPRESSED IN ADULT LIVER, SIGNAL = 3.6; EXPRESSED IN FETAL LIVER, SIGNAL = 4.8; EXPRESSED IN PLACENTA, SIGNAL = 3.4; EXPRESSED IN HEART, SIGNAL = 3.7; EXPRESSED IN LUNG, SIGNAL = 8.3; EXPRESSED IN BRAIN, SIGNAL = 5.7; EXPRESSED IN HELA, SIGNAL = 6.9; EXPRESSED IN BONE MARROW, SIGNAL = 6.5; SWISSPROT HIT: Q9Y261, EVALUE 8.60e-01
CPAAGGEAGRGDPALRHLAAQLLPAGGCSPGAGGWRCPTAHCWRLSPLGLHPAQLPPVCSL

SEQ ID NO: 38775 - protein, 62 aa, Homo sapiens
  MAP TO Z83840.7; EXPRESSED IN FETAL LIVER, SIGNAL = 6.9; EXPRESSED IN ADULT LIVER, SIGNAL = 8.1; EXPRESSED IN PLACENTA, SIGNAL = 5.7; EXPRESSED IN HELA, SIGNAL = 5.2; EXPRESSED IN BRAIN, SIGNAL = 4.7; EXPRESSED IN HEART, SIGNAL = 4.8; EXPRESSED IN LUNG, SIGNAL =   6; EXPRESSED IN BONE MARROW, SIGNAL = 4.2; SWISSPROT HIT: Q06990, EVALUE 3.00e-01
GDPRAGEDSIGDHTASQRDLQLQGHCCTGATLPKTESPQGQEAPGNPNGAPQNTRASKKFSI

SEQ ID NO: 38776 - protein, 41 aa, Homo sapiens
  MAP TO Z83844.5; EXPRESSED IN PLACENTA, SIGNAL = 2.2; EXPRESSED IN HELA, SIGNAL = 3.1; EXPRESSED IN LUNG, SIGNAL = 3.3; EXPRESSED IN HEART, SIGNAL = 2.7; EXPRESSED IN BONE MARROW, SIGNAL =   4; EXPRESSED IN FETAL LIVER, SIGNAL = 1.5; EXPRESSED IN ADULT LIVER, SIGNAL = 2.6; EXPRESSED IN BRAIN, SIGNAL = 4.1; SWISSPROT HIT: P34298, EVALUE 1.60e+00
VAPQTHHKSRRKSEPQFLIFTTGMVCLLCGVVVRLTREWGS

SEQ ID NO: 38777 - protein, 55 aa, Homo sapiens
  MAP TO AC007106.6; EXPRESSED IN ADULT LIVER, SIGNAL = 6.5; EXPRESSED IN HELA, SIGNAL = 9.8; EXPRESSED IN PLACENTA, SIGNAL =  12; EXPRESSED IN LUNG, SIGNAL = 6.8; EXPRESSED IN BONE MARROW, SIGNAL = 4.3; EXPRESSED IN FETAL LIVER, SIGNAL = 4.5; EXPRESSED IN BRAIN, SIGNAL = 8.9; EXPRESSED IN HEART, SIGNAL = 4.2; SWISSPROT HIT: P75320, EVALUE 2.10e+00
SRGWCSSGRLGPHRSPWSGWEAQAWWAAGPEPCPVGRQLRPGEKSSAAPVGQHCW

SEQ ID NO: 38778 - protein, 53 aa, Homo sapiens
  MAP TO Z83840.7; EXPRESSED IN HELA, SIGNAL = 4.3; EXPRESSED IN BRAIN, SIGNAL = 3.1; EXPRESSED IN PLACENTA, SIGNAL = 6.3; EXPRESSED IN HEART, SIGNAL = 2.4; EXPRESSED IN LUNG, SIGNAL = 2.8; EXPRESSED IN BONE MARROW, SIGNAL = 2.9; EXPRESSED IN ADULT LIVER, SIGNAL = 3.6; EXPRESSED IN FETAL LIVER, SIGNAL = 3.8; SWISSPROT HIT: P12956, EVALUE 3.00e-25
SSTLFSALLIKCLEKEVAALCRYTPRRNIPPYFVALVPQEEELDDQKIQVTPP

SEQ ID NO: 38779 - protein, 37 aa, Homo sapiens
  MAP TO Z83844.5; EXPRESSED IN PLACENTA, SIGNAL = 1.7; EXPRESSED IN HELA, SIGNAL =   2; EXPRESSED IN BRAIN, SIGNAL = 2.7; EXPRESSED IN HEART, SIGNAL =   2; EXPRESSED IN BONE MARROW, SIGNAL = 3.3; EXPRESSED IN LUNG, SIGNAL = 2.5; EXPRESSED IN FETAL LIVER, SIGNAL = 1.4; SWISSPROT HIT: P55194, EVALUE 2.00e-11
KALEMSCAIQNQLARILAEFEMTLERDVLQPLSRLSE

SEQ ID NO: 38780 - protein, 26 aa, Homo sapiens
  MAP TO Z83844.5; EXPRESSED IN PLACENTA, SIGNAL = 1.7; EXPRESSED IN HELA, SIGNAL = 1.4; EXPRESSED IN HEART, SIGNAL = 1.9; EXPRESSED IN LUNG, SIGNAL = 1.8; EXPRESSED IN BONE MARROW, SIGNAL = 1.6; EXPRESSED IN ADULT LIVER, SIGNAL = 4.4; EXPRESSED IN FETAL LIVER, SIGNAL = 1.4; EXPRESSED IN BRAIN, SIGNAL = 1.5
HTTMANKVETLKEEEEELKRKVEQCR

SEQ ID NO: 38781 - protein, 51 aa, Homo sapiens
  MAP TO AP000356.1; EXPRESSED IN BRAIN, SIGNAL = 1.5; EXPRESSED IN PLACENTA, SIGNAL = 1.6; EXPRESSED IN HEART, SIGNAL = 2.5; EXPRESSED IN BONE MARROW, SIGNAL = 1.7; EXPRESSED IN ADULT LIVER, SIGNAL = 5.1; EXPRESSED IN FETAL LIVER, SIGNAL = 2.1; SWISSPROT HIT: Q03248, EVALUE 1.00e-20
NHDMVVVSPILERDSEHGDVLWNTAVVISNSGAVLGKTRKNHIPRVGDFNE

SEQ ID NO: 38782 - protein, 26 aa, Homo sapiens
  MAP TO AP000356.1; EXPRESSED IN BRAIN, SIGNAL = 1.5; EXPRESSED IN PLACENTA, SIGNAL = 1.6; EXPRESSED IN HEART, SIGNAL = 2.5; EXPRESSED IN BONE MARROW, SIGNAL = 1.7; EXPRESSED IN ADULT LIVER, SIGNAL = 5.1; EXPRESSED IN FETAL LIVER, SIGNAL = 2.1
TMTWWWCLPSWNETASMGMFCGIQPW

SEQ ID NO: 38783 - protein, 33 aa, Homo sapiens
  MAP TO AL031588.1; EXPRESSED IN FETAL LIVER, SIGNAL = 4.3; EXPRESSED IN ADULT LIVER, SIGNAL = 2.2; EXPRESSED IN HELA, SIGNAL = 3.1; EXPRESSED IN PLACENTA, SIGNAL = 3.2; EXPRESSED IN BRAIN, SIGNAL = 3.4; EXPRESSED IN HEART, SIGNAL = 2.5; EXPRESSED IN BONE MARROW, SIGNAL = 2.8; EXPRESSED IN LUNG, SIGNAL = 3.4
FFFLPLFLQFSFLALIFLLSFCDSSDSDVRPLD

SEQ ID NO: 38784 - protein, 27 aa, Homo sapiens
  MAP TO AP000354.1; EXPRESSED IN LUNG, SIGNAL = 1.4; EXPRESSED IN BONE MARROW, SIGNAL = 1.8; EXPRESSED IN HEART, SIGNAL = 1.4; EXPRESSED IN BRAIN, SIGNAL = 1.5
EWLHAKRSIMKFKYRGMGGVLGKASQK

SEQ ID NO: 38785 - protein, 20 aa, Homo sapiens
  MAP TO Z83844.5; EXPRESSED IN HELA, SIGNAL = 1.4; EXPRESSED IN PLACENTA, SIGNAL =   2; EXPRESSED IN BONE MARROW, SIGNAL = 1.5; EXPRESSED IN HEART, SIGNAL = 1.8; EXPRESSED IN LUNG, SIGNAL = 1.7; EXPRESSED IN ADULT LIVER, SIGNAL = 1.5
SVPSPPLASSFLRLSCASPM

SEQ ID NO: 38786 - protein, 50 aa, Homo sapiens
  MAP TO Z98884.11; EXPRESSED IN HEART, SIGNAL = 1.9; EXPRESSED IN BRAIN, SIGNAL = 3.1; SWISSPROT HIT: Q06596, EVALUE 4.70e+00
NQFRMSILERLEQMERRMAEMTGSQQHKQASGGGSSGGGSGSGNGGSQAQ

SEQ ID NO: 38787 - protein, 73 aa, Homo sapiens
  MAP TO AL079300.11; EXPRESSED IN PLACENTA, SIGNAL = 1.2; EXPRESSED IN LUNG, SIGNAL = 1.3; EXPRESSED IN HEART, SIGNAL = 1.5; EXPRESSED IN FETAL LIVER, SIGNAL = 1.4; SWISSPROT HIT: Q11126, EVALUE 4.90e+00
EEIEAQRVIGPQAPIKHVSELELRPGFTPPPGVRQAWCSMPAFSECNSPGTLLRLSVLICEMETMIPASCILK

SEQ ID NO: 38788 - protein, 31 aa, Homo sapiens
  MAP TO AP000127.1; EXPRESSED IN HEART, SIGNAL = 1.5; EXPRESSED IN FETAL LIVER, SIGNAL = 1.5; EXPRESSED IN ADULT LIVER, SIGNAL = 1.5; EXPRESSED IN PLACENTA, SIGNAL = 1.8; EXPRESSED IN HELA, SIGNAL = 1.3; EXPRESSED IN LUNG, SIGNAL = 1.4; EXPRESSED IN BONE MARROW, SIGNAL = 1.5; SWISSPROT HIT: P37001, EVALUE 8.50e+00
MRRNQVAIPWGANFGEGKTDEKNNFRNFSCK

SEQ ID NO: 38789 - protein, 17 aa, Homo sapiens
  MAP TO AC006548.19; EXPRESSED IN HEART, SIGNAL = 1.8; EXPRESSED IN BONE MARROW, SIGNAL =  23; EXPRESSED IN LUNG, SIGNAL =  11; EXPRESSED IN FETAL LIVER, SIGNAL = 1.6; EXPRESSED IN ADULT LIVER, SIGNAL = 2.7
ETESPSLAGRVRALAII

SEQ ID NO: 38790 - protein, 45 aa, Homo sapiens
  MAP TO AB016897.1; EXPRESSED IN PLACENTA, SIGNAL = 2.2; EXPRESSED IN LUNG, SIGNAL = 2.5; EXPRESSED IN HEART, SIGNAL = 1.9; EXPRESSED IN FETAL LIVER, SIGNAL =   2; EXPRESSED IN ADULT LIVER, SIGNAL = 2.3; SWISSPROT HIT: Q9XBF7, EVALUE 4.80e+00
PGSSGAPENLTFKERQRLFSQGQDVSNKVKASRKLTELENELNTK

SEQ ID NO: 38791 - protein, 35 aa, Homo sapiens
  MAP TO AP000353.1; EXPRESSED IN BRAIN, SIGNAL = 6.3; EXPRESSED IN PLACENTA, SIGNAL = 2.8; EXPRESSED IN HELA, SIGNAL = 4.2; EXPRESSED IN LUNG, SIGNAL = 4.6; EXPRESSED IN HEART, SIGNAL = 3.2; EXPRESSED IN BONE MARROW, SIGNAL = 6.5; EXPRESSED IN FETAL LIVER, SIGNAL = 3.5; EXPRESSED IN ADULT LIVER, SIGNAL = 3.8
MDSWPRDGPWLGTGYVQEVALHRILFGGLDTGVQE

SEQ ID NO: 38792 - protein, 49 aa, Homo sapiens
  MAP TO Z97055.1; EXPRESSED IN PLACENTA, SIGNAL = 1.4; EXPRESSED IN HELA, SIGNAL =   2; EXPRESSED IN BRAIN, SIGNAL = 2.2; EXPRESSED IN HEART, SIGNAL = 1.8; EXPRESSED IN BONE MARROW, SIGNAL = 3.5; EXPRESSED IN LUNG, SIGNAL = 2.1; EXPRESSED IN ADULT LIVER, SIGNAL = 1.9; EXPRESSED IN FETAL LIVER, SIGNAL = 2.7
DIMETKKLKTSKLNSQSRRCSGKGTEEPHESRGSRLWPKRKARARRVIA

SEQ ID NO: 38793 - protein, 27 aa, Homo sapiens
  MAP TO AC004032.7; EXPRESSED IN PLACENTA, SIGNAL = 3.6; EXPRESSED IN BRAIN, SIGNAL = 2.5; EXPRESSED IN HELA, SIGNAL = 2.6; EXPRESSED IN HEART, SIGNAL =   2; EXPRESSED IN LUNG, SIGNAL = 3.5; EXPRESSED IN BONE MARROW, SIGNAL = 3.5; EXPRESSED IN ADULT LIVER, SIGNAL = 3.6; EXPRESSED IN FETAL LIVER, SIGNAL = 3.6
MAHAPPSNLAPRPFDGYRMMEGIQTLY

SEQ ID NO: 38794 - protein, 26 aa, Homo sapiens
  MAP TO AC002472.3; EXPRESSED IN LUNG, SIGNAL =  12; EXPRESSED IN ADULT LIVER, SIGNAL =  10; EXPRESSED IN FETAL LIVER, SIGNAL =  14; EXPRESSED IN PLACENTA, SIGNAL = 6.7; EXPRESSED IN HELA, SIGNAL =  11; EXPRESSED IN BRAIN, SIGNAL =  13; EXPRESSED IN HEART, SIGNAL = 6.7; EXPRESSED IN BONE MARROW, SIGNAL =  18
MENPARQCTKGCPALKCNQSWVFPIH

SEQ ID NO: 38795 - protein, 113 aa, Homo sapiens
  MAP TO AC008151.1; EXPRESSED IN PLACENTA, SIGNAL = 1.2; EXPRESSED IN BRAIN, SIGNAL = 2.1; EXPRESSED IN HELA, SIGNAL = 1.4; EXPRESSED IN HEART, SIGNAL = 2.3; EXPRESSED IN BONE MARROW, SIGNAL = 1.5; EXPRESSED IN LUNG, SIGNAL = 1.5; SWISSPROT HIT: P56539, EVALUE 2.00e-64
VDFEDVIAEPVGTYSFDGVWKVSYTTFTVSKYWCYRLLSTLLGVPLALLWGFLFACISFCHIWAVVPCIKSYLIEIQCISHIYSLCIRTFCNPLFAALGQVCSSIKVVLRKEV

SEQ ID NO: 38796 - protein, 56 aa, Homo sapiens
  MAP TO AC008009.4; EXPRESSED IN HEART, SIGNAL = 1.4; EXPRESSED IN HELA, SIGNAL = 1.7; EXPRESSED IN PLACENTA, SIGNAL = 1.6; SWISSPROT HIT: P51114, EVALUE 3.00e-26
AKDVIEEHGPSEKAINGPTSASGDDISKLQRTPGEEKINTLKEENTQEAAVLNGVS

SEQ ID NO: 38797 - protein, 50 aa, Homo sapiens
  MAP TO AP000350.1; EXPRESSED IN FETAL LIVER, SIGNAL = 2.2; EXPRESSED IN BRAIN, SIGNAL = 2.3; EXPRESSED IN HELA, SIGNAL = 1.9; EXPRESSED IN HEART, SIGNAL = 1.8; EXPRESSED IN ADULT LIVER, SIGNAL = 1.5; EXPRESSED IN PLACENTA, SIGNAL = 3.4; EXPRESSED IN BONE MARROW, SIGNAL = 2.7; EXPRESSED IN LUNG, SIGNAL = 1.5; SWISSPROT HIT: P17809, EVALUE 7.00e-03
EFTNETWQARTGEPLPDHLVLLMWSLIVSLYPLGGLFGALLAGPLAITLG

SEQ ID NO: 38798 - protein, 18 aa, Homo sapiens
  MAP TO AP000350.1; EXPRESSED IN FETAL LIVER, SIGNAL = 2.2; EXPRESSED IN BRAIN, SIGNAL = 2.3; EXPRESSED IN HELA, SIGNAL = 1.9; EXPRESSED IN HEART, SIGNAL = 1.8; EXPRESSED IN ADULT LIVER, SIGNAL = 1.5; EXPRESSED IN PLACENTA, SIGNAL = 3.4; EXPRESSED IN BONE MARROW, SIGNAL = 2.7; EXPRESSED IN LUNG, SIGNAL = 1.5
NSPMRHGRRVLESHCPIT

SEQ ID NO: 38799 - protein, 40 aa, Homo sapiens
  MAP TO AL008723.8; EXPRESSED IN BONE MARROW, SIGNAL = 3.4; EXPRESSED IN LUNG, SIGNAL = 2.7; EXPRESSED IN HEART, SIGNAL = 2.4; EXPRESSED IN FETAL LIVER, SIGNAL = 1.3; EXPRESSED IN PLACENTA, SIGNAL = 1.6; EXPRESSED IN HELA, SIGNAL = 1.4; EXPRESSED IN BRAIN, SIGNAL = 1.9
MQAEPLRQTWEGLGATAQRGPGFCAALTVRGGGWGGAALT

SEQ ID NO: 38800 - protein, 63 aa, Homo sapiens
  MAP TO AL008723.8; EXPRESSED IN FETAL LIVER, SIGNAL = 1.5; EXPRESSED IN ADULT LIVER, SIGNAL = 2.4; EXPRESSED IN BRAIN, SIGNAL = 2.3; EXPRESSED IN HELA, SIGNAL = 2.5; EXPRESSED IN BONE MARROW, SIGNAL = 5.7; EXPRESSED IN LUNG, SIGNAL = 2.9; EXPRESSED IN HEART, SIGNAL = 2.6; SWISSPROT HIT: P48681, EVALUE 5.90e+00
YGSQKSKMRPELLRSGCQQGRAPSGGSETNPFPELFQLLEDAPSSWPFLLTTKPELSIFRSLS

SEQ ID NO: 38801 - protein, 47 aa, Homo sapiens
  MAP TO AC002472.3; EXPRESSED IN PLACENTA, SIGNAL = 1.3; EXPRESSED IN HELA, SIGNAL = 2.5; EXPRESSED IN LUNG, SIGNAL = 1.6; EXPRESSED IN BONE MARROW, SIGNAL = 2.2; EXPRESSED IN HEART, SIGNAL = 5.1; EXPRESSED IN FETAL LIVER, SIGNAL = 2.9; EXPRESSED IN ADULT LIVER, SIGNAL = 3.5; EXPRESSED IN BRAIN, SIGNAL = 1.4; SWISSPROT HIT: P39061, EVALUE 4.20e-01
GETKTAPPSGECRPCWNAAAAKDPARGHPASPALPGCPSGVGLEEGS

SEQ ID NO: 38802 - protein, 57 aa, Homo sapiens
  MAP TO AL022238.1; EXPRESSED IN LUNG, SIGNAL = 2.9; EXPRESSED IN ADULT LIVER, SIGNAL = 4.6; EXPRESSED IN FETAL LIVER, SIGNAL =   3; EXPRESSED IN HELA, SIGNAL = 2.7; EXPRESSED IN PLACENTA, SIGNAL = 8.5; EXPRESSED IN BRAIN, SIGNAL = 2.7; EXPRESSED IN BONE MARROW, SIGNAL = 3.7; EXPRESSED IN HEART, SIGNAL = 2.5; SWISSPROT HIT: P20134, EVALUE 4.10e-01
IVAPGKTRGGSPYNQFDIIPGDTLGGHTGPAGDSWLPAKSPPTNKIGSKSSNASWPP

SEQ ID NO: 38803 - protein, 47 aa, Homo sapiens
  MAP TO AB016897.1; EXPRESSED IN BRAIN, SIGNAL = 2.1; EXPRESSED IN PLACENTA, SIGNAL = 8.4; EXPRESSED IN HELA, SIGNAL = 3.2; EXPRESSED IN LUNG, SIGNAL = 4.1; EXPRESSED IN BONE MARROW, SIGNAL = 1.9; EXPRESSED IN HEART, SIGNAL = 2.8; EXPRESSED IN FETAL LIVER, SIGNAL =  15; EXPRESSED IN ADULT LIVER, SIGNAL = 8.4; SWISSPROT HIT: P98133, EVALUE 8.10e+00
PYLCVQHICSNTFWTFLVLERTYRRCVGLVLHYCAQLCQPRKPVLSL

SEQ ID NO: 38804 - protein, 77 aa, Homo sapiens
  MAP TO AB016897.1; EXPRESSED IN PLACENTA, SIGNAL = 1.7; EXPRESSED IN BONE MARROW, SIGNAL = 2.4; EXPRESSED IN HEART, SIGNAL = 2.1; EXPRESSED IN ADULT LIVER, SIGNAL = 1.9; EXPRESSED IN FETAL LIVER, SIGNAL = 1.7; EXPRESSED IN BRAIN, SIGNAL = 2.9; EXPRESSED IN HELA, SIGNAL = 1.6; EXPRESSED IN LUNG, SIGNAL = 2.2; SWISSPROT HIT: P12950, EVALUE 2.90e+00
MAGNVTCFLHAVQSLCRVSRRGWGHPGDVSGCRSGCRDGRGRNGSPEQAPAGVGGFEEPDGGVATQIGEHGGMGWGG

SEQ ID NO: 38805 - protein, 77 aa, Homo sapiens
  MAP TO AL022318.2; EXPRESSED IN FETAL LIVER, SIGNAL = 4.4; EXPRESSED IN PLACENTA, SIGNAL = 4.7; EXPRESSED IN HEART, SIGNAL = 2.3; EXPRESSED IN LUNG, SIGNAL = 3.6; EXPRESSED IN BONE MARROW, SIGNAL = 2.3; EXPRESSED IN ADULT LIVER, SIGNAL = 4.5; EXPRESSED IN BRAIN, SIGNAL =   2; EXPRESSED IN HELA, SIGNAL = 2.4
SPRHGNTLPWEGSCETRREAPDRLAWDTSRCPSITWGQERAKVQPNTEDLRAGDGEEGEAGRKELSVGARMASRWDI

SEQ ID NO: 38806 - protein, 33 aa, Homo sapiens
  MAP TO AC004032.7; EXPRESSED IN HELA, SIGNAL = 1.5; EXPRESSED IN PLACENTA, SIGNAL = 1.3; EXPRESSED IN BRAIN, SIGNAL = 1.8; EXPRESSED IN HEART, SIGNAL = 1.6; EXPRESSED IN BONE MARROW, SIGNAL = 1.9; EXPRESSED IN LUNG, SIGNAL = 1.4; EXPRESSED IN FETAL LIVER, SIGNAL = 1.5
KELPAWCPGGRLVESEGPGRLLGGQGPGAEDEG

SEQ ID NO: 38807 - protein, 40 aa, Homo sapiens
  MAP TO AP000233.1; EXPRESSED IN HELA, SIGNAL = 2.6; EXPRESSED IN PLACENTA, SIGNAL =  27; EXPRESSED IN LUNG, SIGNAL = 3.4; EXPRESSED IN HEART, SIGNAL = 5.2; EXPRESSED IN BONE MARROW, SIGNAL =   2; EXPRESSED IN ADULT LIVER, SIGNAL =   2; EXPRESSED IN FETAL LIVER, SIGNAL = 5.1; SWISSPROT HIT: P73098, EVALUE 5.60e-01
HTRSGEGGRGHQPSQPDQPNQPWRSMGWQMSQPDWPHIHI

SEQ ID NO: 38808 - protein, 22 aa, Homo sapiens
  MAP TO AC007262.4; EXPRESSED IN HELA, SIGNAL = 3.4; EXPRESSED IN PLACENTA, SIGNAL = 8.2; EXPRESSED IN LUNG, SIGNAL = 4.2; EXPRESSED IN HEART, SIGNAL =   3; EXPRESSED IN FETAL LIVER, SIGNAL = 7.8; EXPRESSED IN ADULT LIVER, SIGNAL = 7.9
SDQFQYQLYQFSYSGKQMLRQR

SEQ ID NO: 38809 - protein, 43 aa, Homo sapiens
  MAP TO AC004032.7; EXPRESSED IN PLACENTA, SIGNAL = 1.3; EXPRESSED IN HEART, SIGNAL = 1.5; EXPRESSED IN FETAL LIVER, SIGNAL =   2; EXPRESSED IN ADULT LIVER, SIGNAL = 1.8; EXPRESSED IN BRAIN, SIGNAL = 1.6; EXPRESSED IN HELA, SIGNAL =   2; EXPRESSED IN BONE MARROW, SIGNAL = 2.3; EXPRESSED IN LUNG, SIGNAL = 1.9
KERKHCCRTFQLLPTEQSWTRPHVHRREGRLPAGEERTQVEGN

SEQ ID NO: 38810 - protein, 46 aa, Homo sapiens
  MAP TO AC002472.3; EXPRESSED IN PLACENTA, SIGNAL = 1.2; EXPRESSED IN LUNG, SIGNAL = 1.2; EXPRESSED IN HEART, SIGNAL = 2.1; SWISSPROT HIT: P33485, EVALUE 9.40e-01
KAGGRGDGGLWTSCRGPRSQAGSQGRFRLRPRDGRCSGQGPGPSPP

SEQ ID NO: 38811 - protein, 52 aa, Homo sapiens
  MAP TO AP000352.2; EXPRESSED IN BONE MARROW, SIGNAL = 3.5; EXPRESSED IN LUNG, SIGNAL = 3.5; EXPRESSED IN HEART, SIGNAL = 2.7; EXPRESSED IN ADULT LIVER, SIGNAL = 5.3; EXPRESSED IN FETAL LIVER, SIGNAL = 4.4; EXPRESSED IN HELA, SIGNAL = 3.5; EXPRESSED IN PLACENTA, SIGNAL = 4.7; EXPRESSED IN BRAIN, SIGNAL = 4.4; SWISSPROT HIT: Q9Y6J0, EVALUE 3.00e-26
VIDCSMAVQEEAKEPHVSSVLPWIILHRIIWQEEDTFHSLCHQQQLQNPAEE

SEQ ID NO: 38812 - protein, 32 aa, Homo sapiens
  MAP TO AP000189.1; EXPRESSED IN LUNG, SIGNAL = 1.9; EXPRESSED IN BONE MARROW, SIGNAL =   3; EXPRESSED IN ADULT LIVER, SIGNAL =   3; EXPRESSED IN FETAL LIVER, SIGNAL = 1.9; EXPRESSED IN BRAIN, SIGNAL = 2.4; EXPRESSED IN PLACENTA, SIGNAL =   3; EXPRESSED IN HEART, SIGNAL = 1.7; EXPRESSED IN HELA, SIGNAL = 1.9
DTKWQQTVEDGSQRRQQSSQEMESRSCRIWTV

SEQ ID NO: 38813 - protein, 58 aa, Homo sapiens
  MAP TO AP000352.2; EXPRESSED IN PLACENTA, SIGNAL = 2.3; EXPRESSED IN BRAIN, SIGNAL = 2.3; EXPRESSED IN HELA, SIGNAL = 2.2; EXPRESSED IN HEART, SIGNAL =   2; EXPRESSED IN LUNG, SIGNAL =   2; EXPRESSED IN BONE MARROW, SIGNAL = 2.7; EXPRESSED IN FETAL LIVER, SIGNAL = 2.6; EXPRESSED IN ADULT LIVER, SIGNAL = 2.5; SWISSPROT HIT: P30712, EVALUE 5.00e-27
VLGPLIGVQVPEEKVERNRTAIDQALQWLEDKFLGDRPFLAGQQVTLADLMALEELMQ

SEQ ID NO: 38814 - protein, 59 aa, Homo sapiens
  MAP TO AP000350.1; EXPRESSED IN HEART, SIGNAL = 1.4; EXPRESSED IN BONE MARROW, SIGNAL = 1.5; EXPRESSED IN LUNG, SIGNAL = 1.7; EXPRESSED IN ADULT LIVER, SIGNAL = 1.5; EXPRESSED IN HELA, SIGNAL = 1.3; EXPRESSED IN BRAIN, SIGNAL =   2; SWISSPROT HIT: P20135, EVALUE 4.00e-13
LLIPKITGEEVSAEKMEHAVEEVKNSLQLFEEKFLQDKMFITGNQISLADLVAVVEMMQ

SEQ ID NO: 38815 - protein, 19 aa, Homo sapiens [sequence omitted]

SEQ ID NO: 38816 - protein, 33 aa, Homo sapiens
  MAP TO AP000352.2; EXPRESSED IN FETAL LIVER, SIGNAL = 1.3; EXPRESSED IN PLACENTA, SIGNAL = 1.4; EXPRESSED IN HELA, SIGNAL = 1.2; EXPRESSED IN HEART, SIGNAL = 1.4; EXPRESSED IN BONE MARROW, SIGNAL = 1.4; SWISSPROT HIT: Q9Y6J0, EVALUE 3.00e-13
KQDVHEFLLENLTNGGILELMMRYLKAMGHKFL

SEQ ID NO: 38817 - protein, 43 aa, Homo sapiens
  MAP TO AC007556.2; EXPRESSED IN FETAL LIVER, SIGNAL = 2.5; EXPRESSED IN BRAIN, SIGNAL = 3.1; EXPRESSED IN PLACENTA, SIGNAL = 2.4; EXPRESSED IN HELA, SIGNAL = 2.3; EXPRESSED IN BONE MARROW, SIGNAL = 2.6; EXPRESSED IN LUNG, SIGNAL = 2.4; EXPRESSED IN HEART, SIGNAL = 2.6; EXPRESSED IN ADULT LIVER, SIGNAL = 2.1; SWISSPROT HIT: P98164, EVALUE 1.00e-22
INECEQFGTCPQHCRNTKGSYECVCADGFTSMSDRPGKRCAAE

SEQ ID NO: 38818 - protein, 31 aa, Homo sapiens
  MAP TO AC007556.2; EXPRESSED IN FETAL LIVER, SIGNAL = 2.5; EXPRESSED IN BRAIN, SIGNAL = 3.1; EXPRESSED IN PLACENTA, SIGNAL = 2.4; EXPRESSED IN HELA, SIGNAL = 2.3; EXPRESSED IN BONE MARROW, SIGNAL = 2.6; EXPRESSED IN LUNG, SIGNAL = 2.4; EXPRESSED IN HEART, SIGNAL = 2.6; EXPRESSED IN ADULT LIVER, SIGNAL = 2.1
SMNVNNLGLVPSTAEIPKEVMSVSVLMASRL

SEQ ID NO: 38819 - protein, 24 aa, Homo sapiens
  MAP TO AL022312.7; EXPRESSED IN BRAIN, SIGNAL = 2.2; EXPRESSED IN PLACENTA, SIGNAL = 2.1; EXPRESSED IN ADULT LIVER, SIGNAL = 1.5; EXPRESSED IN FETAL LIVER, SIGNAL = 1.8; EXPRESSED IN HELA, SIGNAL = 1.7; EXPRESSED IN BONE MARROW, SIGNAL = 1.9; EXPRESSED IN HEART, SIGNAL = 1.6; EXPRESSED IN LUNG, SIGNAL = 1.7
AAVGLGCQLGPDAPSPHQERPESG

SEQ ID NO: 38820 - protein, 43 aa, Homo sapiens
  MAP TO AB016897.1; EXPRESSED IN PLACENTA, SIGNAL = 1.9; EXPRESSED IN BONE MARROW, SIGNAL = 1.7; EXPRESSED IN LUNG, SIGNAL = 3.2; EXPRESSED IN FETAL LIVER, SIGNAL = 1.4; EXPRESSED IN ADULT LIVER, SIGNAL =   2; EXPRESSED IN BRAIN, SIGNAL = 1.6; EXPRESSED IN HELA, SIGNAL =   2; EXPRESSED IN HEART, SIGNAL = 3.3
DEERRRQQQLEEMRKREAEDRARQEEERRRQEEERTKRDAEEK

SEQ ID NO: 38821 - protein, 32 aa, Homo sapiens
  MAP TO AL022238.1; EXPRESSED IN HELA, SIGNAL = 2.8; EXPRESSED IN PLACENTA, SIGNAL =   4; EXPRESSED IN BRAIN, SIGNAL = 4.9; EXPRESSED IN HEART, SIGNAL = 2.1; EXPRESSED IN LUNG, SIGNAL = 3.5; EXPRESSED IN BONE MARROW, SIGNAL = 5.6; EXPRESSED IN ADULT LIVER, SIGNAL = 4.9; EXPRESSED IN FETAL LIVER, SIGNAL = 4.8
ACQLLLQQQQQQQLLQNQRKISQAVRQQQEQQ

SEQ ID NO: 38822 - protein, 126 aa, Homo sapiens
  MAP TO AL031587.3; EXPRESSED IN FETAL LIVER, SIGNAL = 1.4; EXPRESSED IN BRAIN, SIGNAL = 2.2; EXPRESSED IN HELA, SIGNAL = 1.5; EXPRESSED IN LUNG, SIGNAL = 1.2; EXPRESSED IN HEART, SIGNAL =   2; EXPRESSED IN BONE MARROW, SIGNAL = 3.1; SWISSPROT HIT: P49085, EVALUE 7.00e-01
AALGSHWASGHSLFPSMHPCVPGLAASPGLSQRSGVSHSWLQNLLGHFLATWRQAGPNPSLGSSFLLQEAGEGIMQNQRPPAPALRRPKCPAWGGVRRQPRAQRRARPLGVEIPALTPAVQPWTPL

SEQ ID NO: 38823 - protein, 38 aa, Homo sapiens
  MAP TO AC006548.19; EXPRESSED IN FETAL LIVER, SIGNAL = 2.9; EXPRESSED IN HELA, SIGNAL = 2.5; EXPRESSED IN BRAIN, SIGNAL = 2.5; EXPRESSED IN PLACENTA, SIGNAL = 2.6; EXPRESSED IN LUNG, SIGNAL = 2.1; EXPRESSED IN BONE MARROW, SIGNAL = 5.7; EXPRESSED IN HEART, SIGNAL = 2.3; EXPRESSED IN ADULT LIVER, SIGNAL = 2.4
CPFVSERVFTNARRLALEWMNSLCSPVTRSRAIGTGRL

SEQ ID NO: 38824 - protein, 29 aa, Homo sapiens
  MAP TO Z82201.1; EXPRESSED IN LUNG, SIGNAL = 1.7; EXPRESSED IN BONE MARROW, SIGNAL =   2; EXPRESSED IN HEART, SIGNAL = 2.3; EXPRESSED IN FETAL LIVER, SIGNAL = 2.7; EXPRESSED IN ADULT LIVER, SIGNAL = 1.6; EXPRESSED IN PLACENTA, SIGNAL = 1.2; EXPRESSED IN HELA, SIGNAL = 1.7; EXPRESSED IN BRAIN, SIGNAL = 2.7; SWISSPROT HIT: Q09216, EVALUE 6.60e+00
HGKINLTAAQRQCGSETVGWWQWWESSSL

SEQ ID NO: 38825 - protein, 50 aa, Homo sapiens
  MAP TO AL022328.21; EXPRESSED IN FETAL LIVER, SIGNAL = 4.3; EXPRESSED IN PLACENTA, SIGNAL = 3.2; EXPRESSED IN HEART, SIGNAL = 2.2; EXPRESSED IN BRAIN, SIGNAL = 3.3; EXPRESSED IN HELA, SIGNAL = 4.2; EXPRESSED IN BONE MARROW, SIGNAL =   3; EXPRESSED IN LUNG, SIGNAL = 2.5; EXPRESSED IN ADULT LIVER, SIGNAL = 4.9; SWISSPROT HIT: P23249, EVALUE 5.00e-06
GSEAREGKSPSWFNPAEAVQVLRYCCLLAHSISSQVSASDIGVITPYRKQ

SEQ ID NO: 38826 - protein, 77 aa, Homo sapiens
  MAP TO AL035681.13; EXPRESSED IN ADULT LIVER, SIGNAL = 3.2; EXPRESSED IN FETAL LIVER, SIGNAL =   4; EXPRESSED IN BRAIN, SIGNAL = 3.3; EXPRESSED IN PLACENTA, SIGNAL =   2; EXPRESSED IN HELA, SIGNAL = 2.5; EXPRESSED IN HEART, SIGNAL = 2.3; EXPRESSED IN BONE MARROW, SIGNAL = 3.6; EXPRESSED IN LUNG, SIGNAL = 2.7; SWISSPROT HIT: Q11193, EVALUE 5.90e+00
MVESMKYPFRQGMRLEVVDKSQVSRTRMAVVDTVIGGRLRLLYEDGDSDDDFWCHMWSPLIHPVGWSRRVGHGIKMS

SEQ ID NO: 38827 - protein, 19 aa, Homo sapiens
  MAP TO AL035681.13; EXPRESSED IN ADULT LIVER, SIGNAL = 3.2; EXPRESSED IN FETAL LIVER, SIGNAL =   4; EXPRESSED IN BRAIN, SIGNAL = 3.3; EXPRESSED IN PLACENTA, SIGNAL =   2; EXPRESSED IN HELA, SIGNAL = 2.5; EXPRESSED IN HEART, SIGNAL = 2.3; EXPRESSED IN BONE MARROW, SIGNAL = 3.6; EXPRESSED IN LUNG, SIGNAL = 2.7
WKWWTSPRCHALAWLWWTQ

SEQ ID NO: 38828 - protein, 46 aa, Homo sapiens
  MAP TO AP000233.1; EXPRESSED IN HELA, SIGNAL = 3.3; EXPRESSED IN PLACENTA, SIGNAL = 3.5; EXPRESSED IN HEART, SIGNAL = 2.9; EXPRESSED IN BONE MARROW, SIGNAL = 6.5; EXPRESSED IN LUNG, SIGNAL = 4.2; EXPRESSED IN ADULT LIVER, SIGNAL = 4.7; EXPRESSED IN FETAL LIVER, SIGNAL = 3.6; EXPRESSED IN BRAIN, SIGNAL = 6.4
TIDESSRLPSSHCHCASWSRSRGKREGRGWDMSSGSGSGCKSNSGS

SEQ ID NO: 38829 - protein, 60 aa, Homo sapiens
  MAP TO AC007539.8; EXPRESSED IN HEART, SIGNAL = 1.4; EXPRESSED IN FETAL LIVER, SIGNAL = 1.6; EXPRESSED IN PLACENTA, SIGNAL = 2.2; EXPRESSED IN HELA, SIGNAL = 4.6; SWISSPROT HIT: O13425, EVALUE 4.60e+00
AFVIAITSDFIPRLVYQYSYSHNGTLHGFVNHTLSFFNVSQLKEGTQPENSQFDQEVQFC

SEQ ID NO: 38830 - protein, 60 aa, Homo sapiens
  MAP TO Z83844.5; EXPRESSED IN FETAL LIVER, SIGNAL = 2.9; EXPRESSED IN ADULT LIVER, SIGNAL = 2.3; EXPRESSED IN HELA, SIGNAL = 2.5; EXPRESSED IN PLACENTA, SIGNAL =   5; EXPRESSED IN BRAIN, SIGNAL = 3.7; EXPRESSED IN BONE MARROW, SIGNAL = 2.6; EXPRESSED IN LUNG, SIGNAL =   3; EXPRESSED IN HEART, SIGNAL = 2.2; SWISSPROT HIT: P55194, EVALUE 3.10e-01
INFNVSGLFSAVTLQDTVSDRLASEELPSTAVPTPATTPAPAPAPAPAPAPALASAATKE

SEQ ID NO: 38831 - protein, 66 aa, Homo sapiens
  MAP TO AL022328.21; EXPRESSED IN ADULT LIVER, SIGNAL = 4.2; EXPRESSED IN FETAL LIVER, SIGNAL = 5.2; EXPRESSED IN BRAIN, SIGNAL = 2.4; EXPRESSED IN PLACENTA, SIGNAL = 4.1; EXPRESSED IN BONE MARROW, SIGNAL = 5.1; EXPRESSED IN HEART, SIGNAL = 2.8; EXPRESSED IN LUNG, SIGNAL =   4; EXPRESSED IN HELA, SIGNAL = 3.2; SWISSPROT HIT: Q03052, EVALUE 4.40e-01
GGLGPGETRALHQAGHSQGSWLRPRPSLGACRCERLPGAVWPPGLCCPSVGIISFTRGHPRGASRP

SEQ ID NO: 38832 - protein, 29 aa, Homo sapiens
  MAP TO AL031587.3; EXPRESSED IN BRAIN, SIGNAL = 4.1; EXPRESSED IN HELA, SIGNAL = 3.7; EXPRESSED IN PLACENTA, SIGNAL = 2.9; EXPRESSED IN BONE MARROW, SIGNAL = 2.9; EXPRESSED IN HEART, SIGNAL = 2.6; EXPRESSED IN LUNG, SIGNAL = 3.4; EXPRESSED IN ADULT LIVER, SIGNAL = 2.5; EXPRESSED IN FETAL LIVER, SIGNAL = 2.8; SWISSPROT HIT: O88828, EVALUE 2.00e-10
PQANQKRITTPYMTKYERARVLGTRALQI

SEQ ID NO: 38833 - protein, 26 aa, Homo sapiens
  MAP TO AL021707.2; EXPRESSED IN HEART, SIGNAL = 1.3
MPFFGNTFSPKKTPPRKSASLSNLHS

SEQ ID NO: 38834 - protein, 25 aa, Homo sapiens
  MAP TO AC004624.6; EXPRESSED IN LUNG, SIGNAL = 1.6; EXPRESSED IN FETAL LIVER, SIGNAL = 1.5; EXPRESSED IN PLACENTA, SIGNAL = 1.9; EXPRESSED IN BRAIN, SIGNAL = 1.9; EXPRESSED IN HELA, SIGNAL = 1.6; EXPRESSED IN BONE MARROW, SIGNAL = 1.8; EXPRESSED IN HEART, SIGNAL = 1.4
CQALCQARKSNRRQMWSPPSRGAAG

SEQ ID NO: 38835 - protein, 50 aa, Homo sapiens
  MAP TO AL031588.1; EXPRESSED IN FETAL LIVER, SIGNAL = 2.8; EXPRESSED IN ADULT LIVER, SIGNAL = 1.9; EXPRESSED IN BRAIN, SIGNAL = 2.9; EXPRESSED IN HELA, SIGNAL = 3.1; EXPRESSED IN PLACENTA, SIGNAL = 3.1; EXPRESSED IN BONE MARROW, SIGNAL = 2.4; EXPRESSED IN HEART, SIGNAL =   2; EXPRESSED IN LUNG, SIGNAL = 2.7; SWISSPROT HIT: Q46378, EVALUE 4.70e+00
LFSGESVVSWSDLNIIISVPWYLGLMFRTRKEDSVLMEATSGGPTSFRLQ

SEQ ID NO: 38836 - protein, 43 aa, Homo sapiens
  MAP TO AL023553.5; EXPRESSED IN LUNG, SIGNAL = 2.1; EXPRESSED IN HEART, SIGNAL = 3.7; EXPRESSED IN BONE MARROW, SIGNAL = 2.9; EXPRESSED IN ADULT LIVER, SIGNAL = 2.7; EXPRESSED IN FETAL LIVER, SIGNAL = 2.2; EXPRESSED IN BRAIN, SIGNAL = 3.3; EXPRESSED IN PLACENTA, SIGNAL = 3.9; EXPRESSED IN HELA, SIGNAL = 1.7; SWISSPROT HIT: O07887, EVALUE 6.30e+00
LRPRGAEGNWMTYPSALMLFLLCFETDFHYVIIRAHFLGEKLK

SEQ ID NO: 38837 - protein, 39 aa, Homo sapiens
  MAP TO AL022327.17; EXPRESSED IN HEART, SIGNAL = 2.6; EXPRESSED IN LUNG, SIGNAL = 2.4; EXPRESSED IN BONE MARROW, SIGNAL = 4.4; EXPRESSED IN ADULT LIVER, SIGNAL = 3.1; EXPRESSED IN FETAL LIVER, SIGNAL = 4.8; EXPRESSED IN BRAIN, SIGNAL = 2.8; EXPRESSED IN PLACENTA, SIGNAL = 3.9; EXPRESSED IN HELA, SIGNAL = 2.9; SWISSPROT HIT: Q9X4D0, EVALUE 8.30e+00
SAGPPRPARRALHTHTFNFPVSQEAGQWDRGTGGRSQRP

SEQ ID NO: 38838 - protein, 40 aa, Homo sapiens
  MAP TO AL022329.9; EXPRESSED IN ADULT LIVER, SIGNAL = 2.6; EXPRESSED IN PLACENTA, SIGNAL = 3.6; EXPRESSED IN BONE MARROW, SIGNAL = 1.6; EXPRESSED IN FETAL LIVER, SIGNAL = 2.3; EXPRESSED IN BRAIN, SIGNAL = 1.9; EXPRESSED IN HELA, SIGNAL = 2.5; EXPRESSED IN HEART, SIGNAL = 2.1; EXPRESSED IN LUNG, SIGNAL = 2.5
CGCPKRCCLIQCTSSWRLSVPLGLLDSNKDNGGLGCCIHC

SEQ ID NO: 38839 - protein, 30 aa, Homo sapiens
  MAP TO AC007286.18; EXPRESSED IN PLACENTA, SIGNAL = 3.2; EXPRESSED IN HELA, SIGNAL = 2.2; EXPRESSED IN BRAIN, SIGNAL = 1.9; EXPRESSED IN BONE MARROW, SIGNAL = 2.2; EXPRESSED IN LUNG, SIGNAL = 3.1; EXPRESSED IN HEART, SIGNAL = 1.9; EXPRESSED IN FETAL LIVER, SIGNAL = 3.9; EXPRESSED IN ADULT LIVER, SIGNAL = 4.4
SLAHEVMPVAPLRNSIKYSNTAVKRSDLIP

SEQ ID NO: 38840 - protein, 20 aa, Homo sapiens
  MAP TO AP000189.1; EXPRESSED IN ADULT LIVER, SIGNAL = 3.3; EXPRESSED IN BRAIN, SIGNAL = 3.9; EXPRESSED IN PLACENTA, SIGNAL = 2.4; EXPRESSED IN HELA, SIGNAL = 3.3; EXPRESSED IN LUNG, SIGNAL = 4.2; EXPRESSED IN HEART, SIGNAL = 2.7; EXPRESSED IN BONE MARROW, SIGNAL = 4.6; EXPRESSED IN FETAL LIVER, SIGNAL = 3.5
KDAANLAGGRCPEPKNGSGL

SEQ ID NO: 38841 - protein, 28 aa, Homo sapiens
  MAP TO AC006548.19; EXPRESSED IN BONE MARROW, SIGNAL = 6.8; EXPRESSED IN LUNG, SIGNAL = 3.1; EXPRESSED IN HEART, SIGNAL = 3.9; EXPRESSED IN FETAL LIVER, SIGNAL = 5.3; EXPRESSED IN ADULT LIVER, SIGNAL = 3.8; EXPRESSED IN PLACENTA, SIGNAL = 4.8; EXPRESSED IN BRAIN, SIGNAL = 6.5; EXPRESSED IN HELA, SIGNAL = 3.6
SSGKYTQHGGGNASRPAESMHEGVCSFL

SEQ ID NO: 38842 - protein, 26 aa, Homo sapiens
  MAP TO AP000346.1; EXPRESSED IN PLACENTA, SIGNAL = 3.3; EXPRESSED IN BRAIN, SIGNAL =   2; EXPRESSED IN HELA, SIGNAL = 2.3; EXPRESSED IN BONE MARROW, SIGNAL = 1.6; EXPRESSED IN LUNG, SIGNAL = 2.4; EXPRESSED IN HEART, SIGNAL = 1.7; EXPRESSED IN FETAL LIVER, SIGNAL = 3.1; EXPRESSED IN ADULT LIVER, SIGNAL =   3; SWISSPROT HIT: P10263, EVALUE 4.40e-01
VDRVVHCMQSLMKPENRAILRHGGSW

SEQ ID NO: 38843 - protein, 37 aa, Homo sapiens
  MAP TO AC008151.1; EXPRESSED IN HELA, SIGNAL = 1.2; EXPRESSED IN PLACENTA, SIGNAL = 1.6; EXPRESSED IN BRAIN, SIGNAL = 1.5; EXPRESSED IN LUNG, SIGNAL = 1.3; EXPRESSED IN BONE MARROW, SIGNAL =   3; EXPRESSED IN HEART, SIGNAL = 2.3; EXPRESSED IN FETAL LIVER, SIGNAL = 1.3; EXPRESSED IN ADULT LIVER, SIGNAL = 1.6; SWISSPROT HIT: P56539, EVALUE 7.00e-16
MAEEHTDLEAQIVKDIHCKEIDLVNRDPKNINEDIVK

SEQ ID NO: 38844 - protein, 23 aa, Homo sapiens
  MAP TO AC008151.1; EXPRESSED IN HELA, SIGNAL = 1.2; EXPRESSED IN PLACENTA, SIGNAL = 1.6; EXPRESSED IN BRAIN, SIGNAL = 1.5; EXPRESSED IN LUNG, SIGNAL = 1.3; EXPRESSED IN BONE MARROW, SIGNAL =   3; EXPRESSED IN HEART, SIGNAL = 2.3; EXPRESSED IN FETAL LIVER, SIGNAL = 1.3; EXPRESSED IN ADULT LIVER, SIGNAL = 1.6
WQKSTQISRPRSSRISTARRLTW

SEQ ID NO: 38845 - protein, 63 aa, Homo sapiens
  MAP TO AB016897.1; EXPRESSED IN FETAL LIVER, SIGNAL = 1.5; EXPRESSED IN ADULT LIVER, SIGNAL = 1.6; EXPRESSED IN PLACENTA, SIGNAL = 1.8; EXPRESSED IN BRAIN, SIGNAL = 2.5; EXPRESSED IN HELA, SIGNAL = 1.3; EXPRESSED IN BONE MARROW, SIGNAL = 1.6; EXPRESSED IN LUNG, SIGNAL = 2.5; EXPRESSED IN HEART, SIGNAL = 1.9; SWISSPROT HIT: P36011, EVALUE 4.50e+00
RQELRLLRTRADSLPVTRTPSTPNTRTQWACNHNSPPGIQLHKPLKSSLLELVGVGCCVLCPR

SEQ ID NO: 38846 - protein, 53 aa, Homo sapiens
  MAP TO AL031588.1; EXPRESSED IN LUNG, SIGNAL = 6.4; EXPRESSED IN HEART, SIGNAL = 4.9; EXPRESSED IN FETAL LIVER, SIGNAL = 5.2; EXPRESSED IN BRAIN, SIGNAL = 5.9; EXPRESSED IN HELA, SIGNAL = 5.5; EXPRESSED IN BONE MARROW, SIGNAL = 7.2; EXPRESSED IN ADULT LIVER, SIGNAL = 5.4; EXPRESSED IN PLACENTA, SIGNAL = 3.8
MGTGLILPSRSSLLRTAFLLLLLISATWLLGLLAVNRDALSFHYLFAIFSGLQ

SEQ ID NO: 38847 - protein, 47 aa, Homo sapiens
  MAP TO AC006548.19; EXPRESSED IN ADULT LIVER, SIGNAL = 1.6; EXPRESSED IN PLACENTA, SIGNAL = 3.2; EXPRESSED IN BRAIN, SIGNAL = 2.5; EXPRESSED IN HELA, SIGNAL =   3; EXPRESSED IN BONE MARROW, SIGNAL = 2.1; EXPRESSED IN HEART, SIGNAL =   2; EXPRESSED IN LUNG, SIGNAL = 2.2; EXPRESSED IN FETAL LIVER, SIGNAL = 2.9; SWISSPROT HIT: P43053, EVALUE 1.20e+00; EST_HUMAN HIT: BE939176.1, EVALUE 8.00e-11
PSIGSVTSGKKVDYVQVDLEKTQALQKTMHEQMCLRQSSEPPRGAKL

SEQ ID NO: 38848 - protein, 49 aa, Homo sapiens
  MAP TO AL049758.11; EXPRESSED IN PLACENTA, SIGNAL = 2.1; EXPRESSED IN HELA, SIGNAL = 1.3; EXPRESSED IN LUNG, SIGNAL = 1.7; EXPRESSED IN HEART, SIGNAL =   2; EXPRESSED IN BONE MARROW, SIGNAL = 1.8; EXPRESSED IN ADULT LIVER, SIGNAL = 1.8; EXPRESSED IN FETAL LIVER, SIGNAL = 1.6; EXPRESSED IN BRAIN, SIGNAL = 1.4; SWISSPROT HIT: Q61286, EVALUE 2.10e+00; EST_HUMAN HIT: BE970436.1, EVALUE 1.50e-01
VAKSERNVALLEGRGQLPFVPAQCQPQQVPWSLPSVSWFHRQSQNTPPL

SEQ ID NO: 38849 - protein, 40 aa, Homo sapiens
  MAP TO AP000111.1; EXPRESSED IN BRAIN, SIGNAL =   5; EXPRESSED IN HELA, SIGNAL = 4.2; EXPRESSED IN FETAL LIVER, SIGNAL = 2.4; EXPRESSED IN ADULT LIVER, SIGNAL = 3.5; EXPRESSED IN PLACENTA, SIGNAL =   3; EXPRESSED IN BONE MARROW, SIGNAL = 9.3; EXPRESSED IN HEART, SIGNAL = 4.1; EXPRESSED IN LUNG, SIGNAL = 4.6; SWISSPROT HIT: Q08334, EVALUE 3.00e-18; EST_HUMAN HIT: AA307672.1, EVALUE 4.00e-17
LGMVPPPENVRMNSVNFKNILQWESPAFAKGNLTFTAQYL

SEQ ID NO: 38850 - protein, 26 aa, Homo sapiens
  MAP TO AC009266.1; EXPRESSED IN FETAL LIVER, SIGNAL = 7.4; EXPRESSED IN HELA, SIGNAL = 5.2; EXPRESSED IN BRAIN, SIGNAL = 4.3; EXPRESSED IN PLACENTA, SIGNAL = 9.7; EXPRESSED IN LUNG, SIGNAL = 4.7; EXPRESSED IN BONE MARROW, SIGNAL = 3.9; EXPRESSED IN HEART, SIGNAL = 3.4; EXPRESSED IN ADULT LIVER, SIGNAL =  11; EST_HUMAN HIT: T52901.1, EVALUE 3.00e-05
IGDYYSKRVTQEWKTKHCMFSLLCGS

SEQ ID NO: 38851 - protein, 63 aa, Homo sapiens
  MAP TO AB016897.1; EXPRESSED IN BRAIN, SIGNAL = 2.8; EXPRESSED IN PLACENTA, SIGNAL = 1.7; EXPRESSED IN BONE MARROW, SIGNAL = 4.3; EXPRESSED IN HEART, SIGNAL = 2.2; EXPRESSED IN FETAL LIVER, SIGNAL =   3; EXPRESSED IN ADULT LIVER, SIGNAL = 2.9; EXPRESSED IN HELA, SIGNAL = 2.6; EXPRESSED IN LUNG, SIGNAL = 3.5; EST_HUMAN HIT: AI608773.1, EVALUE 2.00e+00
ATRGFHPVPVPASFLPLEGLSCASVCAFVFAFHTLAPSCLRPQLKATFLKRLSLSILSLSQHL

SEQ ID NO: 38852 - protein, 41 aa, Homo sapiens
  MAP TO AC008151.1; EXPRESSED IN HEART, SIGNAL = 2.5; EXPRESSED IN FETAL LIVER, SIGNAL = 4.4; EXPRESSED IN ADULT LIVER, SIGNAL = 6.5; EXPRESSED IN HELA, SIGNAL = 2.9; EXPRESSED IN PLACENTA, SIGNAL = 4.7; EXPRESSED IN BRAIN, SIGNAL = 4.2; EXPRESSED IN LUNG, SIGNAL = 2.5; EXPRESSED IN BONE MARROW, SIGNAL = 6.5; EST_HUMAN HIT: AV655125.1, EVALUE 4.00e-07
MVESSLRPHLKPSRCQHHDSCTDHRPMGQLNLLSLSITQPQ

SEQ ID NO: 38853 - protein, 51 aa, Homo sapiens
  MAP TO AL022318.2; EXPRESSED IN LUNG, SIGNAL = 4.6; EXPRESSED IN BONE MARROW, SIGNAL = 4.6; EXPRESSED IN HEART, SIGNAL = 3.6; EXPRESSED IN ADULT LIVER, SIGNAL = 3.7; EXPRESSED IN FETAL LIVER, SIGNAL = 3.4; EXPRESSED IN HELA, SIGNAL = 3.9; EXPRESSED IN PLACENTA, SIGNAL = 3.6; EXPRESSED IN BRAIN, SIGNAL = 4.1; EST_HUMAN HIT: BF237537.1, EVALUE 2.00e-15
YLMDPDTFTFNFNNDPLVLRRRQTYLCYEVERLDNGTWVLMDQHMGFLCNE

SEQ ID NO: 38854 - protein, 38 aa, Homo sapiens
  MAP TO AL022318.2; EXPRESSED IN HELA, SIGNAL = 1.6; EXPRESSED IN BRAIN, SIGNAL = 2.4; EXPRESSED IN LUNG, SIGNAL = 1.4; EXPRESSED IN BONE MARROW, SIGNAL = 3.5; EXPRESSED IN HEART, SIGNAL =   2; EXPRESSED IN FETAL LIVER, SIGNAL = 1.4
PPEDSPGWALLPSVLPPCLPSWLHPLTHTPHAPSTLVP

SEQ ID NO: 38855 - protein, 24 aa, Homo sapiens
  MAP TO AP000350.1; EXPRESSED IN PLACENTA, SIGNAL = 2.4; EXPRESSED IN HELA, SIGNAL = 1.3; EXPRESSED IN LUNG, SIGNAL = 1.6; EXPRESSED IN HEART, SIGNAL = 1.3; EXPRESSED IN ADULT LIVER, SIGNAL =   2; EXPRESSED IN FETAL LIVER, SIGNAL = 1.4; SWISSPROT HIT: Q04652, EVALUE 5.10e+00; EST_HUMAN HIT: BE394661.1, EVALUE 2.00e-03
STVGVAVLSGKLNAVGGGDASSCL

SEQ ID NO: 38856 - protein, 30 aa, Homo sapiens
  MAP TO AL079295.1; EXPRESSED IN LUNG, SIGNAL = 1.4; EXPRESSED IN FETAL LIVER, SIGNAL = 1.6; EXPRESSED IN HELA, SIGNAL = 1.4; EXPRESSED IN HEART, SIGNAL = 1.3
RAFLPKHACHQASGEGCSQARSHYKPANLL

SEQ ID NO: 38857 - protein, 35 aa, Homo sapiens
  MAP TO AC008151.1; EXPRESSED IN ADULT LIVER, SIGNAL = 4.5; EXPRESSED IN BRAIN, SIGNAL = 3.4; EXPRESSED IN PLACENTA, SIGNAL = 4.2; EXPRESSED IN BONE MARROW, SIGNAL = 5.8; EXPRESSED IN HEART, SIGNAL = 2.3; EXPRESSED IN LUNG, SIGNAL = 4.9; EXPRESSED IN FETAL LIVER, SIGNAL = 4.7; EXPRESSED IN HELA, SIGNAL = 3.4
PWVTWATVSIPCSVSPSPPTGRGPESSDSKCPRNI

SEQ ID NO: 38858 - protein, 53 aa, Homo sapiens
  MAP TO AL023553.5; EXPRESSED IN BRAIN, SIGNAL = 3.2; EXPRESSED IN HELA, SIGNAL = 4.2; EXPRESSED IN BONE MARROW, SIGNAL = 2.3; EXPRESSED IN ADULT LIVER, SIGNAL = 2.8; EXPRESSED IN FETAL LIVER, SIGNAL =   4; EXPRESSED IN PLACENTA, SIGNAL = 3.8; EXPRESSED IN HEART, SIGNAL = 9.8; EXPRESSED IN LUNG, SIGNAL = 4.1; SWISSPROT HIT: Q99798, EVALUE 5.00e-17; EST_HUMAN HIT: BE384542.1, EVALUE 6.00e-16
IILENYAYPGVLLIGTDSHTPNGGGLGGICIGVGGADAVDVMAGIPWELKCPK

SEQ ID NO: 38859 - protein, 25 aa, Homo sapiens
  MAP TO AL008723.8; EXPRESSED IN HEART, SIGNAL = 1.7; EXPRESSED IN ADULT LIVER, SIGNAL = 2.7; EXPRESSED IN HELA, SIGNAL = 2.6; EXPRESSED IN PLACENTA, SIGNAL = 2.6; EXPRESSED IN BONE MARROW, SIGNAL =   3; EXPRESSED IN LUNG, SIGNAL = 1.5; EXPRESSED IN FETAL LIVER, SIGNAL = 2.9; EXPRESSED IN BRAIN, SIGNAL = 1.9; EST_HUMAN HIT: AL118917.1, EVALUE 1.80e-01
LRRMTSGPISSWERWILKSRNWSPS

SEQ ID NO: 38860 - protein, 50 aa, Homo sapiens
  MAP TO AL022328.21; EXPRESSED IN BONE MARROW, SIGNAL = 2.4; EXPRESSED IN HEART, SIGNAL = 1.4; EXPRESSED IN FETAL LIVER, SIGNAL = 1.7; EXPRESSED IN HELA, SIGNAL = 1.6; EXPRESSED IN BRAIN, SIGNAL = 2.7; EXPRESSED IN PLACENTA, SIGNAL = 1.2
RGGEPLVQAVGGTRTPPWNIGNAKWTGEGRGRRVGTEAPQKAVFEKWLCH

SEQ ID NO: 38861 - protein, 56 aa, Homo sapiens
  MAP TO AL031588.1; EXPRESSED IN BRAIN, SIGNAL = 6.8; EXPRESSED IN HEART, SIGNAL =   4; EXPRESSED IN ADULT LIVER, SIGNAL = 5.4; EXPRESSED IN HELA, SIGNAL = 4.8; EXPRESSED IN PLACENTA, SIGNAL = 7.4; EXPRESSED IN BONE MARROW, SIGNAL = 6.3; EXPRESSED IN LUNG, SIGNAL = 6.4; EXPRESSED IN FETAL LIVER, SIGNAL = 7.3
EVPPKAASGLRVLRHQLCAVAEPCLIAFAPLGSGLLLLPSVSWTPSRIRGSWAKVR

SEQ ID NO: 38862 - protein, 38 aa, Homo sapiens
  MAP TO AL035681.13; EXPRESSED IN FETAL LIVER, SIGNAL = 1.7; EXPRESSED IN BRAIN, SIGNAL =   3; EXPRESSED IN PLACENTA, SIGNAL = 1.8; EXPRESSED IN HELA, SIGNAL = 3.3; EXPRESSED IN HEART, SIGNAL = 1.9; EXPRESSED IN LUNG, SIGNAL =   2; EXPRESSED IN BONE MARROW, SIGNAL = 3.3; EXPRESSED IN ADULT LIVER, SIGNAL = 1.7; SWISSPROT HIT: P75822, EVALUE 6.40e+00; EST_HUMAN HIT: AA351643.1, EVALUE 2.00e-15
KRIPPTKTRPLRQGSKKPLLEDDPQGARKISSEPVPGE

SEQ ID NO: 38863 - protein, 25 aa, Homo sapiens
  MAP TO AL035681.13; EXPRESSED IN FETAL LIVER, SIGNAL = 1.7; EXPRESSED IN BRAIN, SIGNAL =   3; EXPRESSED IN PLACENTA, SIGNAL = 1.8; EXPRESSED IN HELA, SIGNAL = 3.3; EXPRESSED IN HEART, SIGNAL = 1.9; EXPRESSED IN LUNG, SIGNAL =   2; EXPRESSED IN BONE MARROW, SIGNAL = 3.3; EXPRESSED IN ADULT LIVER, SIGNAL = 1.7; EST_HUMAN HIT: BF346206.1, EVALUE 5.00e-06
GRSRRSLFLARVRATGLGQGRTSLL

SEQ ID NO: 38864 - protein, 47 aa, Homo sapiens
  MAP TO Z83844.5; EXPRESSED IN BRAIN, SIGNAL =   4; EXPRESSED IN PLACENTA, SIGNAL = 3.9; EXPRESSED IN HELA, SIGNAL = 4.8; EXPRESSED IN LUNG, SIGNAL = 6.3; EXPRESSED IN HEART, SIGNAL = 4.1; EXPRESSED IN BONE MARROW, SIGNAL = 6.9; EXPRESSED IN ADULT LIVER, SIGNAL = 4.4; EXPRESSED IN FETAL LIVER, SIGNAL = 5.7; SWISSPROT HIT: P18127, EVALUE 4.70e+00; EST_HUMAN HIT: AV685234.1, EVALUE 1.00e+00
ALGGRGVGADQLVRVAQCWPMSWVSHCQPWEEGAWGQTGLSGLLSAG

SEQ ID NO: 38865 - protein, 30 aa, Homo sapiens
  MAP TO AP000353.1; EXPRESSED IN LUNG, SIGNAL = 3.4; EXPRESSED IN BONE MARROW, SIGNAL =   3; EXPRESSED IN HEART, SIGNAL = 2.4; EXPRESSED IN FETAL LIVER, SIGNAL = 2.9; EXPRESSED IN ADULT LIVER, SIGNAL = 2.5; EXPRESSED IN PLACENTA, SIGNAL = 2.4; EXPRESSED IN HELA, SIGNAL = 2.4; EXPRESSED IN BRAIN, SIGNAL = 3.5; EST_HUMAN HIT: BE740551.1, EVALUE 9.00e-07; SWISSPROT HIT: Q9Y6J0, EVALUE 7.00e-08
HLPVKVDEEAALEQAVKFCQVHLGAAAQRQ

SEQ ID NO: 38866 - protein, 27 aa, Homo sapiens
  MAP TO AC006548.19; EXPRESSED IN PLACENTA, SIGNAL = 4.9; EXPRESSED IN BRAIN, SIGNAL = 1.5; EXPRESSED IN HELA, SIGNAL = 2.9; EXPRESSED IN HEART, SIGNAL =   2; EXPRESSED IN BONE MARROW, SIGNAL = 4.6; EXPRESSED IN LUNG, SIGNAL = 3.2; EXPRESSED IN FETAL LIVER, SIGNAL = 3.4; EST_HUMAN HIT: AA078318.1, EVALUE 4.00e-05
ITLVHYINDIMLVGSCEQEIANTLDLL

SEQ ID NO: 38867 - protein, 20 aa, Homo sapiens
  MAP TO AC006548.19; EXPRESSED IN PLACENTA, SIGNAL = 4.9; EXPRESSED IN BRAIN, SIGNAL = 1.5; EXPRESSED IN HELA, SIGNAL = 2.9; EXPRESSED IN HEART, SIGNAL =   2; EXPRESSED IN BONE MARROW, SIGNAL = 4.6; EXPRESSED IN LUNG, SIGNAL = 3.2; EXPRESSED IN FETAL LIVER, SIGNAL = 3.4; EST_HUMAN HIT: AA078318.1, EVALUE 1.00e-03
ISHWSITLMTLCWLDPVSKK

SEQ ID NO: 38868 - protein, 56 aa, Homo sapiens
  MAP TO AP000127.1; EXPRESSED IN FETAL LIVER, SIGNAL = 1.9; EXPRESSED IN ADULT LIVER, SIGNAL = 1.9; EXPRESSED IN HELA, SIGNAL = 1.7; EXPRESSED IN PLACENTA, SIGNAL = 2.2; EXPRESSED IN BRAIN, SIGNAL = 2.1; EXPRESSED IN BONE MARROW, SIGNAL = 1.9; EXPRESSED IN LUNG, SIGNAL = 1.8; EXPRESSED IN HEART, SIGNAL = 1.4; SWISSPROT HIT: Q01470, EVALUE 3.10e-01; EST_HUMAN HIT: Z43646.1, EVALUE 1.60e+00
SSAAGHAGLLIRPGDPTGWLADSRDSSHWLADSRDAAHWLADTGDASQGLTSTRDK

SEQ ID NO: 38869 - protein, 49 aa, Homo sapiens
  MAP TO Z98884.11; EXPRESSED IN LUNG, SIGNAL = 7.5; EXPRESSED IN HEART, SIGNAL = 4.2; EXPRESSED IN BRAIN, SIGNAL = 5.2; EXPRESSED IN HELA, SIGNAL = 4.8; EXPRESSED IN BONE MARROW, SIGNAL = 4.8; EXPRESSED IN ADULT LIVER, SIGNAL = 4.9; EXPRESSED IN FETAL LIVER, SIGNAL = 5.8; EXPRESSED IN PLACENTA, SIGNAL = 2.3; SWISSPROT HIT: Q06598, EVALUE 4.70e+00; EST_HUMAN HIT: AW163688.1, EVALUE 1.00e-21
TPDRIKQENFVPMESSGLERTDPATISSTMSWLASYLADADCLPSAAQI

SEQ ID NO: 38870 - protein, 25 aa, Homo sapiens
  MAP TO AC007539.8; EXPRESSED IN LUNG, SIGNAL = 1.4; EXPRESSED IN BONE MARROW, SIGNAL = 2.4; EXPRESSED IN HEART, SIGNAL = 1.9; EXPRESSED IN ADULT LIVER, SIGNAL = 1.8; EXPRESSED IN FETAL LIVER, SIGNAL = 1.9; EXPRESSED IN PLACENTA, SIGNAL = 1.8; EXPRESSED IN HELA, SIGNAL = 1.7; EXPRESSED IN BRAIN, SIGNAL =   2
MNSTRMAMETITLKLLTHVAMSAWL

SEQ ID NO: 38871 - protein, 32 aa, Homo sapiens
  MAP TO Z98884.11; EXPRESSED IN PLACENTA, SIGNAL = 2.2; EXPRESSED IN BRAIN, SIGNAL = 1.6; EXPRESSED IN HELA, SIGNAL = 1.5; EXPRESSED IN HEART, SIGNAL = 1.8; EXPRESSED IN BONE MARROW, SIGNAL = 1.7; EXPRESSED IN LUNG, SIGNAL = 1.8; EXPRESSED IN FETAL LIVER, SIGNAL = 3.3; EXPRESSED IN ADULT LIVER, SIGNAL = 1.5; EST_HUMAN HIT: BE885442.1, EVALUE 1.50e+00
LQCVLKHRICVDDENTVHPGVWHSLQRSYVPY

SEQ ID NO: 38872 - protein, 68 aa, Homo sapiens
  MAP TO AL031587.3; EXPRESSED IN LUNG, SIGNAL = 1.5; EXPRESSED IN BONE MARROW, SIGNAL = 1.9; EXPRESSED IN HEART, SIGNAL = 1.7; EXPRESSED IN FETAL LIVER, SIGNAL = 1.4; EXPRESSED IN BRAIN, SIGNAL =   2; EXPRESSED IN PLACENTA, SIGNAL = 1.3; EXPRESSED IN HELA, SIGNAL = 1.4
GDSGSELDLRHWAEGLRPGTSSLLLEGLSLGSVETLRLKSWTAASSPLDRPLHIMDQSLRPREGAAAP

SEQ ID NO: 38873 - protein, 72 aa, Homo sapiens
  MAP TO Z82188.2; EXPRESSED IN HELA, SIGNAL = 1.3; EXPRESSED IN BRAIN, SIGNAL = 2.9; EXPRESSED IN LUNG, SIGNAL = 1.4; EXPRESSED IN HEART, SIGNAL = 1.8; EXPRESSED IN BONE MARROW, SIGNAL = 2.7; SWISSPROT HIT: P40087, EVALUE 2.20e-01; EST_HUMAN HIT: AV657071.1, EVALUE 7.10e-02
MRVPLSIRDFPDEKTSILPPEPGSVPQTHPDTKQNQAPTAPHLRSQEALPAGPTGHSLTDGLMRAAPPILEQ

SEQ ID NO: 38874 - protein, 22 aa, Homo sapiens
  MAP TO Z95114.19; EXPRESSED IN ADULT LIVER, SIGNAL = 1.8; EXPRESSED IN FETAL LIVER, SIGNAL = 1.5; EXPRESSED IN BRAIN, SIGNAL = 1.6; EXPRESSED IN PLACENTA, SIGNAL = 2.1; EXPRESSED IN BONE MARROW, SIGNAL = 1.6; EXPRESSED IN LUNG, SIGNAL = 1.5; EXPRESSED IN HEART, SIGNAL = 1.4
VVLSWHGLLQQQAGMPAVPRAG

SEQ ID NO: 38875 - protein, 41 aa, Homo sapiens
  MAP TO Z98884.11; EXPRESSED IN LUNG, SIGNAL = 1.6; EXPRESSED IN FETAL LIVER, SIGNAL = 1.5; EXPRESSED IN ADULT LIVER, SIGNAL =   2; EXPRESSED IN BRAIN, SIGNAL = 1.5; EXPRESSED IN HELA, SIGNAL = 1.4; EXPRESSED IN BONE MARROW, SIGNAL = 1.5; EXPRESSED IN HEART, SIGNAL = 1.7; SWISSPROT HIT: O70361, EVALUE 2.50e-01; EST_HUMAN HIT: BF357140.1, EVALUE 2.10e-01
YLKSYNIPALKRKCISCTNTTSSSSEEDKQNHKADDVQALQ

SEQ ID NO: 38876 - protein, 31 aa, Homo sapiens
  MAP TO AP000347.1; EXPRESSED IN FETAL LIVER, SIGNAL =   2; EXPRESSED IN PLACENTA, SIGNAL = 1.4; EXPRESSED IN BRAIN, SIGNAL = 2.3; EXPRESSED IN HELA, SIGNAL = 1.5; EXPRESSED IN HEART, SIGNAL = 1.4; EXPRESSED IN BONE MARROW, SIGNAL = 1.5; EXPRESSED IN LUNG, SIGNAL = 1.7; SWISSPROT HIT: Q02342, EVALUE 1.00e-03; EST_HUMAN HIT: BF531102.1, EVALUE 4.00e-11
SLNNFSSVHVIVSALCSNPIGQLHKTWAGVS

SEQ ID NO: 38877 - protein, 19 aa, Homo sapiens
  MAP TO AP000347.1; EXPRESSED IN FETAL LIVER, SIGNAL =   2; EXPRESSED IN PLACENTA, SIGNAL = 1.4; EXPRESSED IN BRAIN, SIGNAL = 2.3; EXPRESSED IN HELA, SIGNAL = 1.5; EXPRESSED IN HEART, SIGNAL = 1.4; EXPRESSED IN BONE MARROW, SIGNAL = 1.5; EXPRESSED IN LUNG, SIGNAL = 1.7; EST_HUMAN HIT: BF531102.1, EVALUE 3.00e-03
ASTTSPRCTSSSLLCAATQ

SEQ ID NO: 38878 - protein, 65 aa, Homo sapiens
  MAP TO AC007556.2; EXPRESSED IN PLACENTA, SIGNAL = 1.8; EXPRESSED IN HELA, SIGNAL = 1.3; EXPRESSED IN BRAIN, SIGNAL = 1.4; EXPRESSED IN HEART, SIGNAL = 5.1; EXPRESSED IN BONE MARROW, SIGNAL = 1.8; EXPRESSED IN FETAL LIVER, SIGNAL = 2.2; SWISSPROT HIT: P98164, EVALUE 1.00e-24; EST_HUMAN HIT: BE835644.1, EVALUE 3.00e-10
YEVPCELIIDSFCMTRYLYWADWDTHAKIERATLGGNFRVPIVNSSLVMPSGLTLDYEEDLLYWV

SEQ ID NO: 38879 - protein, 24 aa, Homo sapiens
  MAP TO AL022318.2; EXPRESSED IN ADULT LIVER, SIGNAL = 3.3; EXPRESSED IN PLACENTA, SIGNAL = 3.7; EXPRESSED IN HELA, SIGNAL = 1.9; EXPRESSED IN LUNG, SIGNAL = 2.4; EXPRESSED IN HEART, SIGNAL = 1.9; EXPRESSED IN BONE MARROW, SIGNAL = 2.3; EXPRESSED IN FETAL LIVER, SIGNAL = 3.2; EST_HUMAN HIT: BE160072.1, EVALUE 1.00e-03
TSASFRLFFRNFLTSLSLHRIEES

SEQ ID NO: 38880 - protein, 27 aa, Homo sapiens
  MAP TO Z86090.10; EXPRESSED IN FETAL LIVER, SIGNAL =  17; EXPRESSED IN PLACENTA, SIGNAL = 6.1; EXPRESSED IN HELA, SIGNAL =  18; EXPRESSED IN HEART, SIGNAL = 5.4; EXPRESSED IN ADULT LIVER, SIGNAL = 6.7; EXPRESSED IN BRAIN, SIGNAL = 2.7; EXPRESSED IN BONE MARROW, SIGNAL = 4.2; EXPRESSED IN LUNG, SIGNAL = 9.3; EST_HUMAN HIT: BE737243.1, EVALUE 3.00e-05
AFNFISDHQKKFRNFLNMMTCRHDQHW

SEQ ID NO: 38881 - protein, 36 aa, Homo sapiens
  MAP TO AC004624.6; EXPRESSED IN PLACENTA, SIGNAL = 1.3; EXPRESSED IN HELA, SIGNAL = 2.7; EXPRESSED IN BRAIN, SIGNAL =   3; EXPRESSED IN BONE MARROW, SIGNAL = 4.1; EXPRESSED IN HEART, SIGNAL = 2.9; EXPRESSED IN LUNG, SIGNAL = 4.4; EXPRESSED IN FETAL LIVER, SIGNAL = 2.8; EXPRESSED IN ADULT LIVER, SIGNAL = 2.2; EST_HUMAN HIT: W28578.1, EVALUE 2.00e-13
DLRFCQLTREYQALQRAYALLQEQVGGTLDAEREAR

SEQ ID NO: 38882 - protein, 25 aa, Homo sapiens
  MAP TO AL035681.13; EXPRESSED IN LUNG, SIGNAL = 1.6; EXPRESSED IN BONE MARROW, SIGNAL = 1.5; EXPRESSED IN HEART, SIGNAL = 1.5; EXPRESSED IN BRAIN, SIGNAL = 1.4; EXPRESSED IN PLACENTA, SIGNAL = 1.3; EXPRESSED IN HELA, SIGNAL = 1.3; EST_HUMAN HIT: BE886173.1, EVALUE 2.00e-06
KVEVLNSDAVLPSRVYWIASVIQTA

SEQ ID NO: 38883 - protein, 25 aa, Homo sapiens
  MAP TO AL035681.13; EXPRESSED IN LUNG, SIGNAL = 1.6; EXPRESSED IN BONE MARROW, SIGNAL = 1.5; EXPRESSED IN HEART, SIGNAL = 1.5; EXPRESSED IN BRAIN, SIGNAL = 1.4; EXPRESSED IN PLACENTA, SIGNAL = 1.3; EXPRESSED IN HELA, SIGNAL = 1.3; EST_HUMAN HIT: BE886173.1, EVALUE 2.00e-08; SWISSPROT HIT: Q9WV08, EVALUE 6.60e+00
RWRCSTVMLCSPAGCTGSPLSSRQQ

SEQ ID NO: 38884 - protein, 19 aa, Homo sapiens
  MAP TO AC004624.6; EXPRESSED IN LUNG, SIGNAL = 1.9; EXPRESSED IN HEART, SIGNAL =   2; EXPRESSED IN FETAL LIVER, SIGNAL = 2.3; EXPRESSED IN ADULT LIVER, SIGNAL = 2.5; EXPRESSED IN BRAIN, SIGNAL = 1.9; EXPRESSED IN PLACENTA, SIGNAL = 2.1; EXPRESSED IN HELA, SIGNAL = 1.7; EXPRESSED IN BONE MARROW, SIGNAL = 2.1
ATWKRSSTTGSKPLTRLTW

SEQ ID NO: 38885 - protein, 53 aa, Homo sapiens
  MAP TO AP000041.1; EXPRESSED IN PLACENTA, SIGNAL = 4.4; EXPRESSED IN HELA, SIGNAL = 2.7; EXPRESSED IN LUNG, SIGNAL = 3.7; EXPRESSED IN BONE MARROW, SIGNAL = 1.7; EXPRESSED IN HEART, SIGNAL = 2.7; EXPRESSED IN FETAL LIVER, SIGNAL = 2.5; EXPRESSED IN ADULT LIVER, SIGNAL = 2.5; EXPRESSED IN BRAIN, SIGNAL = 1.9; EST_HUMAN HIT: BE814918.1, EVALUE 4.90e+00
VVMVVMVVVVVVVVVVLVLFHLLASGGFTHMLPLQSWFPTAMGRRYSLYMSLY

SEQ ID NO: 38886 - protein, 31 aa, Homo sapiens
  MAP TO AL031587.3; EXPRESSED IN LUNG, SIGNAL = 5.7; EXPRESSED IN HEART, SIGNAL = 4.3; EXPRESSED IN BONE MARROW, SIGNAL = 9.3; EXPRESSED IN ADULT LIVER, SIGNAL = 3.2; EXPRESSED IN FETAL LIVER, SIGNAL = 4.9; EXPRESSED IN BRAIN, SIGNAL = 6.9; EXPRESSED IN PLACENTA, SIGNAL = 3.5; EXPRESSED IN HELA, SIGNAL = 4.5; EST_HUMAN HIT: BE937981.1, EVALUE 4.00e-10
QPAASEAFVKFADAHRSIEKFGIRLLKTIKP

SEQ ID NO: 38887 - protein, 54 aa, Homo sapiens
  MAP TO AC007106.6; EXPRESSED IN PLACENTA, SIGNAL = 4.3; EXPRESSED IN BRAIN, SIGNAL = 2.9; EXPRESSED IN HELA, SIGNAL =  13; EXPRESSED IN HEART, SIGNAL = 5.1; EXPRESSED IN BONE MARROW, SIGNAL =   7; EXPRESSED IN LUNG, SIGNAL = 8.8; EXPRESSED IN ADULT LIVER, SIGNAL = 7.2; EXPRESSED IN FETAL LIVER, SIGNAL = 5.8; SWISSPROT HIT: P38786, EVALUE 8.00e+00; EST_HUMAN HIT: AI631809.1, EVALUE 9.00e-21
MDFSEIWCRDSDRGTSLGRSISCPPALCSMRKIHLRSLVLRSTRPRNISPILNR

SEQ ID NO: 38888 - protein, 189 aa, Homo sapiens
  MAP TO AP000346.1; EXPRESSED IN PLACENTA, SIGNAL = 3.3; EXPRESSED IN BRAIN, SIGNAL =   2; EXPRESSED IN HELA, SIGNAL = 2.3; EXPRESSED IN BONE MARROW, SIGNAL = 1.6; EXPRESSED IN LUNG, SIGNAL = 2.4; EXPRESSED IN HEART, SIGNAL = 1.7; EXPRESSED IN FETAL LIVER, SIGNAL = 3.1; EXPRESSED IN ADULT LIVER, SIGNAL =   3; SWISSPROT HIT: P10264, EVALUE 8.00e-63; EST_HUMAN HIT: AW896117.1, EVALUE 1.00e-49
MASNSPATQDAALYPQPPTVRLNPTASRSGQGGALHAVIDEARKQGDLEAWRFLVILQLVQAGEETQVGAPARAETRCEPFTMKMLKDIKEGVKQYGSNSPYIRTLLDSIAHGNRLTPYDWEILAKSSLSSSQYLQFKTWWIDGVQEQVRKNQATKPTVNIDADQLLGTGPNWSTINQQSVMQNEAIEQ

SEQ ID NO: 38889 - protein, 66 aa, Homo sapiens
  MAP TO AC004676.1; EXPRESSED IN ADULT LIVER, SIGNAL = 4.8; EXPRESSED IN PLACENTA, SIGNAL = 5.3; EXPRESSED IN LUNG, SIGNAL = 5.4; EXPRESSED IN HEART, SIGNAL = 4.8; EXPRESSED IN BRAIN, SIGNAL = 4.6; EXPRESSED IN HELA, SIGNAL = 4.8; EXPRESSED IN FETAL LIVER, SIGNAL = 4.6; EXPRESSED IN BONE MARROW, SIGNAL = 4.6; SWISSPROT HIT: Q19691, EVALUE 1.50e+00; EST_HUMAN HIT: AW979202.1, EVALUE 3.30e+00
MSTSCPPKILGNRSFAMLITEKALAPFNPFVSLQPLTKHLLSGRHSCRLLKAMAPDLWEAPLKEVK

SEQ ID NO: 38890 - protein, 129 aa, Homo sapiens
  MAP TO AC004590.1; EXPRESSED IN HEART, SIGNAL = 4.2; EXPRESSED IN BRAIN, SIGNAL = 4.4; EXPRESSED IN PLACENTA, SIGNAL = 4.2; EXPRESSED IN LUNG, SIGNAL = 4.4; EXPRESSED IN FETAL LIVER, SIGNAL =   4; EXPRESSED IN BONE MARROW, SIGNAL = 3.9; EXPRESSED IN ADULT LIVER, SIGNAL = 4.5; EXPRESSED IN HELA, SIGNAL = 4.4; SWISSPROT HIT: O54898, EVALUE 6.00e-44
SWTSRRSSRNSLGRAPSLKRRSPSGERRSLLSGEGQESQDEEESSEEERASPAGSDHRHRGSLEREAKSSFDLPDTLQVPGLHRTASGRGSASEHQDCNGKSASGRLARALRPDDPPLDGDDADDEGNL

SEQ ID NO: 38891 - protein, 72 aa, Homo sapiens
  MAP TO AC005611.1; EXPRESSED IN PLACENTA, SIGNAL = 5.3; EXPRESSED IN HELA, SIGNAL = 5.3; EXPRESSED IN HEART, SIGNAL = 5.1; EXPRESSED IN ADULT LIVER, SIGNAL = 5.2; EXPRESSED IN BONE MARROW, SIGNAL = 4.8; EXPRESSED IN BRAIN, SIGNAL = 5.8; EXPRESSED IN FETAL LIVER, SIGNAL = 4.9; EXPRESSED IN LUNG, SIGNAL = 5.1; EST_HUMAN HIT: BF674941.1, EVALUE 5.00e-14; SWISSPROT HIT: P08547, EVALUE 4.00e-14
EDITILNVYAPNNATSKCVSQKLAELQGEINESTIVIRDFNIPLLVIGRSSKQKIIKDIVERNSTINQVNLN

SEQ ID NO: 38892 - protein, 26 aa, Homo sapiens
  MAP TO AC002302.1; EXPRESSED IN PLACENTA, SIGNAL =   2; EXPRESSED IN LUNG, SIGNAL = 2.8; EXPRESSED IN FETAL LIVER, SIGNAL = 2.1; EXPRESSED IN BRAIN, SIGNAL = 2.2; EXPRESSED IN BONE MARROW, SIGNAL = 2.3; EXPRESSED IN ADULT LIVER, SIGNAL = 2.2; EXPRESSED IN HELA, SIGNAL = 2.4; EXPRESSED IN HEART, SIGNAL = 2.1
KLTEVDDLPRIAQKAGSRADCHGNHF

SEQ ID NO: 38893 - protein, 70 aa, Homo sapiens
  MAP TO AC004828.2; EXPRESSED IN BRAIN, SIGNAL = 1.8; EXPRESSED IN ADULT LIVER, SIGNAL = 1.7; EXPRESSED IN HELA, SIGNAL = 1.9; EXPRESSED IN HEART, SIGNAL = 1.5; EXPRESSED IN BONE MARROW, SIGNAL = 1.6; EXPRESSED IN PLACENTA, SIGNAL = 1.5; EXPRESSED IN LUNG, SIGNAL = 2.6; EXPRESSED IN FETAL LIVER, SIGNAL = 1.5; EST_HUMAN HIT: BE157898.1, EVALUE 1.10e+00
MGGGGEGQRRLQQSTLPFQQQHQARDEPWALLKTKLGGDRASDSRRTKVKRSLLLQVVQTQLPLALQTLC

SEQ ID NO: 38894 - protein, 31 aa, Homo sapiens
  MAP TO AC004828.2; EXPRESSED IN BRAIN, SIGNAL = 1.8; EXPRESSED IN ADULT LIVER, SIGNAL = 1.7; EXPRESSED IN HELA, SIGNAL = 1.9; EXPRESSED IN HEART, SIGNAL = 1.5; EXPRESSED IN BONE MARROW, SIGNAL = 1.6; EXPRESSED IN PLACENTA, SIGNAL = 1.5; EXPRESSED IN LUNG, SIGNAL = 2.6; EXPRESSED IN FETAL LIVER, SIGNAL = 1.5
WAGAGKVSAGSSSPLCPFSSSTRRGMSHGLC

SEQ ID NO: 38895 - protein, 33 aa, Homo sapiens
  MAP TO AC005371.1; EXPRESSED IN LUNG, SIGNAL = 5.1; EXPRESSED IN HELA, SIGNAL = 4.1; EXPRESSED IN BONE MARROW, SIGNAL = 4.4; EXPRESSED IN ADULT LIVER, SIGNAL = 4.9; EXPRESSED IN PLACENTA, SIGNAL = 4.8; EXPRESSED IN HEART, SIGNAL = 4.1; EXPRESSED IN FETAL LIVER, SIGNAL = 4.7; EXPRESSED IN BRAIN, SIGNAL = 5.1
PSVTIFLQKLLTVQSYVLDQCTWMLPFTSSLDT

SEQ ID NO: 38896 - protein, 44 aa, Homo sapiens
  MAP TO AC005588.1; EXPRESSED IN PLACENTA, SIGNAL = 3.9; EXPRESSED IN LUNG, SIGNAL = 4.7; EXPRESSED IN HELA, SIGNAL = 4.6; EXPRESSED IN FETAL LIVER, SIGNAL = 4.6; EXPRESSED IN BONE MARROW, SIGNAL = 4.1; EXPRESSED IN ADULT LIVER, SIGNAL = 5.4; EXPRESSED IN HEART, SIGNAL = 3.5; EXPRESSED IN BRAIN, SIGNAL = 4.8
LLSLAELGTEIVQQSKQLTALHQSLSDDTALDFKCQQTDPEMRL

SEQ ID NO: 38897 - protein, 70 aa, Homo sapiens
  MAP TO AC005803.1; EXPRESSED IN LUNG, SIGNAL = 1.8; EXPRESSED IN ADULT LIVER, SIGNAL = 2.1; EXPRESSED IN PLACENTA, SIGNAL = 1.7; EXPRESSED IN HELA, SIGNAL = 1.8; EXPRESSED IN HEART, SIGNAL =   2; EXPRESSED IN FETAL LIVER, SIGNAL = 1.8; EXPRESSED IN BRAIN, SIGNAL =   2; EXPRESSED IN BONE MARROW, SIGNAL = 1.7; EST_HUMAN HIT: AI733735.1, EVALUE 1.00e-13; SWISSPROT HIT: Q09499, EVALUE 5.00e-14
KHHYRELPAEVRETLGSLPDDFVCYFTSRFPHLLAHTYRAMELCSHERLFQPYYFHEPPEPQPPVTPDAL

SEQ ID NO: 38898 - protein, 63 aa, Homo sapiens
  MAP TO AC005803.1; EXPRESSED IN LUNG, SIGNAL = 1.8; EXPRESSED IN ADULT LIVER, SIGNAL = 2.1; EXPRESSED IN PLACENTA, SIGNAL = 1.7; EXPRESSED IN HELA, SIGNAL = 1.8; EXPRESSED IN HEART, SIGNAL =   2; EXPRESSED IN FETAL LIVER, SIGNAL = 1.8; EXPRESSED IN BRAIN, SIGNAL =   2; EXPRESSED IN BONE MARROW, SIGNAL = 1.7; EST_HUMAN HIT: AW503972.1, EVALUE 4.60e-02; SWISSPROT HIT: P28465, EVALUE 1.50e+00
FLTLCRSTTTGSCLQRCGRRWGPSPTTSCATSHLASPTSSHTPTGPWSCAATRDSSSPTTSTS

SEQ ID NO: 38899 - protein, 63 aa, Homo sapiens
  MAP TO AC004070.1; EXPRESSED IN PLACENTA, SIGNAL = 1.1; EXPRESSED IN BRAIN, SIGNAL = 0.73; EXPRESSED IN ADULT LIVER, SIGNAL = 2.4; EXPRESSED IN HEART, SIGNAL = 1.6; EXPRESSED IN LUNG, SIGNAL = 1.2; EXPRESSED IN FETAL LIVER, SIGNAL = 1.9; EXPRESSED IN BONE MARROW, SIGNAL = 1.2; EST_HUMAN HIT: AW862836.1, EVALUE 5.00e-06; SWISSPROT HIT: P40034, EVALUE 5.90e+00
NCYSSPVVLKEWPQTTTTTAIAIIIIMPGNLLETSVLRPHSKSTELETLGMRPSRFCFNKLSR

SEQ ID NO: 38900 - protein, 39 aa, Homo sapiens
  MAP TO AC004927.2; EXPRESSED IN HEART, SIGNAL = 1.8; EXPRESSED IN BRAIN, SIGNAL = 1.8; EXPRESSED IN PLACENTA, SIGNAL = 1.8; EXPRESSED IN LUNG, SIGNAL = 1.9; EXPRESSED IN HELA, SIGNAL = 1.9; EXPRESSED IN FETAL LIVER, SIGNAL = 2.4; EXPRESSED IN BONE MARROW, SIGNAL =   2; EXPRESSED IN ADULT LIVER, SIGNAL = 2.4; SWISSPROT HIT: P25491, EVALUE 1.30e+00
GEVKAGNKQLLLKWCSGRGGGEGQVAIISGYQVPRDRVR

SEQ ID NO: 38901 - protein, 89 aa, Homo sapiens
  MAP TO AC006501.5; EXPRESSED IN BONE MARROW, SIGNAL = 2.1; EXPRESSED IN BRAIN, SIGNAL = 1.7; EXPRESSED IN ADULT LIVER, SIGNAL = 1.7; EXPRESSED IN PLACENTA, SIGNAL =   2; EXPRESSED IN LUNG, SIGNAL =   2; EXPRESSED IN HELA, SIGNAL =   2; EXPRESSED IN HEART, SIGNAL =   2; EXPRESSED IN FETAL LIVER, SIGNAL = 1.9; EST_HUMAN HIT: BF218744.1, EVALUE 2.30e+00; SWISSPROT HIT: Q14694, EVALUE 7.90e+00
EACLPNKRAECCGGLAASDLIKWKSPVFIPLHGIMQRPCLCVEPMRLCFDSFLLLVNQGEEEEGVVPCLEENGRAAADPGSGSIPRSSS

SEQ ID NO: 38902 - protein, 17 aa, Homo sapiens
  MAP TO AC006501.5; EXPRESSED IN BONE MARROW, SIGNAL = 2.1; EXPRESSED IN BRAIN, SIGNAL = 1.7; EXPRESSED IN ADULT LIVER, SIGNAL = 1.7; EXPRESSED IN PLACENTA, SIGNAL =   2; EXPRESSED IN LUNG, SIGNAL =   2; EXPRESSED IN HELA, SIGNAL =   2; EXPRESSED IN HEART, SIGNAL =   2; EXPRESSED IN FETAL LIVER, SIGNAL = 1.9
SRQGTTPSSSSPWLTRR

SEQ ID NO: 38903 - protein, 19 aa, Homo sapiens
  MAP TO AC004974.1; EXPRESSED IN BONE MARROW, SIGNAL = 1.3; EXPRESSED IN ADULT LIVER, SIGNAL = 1.5; EXPRESSED IN PLACENTA, SIGNAL = 1.6; EXPRESSED IN HEART, SIGNAL = 1.4; EXPRESSED IN LUNG, SIGNAL = 1.3; EXPRESSED IN FETAL LIVER, SIGNAL = 1.4; EXPRESSED IN BRAIN, SIGNAL = 1.5
KDLEADHVIVKEADHVIVK

SEQ ID NO: 38904 - protein, 62 aa, Homo sapiens
  MAP TO AC004894.1; EXPRESSED IN BONE MARROW, SIGNAL = 3.9; EXPRESSED IN ADULT LIVER, SIGNAL = 3.4; EXPRESSED IN PLACENTA, SIGNAL = 3.6; EXPRESSED IN HEART, SIGNAL = 3.3; EXPRESSED IN LUNG, SIGNAL = 3.8; EXPRESSED IN HELA, SIGNAL = 4.7; EXPRESSED IN FETAL LIVER, SIGNAL = 3.3; EXPRESSED IN BRAIN, SIGNAL = 3.7; EST_HUMAN HIT: BF700222.1, EVALUE 4.00e-24; SWISSPROT HIT: P18155, EVALUE 4.00e-25
VEMPVAMLLHTDGAHEGPRGDATVTISHGYTPKEQLKKHTILADIVISAADIPNLITAHMIK

SEQ ID NO: 38905 - protein, 93 aa, Homo sapiens
  MAP TO AC005344.1; EXPRESSED IN PLACENTA, SIGNAL = 1.4; EXPRESSED IN HEART, SIGNAL = 1.7; EXPRESSED IN BONE MARROW, SIGNAL = 1.1; EXPRESSED IN ADULT LIVER, SIGNAL = 1.4; EXPRESSED IN LUNG, SIGNAL = 1.3; EXPRESSED IN HELA, SIGNAL = 1.6; EXPRESSED IN FETAL LIVER, SIGNAL = 1.2; EXPRESSED IN BRAIN, SIGNAL = 1.2
GGGGGGGGSGGGTKGVEGGGGTQGGAGGEEEERNRRRSTRRRRESGRSQRRSRRRRTGQVILGCISGNPLTLRGSLLLPGVQLELRYPGSGIN

SEQ ID NO: 38906 - protein, 152 aa, Homo sapiens
  MAP TO AC005410.1; EXPRESSED IN HEART, SIGNAL = 2.1; EXPRESSED IN LUNG, SIGNAL = 2.2; EXPRESSED IN FETAL LIVER, SIGNAL = 1.6; EXPRESSED IN BONE MARROW, SIGNAL = 1.4; EXPRESSED IN PLACENTA, SIGNAL = 1.8; EXPRESSED IN HELA, SIGNAL = 3.8; EXPRESSED IN BRAIN, SIGNAL =   2; EXPRESSED IN ADULT LIVER, SIGNAL = 1.6; SWISSPROT HIT: Q62203, EVALUE 2.00e-09; EST_HUMAN HIT: AA233392.1, EVALUE 4.00e-14
GKSRFSGEGSSTPTPSLVSTPSLLFWGRGKYPSTPSPSPLAASPAFLGGKNPPIPYFHTPTSYLCAPVPYFHAPTSCLCAPIPYLCAPIPYFHTPTSYLCAPVPYFHAPTSYLCVPIPYFHAPTSYLCAPIPYLCAPMPYFRAPTPPSRFSG

SEQ ID NO: 38907 - protein, 42 aa, Homo sapiens
  MAP TO AC006007.1; EXPRESSED IN PLACENTA, SIGNAL = 2.3; EXPRESSED IN LUNG, SIGNAL = 1.3; EXPRESSED IN FETAL LIVER, SIGNAL = 2.3; EXPRESSED IN BRAIN, SIGNAL = 1.9; EXPRESSED IN BONE MARROW, SIGNAL = 1.9; EXPRESSED IN ADULT LIVER, SIGNAL = 2.1; EXPRESSED IN HELA, SIGNAL = 2.1; EXPRESSED IN HEART, SIGNAL =   2
EYMADSNALCAQNFYVQQQLCLSYFKTQSDLSWTTDLTSFKT

SEQ ID NO: 38908 - protein, 20 aa, Homo sapiens
  MAP TO AC004633.1; EXPRESSED IN BONE MARROW, SIGNAL = 1.2; EXPRESSED IN PLACENTA, SIGNAL = 1.1; EXPRESSED IN LUNG, SIGNAL = 1.3; EXPRESSED IN HEART, SIGNAL = 1.4; EXPRESSED IN FETAL LIVER, SIGNAL = 1.2; EXPRESSED IN ADULT LIVER, SIGNAL = 1.9; EXPRESSED IN BRAIN, SIGNAL =   2
SNAVAAAAAAAADDDDDDDS

SEQ ID NO: 38909 - protein, 83 aa, Homo sapiens
  MAP TO AC004492.1; EXPRESSED IN LUNG, SIGNAL =   2; EXPRESSED IN BONE MARROW, SIGNAL = 1.8; EXPRESSED IN HELA, SIGNAL = 1.8; EXPRESSED IN ADULT LIVER, SIGNAL = 1.8; EXPRESSED IN PLACENTA, SIGNAL = 1.8; EXPRESSED IN HEART, SIGNAL = 1.7; EXPRESSED IN FETAL LIVER, SIGNAL = 1.9; EXPRESSED IN BRAIN, SIGNAL = 1.7; EST_HUMAN HIT: W25749.1, EVALUE 1.00e-08; SWISSPROT HIT: O47499, EVALUE 4.60e+00
PVILDEPADINPREAELAVSFSSWLGLCLCSEFGCGCWLSFTFQQDYWLATAIRRSCWLGTVIASNIWQRHKVYFPVGEYCYL

SEQ ID NO: 38910 - protein, 37 aa, Homo sapiens
  MAP TO AC004953.1; EXPRESSED IN FETAL LIVER, SIGNAL = 1.7; EXPRESSED IN BRAIN, SIGNAL = 1.7; EXPRESSED IN BONE MARROW, SIGNAL = 1.8; EXPRESSED IN PLACENTA, SIGNAL = 1.7; EXPRESSED IN HELA, SIGNAL = 1.8; EXPRESSED IN HEART, SIGNAL = 1.5; EXPRESSED IN ADULT LIVER, SIGNAL = 1.7; EXPRESSED IN LUNG, SIGNAL = 2.1
CPPGPGCPPAPTCPSSPLGSACSSWVSRSLNMTVSLP

SEQ ID NO: 38911 - protein, 28 aa, Homo sapiens
  MAP TO AC005479.2; EXPRESSED IN FETAL LIVER, SIGNAL = 1.8; EXPRESSED IN BONE MARROW, SIGNAL = 1.7; EXPRESSED IN ADULT LIVER, SIGNAL = 1.8; EXPRESSED IN HELA, SIGNAL = 1.9; EXPRESSED IN PLACENTA, SIGNAL = 2.1; EXPRESSED IN LUNG, SIGNAL =   2; EXPRESSED IN HEART, SIGNAL = 1.8; EXPRESSED IN BRAIN, SIGNAL =   2
NDQGWKKSSRNLLSTSNKVLLMYLVARQ

SEQ ID NO: 38912 - protein, 45 aa, Homo sapiens
  MAP TO AC003691.1; EXPRESSED IN PLACENTA, SIGNAL = 3.6; EXPRESSED IN HEART, SIGNAL = 3.3; EXPRESSED IN BONE MARROW, SIGNAL = 3.1; EXPRESSED IN ADULT LIVER, SIGNAL = 2.3; EXPRESSED IN HELA, SIGNAL = 1.9; EXPRESSED IN FETAL LIVER, SIGNAL = 4.2; EXPRESSED IN LUNG, SIGNAL = 3.6; EXPRESSED IN BRAIN, SIGNAL = 2.2
HLQHFPEFLASGKSFQEMKQLLLFLSRKNQIDSMPLNPTFRLHGD

SEQ ID NO: 38913 - protein, 26 aa, Homo sapiens
  MAP TO AC003691.1; EXPRESSED IN PLACENTA, SIGNAL = 3.6; EXPRESSED IN HEART, SIGNAL = 3.3; EXPRESSED IN BONE MARROW, SIGNAL = 3.1; EXPRESSED IN ADULT LIVER, SIGNAL = 2.3; EXPRESSED IN HELA, SIGNAL = 1.9; EXPRESSED IN FETAL LIVER, SIGNAL = 4.2; EXPRESSED IN LUNG, SIGNAL = 3.6; EXPRESSED IN BRAIN, SIGNAL = 2.2
SPAAFPRIPGFWKEFPGNEAAAAFSL

SEQ ID NO: 38914 - protein, 31 aa, Homo sapiens
  MAP TO AC004881.1; EXPRESSED IN PLACENTA, SIGNAL = 1.4; EXPRESSED IN LUNG, SIGNAL = 1.4; EXPRESSED IN HEART, SIGNAL = 1.4; EXPRESSED IN BRAIN, SIGNAL = 1.5; EXPRESSED IN FETAL LIVER, SIGNAL = 1.3; EXPRESSED IN ADULT LIVER, SIGNAL = 1.4; EXPRESSED IN BONE MARROW, SIGNAL = 1.2
GDQSQLGTLPPGETFETLSPPVFHLCVCRMP

SEQ ID NO: 38915 - protein, 32 aa, Homo sapiens
  MAP TO AC004881.1; EXPRESSED IN PLACENTA, SIGNAL = 1.4; EXPRESSED IN LUNG, SIGNAL = 1.4; EXPRESSED IN HEART, SIGNAL = 1.4; EXPRESSED IN BRAIN, SIGNAL = 1.5; EXPRESSED IN FETAL LIVER, SIGNAL = 1.3; EXPRESSED IN ADULT LIVER, SIGNAL = 1.4; EXPRESSED IN BONE MARROW, SIGNAL = 1.2
RTVLKWAHRTPVSFICKAPVAVLGFEVSRSDQ

SEQ ID NO: 38916 - protein, 53 aa, Homo sapiens
  MAP TO AC004695.1; EXPRESSED IN PLACENTA, SIGNAL = 1.8; EXPRESSED IN HEART, SIGNAL = 1.3; EXPRESSED IN FETAL LIVER, SIGNAL = 1.4; EXPRESSED IN LUNG, SIGNAL = 1.8; EXPRESSED IN BRAIN, SIGNAL = 1.4; EXPRESSED IN BONE MARROW, SIGNAL = 1.3; EXPRESSED IN ADULT LIVER, SIGNAL = 1.6; EST_HUMAN HIT: AA401879.1, EVALUE 1.90e-01; SWISSPROT HIT: P23470, EVALUE 7.00e-27
AYGPEHWVTSSVSCGGRHQSPIDILDQYARVGEEYQELQLDGFDNESSNKTWM

SEQ ID NO: 38917 - protein, 25 aa, Homo sapiens
  MAP TO AC004695.1; EXPRESSED IN PLACENTA, SIGNAL = 1.8; EXPRESSED IN HEART, SIGNAL = 1.3; EXPRESSED IN FETAL LIVER, SIGNAL = 1.4; EXPRESSED IN LUNG, SIGNAL = 1.8; EXPRESSED IN BRAIN, SIGNAL = 1.4; EXPRESSED IN BONE MARROW, SIGNAL = 1.3; EXPRESSED IN ADULT LIVER, SIGNAL = 1.6
VPMVLSTGSRLVSAVGAVTSLLLTF

SEQ ID NO: 38918 - protein, 72 aa, Homo sapiens
  MAP TO AC005606.1; EXPRESSED IN LUNG, SIGNAL = 1.3; EXPRESSED IN FETAL LIVER, SIGNAL = 1.4; EXPRESSED IN BONE MARROW, SIGNAL = 1.3; EXPRESSED IN PLACENTA, SIGNAL = 1.2; EXPRESSED IN BRAIN, SIGNAL = 1.4; EXPRESSED IN ADULT LIVER, SIGNAL = 1.2; EXPRESSED IN HELA, SIGNAL = 6.1; EXPRESSED IN HEART, SIGNAL = 6.4; EST_HUMAN HIT: BE783915.1, EVALUE 2.00e-38; SWISSPROT HIT: P36197, EVALUE 4.00e-01
DYAYLREHFREKHFLCEEGRCSTEQFTHAFRTEIDLKAHRTACHSRSRAEARQNRHIDLQFSYAPRHSRRNE

SEQ ID NO: 38919 - protein, 23 aa, Homo sapiens
  MAP TO AC004782.1; EXPRESSED IN PLACENTA, SIGNAL = 2.4; EXPRESSED IN HELA, SIGNAL =   2; EXPRESSED IN HEART, SIGNAL = 1.6; EXPRESSED IN FETAL LIVER, SIGNAL = 1.4; EXPRESSED IN BRAIN, SIGNAL = 2.4; EXPRESSED IN ADULT LIVER, SIGNAL = 2.1; EXPRESSED IN LUNG, SIGNAL = 1.4; EXPRESSED IN BONE MARROW, SIGNAL = 1.7; EST_HUMAN HIT: AA252234.1, EVALUE 1.00e-05; SWISSPROT HIT: O46567, EVALUE 8.00e-07
MTTLNMLGGRQVIAAVKWAKAIP

SEQ ID NO: 38920 - protein, 31 aa, Homo sapiens
  MAP TO AC004782.1; EXPRESSED IN PLACENTA, SIGNAL = 2.4; EXPRESSED IN HELA, SIGNAL =   2; EXPRESSED IN HEART, SIGNAL = 1.6; EXPRESSED IN FETAL LIVER, SIGNAL = 1.4; EXPRESSED IN BRAIN, SIGNAL = 2.4; EXPRESSED IN ADULT LIVER, SIGNAL = 2.1; EXPRESSED IN LUNG, SIGNAL = 1.4; EXPRESSED IN BONE MARROW, SIGNAL = 1.7; EST_HUMAN HIT: AU139958.1, EVALUE 1.50e-02
VYIVALLCFASYLVLPLPISLLQSLAALLTC

SEQ ID NO: 38921 - protein, 52 aa, Homo sapiens
  MAP TO AC003071.1; EXPRESSED IN PLACENTA, SIGNAL = 1.4; EXPRESSED IN LUNG, SIGNAL = 1.7; EXPRESSED IN FETAL LIVER, SIGNAL = 1.4; EXPRESSED IN BRAIN, SIGNAL = 1.6; EXPRESSED IN ADULT LIVER, SIGNAL = 1.5; EXPRESSED IN HEART, SIGNAL = 1.6; EXPRESSED IN BONE MARROW, SIGNAL = 1.5; SWISSPROT HIT: P20050, EVALUE 4.10e-01
HSSSTSFESGTNNEDIKKASVLLIRKLYILMQDLEPLPNNVVLTMKLHYYNA

SEQ ID NO: 38922 - protein, 37 aa, Homo sapiens
  MAP TO AC004904.1; EXPRESSED IN ADULT LIVER, SIGNAL = 2.2; EXPRESSED IN PLACENTA, SIGNAL = 3.1; EXPRESSED IN BONE MARROW, SIGNAL = 1.9; EXPRESSED IN LUNG, SIGNAL = 2.7; EXPRESSED IN HELA, SIGNAL = 3.1; EXPRESSED IN HEART, SIGNAL =   2; EXPRESSED IN FETAL LIVER, SIGNAL = 2.2; EXPRESSED IN BRAIN, SIGNAL = 2.9; SWISSPROT HIT: P05023, EVALUE 3.00e-07; EST_HUMAN HIT: BE271862.1, EVALUE 4.00e-06
VGRDKYEPAAVSEQGDKKGKKGKKDRDMDELKKEVSM

SEQ ID NO: 38923 - protein, 29 aa, Homo sapiens
  MAP TO AC004904.1; EXPRESSED IN ADULT LIVER, SIGNAL = 2.2; EXPRESSED IN PLACENTA, SIGNAL = 3.1; EXPRESSED IN BONE MARROW, SIGNAL = 1.9; EXPRESSED IN LUNG, SIGNAL = 2.7; EXPRESSED IN HELA, SIGNAL = 3.1; EXPRESSED IN HEART, SIGNAL =   2; EXPRESSED IN FETAL LIVER, SIGNAL = 2.2; EXPRESSED IN BRAIN, SIGNAL = 2.9; EST_HUMAN HIT: AW410252.1, EVALUE 3.00e-09
DVISMSLQLFQNKVIKRAKRAKKTGTWMN

SEQ ID NO: 38924 - protein, 62 aa, Homo sapiens
  MAP TO AC004503.1; EXPRESSED IN HEART, SIGNAL = 9.3; EXPRESSED IN BRAIN, SIGNAL =  11; EXPRESSED IN ADULT LIVER, SIGNAL =  12; EXPRESSED IN PLACENTA, SIGNAL =  18; EXPRESSED IN LUNG, SIGNAL =  15; EXPRESSED IN FETAL LIVER, SIGNAL =  25; EXPRESSED IN BONE MARROW, SIGNAL =  25; EXPRESSED IN HELA, SIGNAL =  10; EST_HUMAN HIT: BE311566.1, EVALUE 2.00e-12; SWISSPROT HIT: Q95215, EVALUE 1.00e-13
IVTVNCARLLKADHHATNGVVHLIDKVISTITNNIQQIIEIEDTFETLRVRDCPGWRPRLGT

SEQ ID NO: 38925 - protein, 150 aa, Homo sapiens
  MAP TO AC004706.1; EXPRESSED IN LUNG, SIGNAL = 1.8; EXPRESSED IN BRAIN, SIGNAL = 2.1; EXPRESSED IN ADULT LIVER, SIGNAL = 1.6; EXPRESSED IN HELA, SIGNAL = 1.9; EXPRESSED IN HEART, SIGNAL = 1.7; EXPRESSED IN BONE MARROW, SIGNAL = 1.8; EXPRESSED IN PLACENTA, SIGNAL = 1.8; EXPRESSED IN FETAL LIVER, SIGNAL = 1.7; EST_HUMAN HIT: AU142652.1, EVALUE 7.00e-01; SWISSPROT HIT: P18065, EVALUE 1.90e-01
MEAFQACQGGSKLQECLALWGCLQLVGCPWLPGCLGLCKRKLAQNCGVKERQWADLQMPRVPQGWRCPPRPGCLGPWRRRLALGVSQVCWEADRLQECPWLWGCWGLWGRGPSLSMSLACLEEGRLLGGLWLLEVPWPWECPQLPGFQGQ

SEQ ID NO: 38926 - protein, 25 aa, Homo sapiens
  MAP TO AC002504.1; EXPRESSED IN BRAIN, SIGNAL = 8.4; EXPRESSED IN ADULT LIVER, SIGNAL = 6.9; EXPRESSED IN HELA, SIGNAL = 6.6; EXPRESSED IN HEART, SIGNAL = 6.8; EXPRESSED IN BONE MARROW, SIGNAL = 7.2; EXPRESSED IN PLACENTA, SIGNAL = 6.7; EXPRESSED IN LUNG, SIGNAL = 8.4; EXPRESSED IN FETAL LIVER, SIGNAL =   7
KKRSQMWTSADGENSTSPRDHGLLS

SEQ ID NO: 38927 - protein, 24 aa, Homo sapiens
  MAP TO AC002504.1; EXPRESSED IN BRAIN, SIGNAL = 8.4; EXPRESSED IN ADULT LIVER, SIGNAL = 6.9; EXPRESSED IN HELA, SIGNAL = 6.6; EXPRESSED IN HEART, SIGNAL = 6.8; EXPRESSED IN BONE MARROW, SIGNAL = 7.2; EXPRESSED IN PLACENTA, SIGNAL = 6.7; EXPRESSED IN LUNG, SIGNAL = 8.4; EXPRESSED IN FETAL LIVER, SIGNAL =   7
EEKPNVDFSRWGEQHIPQRSWSFI

SEQ ID NO: 38928 - protein, 74 aa, Homo sapiens
  MAP TO AC005385.2; EXPRESSED IN BONE MARROW, SIGNAL = 1.3; EXPRESSED IN PLACENTA, SIGNAL = 1.8; EXPRESSED IN LUNG, SIGNAL = 1.7; EXPRESSED IN HEART, SIGNAL = 1.3; EXPRESSED IN FETAL LIVER, SIGNAL = 1.3; EXPRESSED IN ADULT LIVER, SIGNAL = 1.4; EXPRESSED IN BRAIN, SIGNAL = 1.6; EST_HUMAN HIT: AI582642.1, EVALUE 7.00e-29; SWISSPROT HIT: P34216, EVALUE 3.30e+00
EKMWSGLLPPGLNESDAESNSEDEATLENSGLNLQEDKEDESIRKTEIIDFSTDEPKTETESNVNAYEECPSGI

SEQ ID NO: 38929 - protein, 25 aa, Homo sapiens
  MAP TO AC004254.1; EXPRESSED IN LUNG, SIGNAL = 2.1; EXPRESSED IN PLACENTA, SIGNAL = 1.9; EXPRESSED IN HEART, SIGNAL = 1.7; EXPRESSED IN FETAL LIVER, SIGNAL = 1.5; EXPRESSED IN BRAIN, SIGNAL = 2.7; EXPRESSED IN BONE MARROW, SIGNAL = 1.8; EXPRESSED IN HELA, SIGNAL =   2; EXPRESSED IN ADULT LIVER, SIGNAL = 1.8; EST_HUMAN HIT: BF347433.1, EVALUE 5.00e-08
RVDEWMAKEGLLDPNVKSIFVTCGD

SEQ ID NO: 38930 - protein, 95 aa, Homo sapiens
  MAP TO AC005846.1; EXPRESSED IN PLACENTA, SIGNAL = 4.1; EXPRESSED IN BONE MARROW, SIGNAL = 3.2; EXPRESSED IN ADULT LIVER, SIGNAL =   4; EXPRESSED IN LUNG, SIGNAL = 4.5; EXPRESSED IN HELA, SIGNAL = 3.8; EXPRESSED IN HEART, SIGNAL = 3.6; EXPRESSED IN FETAL LIVER, SIGNAL = 3.5; EXPRESSED IN BRAIN, SIGNAL = 3.7; SWISSPROT HIT: P16748, EVALUE 8.90e+00; EST_HUMAN HIT: BF683112.1, EVALUE 2.00e+00
SHDDDEEEEEDEKEEEEEEEELLLAGSPYSPTVPCFPLECPCLENGSRQKQDKHTPGFKHKFQHAFFFSFPLATITHSFWVAEHSLRLEGKQGAQ

SEQ ID NO: 38931 - protein, 25 aa, Homo sapiens
  MAP TO AC005392.1; EXPRESSED IN PLACENTA, SIGNAL = 3.6; EXPRESSED IN LUNG, SIGNAL =   5; EXPRESSED IN HELA, SIGNAL = 3.5; EXPRESSED IN FETAL LIVER, SIGNAL = 4.2; EXPRESSED IN BONE MARROW, SIGNAL =   4; EXPRESSED IN ADULT LIVER, SIGNAL = 3.4; EXPRESSED IN HEART, SIGNAL = 3.8; EXPRESSED IN BRAIN, SIGNAL = 4.1
SPRAARRPRTRSPASLSTGWAPASP

SEQ ID NO: 38932 - protein, 110 aa, Homo sapiens
  MAP TO AC005684.1; EXPRESSED IN LUNG, SIGNAL = 4.8; EXPRESSED IN HELA, SIGNAL = 4.8; EXPRESSED IN ADULT LIVER, SIGNAL = 5.2; EXPRESSED IN PLACENTA, SIGNAL = 4.5; EXPRESSED IN HEART, SIGNAL = 4.9; EXPRESSED IN FETAL LIVER, SIGNAL = 5.1; EXPRESSED IN BRAIN, SIGNAL = 5.5; EXPRESSED IN BONE MARROW, SIGNAL = 4.4; EST_HUMAN HIT: BF056780.1, EVALUE 9.00e-06; SWISSPROT HIT: P44335, EVALUE 1.50e+00
LPLDQTLPRQGPGQSLSFPENYQTLPKSTRHPSGGSSPPPRNLPSDYKYAQDRASHLKMSSEERRAHRDGTVWQLYEWQQRQQFRHGSPTAPICLGSPEFTDQGRSRSML

SEQ ID NO: 38933 - protein, 105 aa, Homo sapiens
  MAP TO AC004080.1; EXPRESSED IN LUNG, SIGNAL = 2.4; EXPRESSED IN HELA, SIGNAL =   2; EXPRESSED IN FETAL LIVER, SIGNAL = 2.4; EXPRESSED IN BRAIN, SIGNAL = 2.3; EXPRESSED IN BONE MARROW, SIGNAL = 2.4; EXPRESSED IN ADULT LIVER, SIGNAL =   3; EXPRESSED IN PLACENTA, SIGNAL = 2.5; EXPRESSED IN HEART, SIGNAL = 3.1; EST_HUMAN HIT: AL080006.1, EVALUE 2.00e-33; SWISSPROT HIT: P31269, EVALUE 2.00e-34
MATTGALGNYYVDSFLLGADAADELSVGRYAPGTLGQPPRQAATLAEHPDFSPCSFQSKATVFGASWNPVHAAGANAVPAAVYHHHHHHPYVHPQAPVAAAAPDG

SEQ ID NO: 38934 - protein, 33 aa, Homo sapiens
  MAP TO AC004080.1; EXPRESSED IN LUNG, SIGNAL = 2.4; EXPRESSED IN HELA, SIGNAL =   2; EXPRESSED IN FETAL LIVER, SIGNAL = 2.4; EXPRESSED IN BRAIN, SIGNAL = 2.3; EXPRESSED IN BONE MARROW, SIGNAL = 2.4; EXPRESSED IN ADULT LIVER, SIGNAL =   3; EXPRESSED IN PLACENTA, SIGNAL = 2.5; EXPRESSED IN HEART, SIGNAL = 3.1; EST_HUMAN HIT: BE872936.1, EVALUE 6.70e-01
GPGGPGAGHGDGHHWGPGQLLRGLVPAGRRRRG

SEQ ID NO: 38935 - protein, 26 aa, Homo sapiens
  MAP TO AC005822.1; EXPRESSED IN HEART, SIGNAL = 1.7; EXPRESSED IN BRAIN, SIGNAL = 1.6; EXPRESSED IN BONE MARROW, SIGNAL = 1.5; EXPRESSED IN PLACENTA, SIGNAL = 0.98; EXPRESSED IN LUNG, SIGNAL = 1.3; EXPRESSED IN FETAL LIVER, SIGNAL = 1.3; EXPRESSED IN ADULT LIVER, SIGNAL = 1.4; EST_HUMAN HIT: AW404800.1, EVALUE 1.00e-07
PQNSTLSQDTPEEDPRGKHAFQTGWL

SEQ ID NO: 38936 - protein, 26 aa, Homo sapiens
  MAP TO AC005822.1; EXPRESSED IN HEART, SIGNAL = 1.7; EXPRESSED IN BRAIN, SIGNAL = 1.6; EXPRESSED IN BONE MARROW, SIGNAL = 1.5; EXPRESSED IN PLACENTA, SIGNAL = 0.98; EXPRESSED IN LUNG, SIGNAL = 1.3; EXPRESSED IN FETAL LIVER, SIGNAL = 1.3; EXPRESSED IN ADULT LIVER, SIGNAL = 1.4; EST_HUMAN HIT: AW404800.1, EVALUE 2.00e-06
LLKTLPFPKIPQRKTPEENMLSRQDG

SEQ ID NO: 38937 - protein, 55 aa, Homo sapiens
  MAP TO AC005848.1; EXPRESSED IN PLACENTA, SIGNAL = 2.8; EXPRESSED IN LUNG, SIGNAL = 3.3; EXPRESSED IN HELA, SIGNAL = 3.2; EXPRESSED IN HEART, SIGNAL = 2.5; EXPRESSED IN BONE MARROW, SIGNAL = 2.7; EXPRESSED IN FETAL LIVER, SIGNAL = 2.6; EXPRESSED IN BRAIN, SIGNAL = 2.9; EXPRESSED IN ADULT LIVER, SIGNAL = 2.9; EST_HUMAN HIT: BE018257.1, EVALUE 9.00e-21; SWISSPROT HIT: Q01970, EVALUE 7.00e-22
SPSSDSCPGLSNGEEVGLEKPSLEPQKSLGDEGLNRGPYVLGPADREDEEEDEEE

SEQ ID NO: 38938 - protein, 36 aa, Homo sapiens
  MAP TO AC004087.1; EXPRESSED IN PLACENTA, SIGNAL = 1.6; EXPRESSED IN LUNG, SIGNAL = 1.3; EXPRESSED IN HEART, SIGNAL = 1.6; EXPRESSED IN FETAL LIVER, SIGNAL = 1.4; EXPRESSED IN BONE MARROW, SIGNAL = 1.5; EXPRESSED IN BRAIN, SIGNAL = 1.6; EXPRESSED IN ADULT LIVER, SIGNAL = 1.6
MNTFMTDNSARLLERRAEQGHNDIHCTCVPAFPSLF

SEQ ID NO: 38939 - protein, 53 aa, Homo sapiens
  MAP TO AC005611.1; EXPRESSED IN LUNG, SIGNAL = 6.4; EXPRESSED IN FETAL LIVER, SIGNAL = 6.2; EXPRESSED IN PLACENTA, SIGNAL = 6.2; EXPRESSED IN HELA, SIGNAL = 7.1; EXPRESSED IN BRAIN, SIGNAL =   7; EXPRESSED IN BONE MARROW, SIGNAL = 6.6; EXPRESSED IN ADULT LIVER, SIGNAL = 6.1; EXPRESSED IN HEART, SIGNAL =   6; EST_HUMAN HIT: AI417010.1, EVALUE 2.00e-23
LLVTVGEVLEKSLLNVSRTDWHMAFTGMSRRQMIYSAARAIAGMYKQRLPPRT

SEQ ID NO: 38940 - protein, 68 aa, Homo sapiens
  MAP TO AC005661.1; EXPRESSED IN LUNG, SIGNAL = 3.7; EXPRESSED IN FETAL LIVER, SIGNAL = 6.9; EXPRESSED IN BRAIN, SIGNAL = 4.8; EXPRESSED IN BONE MARROW, SIGNAL = 4.5; EXPRESSED IN HELA, SIGNAL = 4.8; EXPRESSED IN PLACENTA, SIGNAL = 4.3; EXPRESSED IN HEART, SIGNAL = 4.7; EXPRESSED IN ADULT LIVER, SIGNAL = 4.7; EST_HUMAN HIT: W68409.1, EVALUE 4.30e+00
PQARRCCPEALGKLFPGLCFLCFLVTYALVGAVVFSAIEDGQVLVAADDGEFEKFLEELCRILNCSET

SEQ ID NO: 38941 - protein, 38 aa, Homo sapiens
  MAP TO AC005661.1; EXPRESSED IN LUNG, SIGNAL = 3.7; EXPRESSED IN FETAL LIVER, SIGNAL = 6.9; EXPRESSED IN BRAIN, SIGNAL = 4.8; EXPRESSED IN BONE MARROW, SIGNAL = 4.5; EXPRESSED IN HELA, SIGNAL = 4.8; EXPRESSED IN PLACENTA, SIGNAL = 4.3; EXPRESSED IN HEART, SIGNAL = 4.7; EXPRESSED IN ADULT LIVER, SIGNAL = 4.7; SWISSPROT HIT: P39584, EVALUE 1.70e+00; EST_HUMAN HIT: BF312621.1, EVALUE 1.40e+00
PPGQEMLPRGPGKALPWPLLPLLSGDLRPGGCCGLLCH

SEQ ID NO: 38942 - protein, 22 aa, Homo sapiens
  MAP TO AC003078.1; EXPRESSED IN PLACENTA, SIGNAL = 4.5; EXPRESSED IN HEART, SIGNAL =   4; EXPRESSED IN FETAL LIVER, SIGNAL = 4.2; EXPRESSED IN BONE MARROW, SIGNAL = 4.5; EXPRESSED IN ADULT LIVER, SIGNAL = 3.9; EXPRESSED IN HELA, SIGNAL = 4.4; EXPRESSED IN LUNG, SIGNAL = 4.2; EXPRESSED IN BRAIN, SIGNAL = 4.8; EST_HUMAN HIT: AI267342.1, EVALUE 2.80e+00
VLNSPSSIVLKCCMMFLSTRKL

SEQ ID NO: 38943 - protein, 33 aa, Homo sapiens
  MAP TO AC004911.1; EXPRESSED IN PLACENTA, SIGNAL = 2.5; EXPRESSED IN LUNG, SIGNAL =   3; EXPRESSED IN HEART, SIGNAL = 2.7; EXPRESSED IN HELA, SIGNAL = 2.9; EXPRESSED IN FETAL LIVER, SIGNAL = 2.5; EXPRESSED IN BRAIN, SIGNAL = 2.7; EXPRESSED IN BONE MARROW, SIGNAL = 2.8; EXPRESSED IN ADULT LIVER, SIGNAL = 2.6
ENRSFFAEEAGVHQDGTECTSGSGGENAAKRSR

SEQ ID NO: 38944 - protein, 32 aa, Homo sapiens
  MAP TO AC004911.1; EXPRESSED IN PLACENTA, SIGNAL = 2.5; EXPRESSED IN LUNG, SIGNAL =   3; EXPRESSED IN HEART, SIGNAL = 2.7; EXPRESSED IN HELA, SIGNAL = 2.9; EXPRESSED IN FETAL LIVER, SIGNAL = 2.5; EXPRESSED IN BRAIN, SIGNAL = 2.7; EXPRESSED IN BONE MARROW, SIGNAL = 2.8; EXPRESSED IN ADULT LIVER, SIGNAL = 2.6; SWISSPROT HIT: P12783, EVALUE 2.90e+00
KIEASLQKKPVSIRTELNAPLDQVAKMLQKDP

SEQ ID NO: 38945 - protein, 75 aa, Homo sapiens
  MAP TO AC002093.1; EXPRESSED IN PLACENTA, SIGNAL = 1.2; EXPRESSED IN LUNG, SIGNAL = 1.2; EXPRESSED IN HEART, SIGNAL = 1.3; EXPRESSED IN FETAL LIVER, SIGNAL = 0.98; EXPRESSED IN BRAIN, SIGNAL = 1.2; EXPRESSED IN BONE MARROW, SIGNAL = 1.2; EXPRESSED IN ADULT LIVER, SIGNAL = 1.2; EST_HUMAN HIT: BE047864.1, EVALUE 2.00e-05; SWISSPROT HIT: P35084, EVALUE 1.60e+00
  unsure 22
  unsure 23
  unsure 26
  unsure 32
  unsure 34
  unsure 41
  unsure 61
  unsure 67
IPMMALGRGNASRGDPLTVPVXXQRXEAAQQXRXAPRRQGXCRFSREEFEQILQERNELKXQSVPAXRRNWPTSS

SEQ ID NO: 38946 - protein, 61 aa, Homo sapiens
  MAP TO AC003665.1; EXPRESSED IN PLACENTA, SIGNAL = 2.6; EXPRESSED IN LUNG, SIGNAL = 2.7; EXPRESSED IN HEART, SIGNAL = 1.7; EXPRESSED IN BRAIN, SIGNAL = 2.8; EXPRESSED IN HELA, SIGNAL = 1.9; EXPRESSED IN FETAL LIVER, SIGNAL = 2.5; EXPRESSED IN BONE MARROW, SIGNAL = 2.2; EXPRESSED IN ADULT LIVER, SIGNAL = 2.8
ACGTFCATTSAKTCPRCQCLCSSTSRSTLCSGSARSWSTAASWTRPAASPTPASAWYLLPV

SEQ ID NO: 38947 - protein, 36 aa, Homo sapiens
  MAP TO AC005482.1; EXPRESSED IN LUNG, SIGNAL =  80; EXPRESSED IN FETAL LIVER, SIGNAL = 2.8; EXPRESSED IN BONE MARROW, SIGNAL = 2.5; EXPRESSED IN PLACENTA, SIGNAL = 2.6; EXPRESSED IN HELA, SIGNAL = 2.9; EXPRESSED IN HEART, SIGNAL = 2.3; EXPRESSED IN BRAIN, SIGNAL = 3.1; EXPRESSED IN ADULT LIVER, SIGNAL = 2.5; EST_HUMAN HIT: AA199942.1, EVALUE 8.60e-01
SSLLITLWLHPELTRWAFSLGMPPFTPTALPPSLPW

SEQ ID NO: 38948 - protein, 36 aa, Homo sapiens
  MAP TO AC004853.1; EXPRESSED IN PLACENTA, SIGNAL = 1.7; EXPRESSED IN LUNG, SIGNAL = 1.9; EXPRESSED IN HELA, SIGNAL = 1.6; EXPRESSED IN FETAL LIVER, SIGNAL = 1.7; EXPRESSED IN BRAIN, SIGNAL = 1.5; EXPRESSED IN BONE MARROW, SIGNAL = 1.8; EXPRESSED IN ADULT LIVER, SIGNAL = 1.7; EXPRESSED IN HEART, SIGNAL = 1.3; EST_HUMAN HIT: H78008.1, EVALUE 2.00e-03
DIDKGEVGEKEIHGSVESAVQSDQKDNETVPQHCHE

SEQ ID NO: 38949 - protein, 111 aa, Homo sapiens
  MAP TO AC004853.1; EXPRESSED IN PLACENTA, SIGNAL = 1.7; EXPRESSED IN LUNG, SIGNAL = 1.9; EXPRESSED IN HELA, SIGNAL = 1.6; EXPRESSED IN FETAL LIVER, SIGNAL = 1.7; EXPRESSED IN BRAIN, SIGNAL = 1.5; EXPRESSED IN BONE MARROW, SIGNAL = 1.8; EXPRESSED IN ADULT LIVER, SIGNAL = 1.7; EXPRESSED IN HEART, SIGNAL = 1.3; EST_HUMAN HIT: AI278824.1, EVALUE 2.00e-20; SWISSPROT HIT: Q13607, EVALUE 1.00e-53
TWVREFILLGLSSDWCTQISLFSLFLVTYLMTVLGNCLIVLLIRLDSRLHTPMYFFLTNLSLVDVSYATSVVPQLLAHFLAEHKAIPFQSCAAQLFFSLALGGIEFVLLAV

SEQ ID NO: 38950 - protein, 174 aa, Homo sapiens
  MAP TO AC003957.1; EXPRESSED IN LUNG, SIGNAL = 0.92; EXPRESSED IN BRAIN, SIGNAL = 1.4; EXPRESSED IN ADULT LIVER, SIGNAL =   1; EXPRESSED IN PLACENTA, SIGNAL = 1.1; EXPRESSED IN HEART, SIGNAL = 1.6; EXPRESSED IN FETAL LIVER, SIGNAL = 1.1; EXPRESSED IN BONE MARROW, SIGNAL = 1.1; EST_HUMAN HIT: AW249047.1, EVALUE 2.00e-14; SWISSPROT HIT: Q04888, EVALUE 3.50e-01
MAFSQVQCLDDNHVNWRSSESKPEFFYSEEQRLALEALVARGRDAFYEVLKRENIRDFLSELELKRILETIEVYDPGSEDPRGTGPSQGPEDNGVGDGEEASGADGVPIEAEPLPSLEYWPQKSDRSIPQLDLGWPDTIAYRGVTRASVYMQPPIDGQAHIKEVVRKMISQAQK

SEQ ID NO: 38951 - protein, 48 aa, Homo sapiens
  MAP TO AC002302.1; EXPRESSED IN BONE MARROW, SIGNAL = 3.1; EXPRESSED IN PLACENTA, SIGNAL = 2.3; EXPRESSED IN LUNG, SIGNAL =   2; EXPRESSED IN HELA, SIGNAL = 2.7; EXPRESSED IN HEART, SIGNAL =   2; EXPRESSED IN FETAL LIVER, SIGNAL = 3.1; EXPRESSED IN BRAIN, SIGNAL = 2.2; EXPRESSED IN ADULT LIVER, SIGNAL = 2.8; EST_HUMAN HIT: BE018348.1, EVALUE 3.00e-11; SWISSPROT HIT: P36418, EVALUE 8.10e+00
MMGEAKRKPLELPQPRKTANQEQYYILRGTAEISAIINDLKDAEVVIP

SEQ ID NO: 38952 - protein, 43 aa, Homo sapiens
  MAP TO AC003119.1; EXPRESSED IN LUNG, SIGNAL = 1.9; EXPRESSED IN ADULT LIVER, SIGNAL = 1.9; EXPRESSED IN PLACENTA, SIGNAL = 1.7; EXPRESSED IN HEART, SIGNAL = 1.5; EXPRESSED IN FETAL LIVER, SIGNAL = 1.6; EXPRESSED IN BRAIN, SIGNAL = 1.8; EXPRESSED IN BONE MARROW, SIGNAL = 1.7; EST_HUMAN HIT: BF213906.1, EVALUE 9.20e+00
PHIMLLLLASTLHLKYREVECTVTQSVSHMQLLVHKKTFGDAQ

SEQ ID NO: 38953 - protein, 17 aa, Homo sapiens
  MAP TO AC003119.1; EXPRESSED IN LUNG, SIGNAL = 1.9; EXPRESSED IN ADULT LIVER, SIGNAL = 1.9; EXPRESSED IN PLACENTA, SIGNAL = 1.7; EXPRESSED IN HEART, SIGNAL = 1.5; EXPRESSED IN FETAL LIVER, SIGNAL = 1.6; EXPRESSED IN BRAIN, SIGNAL = 1.8; EXPRESSED IN BONE MARROW, SIGNAL = 1.7
PPHNAAVAGLNTALEIP

SEQ ID NO: 38954 - protein, 29 aa, Homo sapiens
  MAP TO AC005659.2; EXPRESSED IN LUNG, SIGNAL =  15; EXPRESSED IN FETAL LIVER, SIGNAL =  20; EXPRESSED IN BRAIN, SIGNAL =  16; EXPRESSED IN BONE MARROW, SIGNAL =  13; EXPRESSED IN PLACENTA, SIGNAL =  14; EXPRESSED IN HELA, SIGNAL =  22; EXPRESSED IN HEART, SIGNAL =  12; EXPRESSED IN ADULT LIVER, SIGNAL =  41; EST_HUMAN HIT: AV689134.1, EVALUE 4.60e+00
MRVGSYPASTNHSRAPPTNRLGSSWKWPM

SEQ ID NO: 38955 - protein, 69 aa, Homo sapiens
  MAP TO AC002519.1; EXPRESSED IN HEART, SIGNAL = 7.7; EXPRESSED IN BRAIN, SIGNAL = 8.4; EXPRESSED IN BONE MARROW, SIGNAL = 7.2; EXPRESSED IN ADULT LIVER, SIGNAL = 8.4; EXPRESSED IN PLACENTA, SIGNAL = 8.1; EXPRESSED IN HELA, SIGNAL = 7.8; EXPRESSED IN FETAL LIVER, SIGNAL = 7.9; EXPRESSED IN LUNG, SIGNAL =   9; SWISSPROT HIT: O75153, EVALUE 3.00e-15; EST_HUMAN HIT: AA284651.1, EVALUE 6.00e-23
TQQLQNGSHMGRHGSQGGIVMAISPSEETKLQMFMWSRIIFSLGFVISGHYKDFARDVAASIAFTNDLN

SEQ ID NO: 38956 - protein, 18 aa, Homo sapiens
  MAP TO AC002519.1; EXPRESSED IN HEART, SIGNAL = 7.7; EXPRESSED IN BRAIN, SIGNAL = 8.4; EXPRESSED IN BONE MARROW, SIGNAL = 7.2; EXPRESSED IN ADULT LIVER, SIGNAL = 8.4; EXPRESSED IN PLACENTA, SIGNAL = 8.1; EXPRESSED IN HELA, SIGNAL = 7.8; EXPRESSED IN FETAL LIVER, SIGNAL = 7.9; EXPRESSED IN LUNG, SIGNAL =   9; EST_HUMAN HIT: AA284651.1, EVALUE 4.00e-03
VPPRYTATSEWQPHGAPW

SEQ ID NO: 38957 - protein, 75 aa, Homo sapiens
  MAP TO AC004636.1; EXPRESSED IN PLACENTA, SIGNAL = 4.2; EXPRESSED IN LUNG, SIGNAL = 4.1; EXPRESSED IN HEART, SIGNAL = 5.3; EXPRESSED IN BRAIN, SIGNAL = 4.4; EXPRESSED IN BONE MARROW, SIGNAL = 4.3; EXPRESSED IN ADULT LIVER, SIGNAL = 4.4; EXPRESSED IN HELA, SIGNAL = 4.3; EXPRESSED IN FETAL LIVER, SIGNAL = 4.4; SWISSPROT HIT: P07774, EVALUE 5.20e+00; EST_HUMAN HIT: AA469992.1, EVALUE 4.00e-03
RGMVQEDMGHSAAPFVYILIGVDVSLIDDERFPRLSFGMTQEFIQHSHQLPSLFILLQPNYNEHHLQHEPEVIPK

SEQ ID NO: 38958 - protein, 163 aa, Homo sapiens
  MAP TO AC004636.1; EXPRESSED IN PLACENTA, SIGNAL = 4.2; EXPRESSED IN LUNG, SIGNAL = 4.1; EXPRESSED IN HEART, SIGNAL = 5.3; EXPRESSED IN BRAIN, SIGNAL = 4.4; EXPRESSED IN BONE MARROW, SIGNAL = 4.3; EXPRESSED IN ADULT LIVER, SIGNAL = 4.4; EXPRESSED IN HELA, SIGNAL = 4.3; EXPRESSED IN FETAL LIVER, SIGNAL = 4.4; SWISSPROT HIT: O14975, EVALUE 3.00e-31; EST_HUMAN HIT: AU138729.1, EVALUE 2.00e-28
KLLFPYFWDDFWFVLKVVLIIIRLKKYEKRGELVTVLDKFLSHAKRQPRKPFIIYEGDIYTYQDVDKRSSRVAHVFLNHSSLKKGDTVALLMSNEPDFVHVWFGLAKLGCVVAFLNTNIRSNSLLNCIRACGPRALVVGAGRVWGVVCLYRMAAHLLSYPFFF

SEQ ID NO: 38959 - protein, 36 aa, Homo sapiens
  MAP TO AC006150.2; EXPRESSED IN PLACENTA, SIGNAL = 1.7; EXPRESSED IN LUNG, SIGNAL = 1.5; EXPRESSED IN HEART, SIGNAL = 1.4; EXPRESSED IN BRAIN, SIGNAL = 1.8; EXPRESSED IN FETAL LIVER, SIGNAL = 1.6; EXPRESSED IN BONE MARROW, SIGNAL = 1.2; EXPRESSED IN ADULT LIVER, SIGNAL = 1.5; EST_HUMAN HIT: AW939485.1, EVALUE 1.30e-01
DAIQDNADSLQNRLFASRPIIRLKSHQSPKGEVQCV

SEQ ID NO: 38960 - protein, 48 aa, Homo sapiens
  MAP TO AC004802.1; EXPRESSED IN LUNG, SIGNAL = 5.2; EXPRESSED IN HELA, SIGNAL = 5.7; EXPRESSED IN BRAIN, SIGNAL = 6.5; EXPRESSED IN BONE MARROW, SIGNAL = 5.4; EXPRESSED IN ADULT LIVER, SIGNAL =   5; EXPRESSED IN PLACENTA, SIGNAL = 4.8; EXPRESSED IN HEART, SIGNAL = 4.7; EXPRESSED IN FETAL LIVER, SIGNAL =   5; SWISSPROT HIT: O83416, EVALUE 2.40e-01; EST_HUMAN HIT: BE816111.1, EVALUE 2.00e-19
AHEAALEARASPEMSDRIQHLEREITRYKDESSKAQAEVDRLLEILKE

SEQ ID NO: 38961 - protein, 34 aa, Homo sapiens
  MAP TO AC005549.1; EXPRESSED IN LUNG, SIGNAL = 2.5; EXPRESSED IN HELA, SIGNAL = 2.1; EXPRESSED IN BONE MARROW, SIGNAL = 2.4; EXPRESSED IN ADULT LIVER, SIGNAL = 2.5; EXPRESSED IN PLACENTA, SIGNAL = 2.9; EXPRESSED IN HEART, SIGNAL = 2.6; EXPRESSED IN FETAL LIVER, SIGNAL = 3.7; EXPRESSED IN BRAIN, SIGNAL = 2.5; EST_HUMAN HIT: BF211527.1, EVALUE 1.00e-13; SWISSPROT HIT: P13500, EVALUE 8.00e-15
FKTIVAKEICADPKQKWVQDSMDHLDKQTQTPKT

SEQ ID NO: 38962 - protein, 34 aa, Homo sapiens
  MAP TO AC005549.1; EXPRESSED IN LUNG, SIGNAL = 2.5; EXPRESSED IN HELA, SIGNAL = 2.1; EXPRESSED IN BONE MARROW, SIGNAL = 2.4; EXPRESSED IN ADULT LIVER, SIGNAL = 2.5; EXPRESSED IN PLACENTA, SIGNAL = 2.9; EXPRESSED IN HEART, SIGNAL = 2.6; EXPRESSED IN FETAL LIVER, SIGNAL = 3.7; EXPRESSED IN BRAIN, SIGNAL = 2.5; EST_HUMAN HIT: AI478647.1, EVALUE 8.00e-12
SSLPTASRPLWPRRSVLTPSRSGFRIPWTTWTSK

SEQ ID NO: 38963 - protein, 69 aa, Homo sapiens
  MAP TO AC002099.1; EXPRESSED IN PLACENTA, SIGNAL = 2.6; EXPRESSED IN HELA, SIGNAL =   3; EXPRESSED IN HEART, SIGNAL = 2.9; EXPRESSED IN BONE MARROW, SIGNAL =   3; EXPRESSED IN ADULT LIVER, SIGNAL = 2.8; EXPRESSED IN BRAIN, SIGNAL = 2.9; EXPRESSED IN FETAL LIVER, SIGNAL = 2.6; EXPRESSED IN LUNG, SIGNAL = 3.1; EST_HUMAN HIT: BE618264.1, EVALUE 3.00e-22; SWISSPROT HIT: Q15528, EVALUE 3.00e-23
VRAGESLMKLVSDLKQFLILNDFPSVNEAIDQRNQQLRTLQEECDRKLITLRDEISIDLYELEEEYYSS

SEQ ID NO: 38964 - protein, 18 aa, Homo sapiens
  MAP TO AC002099.1; EXPRESSED IN PLACENTA, SIGNAL = 2.6; EXPRESSED IN HELA, SIGNAL =   3; EXPRESSED IN HEART, SIGNAL = 2.9; EXPRESSED IN BONE MARROW, SIGNAL =   3; EXPRESSED IN ADULT LIVER, SIGNAL = 2.8; EXPRESSED IN BRAIN, SIGNAL = 2.9; EXPRESSED IN FETAL LIVER, SIGNAL = 2.6; EXPRESSED IN LUNG, SIGNAL = 3.1
SPCARPGSDGHRSEPASP

SEQ ID NO: 38965 - protein, 37 aa, Homo sapiens
  MAP TO AC004782.1; EXPRESSED IN ADULT LIVER, SIGNAL = 1.3; EXPRESSED IN PLACENTA, SIGNAL = 1.4; EXPRESSED IN LUNG, SIGNAL = 1.3; EXPRESSED IN HEART, SIGNAL = 1.3; EXPRESSED IN BRAIN, SIGNAL = 1.2; EXPRESSED IN BONE MARROW, SIGNAL = 1.3; EXPRESSED IN FETAL LIVER, SIGNAL = 1.3
SIIIRMSSAISGSICMKRYVMLLLRTWSPRIKPTPRR

SEQ ID NO: 38966 - protein, 66 aa, Homo sapiens
  MAP TO AC005827.3; EXPRESSED IN LUNG, SIGNAL = 1.4; EXPRESSED IN BONE MARROW, SIGNAL = 2.2; EXPRESSED IN PLACENTA, SIGNAL = 1.8; EXPRESSED IN HELA, SIGNAL = 1.9; EXPRESSED IN HEART, SIGNAL = 1.8; EXPRESSED IN FETAL LIVER, SIGNAL = 2.3; EXPRESSED IN BRAIN, SIGNAL = 2.1; EXPRESSED IN ADULT LIVER, SIGNAL = 2.2; SWISSPROT HIT: P25945, EVALUE 3.40e+00; EST_HUMAN HIT: AA789319.1, EVALUE 2.50e+00
MSPSGSDLKCVVTNGQMGGGCEGIFWAAELCTVKELQAPYQKTRVTMGKPLDLSEPQFIISKMAIM

SEQ ID NO: 38967 - protein, 67 aa, Homo sapiens
  MAP TO AC005856.1; EXPRESSED IN PLACENTA, SIGNAL = 1.2; EXPRESSED IN HEART, SIGNAL = 1.5; EXPRESSED IN BRAIN, SIGNAL =   2; EXPRESSED IN BONE MARROW, SIGNAL = 1.2; EXPRESSED IN ADULT LIVER, SIGNAL = 1.8; EXPRESSED IN LUNG, SIGNAL = 1.2; EXPRESSED IN FETAL LIVER, SIGNAL = 1.1; EST_HUMAN HIT: T80876.1, EVALUE 6.00e-11
RKCFPNRSCIPNSFLMWHTKPLGSGSCVPLLPLLLLLLLLFPLLPWPPPLPPPPPSSLHPFAPAFPA

SEQ ID NO: 38968 - protein, 29 aa, Homo sapiens
  MAP TO AC005737.1; EXPRESSED IN PLACENTA, SIGNAL = 1.3; EXPRESSED IN LUNG, SIGNAL = 1.4; EXPRESSED IN HEART, SIGNAL = 1.3; EXPRESSED IN BONE MARROW, SIGNAL = 0.99; EXPRESSED IN FETAL LIVER, SIGNAL = 3.2; EXPRESSED IN BRAIN, SIGNAL = 1.2; EXPRESSED IN ADULT LIVER, SIGNAL =  15
TQCDITSILGGTARHSYFKIMKSVVAKLQ

SEQ ID NO: 38969 - protein, 65 aa, Homo sapiens
  MAP TO AC004944.1; EXPRESSED IN PLACENTA, SIGNAL = 8.8; EXPRESSED IN HEART, SIGNAL = 9.2; EXPRESSED IN FETAL LIVER, SIGNAL =  15; EXPRESSED IN LUNG, SIGNAL =   9; EXPRESSED IN HELA, SIGNAL = 8.2; EXPRESSED IN BRAIN, SIGNAL =  10; EXPRESSED IN BONE MARROW, SIGNAL = 8.6; EXPRESSED IN ADULT LIVER, SIGNAL =  12; EST_HUMAN HIT: BE966232.2, EVALUE 1.10e+00; SWISSPROT HIT: P49657, EVALUE 8.90e-01
KNNHSSEDGRHKNVQKRRLIHHCLSFKNKEEYSSMTPRNHWVPPNYMADNSHGTPMIGLLNHPET

SEQ ID NO: 38970 - protein, 98 aa, Homo sapiens
  MAP TO AC005859.1; EXPRESSED IN PLACENTA, SIGNAL = 1.1; EXPRESSED IN BRAIN, SIGNAL = 1.1; EXPRESSED IN ADULT LIVER, SIGNAL = 1.6; EXPRESSED IN LUNG, SIGNAL = 1.1; EXPRESSED IN HEART, SIGNAL = 1.5; EXPRESSED IN FETAL LIVER, SIGNAL = 1.1; EXPRESSED IN BONE MARROW, SIGNAL = 1.1; EST_HUMAN HIT: AA972343.1, EVALUE 1.00e-40; SWISSPROT HIT: P00778, EVALUE 2.20e+00
LITSVRNLTCGHTAVIPNRVAPLLPSVLKLPVRTVIYVSTQKGKRTTVKAVIYRFFRLHSGLWVRRKAGYKKKFWKKTPARKKQLREFVFCNKTQSKL

SEQ ID NO: 38971 - protein, 39 aa, Homo sapiens
  MAP TO AC005500.1; EXPRESSED IN PLACENTA, SIGNAL = 2.2; EXPRESSED IN LUNG, SIGNAL = 2.3; EXPRESSED IN FETAL LIVER, SIGNAL =   2; EXPRESSED IN HELA, SIGNAL = 2.4; EXPRESSED IN BRAIN, SIGNAL = 2.1; EXPRESSED IN BONE MARROW, SIGNAL = 2.1; EXPRESSED IN ADULT LIVER, SIGNAL = 1.9; EXPRESSED IN HEART, SIGNAL = 2.1; EST_HUMAN HIT: AW836196.1, EVALUE 2.00e-16
MLGRSPADQANSGPLLTAWPCLCTFVLATASQSPSFMKR

SEQ ID NO: 38972 - protein, 40 aa, Homo sapiens
  MAP TO AC002299.1; EXPRESSED IN PLACENTA, SIGNAL = 5.3; EXPRESSED IN LUNG, SIGNAL = 5.1; EXPRESSED IN FETAL LIVER, SIGNAL = 5.6; EXPRESSED IN BRAIN, SIGNAL = 4.1; EXPRESSED IN ADULT LIVER, SIGNAL = 4.1; EXPRESSED IN HELA, SIGNAL =   6; EXPRESSED IN HEART, SIGNAL = 4.4; EXPRESSED IN BONE MARROW, SIGNAL = 6.3; SWISSPROT HIT: P05127, EVALUE 1.00e-17; EST_HUMAN HIT: AA724722.1, EVALUE 2.00e-16
SDKDRRLSVEIWDWDLTSRNDFMGSLSFGISELQKASVDG

SEQ ID NO: 38973 - protein, 127 aa, Homo sapiens
  MAP TO AC004522.1; EXPRESSED IN PLACENTA, SIGNAL =   5; EXPRESSED IN LUNG, SIGNAL = 4.7; EXPRESSED IN FETAL LIVER, SIGNAL = 5.3; EXPRESSED IN BONE MARROW, SIGNAL = 4.3; EXPRESSED IN ADULT LIVER, SIGNAL = 4.3; EXPRESSED IN HELA, SIGNAL = 4.8; EXPRESSED IN HEART, SIGNAL = 4.8; EXPRESSED IN BRAIN, SIGNAL = 4.9; SWISSPROT HIT: O43309, EVALUE 1.00e-35; EST_HUMAN HIT: AV689461.1, EVALUE 2.00e-34
AAQEKDGIVIVKVEEEDEEDHMWGQDSTLQDTPPPDPEIFRQRFRRFCYQNTFGPREALSRLKELCHQWLRPEINTKEQILELLVLEQFLSILPKELQVWLQEYRPDSGEEAVTLLEDLELDLSGQQ

SEQ ID NO: 38974 - protein, 100 aa, Homo sapiens
  MAP TO AC003958.1; EXPRESSED IN PLACENTA, SIGNAL =   8; EXPRESSED IN LUNG, SIGNAL = 8.3; EXPRESSED IN HEART, SIGNAL = 7.7; EXPRESSED IN FETAL LIVER, SIGNAL = 7.8; EXPRESSED IN BRAIN, SIGNAL = 7.9; EXPRESSED IN BONE MARROW, SIGNAL = 8.1; EXPRESSED IN ADULT LIVER, SIGNAL = 6.8; EXPRESSED IN HELA, SIGNAL = 7.8; EST_HUMAN HIT: AA131922.1, EVALUE 1.40e-01
TAVYPEGKNTSSKRPVIMAKHLPAVISPGWRWEGEAGHSFWLWNEGLAFHIFAGWRWTPSSMDASPGKADRQQPNALFPLTPVEATENAWSRGSSQVEMA

SEQ ID NO: 38975 - protein, 52 aa, Homo sapiens
  MAP TO AC004899.1; EXPRESSED IN PLACENTA, SIGNAL = 2.3; EXPRESSED IN LUNG, SIGNAL = 2.2; EXPRESSED IN HEART, SIGNAL = 1.9; EXPRESSED IN HELA, SIGNAL = 2.1; EXPRESSED IN FETAL LIVER, SIGNAL = 1.8; EXPRESSED IN BRAIN, SIGNAL = 1.8; EXPRESSED IN BONE MARROW, SIGNAL =   2; EXPRESSED IN ADULT LIVER, SIGNAL = 1.9; EST_HUMAN HIT: AV732047.1, EVALUE 3.80e+00
VARSSKDGEIIRSVDTIICLNSNFVNQGLCDFGQVVHFYSEFQFLYIQDPAL

SEQ ID NO: 38976 - protein, 29 aa, Homo sapiens
  MAP TO AC004899.1; EXPRESSED IN PLACENTA, SIGNAL = 2.3; EXPRESSED IN LUNG, SIGNAL = 2.2; EXPRESSED IN HEART, SIGNAL = 1.9; EXPRESSED IN HELA, SIGNAL = 2.1; EXPRESSED IN FETAL LIVER, SIGNAL = 1.8; EXPRESSED IN BRAIN, SIGNAL = 1.8; EXPRESSED IN BONE MARROW, SIGNAL =   2; EXPRESSED IN ADULT LIVER, SIGNAL = 1.9
GSKLKGWRNHQISGYDNLFKFQLCKSGVM

SEQ ID NO: 38977 - protein, 50 aa, Homo sapiens
  MAP TO AC005610.1; EXPRESSED IN LUNG, SIGNAL =   3; EXPRESSED IN PLACENTA, SIGNAL = 3.2; EXPRESSED IN HEART, SIGNAL = 3.5; EXPRESSED IN FETAL LIVER, SIGNAL = 3.9; EXPRESSED IN BRAIN, SIGNAL = 3.5; EXPRESSED IN BONE MARROW, SIGNAL = 3.4; EXPRESSED IN HELA, SIGNAL = 3.4; EXPRESSED IN ADULT LIVER, SIGNAL =   3; SWISSPROT HIT: P30999, EVALUE 4.00e-08; EST_HUMAN HIT: AU126185.1, EVALUE 5.00e-17
WSVYIRAAVRKEKGLPILVELLRIDNDRVVCAVATALRNMALDVRNKELI

SEQ ID NO: 38978 - protein, 33 aa, Homo sapiens
  MAP TO AC005610.1; EXPRESSED IN LUNG, SIGNAL =   3; EXPRESSED IN PLACENTA, SIGNAL = 3.2; EXPRESSED IN HEART, SIGNAL = 3.5; EXPRESSED IN FETAL LIVER, SIGNAL = 3.9; EXPRESSED IN BRAIN, SIGNAL = 3.5; EXPRESSED IN BONE MARROW, SIGNAL = 3.4; EXPRESSED IN HELA, SIGNAL = 3.4; EXPRESSED IN ADULT LIVER, SIGNAL =   3; EST_HUMAN HIT: AA985313.1, EVALUE 3.00e-01
FAFPVFAVVSIYPSRCPKRERPAHPRGAAPNRQ

SEQ ID NO: 38979 - protein, 37 aa, Homo sapiens
  MAP TO AC003090.1; EXPRESSED IN ADULT LIVER, SIGNAL =  13; EXPRESSED IN BONE MARROW, SIGNAL = 9.3; EXPRESSED IN PLACENTA, SIGNAL =  13; EXPRESSED IN LUNG, SIGNAL = 9.2; EXPRESSED IN HELA, SIGNAL = 9.3; EXPRESSED IN HEART, SIGNAL = 7.5; EXPRESSED IN BRAIN, SIGNAL = 8.2; EXPRESSED IN FETAL LIVER, SIGNAL = 7.9
GLKLTSLSAGSSTTAESASLQHFWGSLFSGWKNEVQE

SEQ ID NO: 38980 - protein, 20 aa, Homo sapiens
  MAP TO AC003090.1; EXPRESSED IN ADULT LIVER, SIGNAL =  13; EXPRESSED IN BONE MARROW, SIGNAL = 9.3; EXPRESSED IN PLACENTA, SIGNAL =  13; EXPRESSED IN LUNG, SIGNAL = 9.2; EXPRESSED IN HELA, SIGNAL = 9.3; EXPRESSED IN HEART, SIGNAL = 7.5; EXPRESSED IN BRAIN, SIGNAL = 8.2; EXPRESSED IN FETAL LIVER, SIGNAL = 7.9
LLNFILPAREQTAPKMLQTG

SEQ ID NO: 38981 - protein, 177 aa, Homo sapiens
  MAP TO AC004797.1; EXPRESSED IN PLACENTA, SIGNAL = 7.6; EXPRESSED IN HEART, SIGNAL = 6.7; EXPRESSED IN BONE MARROW, SIGNAL = 7.5; EXPRESSED IN ADULT LIVER, SIGNAL = 5.7; EXPRESSED IN LUNG, SIGNAL = 7.9; EXPRESSED IN HELA, SIGNAL = 7.4; EXPRESSED IN FETAL LIVER, SIGNAL = 6.4; EXPRESSED IN BRAIN, SIGNAL =   7; EST_HUMAN HIT: M85719.1, EVALUE 1.00e-29; SWISSPROT HIT: Q9Z1D7, EVALUE 8.90e-02
NVSKGEKGVSSQSKETPVLKTSSEEEEEESEEEATDDSNDYGENEKQKKKEKIVEKVSVTQRRTRRAASVAAATTSPTPRTTRGRRKSVEPPKRKKRATKEPKAPVQKAKCEEKETLTCEKCPRVFNTRWYLEKHMNVTHRRMQICDKCGKKFVLESELSLHQQTDCEKNIQVGFIT

SEQ ID NO: 38982 - protein, 27 aa, Homo sapiens
  MAP TO AC004827.1; EXPRESSED IN BONE MARROW, SIGNAL =   3; EXPRESSED IN PLACENTA, SIGNAL = 2.9; EXPRESSED IN LUNG, SIGNAL = 3.2; EXPRESSED IN HELA, SIGNAL = 2.8; EXPRESSED IN FETAL LIVER, SIGNAL = 3.1; EXPRESSED IN BRAIN, SIGNAL = 2.9; EXPRESSED IN ADULT LIVER, SIGNAL = 2.7; EXPRESSED IN HEART, SIGNAL = 2.5
VEVESTQQFRVGGIRTLGFHGDSSREN

SEQ ID NO: 38983 - protein, 21 aa, Homo sapiens
  MAP TO AC004827.1; EXPRESSED IN BONE MARROW, SIGNAL =   3; EXPRESSED IN PLACENTA, SIGNAL = 2.9; EXPRESSED IN LUNG, SIGNAL = 3.2; EXPRESSED IN HELA, SIGNAL = 2.8; EXPRESSED IN FETAL LIVER, SIGNAL = 3.1; EXPRESSED IN BRAIN, SIGNAL = 2.9; EXPRESSED IN ADULT LIVER, SIGNAL = 2.7; EXPRESSED IN HEART, SIGNAL = 2.5
LFSRLLSPWKPKVLMPPTLNC

SEQ ID NO: 38984 - protein, 108 aa, Homo sapiens
  MAP TO AC004906.1; EXPRESSED IN BRAIN, SIGNAL = 3.1; EXPRESSED IN BONE MARROW, SIGNAL = 3.1; EXPRESSED IN ADULT LIVER, SIGNAL = 2.9; EXPRESSED IN LUNG, SIGNAL = 3.1; EXPRESSED IN HELA, SIGNAL = 3.4; EXPRESSED IN HEART, SIGNAL = 3.5; EXPRESSED IN FETAL LIVER, SIGNAL = 3.2; EXPRESSED IN PLACENTA, SIGNAL = 3.5; EST_HUMAN HIT: AU142752.1, EVALUE 6.30e-02; SWISSPROT HIT: P33176, EVALUE 2.20e-02
EEGHEGLTHFLMNEVIKLQQQMKAKDLQRCELLARLRQLEDEKKQMTLTRVELLTFQERYYKMKEERDSYNDELVKVKDDNYNLAMRYAQLSEEKNMAVMRSRDLQLE

SEQ ID NO: 38985 - protein, 18 aa, Homo sapiens
  MAP TO AC005664.1; EXPRESSED IN LUNG, SIGNAL = 8.7; EXPRESSED IN HELA, SIGNAL =  11; EXPRESSED IN BRAIN, SIGNAL =  10; EXPRESSED IN BONE MARROW, SIGNAL = 8.7; EXPRESSED IN ADULT LIVER, SIGNAL =  12; EXPRESSED IN PLACENTA, SIGNAL =  12; EXPRESSED IN HEART, SIGNAL = 7.9; EXPRESSED IN FETAL LIVER, SIGNAL =  13; EST_HUMAN HIT: BE734190.1, EVALUE 5.00e-04
EPEPAGWVSGHADLPSRQ

SEQ ID NO: 38986 - protein, 26 aa, Homo sapiens
  MAP TO AC005664.1; EXPRESSED IN LUNG, SIGNAL = 8.7; EXPRESSED IN HELA, SIGNAL =  11; EXPRESSED IN BRAIN, SIGNAL =  10; EXPRESSED IN BONE MARROW, SIGNAL = 8.7; EXPRESSED IN ADULT LIVER, SIGNAL =  12; EXPRESSED IN PLACENTA, SIGNAL =  12; EXPRESSED IN HEART, SIGNAL = 7.9; EXPRESSED IN FETAL LIVER, SIGNAL =  13; EST_HUMAN HIT: BE734190.1, EVALUE 1.00e-09
SPSLSPPPARPTRTLCCPMWERMSPS

SEQ ID NO: 38987 - protein, 93 aa, Homo sapiens
  MAP TO AB019441.1; EXPRESSED IN ADULT LIVER, SIGNAL = 7.6; EXPRESSED IN PLACENTA, SIGNAL = 4.5; EXPRESSED IN LUNG, SIGNAL = 3.9; EXPRESSED IN HELA, SIGNAL = 5.7; EXPRESSED IN HEART, SIGNAL = 3.7; EXPRESSED IN BRAIN, SIGNAL = 4.8; EXPRESSED IN BONE MARROW, SIGNAL = 5.9; EXPRESSED IN FETAL LIVER, SIGNAL = 6.3; SWISSPROT HIT: P06331, EVALUE 2.00e-30; EST_HUMAN HIT: AW405472.1, EVALUE 3.00e-35
GLVKPSETLSLTCTVSGGSISSYYWSWIRQPAGKGLEWIGRIYTSGSTNYNPSLKSRVTMSVDTSKNQFSLKLSSVTAADTAVYYCARDTVRG

SEQ ID NO: 38988 - protein, 64 aa, Homo sapiens
  MAP TO AC005841.3; EXPRESSED IN ADULT LIVER, SIGNAL = 5.5; EXPRESSED IN LUNG, SIGNAL =   5; EXPRESSED IN PLACENTA, SIGNAL = 4.7; EXPRESSED IN HELA, SIGNAL = 4.3; EXPRESSED IN HEART, SIGNAL = 4.4; EXPRESSED IN FETAL LIVER, SIGNAL = 5.7; EXPRESSED IN BRAIN, SIGNAL = 4.8; EXPRESSED IN BONE MARROW, SIGNAL = 4.7; SWISSPROT HIT: Q07283, EVALUE 6.80e-01; EST_HUMAN HIT: BF439625.1, EVALUE 1.00e-11
MSTKQEARRDEGEARTRGQEAQLRDRAHLSQQRRLKQATQFLHKDSADLLPLDSLKRLGTSKDL

SEQ ID NO: 38989 - protein, 66 aa, Homo sapiens
  MAP TO AC005841.3; EXPRESSED IN ADULT LIVER, SIGNAL = 5.5; EXPRESSED IN LUNG, SIGNAL =   5; EXPRESSED IN PLACENTA, SIGNAL = 4.7; EXPRESSED IN HELA, SIGNAL = 4.3; EXPRESSED IN HEART, SIGNAL = 4.4; EXPRESSED IN FETAL LIVER, SIGNAL = 5.7; EXPRESSED IN BRAIN, SIGNAL = 4.8; EXPRESSED IN BONE MARROW, SIGNAL = 4.7; SWISSPROT HIT: P55884, EVALUE 3.00e+00; EST_HUMAN HIT: BE740927.1, EVALUE 2.20e-01
DEGAGGTASRPSPPEPAAPAQTGHPVPAQGLGRPAPAGQPQEARHLQGLGEASPLPCQRPLAFSFH

SEQ ID NO: 38990 - protein, 51 aa, Homo sapiens
  MAP TO AC004824.1; EXPRESSED IN PLACENTA, SIGNAL =  12; EXPRESSED IN LUNG, SIGNAL =  12; EXPRESSED IN HELA, SIGNAL =  11; EXPRESSED IN FETAL LIVER, SIGNAL =  13; EXPRESSED IN HEART, SIGNAL =  10; EXPRESSED IN BRAIN, SIGNAL =  12; EXPRESSED IN BONE MARROW, SIGNAL =   9; EXPRESSED IN ADULT LIVER, SIGNAL =  12; SWISSPROT HIT: O88807, EVALUE 3.00e-07; EST_HUMAN HIT: BE089551.1, EVALUE 2.90e+00
DNSSTFELVLGPDQHAYTLALLGNHLKETFYVEAIAFPSAEFSGLISYSVS

SEQ ID NO: 38991 - protein, 68 aa, Homo sapiens
  MAP TO AC004477.1; EXPRESSED IN PLACENTA, SIGNAL =  37; EXPRESSED IN BONE MARROW, SIGNAL =  38; EXPRESSED IN ADULT LIVER, SIGNAL =  41; EXPRESSED IN LUNG, SIGNAL =  47; EXPRESSED IN HELA, SIGNAL =  38; EXPRESSED IN HEART, SIGNAL =  33; EXPRESSED IN FETAL LIVER, SIGNAL =  38; EXPRESSED IN BRAIN, SIGNAL =  41; SWISSPROT HIT: P43672, EVALUE 1.50e+00; EST_HUMAN HIT: N46046.1, EVALUE 1.00e-29
LEIFLAQRAVELSEEADVLSVSQFQLAPAILQGQTKEKMVTMVSVLEDLIGKLTSLQLQHLFMILASP

SEQ ID NO: 38992 - protein, 56 aa, Homo sapiens
  MAP TO AC004414.1; EXPRESSED IN HEART, SIGNAL = 2.2; EXPRESSED IN BRAIN, SIGNAL = 2.6; EXPRESSED IN BONE MARROW, SIGNAL = 1.8; EXPRESSED IN PLACENTA, SIGNAL = 2.1; EXPRESSED IN LUNG, SIGNAL = 2.2; EXPRESSED IN HELA, SIGNAL = 2.1; EXPRESSED IN FETAL LIVER, SIGNAL =   2; EXPRESSED IN ADULT LIVER, SIGNAL =   2; EST_HUMAN HIT: BE746235.1, EVALUE 6.30e+00; SWISSPROT HIT: P52551, EVALUE 1.80e-01
MSSPSDIVSLDSQQDSMKYKDKWATDQEDCSDQDLAGTPDLGPQKSPLWEKNGSEN

SEQ ID NO: 38993 - protein, 36 aa, Homo sapiens
  MAP TO AC004491.1; EXPRESSED IN PLACENTA, SIGNAL = 3.5; EXPRESSED IN LUNG, SIGNAL = 4.1; EXPRESSED IN HELA, SIGNAL =   4; EXPRESSED IN HEART, SIGNAL = 3.8; EXPRESSED IN BONE MARROW, SIGNAL = 3.9; EXPRESSED IN FETAL LIVER, SIGNAL = 3.7; EXPRESSED IN BRAIN, SIGNAL =   4; EXPRESSED IN ADULT LIVER, SIGNAL =   4
QDYEQLNNHSQDSGTPGLVLAEAEGCRKQGSVALPL

SEQ ID NO: 38994 - protein, 57 aa, Homo sapiens
  MAP TO AC004112.1; EXPRESSED IN PLACENTA, SIGNAL = 3.2; EXPRESSED IN LUNG, SIGNAL = 3.7; EXPRESSED IN FETAL LIVER, SIGNAL =   4; EXPRESSED IN BONE MARROW, SIGNAL = 3.3; EXPRESSED IN ADULT LIVER, SIGNAL =   4; EXPRESSED IN HELA, SIGNAL = 3.3; EXPRESSED IN HEART, SIGNAL = 3.6; EXPRESSED IN BRAIN, SIGNAL = 3.4; SWISSPROT HIT: Q99612, EVALUE 1.40e-01; EST_HUMAN HIT: BE645373.1, EVALUE 3.00e-29
LNFYQQVKLVNFIRRQVHQCRCYGCHVKFKSKADLRTHMEETKHTSLLPDRKTWDQL

SEQ ID NO: 38995 - protein, 36 aa, Homo sapiens
  MAP TO AC004592.1; EXPRESSED IN PLACENTA, SIGNAL = 1.5; EXPRESSED IN BRAIN, SIGNAL = 2.1; EXPRESSED IN ADULT LIVER, SIGNAL = 1.7; EXPRESSED IN LUNG, SIGNAL = 2.5; EXPRESSED IN HELA, SIGNAL = 1.7; EXPRESSED IN HEART, SIGNAL = 1.6; EXPRESSED IN FETAL LIVER, SIGNAL = 1.4; EXPRESSED IN BONE MARROW, SIGNAL = 1.6; EST_HUMAN HIT: BF510579.1, EVALUE 3.00e-16
KRRGTWPRNTGLDLRIWSSASPVPWHSQPWSAAQMA

SEQ ID NO: 38996 - protein, 36 aa, Homo sapiens
  MAP TO AC004592.1; EXPRESSED IN PLACENTA, SIGNAL = 1.5; EXPRESSED IN BRAIN, SIGNAL = 2.1; EXPRESSED IN ADULT LIVER, SIGNAL = 1.7; EXPRESSED IN LUNG, SIGNAL = 2.5; EXPRESSED IN HELA, SIGNAL = 1.7; EXPRESSED IN HEART, SIGNAL = 1.6; EXPRESSED IN FETAL LIVER, SIGNAL = 1.4; EXPRESSED IN BONE MARROW, SIGNAL = 1.6; SWISSPROT HIT: P25304, EVALUE 8.40e+00; EST_HUMAN HIT: BF510579.1, EVALUE 8.00e-16
QKKGNVAQKHWVGPSNLVKCKPCPVAQSAMVCGSDG

SEQ ID NO: 38997 - protein, 38 aa, Homo sapiens
  MAP TO AC004914.1; EXPRESSED IN PLACENTA, SIGNAL = 2.6; EXPRESSED IN LUNG, SIGNAL = 2.7; EXPRESSED IN HELA, SIGNAL =   3; EXPRESSED IN FETAL LIVER, SIGNAL = 2.9; EXPRESSED IN BRAIN, SIGNAL = 2.6; EXPRESSED IN BONE MARROW, SIGNAL = 2.7; EXPRESSED IN ADULT LIVER, SIGNAL = 2.7; EXPRESSED IN HEART, SIGNAL = 2.8
GSFMPDSFLSSSGLASRPFWIASQSDSTSRSRRSWAGS

SEQ ID NO: 38998 - protein, 56 aa, Homo sapiens
  MAP TO AC005479.2; EXPRESSED IN ADULT LIVER, SIGNAL = 1.5; EXPRESSED IN PLACENTA, SIGNAL = 3.5; EXPRESSED IN LUNG, SIGNAL = 1.7; EXPRESSED IN FETAL LIVER, SIGNAL = 1.5; EXPRESSED IN HEART, SIGNAL = 1.4; EXPRESSED IN BRAIN, SIGNAL = 1.3; EXPRESSED IN BONE MARROW, SIGNAL = 1.4; SWISSPROT HIT: Q15668, EVALUE 1.00e-28; EST_HUMAN HIT: AA316517.1, EVALUE 4.00e-27
QSKSSKAVVHGILMGVPVPFPIPEPDGCKSGINCPIQKDKTYSYLNKLPVKSEYPS

SEQ ID NO: 38999 - protein, 73 aa, Homo sapiens
  MAP TO AC005840.1; EXPRESSED IN BONE MARROW, SIGNAL = 1.9; EXPRESSED IN PLACENTA, SIGNAL = 1.9; EXPRESSED IN LUNG, SIGNAL =   2; EXPRESSED IN HELA, SIGNAL = 2.1; EXPRESSED IN HEART, SIGNAL = 5.7; EXPRESSED IN FETAL LIVER, SIGNAL = 1.8; EXPRESSED IN ADULT LIVER, SIGNAL = 1.8; EXPRESSED IN BRAIN, SIGNAL = 1.9; SWISSPROT HIT: P47825, EVALUE 1.10e+00; EST_HUMAN HIT: AW361877.1, EVALUE 4.00e-30
NKIAKETLPSLVSIIPDTVPSTDLLIETTASACYMLNNVIQNSYQNAQRLPNTGGIQKIMTISAGDAYASNKA

SEQ ID NO: 39000 - protein, 33 aa, Homo sapiens
  MAP TO AC005840.1; EXPRESSED IN BONE MARROW, SIGNAL = 1.9; EXPRESSED IN PLACENTA, SIGNAL = 1.9; EXPRESSED IN LUNG, SIGNAL =   2; EXPRESSED IN HELA, SIGNAL = 2.1; EXPRESSED IN HEART, SIGNAL = 5.7; EXPRESSED IN FETAL LIVER, SIGNAL = 1.8; EXPRESSED IN ADULT LIVER, SIGNAL = 1.8; EXPRESSED IN BRAIN, SIGNAL = 1.9; EST_HUMAN HIT: BE866184.1, EVALUE 3.00e-10
PPTKQVKLLPSSCILCRHTRNSIMPTRRLSLRR

SEQ ID NO: 39001 - protein, 20 aa, Homo sapiens
  MAP TO AC005840.1; EXPRESSED IN BONE MARROW, SIGNAL = 1.9; EXPRESSED IN PLACENTA, SIGNAL = 1.9; EXPRESSED IN LUNG, SIGNAL =   2; EXPRESSED IN HELA, SIGNAL = 2.1; EXPRESSED IN HEART, SIGNAL = 5.7; EXPRESSED IN FETAL LIVER, SIGNAL = 1.8; EXPRESSED IN ADULT LIVER, SIGNAL = 1.8; EXPRESSED IN BRAIN, SIGNAL = 1.9; EST_HUMAN HIT: AW390706.1, EVALUE 2.90e-02
SRRKMACSTPERWCMSVTQV

SEQ ID NO: 39002 - protein, 17 aa, Homo sapiens
  MAP TO AC004695.1; EXPRESSED IN LUNG, SIGNAL = 5.7; EXPRESSED IN BRAIN, SIGNAL = 1.6; EXPRESSED IN BONE MARROW, SIGNAL = 1.8; EXPRESSED IN PLACENTA, SIGNAL = 1.6; EXPRESSED IN HEART, SIGNAL = 1.3; EXPRESSED IN FETAL LIVER, SIGNAL = 1.7; EXPRESSED IN ADULT LIVER, SIGNAL = 1.6
HCVSHMVIVSTRKPPAL

SEQ ID NO: 39003 - protein, 72 aa, Homo sapiens
  MAP TO AC002059.3; EXPRESSED IN LUNG, SIGNAL = 1.9; EXPRESSED IN HELA, SIGNAL =   2; EXPRESSED IN HEART, SIGNAL = 1.9; EXPRESSED IN FETAL LIVER, SIGNAL = 1.9; EXPRESSED IN BRAIN, SIGNAL = 2.6; EXPRESSED IN BONE MARROW, SIGNAL = 2.2; EXPRESSED IN PLACENTA, SIGNAL = 1.7; EXPRESSED IN ADULT LIVER, SIGNAL =   2; SWISSPROT HIT: Q10567, EVALUE 4.00e-37; EST_HUMAN HIT: AL041574.1, EVALUE 5.00e-34
DSDNPDLRDRGYIYWRLLSTDPVAAKEVVLAEKPLISEETDLIEPTLLDELICYIGTLASVYHKPPSAFVEG

SEQ ID NO: 39004 - protein, 34 aa, Homo sapiens
  MAP TO AC005667.1; EXPRESSED IN BONE MARROW, SIGNAL = 2.4; EXPRESSED IN PLACENTA, SIGNAL = 2.5; EXPRESSED IN LUNG, SIGNAL = 2.8; EXPRESSED IN HELA, SIGNAL = 2.4; EXPRESSED IN HEART, SIGNAL = 2.1; EXPRESSED IN FETAL LIVER, SIGNAL = 2.5; EXPRESSED IN BRAIN, SIGNAL = 2.7; EXPRESSED IN ADULT LIVER, SIGNAL = 2.5
QAKGYSLVSDTIWIHFPQGLVYSVTQYDGKCKAC

SEQ ID NO: 39005 - protein, 27 aa, Homo sapiens
  MAP TO AC000003.1; EXPRESSED IN PLACENTA, SIGNAL = 5.9; EXPRESSED IN HEART, SIGNAL = 4.2; EXPRESSED IN BONE MARROW, SIGNAL = 7.1; EXPRESSED IN ADULT LIVER, SIGNAL = 7.4; EXPRESSED IN LUNG, SIGNAL =   5; EXPRESSED IN HELA, SIGNAL = 5.9; EXPRESSED IN FETAL LIVER, SIGNAL =  12; EXPRESSED IN BRAIN, SIGNAL = 6.9; EST_HUMAN HIT: BF194707.1, EVALUE 3.00e-09
HLLGGYHRCAQIKVCSREMQVTLYEEE

SEQ ID NO: 39006 - protein, 61 aa, Homo sapiens
  MAP TO AC004668.1; EXPRESSED IN PLACENTA, SIGNAL = 1.5; EXPRESSED IN HEART, SIGNAL = 1.4; EXPRESSED IN BONE MARROW, SIGNAL = 1.5; EXPRESSED IN ADULT LIVER, SIGNAL =   2; EXPRESSED IN LUNG, SIGNAL = 1.3; EXPRESSED IN HELA, SIGNAL =   2; EXPRESSED IN FETAL LIVER, SIGNAL = 1.9; EXPRESSED IN BRAIN, SIGNAL = 1.3; SWISSPROT HIT: O75439, EVALUE 2.00e-28; EST_HUMAN HIT: AW402330.1, EVALUE 2.00e-27
VEILADIIQNSTLGEAEIERERGVILREMQEVETNLQEVVFDYLHATAYQNTALGRTILGP

SEQ ID NO: 39007 - protein, 29 aa, Homo sapiens
  MAP TO AC000378.1; EXPRESSED IN LUNG, SIGNAL = 4.2; EXPRESSED IN FETAL LIVER, SIGNAL = 3.3; EXPRESSED IN BRAIN, SIGNAL = 4.1; EXPRESSED IN BONE MARROW, SIGNAL = 3.7; EXPRESSED IN PLACENTA, SIGNAL = 3.2; EXPRESSED IN HELA, SIGNAL = 3.4; EXPRESSED IN HEART, SIGNAL = 2.7; EXPRESSED IN ADULT LIVER, SIGNAL = 3.3
QSHKVKVFCAEAVHDGIDVLPPLCLVAVW

SEQ ID NO: 39008 - protein, 54 aa, Homo sapiens
  MAP TO AC004837.1; EXPRESSED IN LUNG, SIGNAL =   4; EXPRESSED IN FETAL LIVER, SIGNAL = 3.9; EXPRESSED IN BONE MARROW, SIGNAL = 3.6; EXPRESSED IN PLACENTA, SIGNAL = 3.9; EXPRESSED IN HELA, SIGNAL = 3.9; EXPRESSED IN HEART, SIGNAL = 3.4; EXPRESSED IN BRAIN, SIGNAL = 3.6; EXPRESSED IN ADULT LIVER, SIGNAL = 3.6; SWISSPROT HIT: P11233, EVALUE 5.00e-25; EST_HUMAN HIT: AI344679.1, EVALUE 6.00e-24
EQILRVKEDENVPFLLVGNKSDLEDKRQVSVEEAKNRAEQWNVNYVETSAKTRA

SEQ ID NO: 39009 - protein, 38 aa, Homo sapiens
  MAP TO AC003685.1; EXPRESSED IN LUNG, SIGNAL = 1.9; EXPRESSED IN HEART, SIGNAL =   2; EXPRESSED IN FETAL LIVER, SIGNAL = 1.9; EXPRESSED IN BRAIN, SIGNAL =   2; EXPRESSED IN BONE MARROW, SIGNAL = 1.8; EXPRESSED IN PLACENTA, SIGNAL = 1.8; EXPRESSED IN ADULT LIVER, SIGNAL = 1.9
RGAEGPPREVPRAGLGGASPSAPELPLPAYPACLTGLC

SEQ ID NO: 39010 - protein, 53 aa, Homo sapiens
  MAP TO AC006239.5; EXPRESSED IN BONE MARROW, SIGNAL = 1.7; EXPRESSED IN PLACENTA, SIGNAL = 2.1; EXPRESSED IN LUNG, SIGNAL =   2; EXPRESSED IN HELA, SIGNAL = 2.1; EXPRESSED IN HEART, SIGNAL = 1.9; EXPRESSED IN FETAL LIVER, SIGNAL = 2.1; EXPRESSED IN ADULT LIVER, SIGNAL = 1.9; EXPRESSED IN BRAIN, SIGNAL = 1.9
RERAGNFSFAITDLAQVLRHEDDMEWLGAGGQRPEGVYFLVLVFTNCVAVESY

SEQ ID NO: 39011 - protein, 60 aa, Homo sapiens
  MAP TO AC005878.2; EXPRESSED IN PLACENTA, SIGNAL = 3.4; EXPRESSED IN HEART, SIGNAL = 3.6; EXPRESSED IN FETAL LIVER, SIGNAL =   3; EXPRESSED IN LUNG, SIGNAL = 3.8; EXPRESSED IN HELA, SIGNAL = 2.8; EXPRESSED IN BRAIN, SIGNAL = 3.6; EXPRESSED IN BONE MARROW, SIGNAL = 2.9; EXPRESSED IN ADULT LIVER, SIGNAL = 3.1; EST_HUMAN HIT: AW996316.1, EVALUE 1.00e-14
ILFLKNLTVKQPQVASSGDILEESIVIIGDDSSMCVIAPEDFPVGRDVKVEGSDIDDPDP

SEQ ID NO: 39012 - protein, 42 aa, Homo sapiens
  MAP TO AC005753.1; EXPRESSED IN PLACENTA, SIGNAL = 1.4; EXPRESSED IN HEART, SIGNAL = 1.5; EXPRESSED IN FETAL LIVER, SIGNAL = 1.5; EXPRESSED IN BONE MARROW, SIGNAL = 1.4; EXPRESSED IN ADULT LIVER, SIGNAL = 1.6; EXPRESSED IN LUNG, SIGNAL = 1.8; EXPRESSED IN BRAIN, SIGNAL = 0.82
GSILSPMSTSQPEVDGIRATEVILSDFHSLGMPRETRCLANE

SEQ ID NO: 39013 - protein, 41 aa, Homo sapiens
  MAP TO AC004506.1; EXPRESSED IN PLACENTA, SIGNAL =   3; EXPRESSED IN BRAIN, SIGNAL = 3.4; EXPRESSED IN ADULT LIVER, SIGNAL =   3; EXPRESSED IN LUNG, SIGNAL = 4.6; EXPRESSED IN HELA, SIGNAL = 3.2; EXPRESSED IN HEART, SIGNAL =   3; EXPRESSED IN FETAL LIVER, SIGNAL = 2.9; EXPRESSED IN BONE MARROW, SIGNAL = 3.2; EST_HUMAN HIT: AA416705.1, EVALUE 6.00e-04
DTCEARQKGPSRGSSKPAGIFLLLPVPLYFSQFSKLTQLQV

SEQ ID NO: 39014 - protein, 49 aa, Homo sapiens
  MAP TO AC003030.1; EXPRESSED IN PLACENTA, SIGNAL = 1.7; EXPRESSED IN LUNG, SIGNAL = 1.6; EXPRESSED IN HELA, SIGNAL = 1.7; EXPRESSED IN FETAL LIVER, SIGNAL = 1.7; EXPRESSED IN BRAIN, SIGNAL = 1.2; EXPRESSED IN BONE MARROW, SIGNAL = 1.6; EXPRESSED IN ADULT LIVER, SIGNAL = 1.8; EXPRESSED IN HEART, SIGNAL = 1.7; SWISSPROT HIT: Q25604, EVALUE 5.40e-01; EST_HUMAN HIT: BF083472.1, EVALUE 6.70e+00
VKSVKPCLKQLQQCIQTISTLHDDEILPSNPADLFHWLPKEHMCVLVYL

SEQ ID NO: 39015 - protein, 51 aa, Homo sapiens
  MAP TO AC004736.1; EXPRESSED IN FETAL LIVER, SIGNAL = 1.5; EXPRESSED IN BRAIN, SIGNAL = 1.4; EXPRESSED IN BONE MARROW, SIGNAL = 1.3; EXPRESSED IN ADULT LIVER, SIGNAL = 1.6; EXPRESSED IN PLACENTA, SIGNAL = 1.2; EXPRESSED IN HEART, SIGNAL = 1.7; EXPRESSED IN LUNG, SIGNAL = 1.3; EST_HUMAN HIT: BF128525.1, EVALUE 2.20e+00; SWISSPROT HIT: P53408, EVALUE 8.00e+00
TPKTSRLQALHTLDPPLHTDHAHLQADTSTGVHTRELARLSLSEEPQREDL

SEQ ID NO: 39016 - protein, 90 aa, Homo sapiens
  MAP TO AC003688.1; EXPRESSED IN ADULT LIVER, SIGNAL =  14; EXPRESSED IN PLACENTA, SIGNAL =  16; EXPRESSED IN LUNG, SIGNAL =  16; EXPRESSED IN HEART, SIGNAL =  14; EXPRESSED IN BRAIN, SIGNAL =  17; EXPRESSED IN HELA, SIGNAL =  13; EXPRESSED IN FETAL LIVER, SIGNAL =  14; EXPRESSED IN BONE MARROW, SIGNAL =  14; SWISSPROT HIT: P14378, EVALUE 5.90e+00; EST_HUMAN HIT: BE278817.1, EVALUE 5.50e+00
MSEVEAAAGATAVPAATVPATAAGVVAVVVPVPAGEPQKGGGAGGGGGAASGPAAGTPSAPGSRTPGNPATAVSGTPAPPARSQADKPVL

SEQ ID NO: 39017 - protein, 160 aa, Homo sapiens
  MAP TO AC003688.1; EXPRESSED IN ADULT LIVER, SIGNAL =  14; EXPRESSED IN PLACENTA, SIGNAL =  16; EXPRESSED IN LUNG, SIGNAL =  16; EXPRESSED IN HEART, SIGNAL =  14; EXPRESSED IN BRAIN, SIGNAL =  17; EXPRESSED IN HELA, SIGNAL =  13; EXPRESSED IN FETAL LIVER, SIGNAL =  14; EXPRESSED IN BONE MARROW, SIGNAL =  14; SWISSPROT HIT: P13468, EVALUE 1.60e+00; EST_HUMAN HIT: BF568222.1, EVALUE 2.00e-20
LPLTQHRLVRLTPGRGGGGSRDRRRRIARGAGARRRGGPSSGARGGSAPAARPAAFLRLPCGHRYHHRYHPCRRRGHRRRGDRCSPRCRLHLAHPAGSSTGHSRHRPGPSPRLANPPPCSVLAPRASPTRRQRARSRGQWQPAAAARADPASRPRANPSP

SEQ ID NO: 39018 - protein, 177 aa, Homo sapiens
  MAP TO AC004216.1; EXPRESSED IN PLACENTA, SIGNAL = 4.2; EXPRESSED IN BRAIN, SIGNAL = 3.3; EXPRESSED IN BONE MARROW, SIGNAL = 3.2; EXPRESSED IN ADULT LIVER, SIGNAL = 3.4; EXPRESSED IN LUNG, SIGNAL = 3.5; EXPRESSED IN HELA, SIGNAL =   3; EXPRESSED IN HEART, SIGNAL = 2.9; EXPRESSED IN FETAL LIVER, SIGNAL = 3.2
TPSPSSTTPSPSSTFITPSLLHHPLSLLHLHHPFSLLHHPFSLLYLHHSLSYPVSLLYVHHPPPSSITPSPSSTIPSPSSTFINPSPSSTFITSFPTPSTSSTFITPSPSSITPSPSFTIPSPSSTFINPSPSSTTPSPCSTFITPSYSSTTSSPSSTSHSPLPLPPSPSSMPPHSS

SEQ ID NO: 39019 - protein, 31 aa, Homo sapiens
  MAP TO AC004601.1; EXPRESSED IN PLACENTA, SIGNAL = 2.1; EXPRESSED IN BRAIN, SIGNAL = 1.9; EXPRESSED IN BONE MARROW, SIGNAL = 1.9; EXPRESSED IN ADULT LIVER, SIGNAL = 2.1; EXPRESSED IN LUNG, SIGNAL = 2.6; EXPRESSED IN HELA, SIGNAL = 2.3; EXPRESSED IN HEART, SIGNAL = 2.1; EXPRESSED IN FETAL LIVER, SIGNAL =   2
AAWSQIAAEQLLGLSAAAFGLDNPPEEKSGI

SEQ ID NO: 39020 - protein, 38 aa, Homo sapiens
  MAP TO AC004863.1; EXPRESSED IN BONE MARROW, SIGNAL = 7.7; EXPRESSED IN PLACENTA, SIGNAL = 8.6; EXPRESSED IN LUNG, SIGNAL = 8.5; EXPRESSED IN HELA, SIGNAL = 7.7; EXPRESSED IN HEART, SIGNAL = 7.3; EXPRESSED IN FETAL LIVER, SIGNAL = 6.8; EXPRESSED IN ADULT LIVER, SIGNAL = 6.3; EXPRESSED IN BRAIN, SIGNAL = 8.6; EST_HUMAN HIT: AA446697.1, EVALUE 7.00e-13; SWISSPROT HIT: Q01447, EVALUE 3.70e+00
PLPAGWWPWLRWVSLRRLVAASWPWCWPGRLAPSTSST

SEQ ID NO: 39021 - protein, 65 aa, Homo sapiens
  MAP TO AC004863.1; EXPRESSED IN BONE MARROW, SIGNAL = 7.7; EXPRESSED IN PLACENTA, SIGNAL = 8.6; EXPRESSED IN LUNG, SIGNAL = 8.5; EXPRESSED IN HELA, SIGNAL = 7.7; EXPRESSED IN HEART, SIGNAL = 7.3; EXPRESSED IN FETAL LIVER, SIGNAL = 6.8; EXPRESSED IN ADULT LIVER, SIGNAL = 6.3; EXPRESSED IN BRAIN, SIGNAL = 8.6; EST_HUMAN HIT: AA868568.1, EVALUE 1.00e-22
LVAMAAVGEPEKAGGSFLALVLARASGSIDIQHLKRRWAAPEVDECNRLRLLLQEALWPEGKLHK

SEQ ID NO: 39022 - protein, 42 aa, Homo sapiens
  MAP TO AC004241.1; EXPRESSED IN PLACENTA, SIGNAL = 0.87; EXPRESSED IN HEART, SIGNAL = 1.8; EXPRESSED IN FETAL LIVER, SIGNAL = 0.9; EXPRESSED IN BRAIN, SIGNAL = 1.1; EXPRESSED IN LUNG, SIGNAL =   1; EXPRESSED IN BONE MARROW, SIGNAL = 0.78; EXPRESSED IN ADULT LIVER, SIGNAL = 0.77; SWISSPROT HIT: P25638, EVALUE 1.00e-03; EST_HUMAN HIT: AW939119.1, EVALUE 8.00e-18
GNGFFKEGKYERAIECYTRGIAADGANALLPANRAMAYLKIQ

SEQ ID NO: 39023 - protein, 34 aa, Homo sapiens
  MAP TO AC004061.1; EXPRESSED IN PLACENTA, SIGNAL = 1.9; EXPRESSED IN LUNG, SIGNAL = 1.5; EXPRESSED IN HEART, SIGNAL = 1.7; EXPRESSED IN BONE MARROW, SIGNAL = 2.2; EXPRESSED IN ADULT LIVER, SIGNAL = 1.8; EXPRESSED IN HELA, SIGNAL =   2; EXPRESSED IN FETAL LIVER, SIGNAL = 2.5; EXPRESSED IN BRAIN, SIGNAL = 2.1
SQTLSPSDAHHFIINKQLWTRIQLIQFSHQWKKG

SEQ ID NO: 39024 - protein, 56 aa, Homo sapiens
  MAP TO AC004520.1; EXPRESSED IN PLACENTA, SIGNAL = 1.8; EXPRESSED IN HEART, SIGNAL = 1.5; EXPRESSED IN BONE MARROW, SIGNAL = 1.3; EXPRESSED IN ADULT LIVER, SIGNAL = 1.4; EXPRESSED IN FETAL LIVER, SIGNAL = 1.4; EXPRESSED IN LUNG, SIGNAL =   2; EXPRESSED IN BRAIN, SIGNAL = 1.3; EST_HUMAN HIT: AA099770.1, EVALUE 1.00e-26; SWISSPROT HIT: Q98936, EVALUE 4.70e-02
ENGVLREKHEAVDHSSQHEENEERVSAQKENSLQQNDDDENKIAEKPDWEAEKTTE

SEQ ID NO: 39025 - protein, 29 aa, Homo sapiens
  MAP TO AC004613.1; EXPRESSED IN LUNG, SIGNAL = 2.2; EXPRESSED IN BRAIN, SIGNAL = 1.7; EXPRESSED IN ADULT LIVER, SIGNAL =   2; EXPRESSED IN PLACENTA, SIGNAL = 1.8; EXPRESSED IN HELA, SIGNAL =   2; EXPRESSED IN HEART, SIGNAL =   2; EXPRESSED IN BONE MARROW, SIGNAL = 1.7; EXPRESSED IN FETAL LIVER, SIGNAL = 1.8
QNQKSSGQLSGAKARRQGRRKTGGGREVK

SEQ ID NO: 39026 - protein, 37 aa, Homo sapiens
  MAP TO AC004929.2; EXPRESSED IN LUNG, SIGNAL = 4.1; EXPRESSED IN HELA, SIGNAL = 3.5; EXPRESSED IN FETAL LIVER, SIGNAL = 3.9; EXPRESSED IN BRAIN, SIGNAL = 3.8; EXPRESSED IN BONE MARROW, SIGNAL = 3.8; EXPRESSED IN ADULT LIVER, SIGNAL = 3.5; EXPRESSED IN PLACENTA, SIGNAL = 3.5; EXPRESSED IN HEART, SIGNAL = 3.5
DHEYTQDAEVNWHFSGVLGSASGINLIKLSTPVLPLL

SEQ ID NO: 39027 - protein, 23 aa, Homo sapiens
  MAP TO AC004929.2; EXPRESSED IN LUNG, SIGNAL = 4.1; EXPRESSED IN HELA, SIGNAL = 3.5; EXPRESSED IN FETAL LIVER, SIGNAL = 3.9; EXPRESSED IN BRAIN, SIGNAL = 3.8; EXPRESSED IN BONE MARROW, SIGNAL = 3.8; EXPRESSED IN ADULT LIVER, SIGNAL = 3.5; EXPRESSED IN PLACENTA, SIGNAL = 3.5; EXPRESSED IN HEART, SIGNAL = 3.5
TMNTRRMLRSTGTFQGSLAVLVA

SEQ ID NO: 39028 - protein, 25 aa, Homo sapiens
  MAP TO AC004263.1; EXPRESSED IN BONE MARROW, SIGNAL =  12; EXPRESSED IN PLACENTA, SIGNAL =  12; EXPRESSED IN LUNG, SIGNAL =  12; EXPRESSED IN HELA, SIGNAL =  17; EXPRESSED IN HEART, SIGNAL =  10; EXPRESSED IN FETAL LIVER, SIGNAL =  13; EXPRESSED IN ADULT LIVER, SIGNAL =  20; EXPRESSED IN BRAIN, SIGNAL = 7.8; EST_HUMAN HIT: AV761779.1, EVALUE 3.00e-07; SWISSPROT HIT: Q95140, EVALUE 2.00e-08
LLPHIRGNVGFVFTKEDLTEIRDML

SEQ ID NO: 39029 - protein, 28 aa, Homo sapiens
  MAP TO AC004263.1; EXPRESSED IN BONE MARROW, SIGNAL =  12; EXPRESSED IN PLACENTA, SIGNAL =  12; EXPRESSED IN LUNG, SIGNAL =  12; EXPRESSED IN HELA, SIGNAL =  17; EXPRESSED IN HEART, SIGNAL =  10; EXPRESSED IN FETAL LIVER, SIGNAL =  13; EXPRESSED IN ADULT LIVER, SIGNAL =  20; EXPRESSED IN BRAIN, SIGNAL = 7.8; EST_HUMAN HIT: AW955368.1, EVALUE 1.00e-10
LFADCCLISGGMWALCSPRRTSLRSGTC

SEQ ID NO: 39030 - protein, 23 aa, Homo sapiens
  MAP TO AC004847.1; EXPRESSED IN FETAL LIVER, SIGNAL = 1.6; EXPRESSED IN BRAIN, SIGNAL = 1.9; EXPRESSED IN BONE MARROW, SIGNAL = 1.6; EXPRESSED IN PLACENTA, SIGNAL = 1.8; EXPRESSED IN HELA, SIGNAL = 1.7; EXPRESSED IN HEART, SIGNAL = 1.4; EXPRESSED IN ADULT LIVER, SIGNAL =   2; EXPRESSED IN LUNG, SIGNAL =   2; EST_HUMAN HIT: BE045423.1, EVALUE 2.80e+00
TCVHEDHGEKKTPNYKQDLRPCQ

SEQ ID NO: 39031 - protein, 35 aa, Homo sapiens
  MAP TO AC005726.1; EXPRESSED IN BONE MARROW, SIGNAL = 3.9; EXPRESSED IN ADULT LIVER, SIGNAL = 3.7; EXPRESSED IN PLACENTA, SIGNAL =   4; EXPRESSED IN LUNG, SIGNAL = 4.4; EXPRESSED IN HELA, SIGNAL = 4.6; EXPRESSED IN HEART, SIGNAL = 3.6; EXPRESSED IN FETAL LIVER, SIGNAL = 3.7; EXPRESSED IN BRAIN, SIGNAL =   5; EST_HUMAN HIT: BE086844.1, EVALUE 2.00e-13; SWISSPROT HIT: P02457, EVALUE 8.40e+00
FLPEVPLGQLHDSYRAFRSENLNLSIKMDLTRHSG

SEQ ID NO: 39032 - protein, 42 aa, Homo sapiens
  MAP TO AC004752.1; EXPRESSED IN PLACENTA, SIGNAL = 5.3; EXPRESSED IN LUNG, SIGNAL = 5.8; EXPRESSED IN FETAL LIVER, SIGNAL = 5.1; EXPRESSED IN HELA, SIGNAL = 5.1; EXPRESSED IN BRAIN, SIGNAL = 5.2; EXPRESSED IN BONE MARROW, SIGNAL = 5.1; EXPRESSED IN ADULT LIVER, SIGNAL = 5.3; EXPRESSED IN HEART, SIGNAL = 4.4
PAEKPDSEHALAAATTGRAVRVGVQEGLGERRVICYGVKRKL

SEQ ID NO: 39033 - protein, 38 aa, Homo sapiens
  MAP TO AC004752.1; EXPRESSED IN PLACENTA, SIGNAL = 5.3; EXPRESSED IN LUNG, SIGNAL = 5.8; EXPRESSED IN FETAL LIVER, SIGNAL = 5.1; EXPRESSED IN HELA, SIGNAL = 5.1; EXPRESSED IN BRAIN, SIGNAL = 5.2; EXPRESSED IN BONE MARROW, SIGNAL = 5.1; EXPRESSED IN ADULT LIVER, SIGNAL = 5.3; EXPRESSED IN HEART, SIGNAL = 4.4
GLPRNQIQNMRLLLPPPGGRCGWGCRKAWGSAGLFVMG

SEQ ID NO: 39034 - protein, 70 aa, Homo sapiens
  MAP TO AC004850.2; EXPRESSED IN PLACENTA, SIGNAL = 3.5; EXPRESSED IN LUNG, SIGNAL = 4.4; EXPRESSED IN FETAL LIVER, SIGNAL =   4; EXPRESSED IN BONE MARROW, SIGNAL = 3.8; EXPRESSED IN HELA, SIGNAL =   4; EXPRESSED IN BRAIN, SIGNAL = 3.6; EXPRESSED IN ADULT LIVER, SIGNAL = 3.8; EXPRESSED IN HEART, SIGNAL = 3.1; EST_HUMAN HIT: BE384225.1, EVALUE 2.00e-22; SWISSPROT HIT: P49754, EVALUE 2.00e-23
YLHKLFKRDHHKGQRYHEKQISLYAEYDRPNLLPFLRDSTHCPLEKVRHRLPDLYTLDEEVVIDGKLFVF

SEQ ID NO: 39035 - protein, 66 aa, Homo sapiens
  MAP TO AC005695.1; EXPRESSED IN HELA, SIGNAL = 3.5; EXPRESSED IN FETAL LIVER, SIGNAL = 3.6; EXPRESSED IN BRAIN, SIGNAL = 3.6; EXPRESSED IN BONE MARROW, SIGNAL =   4; EXPRESSED IN ADULT LIVER, SIGNAL = 3.8; EXPRESSED IN PLACENTA, SIGNAL = 3.9; EXPRESSED IN HEART, SIGNAL = 3.5; EXPRESSED IN LUNG, SIGNAL =   4; SWISSPROT HIT: Q90922, EVALUE 1.00e-27; EST_HUMAN HIT: BE270224.1, EVALUE 5.00e-18
CDCHPVGAAGKTCNQTTGQCPCKDGVTGITCNRCAKGYQQSRSPIAPCISMCGAPCFSSLWLCGGQ

SEQ ID NO: 39036 - protein, 20 aa, Homo sapiens
  MAP TO AC005695.1; EXPRESSED IN HELA, SIGNAL = 3.5; EXPRESSED IN FETAL LIVER, SIGNAL = 3.6; EXPRESSED IN BRAIN, SIGNAL = 3.6; EXPRESSED IN BONE MARROW, SIGNAL =   4; EXPRESSED IN ADULT LIVER, SIGNAL = 3.8; EXPRESSED IN PLACENTA, SIGNAL = 3.9; EXPRESSED IN HEART, SIGNAL = 3.5; EXPRESSED IN LUNG, SIGNAL =   4
WVLLAKPATKPPASVPARTA

SEQ ID NO: 39037 - protein, 44 aa, Homo sapiens
  MAP TO AC003108.1; EXPRESSED IN LUNG, SIGNAL = 1.4; EXPRESSED IN PLACENTA, SIGNAL = 1.4; EXPRESSED IN HEART, SIGNAL = 1.4; EXPRESSED IN FETAL LIVER, SIGNAL = 1.4; EXPRESSED IN BRAIN, SIGNAL = 1.4; EXPRESSED IN BONE MARROW, SIGNAL =  98; EXPRESSED IN ADULT LIVER, SIGNAL = 1.2; EST_HUMAN HIT: BE150206.1, EVALUE 7.00e-19
IHGDTVQNQLVVQGVELPSYLPLYPPAMDWIFQCISYHAPEVTA

SEQ ID NO: 39038 - protein, 45 aa, Homo sapiens
  MAP TO AC005868.1; EXPRESSED IN LUNG, SIGNAL = 2.5; EXPRESSED IN HELA, SIGNAL = 2.1; EXPRESSED IN PLACENTA, SIGNAL = 2.7; EXPRESSED IN HEART, SIGNAL = 1.9; EXPRESSED IN FETAL LIVER, SIGNAL = 2.2; EXPRESSED IN BRAIN, SIGNAL = 2.1; EXPRESSED IN ADULT LIVER, SIGNAL = 2.3; EXPRESSED IN BONE MARROW, SIGNAL = 2.3; EST_HUMAN HIT: BE742941.1, EVALUE 3.50e-01; SWISSPROT HIT: P30415, EVALUE 3.60e+00
WSQERSRQRPVAEHSREQPRPWGECVEAGDEEENEMKAKVHIVEH

SEQ ID NO: 39039 - protein, 42 aa, Homo sapiens
  MAP TO AC005529.7; EXPRESSED IN LUNG, SIGNAL = 1.9; EXPRESSED IN HELA, SIGNAL = 2.1; EXPRESSED IN ADULT LIVER, SIGNAL = 2.6; EXPRESSED IN PLACENTA, SIGNAL = 1.7; EXPRESSED IN HEART, SIGNAL = 1.6; EXPRESSED IN FETAL LIVER, SIGNAL = 2.1; EXPRESSED IN BRAIN, SIGNAL = 1.9; EXPRESSED IN BONE MARROW, SIGNAL = 1.5; EST_HUMAN HIT: BF034528.1, EVALUE 3.00e-18
FYSKDNEGSWFRSLFVHKVDPRKDAHSTLLSKKETSNLYKIQ

SEQ ID NO: 39040 - protein, 42 aa, Homo sapiens
  MAP TO AC005529.7; EXPRESSED IN LUNG, SIGNAL = 1.9; EXPRESSED IN HELA, SIGNAL = 2.1; EXPRESSED IN ADULT LIVER, SIGNAL = 2.6; EXPRESSED IN PLACENTA, SIGNAL = 1.7; EXPRESSED IN HEART, SIGNAL = 1.6; EXPRESSED IN FETAL LIVER, SIGNAL = 2.1; EXPRESSED IN BRAIN, SIGNAL = 1.9; EXPRESSED IN BONE MARROW, SIGNAL = 1.5; EST_HUMAN HIT: AU122120.1, EVALUE 5.00e-19; SWISSPROT HIT: P39806, EVALUE 3.70e+00
SIPRTMKAAGSAPSLFTKWIPGRMPTPPCCPRRKPATSIRSS

SEQ ID NO: 39041 - protein, 43 aa, Homo sapiens
  MAP TO AC004962.1; EXPRESSED IN BONE MARROW, SIGNAL = 6.1; EXPRESSED IN PLACENTA, SIGNAL = 5.5; EXPRESSED IN LUNG, SIGNAL = 5.7; EXPRESSED IN HELA, SIGNAL = 6.3; EXPRESSED IN FETAL LIVER, SIGNAL = 6.1; EXPRESSED IN ADULT LIVER, SIGNAL = 4.9; EXPRESSED IN HEART, SIGNAL = 5.8; EXPRESSED IN BRAIN, SIGNAL = 6.4
NPVGVGRYLNTWLMETKDRRQRYRSLFLSGSKRYLSDLARDML

SEQ ID NO: 39042 - protein, 34 aa, Homo sapiens
  MAP TO AC004082.1; EXPRESSED IN PLACENTA, SIGNAL = 1.7; EXPRESSED IN HELA, SIGNAL = 1.8; EXPRESSED IN HEART, SIGNAL =   3; EXPRESSED IN FETAL LIVER, SIGNAL = 1.7; EXPRESSED IN BRAIN, SIGNAL =   2; EXPRESSED IN ADULT LIVER, SIGNAL = 2.1; EXPRESSED IN LUNG, SIGNAL = 1.6; EXPRESSED IN BONE MARROW, SIGNAL = 1.7
VMGEIKIALKKEMKTDGEQLIVEILQCRNITYKF

SEQ ID NO: 39043 - protein, 97 aa, Homo sapiens
  MAP TO AC005323.1; EXPRESSED IN HEART, SIGNAL = 3.3; EXPRESSED IN BRAIN, SIGNAL = 1.6; EXPRESSED IN FETAL LIVER, SIGNAL = 2.3; EXPRESSED IN HELA, SIGNAL = 2.5; EXPRESSED IN BONE MARROW, SIGNAL = 2.4; EXPRESSED IN LUNG, SIGNAL = 4.6; EXPRESSED IN ADULT LIVER, SIGNAL = 0.47; EXPRESSED IN PLACENTA, SIGNAL = 1.9; SWISSPROT HIT: P13535, EVALUE 2.00e-46; EST_HUMAN HIT: AA195905.1, EVALUE 2.00e-46
ASLEHEEGKILRIQLELNQVKSEVDRKIAEKDEEIDQMKRNHIRIVESMQSTLDAEIRSRNDAIRLKKKMEGDLNEMEIQLNHANRMAAEALRNYRN

SEQ ID NO: 39044 - protein, 153 aa, Homo sapiens
  MAP TO AC005950.1; EXPRESSED IN LUNG, SIGNAL = 1.7; EXPRESSED IN FETAL LIVER, SIGNAL = 1.5; EXPRESSED IN BRAIN, SIGNAL = 1.6; EXPRESSED IN BONE MARROW, SIGNAL = 1.2; EXPRESSED IN ADULT LIVER, SIGNAL = 1.5; EXPRESSED IN HELA, SIGNAL = 1.7; EXPRESSED IN PLACENTA, SIGNAL = 1.5; EXPRESSED IN HEART, SIGNAL = 1.5; EST_HUMAN HIT: BE938266.1, EVALUE 1.70e-02; SWISSPROT HIT: O95180, EVALUE 7.60e+00
PSPSPIPSSGPLIGAPPGHGQLLVGGQGVAGQEELRVDGAATAAGLGDVGPALSGGAAAAGGAATVQGEQLVKHVGDECQPLVQLRHLRGQRQTRESVVGSTQVCRQPQGPGLGPEKGRCQPSLQVHAVCRRHARVHPMSARPSVAPVCVQGM

SEQ ID NO: 39045 - protein, 47 aa, Homo sapiens
  MAP TO AC005950.1; EXPRESSED IN LUNG, SIGNAL = 1.7; EXPRESSED IN FETAL LIVER, SIGNAL = 1.5; EXPRESSED IN BRAIN, SIGNAL = 1.6; EXPRESSED IN BONE MARROW, SIGNAL = 1.2; EXPRESSED IN ADULT LIVER, SIGNAL = 1.5; EXPRESSED IN HELA, SIGNAL = 1.7; EXPRESSED IN PLACENTA, SIGNAL = 1.5; EXPRESSED IN HEART, SIGNAL = 1.5
PCTVAAPPAAAAPPERAGPTSPSPAAVAAPSTLSSSCPATPCPPTSS

SEQ ID NO: 39046 - protein, 17 aa, Homo sapiens
  MAP TO AC004242.1; EXPRESSED IN PLACENTA, SIGNAL = 1.6; EXPRESSED IN HEART, SIGNAL = 1.6; EXPRESSED IN FETAL LIVER, SIGNAL = 2.2; EXPRESSED IN BRAIN, SIGNAL = 1.5; EXPRESSED IN ADULT LIVER, SIGNAL = 1.7; EXPRESSED IN LUNG, SIGNAL = 2.9; EXPRESSED IN BONE MARROW, SIGNAL = 1.2
ANLMSKITGFNSNRGGK

SEQ ID NO: 39047 - protein, 55 aa, Homo sapiens
  MAP TO AC004382.1; EXPRESSED IN PLACENTA, SIGNAL = 3.9; EXPRESSED IN LUNG, SIGNAL =   4; EXPRESSED IN HELA, SIGNAL =   5; EXPRESSED IN FETAL LIVER, SIGNAL = 4.8; EXPRESSED IN BRAIN, SIGNAL = 4.9; EXPRESSED IN BONE MARROW, SIGNAL = 4.7; EXPRESSED IN ADULT LIVER, SIGNAL = 3.9; EXPRESSED IN HEART, SIGNAL = 4.3; EST_HUMAN HIT: AA514753.1, EVALUE 3.00e-26; SWISSPROT HIT: P47876, EVALUE 2.10e+00
ARCRQALVPRAFHASAVGLRSSDEQKQQPPNSFSQQHSETQGAEKPDPESSHSPP

SEQ ID NO: 39048 - protein, 61 aa, Homo sapiens
  MAP TO AC004031.1; EXPRESSED IN LUNG, SIGNAL = 0.54; EXPRESSED IN BRAIN, SIGNAL = 0.79; EXPRESSED IN HEART, SIGNAL = 1.6; EXPRESSED IN BONE MARROW, SIGNAL = 0.56; EST_HUMAN HIT: AI553853.1, EVALUE 5.00e-17
SEEKCLVRSGLVQLMDRLCSLSNQTESSSSEKQTKKQKVATMAWAAFQVLANRCVEWEKEE

SEQ ID NO: 39049 - protein, 42 aa, Homo sapiens
  MAP TO AC004031.1; EXPRESSED IN LUNG, SIGNAL = 0.54; EXPRESSED IN BRAIN, SIGNAL = 0.79; EXPRESSED IN HEART, SIGNAL = 1.6; EXPRESSED IN BONE MARROW, SIGNAL = 0.56; EST_HUMAN HIT: AI553853.1, EVALUE 1.40e+00
PAPVRNRPRSRRWPPWPGLPSRCLPTAVLSGKKRKVRCQTPF

SEQ ID NO: 39050 - protein, 62 aa, Homo sapiens
  MAP TO AC004466.1; EXPRESSED IN LUNG, SIGNAL = 3.4; EXPRESSED IN BRAIN, SIGNAL = 2.8; EXPRESSED IN ADULT LIVER, SIGNAL = 3.4; EXPRESSED IN PLACENTA, SIGNAL = 3.2; EXPRESSED IN HELA, SIGNAL = 3.2; EXPRESSED IN HEART, SIGNAL = 3.5; EXPRESSED IN FETAL LIVER, SIGNAL = 2.4; EXPRESSED IN BONE MARROW, SIGNAL = 3.4; EST_HUMAN HIT: AA287737.1, EVALUE 2.00e-19
CPRPCADTPGPQPQPMDLRVGQRPPVEPPPEPTLLALQRPQRLHHHLFLAGLQQQRSVEPMR

SEQ ID NO: 39051 - protein, 31 aa, Homo sapiens
  MAP TO AC004466.1; EXPRESSED IN LUNG, SIGNAL = 3.4; EXPRESSED IN BRAIN, SIGNAL = 2.8; EXPRESSED IN ADULT LIVER, SIGNAL = 3.4; EXPRESSED IN PLACENTA, SIGNAL = 3.2; EXPRESSED IN HELA, SIGNAL = 3.2; EXPRESSED IN HEART, SIGNAL = 3.5; EXPRESSED IN FETAL LIVER, SIGNAL = 2.4; EXPRESSED IN BONE MARROW, SIGNAL = 3.4; EST_HUMAN HIT: AA287737.1, EVALUE 4.00e-12; SWISSPROT HIT: P56690, EVALUE 2.20e+00
CGWASGPQWSPHQSPHCWPCSVPSACTTTSS

SEQ ID NO: 39052 - protein, 19 aa, Homo sapiens
  MAP TO AC005840.1; EXPRESSED IN BRAIN, SIGNAL = 1.2; EXPRESSED IN ADULT LIVER, SIGNAL = 1.2; EXPRESSED IN PLACENTA, SIGNAL = 1.2; EXPRESSED IN LUNG, SIGNAL = 1.3; EXPRESSED IN HEART, SIGNAL =   2; EXPRESSED IN BONE MARROW, SIGNAL = 1.3; EXPRESSED IN FETAL LIVER, SIGNAL = 1.3; EST_HUMAN HIT: AU125826.1, EVALUE 3.20e-01
GIFSPREALTPSWGMQTWR

SEQ ID NO: 39053 - protein, 60 aa, Homo sapiens
  MAP TO AC004098.1; EXPRESSED IN BONE MARROW, SIGNAL = 1.7; EXPRESSED IN PLACENTA, SIGNAL = 1.5; EXPRESSED IN LUNG, SIGNAL = 1.5; EXPRESSED IN FETAL LIVER, SIGNAL = 1.4; EXPRESSED IN ADULT LIVER, SIGNAL = 1.4; EXPRESSED IN HEART, SIGNAL = 1.6; EXPRESSED IN BRAIN, SIGNAL = 1.6; EST_HUMAN HIT: AL119606.1, EVALUE 1.00e-25; SWISSPROT HIT: P46460, EVALUE 1.00e-26
LGANSGLHIIIFDEIDAICKQRGSMAGSTGVHDTVVNQLLSKIDGVEQLNNILVIGMFTF

SEQ ID NO: 39054 - protein, 54 aa, Homo sapiens
  MAP TO AC005962.1; EXPRESSED IN PLACENTA, SIGNAL =  12; EXPRESSED IN ADULT LIVER, SIGNAL =  12; EXPRESSED IN LUNG, SIGNAL =  16; EXPRESSED IN HEART, SIGNAL =  10; EXPRESSED IN FETAL LIVER, SIGNAL =  12; EXPRESSED IN BRAIN, SIGNAL =  13; EXPRESSED IN HELA, SIGNAL =  12; EXPRESSED IN BONE MARROW, SIGNAL =  12; EST_HUMAN HIT: AW118218.1, EVALUE 1.00e-10; SWISSPROT HIT: P47883, EVALUE 3.00e-11
TSPKMLVDFLHETKTISYQGCMAQIFFFHLLGGGTVFFLSVMAYDRYIAISQPL

SEQ ID NO: 39055 - protein, 47 aa, Homo sapiens
  MAP TO AC003689.1; EXPRESSED IN LUNG, SIGNAL =   3; EXPRESSED IN FETAL LIVER, SIGNAL = 3.3; EXPRESSED IN PLACENTA, SIGNAL = 3.1; EXPRESSED IN HELA, SIGNAL = 2.5; EXPRESSED IN BRAIN, SIGNAL = 2.5; EXPRESSED IN BONE MARROW, SIGNAL = 2.7; EXPRESSED IN ADULT LIVER, SIGNAL = 2.5; EXPRESSED IN HEART, SIGNAL = 4.2; EST_HUMAN HIT: AW856805.1, EVALUE 1.00e-03; SWISSPROT HIT: P04196, EVALUE 3.00e-03
AHIHTPHQHGDHTPQHGDHTHQHGNHTHISNGDYTHQRGAHTYTPTW

SEQ ID NO: 39056 - protein, 65 aa, Homo sapiens
  MAP TO AC004764.1; EXPRESSED IN PLACENTA, SIGNAL = 5.4; EXPRESSED IN HEART, SIGNAL = 5.3; EXPRESSED IN FETAL LIVER, SIGNAL = 7.7; EXPRESSED IN BRAIN, SIGNAL = 5.5; EXPRESSED IN BONE MARROW, SIGNAL = 5.7; EXPRESSED IN HELA, SIGNAL = 5.7; EXPRESSED IN ADULT LIVER, SIGNAL = 5.6; EXPRESSED IN LUNG, SIGNAL = 5.3; SWISSPROT HIT: P35500, EVALUE 3.20e-02
MKVYVDPINYWKNGYNLLDVIIIIVMFLPYALRQLMGKQFTYLYIADGMQSLRILKLIGYSQGIR

SEQ ID NO: 39057 - protein, 60 aa, Homo sapiens
  MAP TO AC002081.1; EXPRESSED IN PLACENTA, SIGNAL = 1.8; EXPRESSED IN BRAIN, SIGNAL = 1.7; EXPRESSED IN ADULT LIVER, SIGNAL = 1.6; EXPRESSED IN LUNG, SIGNAL = 1.8; EXPRESSED IN HEART, SIGNAL = 1.5; EXPRESSED IN FETAL LIVER, SIGNAL = 1.6; EXPRESSED IN BONE MARROW, SIGNAL = 1.6; EST_HUMAN HIT: AW966212.1, EVALUE 2.00e-10; SWISSPROT HIT: P21849, EVALUE 5.00e-03
TQIMYKWIEPKICREDLTDAIRLPPSGEKKDCPPCNPGFYNNGSSSCHPCPPGTFSDGTK

SEQ ID NO: 39058 - protein, 34 aa, Homo sapiens
  MAP TO AC005747.1; EXPRESSED IN BONE MARROW, SIGNAL =   2; EXPRESSED IN ADULT LIVER, SIGNAL = 1.7; EXPRESSED IN PLACENTA, SIGNAL = 1.9; EXPRESSED IN LUNG, SIGNAL =   2; EXPRESSED IN HELA, SIGNAL = 1.8; EXPRESSED IN FETAL LIVER, SIGNAL = 1.7; EXPRESSED IN HEART, SIGNAL = 1.6; EXPRESSED IN BRAIN, SIGNAL = 2.5; EST_HUMAN HIT: AL134987.1, EVALUE 3.00e-13; SWISSPROT HIT: P50532, EVALUE 4.90e+00
MNFRENFKKDMKKCDHHIADLRKQLASRYASVEK

SEQ ID NO: 39059 - protein, 47 aa, Homo sapiens
  MAP TO AC004856.1; EXPRESSED IN LUNG, SIGNAL = 3.2; EXPRESSED IN ADULT LIVER, SIGNAL = 3.4; EXPRESSED IN PLACENTA, SIGNAL = 3.6; EXPRESSED IN HELA, SIGNAL = 4.3; EXPRESSED IN HEART, SIGNAL = 2.6; EXPRESSED IN FETAL LIVER, SIGNAL = 3.3; EXPRESSED IN BRAIN, SIGNAL = 2.7; EXPRESSED IN BONE MARROW, SIGNAL = 3.5
LTTKSSYTLKHIVHKILEKKLSNSESAICNNNNVMGPSRWAAENSAR

SEQ ID NO: 39060 - protein, 43 aa, Homo sapiens
  MAP TO AC005077.1; EXPRESSED IN ADULT LIVER, SIGNAL = 3.3; EXPRESSED IN HEART, SIGNAL =   4; EXPRESSED IN BRAIN, SIGNAL = 1.8; EXPRESSED IN PLACENTA, SIGNAL = 1.5; EXPRESSED IN LUNG, SIGNAL = 1.6; EXPRESSED IN FETAL LIVER, SIGNAL = 2.1; EXPRESSED IN BONE MARROW, SIGNAL = 1.3; EST_HUMAN HIT: W73376.1, EVALUE 9.00e-17; SWISSPROT HIT: P40926, EVALUE 7.00e-18
KKGIEKNLGIGKVSSFEEKMISDAIPELKASIKKGEDFVKTLK

SEQ ID NO: 39061 - protein, 83 aa, Homo sapiens
  MAP TO AC005697.1; EXPRESSED IN LUNG, SIGNAL = 4.9; EXPRESSED IN FETAL LIVER, SIGNAL = 4.6; EXPRESSED IN BONE MARROW, SIGNAL = 4.5; EXPRESSED IN PLACENTA, SIGNAL = 4.2; EXPRESSED IN HELA, SIGNAL = 4.3; EXPRESSED IN HEART, SIGNAL = 3.7; EXPRESSED IN BRAIN, SIGNAL = 4.2; EXPRESSED IN ADULT LIVER, SIGNAL = 4.6; EST_HUMAN HIT: AU142764.1, EVALUE 4.60e+00; SWISSPROT HIT: O62699, EVALUE 1.00e-26
AKIEEHLARVEAVTKEIETTGTYQLTGDELIFATKQAWRNAPRCIGRIQWSNLQVNFLRLERERAGGGQALSRWLGTATQSCA

SEQ ID NO: 39062 - protein, 45 aa, Homo sapiens
  MAP TO AC005754.1; EXPRESSED IN LUNG, SIGNAL =   5; EXPRESSED IN HELA, SIGNAL = 5.1; EXPRESSED IN PLACENTA, SIGNAL = 4.6; EXPRESSED IN HEART, SIGNAL =   4; EXPRESSED IN FETAL LIVER, SIGNAL = 4.9; EXPRESSED IN BRAIN, SIGNAL = 5.2; EXPRESSED IN ADULT LIVER, SIGNAL = 4.2; EXPRESSED IN BONE MARROW, SIGNAL = 5.1; EST_HUMAN HIT: BE263191.1, EVALUE 8.00e-22
FSGRGNGEWLLCGQFVKRPGAGDRRTCCEGGQGRFQRKKNAFAVR

SEQ ID NO: 39063 - protein, 32 aa, Homo sapiens
  MAP TO AC004861.1; EXPRESSED IN PLACENTA, SIGNAL = 1.2; EXPRESSED IN LUNG, SIGNAL = 1.1; EXPRESSED IN HEART, SIGNAL = 1.4; EXPRESSED IN FETAL LIVER, SIGNAL =   1; EXPRESSED IN BONE MARROW, SIGNAL = 1.9; EXPRESSED IN ADULT LIVER, SIGNAL =   1; EXPRESSED IN BRAIN, SIGNAL = 0.82
GWKTMRKERGTCLASGFVYLVLTLHTPAPLRL

SEQ ID NO: 39064 - protein, 78 aa, Homo sapiens
  MAP TO AC004381.1; EXPRESSED IN BONE MARROW, SIGNAL = 2.1; EXPRESSED IN PLACENTA, SIGNAL =   2; EXPRESSED IN LUNG, SIGNAL =   2; EXPRESSED IN HELA, SIGNAL = 2.3; EXPRESSED IN FETAL LIVER, SIGNAL =   2; EXPRESSED IN ADULT LIVER, SIGNAL =   2; EXPRESSED IN HEART, SIGNAL =   2; EXPRESSED IN BRAIN, SIGNAL = 2.4; SWISSPROT HIT: P46873, EVALUE 9.20e-01; EST_HUMAN HIT: AW361286.1, EVALUE 8.60e+00
LVSNCGRWWIKTVQPAVHGSTRVQMVATIHPESDRHQETSDVFRLRNFLLTPKCSGLSCVIMADVMKGCALWFLATNP

SEQ ID NO: 39065 - protein, 27 aa, Homo sapiens
  MAP TO AC004470.1; EXPRESSED IN PLACENTA, SIGNAL = 2.2; EXPRESSED IN LUNG, SIGNAL = 2.4; EXPRESSED IN HEART, SIGNAL = 2.3; EXPRESSED IN FETAL LIVER, SIGNAL = 1.7; EXPRESSED IN BRAIN, SIGNAL = 2.2; EXPRESSED IN BONE MARROW, SIGNAL = 2.3; EXPRESSED IN ADULT LIVER, SIGNAL =   2; EXPRESSED IN HELA, SIGNAL = 2.1
IQIIKRLIRTKYSVMAMAKAQVMSIKF

SEQ ID NO: 39066 - protein, 27 aa, Homo sapiens
  MAP TO AC004470.1; EXPRESSED IN PLACENTA, SIGNAL = 2.2; EXPRESSED IN LUNG, SIGNAL = 2.4; EXPRESSED IN HEART, SIGNAL = 2.3; EXPRESSED IN FETAL LIVER, SIGNAL = 1.7; EXPRESSED IN BRAIN, SIGNAL = 2.2; EXPRESSED IN BONE MARROW, SIGNAL = 2.3; EXPRESSED IN ADULT LIVER, SIGNAL =   2; EXPRESSED IN HELA, SIGNAL = 2.1; SWISSPROT HIT: P13485, EVALUE 2.20e+00
LNLMLITWAFAMAITEYFVLINLLIIW

SEQ ID NO: 39067 - protein, 32 aa, Homo sapiens
  MAP TO AC006515.7; EXPRESSED IN PLACENTA, SIGNAL = 0.64; EXPRESSED IN LUNG, SIGNAL = 0.79; EXPRESSED IN HEART, SIGNAL =  72; EXPRESSED IN BRAIN, SIGNAL = 0.61; EXPRESSED IN ADULT LIVER, SIGNAL = 0.69; EXPRESSED IN BONE MARROW, SIGNAL = 0.63; EST_HUMAN HIT: AA613171.1, EVALUE 2.00e-11
MKKTHFFVGKSTAIDTFSWPAASVVESVSTSP

SEQ ID NO: 39068 - protein, 28 aa, Homo sapiens
  MAP TO AC006515.7; EXPRESSED IN PLACENTA, SIGNAL = 0.64; EXPRESSED IN LUNG, SIGNAL = 0.79; EXPRESSED IN HEART, SIGNAL =  72; EXPRESSED IN BRAIN, SIGNAL = 0.61; EXPRESSED IN ADULT LIVER, SIGNAL = 0.69; EXPRESSED IN BONE MARROW, SIGNAL = 0.63; EST_HUMAN HIT: AA613171.1, EVALUE 1.00e-07
VGDVETLSTTEAAGQEKVSIAVLLPTKK

SEQ ID NO: 39069 - protein, 64 aa, Homo sapiens
  MAP TO AC005971.5; EXPRESSED IN PLACENTA, SIGNAL = 1.8; EXPRESSED IN LUNG, SIGNAL = 2.2; EXPRESSED IN HEART, SIGNAL =   2; EXPRESSED IN BRAIN, SIGNAL = 2.7; EXPRESSED IN ADULT LIVER, SIGNAL = 1.9; EXPRESSED IN FETAL LIVER, SIGNAL =   2; EXPRESSED IN BONE MARROW, SIGNAL =   2; EXPRESSED IN HELA, SIGNAL =   2; EST_HUMAN HIT: AA910432.1, EVALUE 6.00e-23; SWISSPROT HIT: P07730, EVALUE 5.90e+00
VLCAHASVCECAAQVHLPSGSALVSASYAGCPLRAQQQRSGTGQGEDCKFLDTPTQIPAPDPCL

SEQ ID NO: 39070 - protein, 89 aa, Homo sapiens
  MAP TO AC004586.1; EXPRESSED IN LUNG, SIGNAL = 8.2; EXPRESSED IN BRAIN, SIGNAL = 6.6; EXPRESSED IN PLACENTA, SIGNAL = 7.2; EXPRESSED IN HEART, SIGNAL = 6.8; EXPRESSED IN FETAL LIVER, SIGNAL = 6.4; EXPRESSED IN BONE MARROW, SIGNAL = 7.7; EXPRESSED IN ADULT LIVER, SIGNAL = 7.1; EXPRESSED IN HELA, SIGNAL = 7.3; EST_HUMAN HIT: BE561130.1, EVALUE 2.00e-22
NLITVVRCLIQEEGETTILQLEKDLRTQVELMRKQKKERKQELKLLQEQDQELCEILCMPHYDIDSASVPSLEELNQFRQHVTTLRETK

SEQ ID NO: 39071 - protein, 162 aa, Homo sapiens
  MAP TO AC004886.1; EXPRESSED IN LUNG, SIGNAL = 1.7; EXPRESSED IN BRAIN, SIGNAL = 1.7; EXPRESSED IN BONE MARROW, SIGNAL = 1.3; EXPRESSED IN ADULT LIVER, SIGNAL = 1.3; EXPRESSED IN PLACENTA, SIGNAL = 2.5; EXPRESSED IN HEART, SIGNAL = 1.6; EXPRESSED IN FETAL LIVER, SIGNAL = 1.5; SWISSPROT HIT: P49955, EVALUE 8.50e-01
KLPTAVSLYSPTDEQSIMQKEGSQKALKSAEEMYEEMMHKTHKYKAFPAANERDEVFEKEPLYGGMLIEDYIYESLVEDTYNGSVDGSLLTRQEEENGFMQQKGREQKIRLSEQIYEDPMQKITDLQKEFYELESLHSVVPQEDIVSSSFIIPESHEIVDLG

SEQ ID NO: 39072 - protein, 104 aa, Homo sapiens
  MAP TO AC004408.1; EXPRESSED IN BONE MARROW, SIGNAL = 3.1; EXPRESSED IN PLACENTA, SIGNAL = 3.1; EXPRESSED IN LUNG, SIGNAL = 3.1; EXPRESSED IN HELA, SIGNAL = 3.3; EXPRESSED IN FETAL LIVER, SIGNAL = 3.3; EXPRESSED IN BRAIN, SIGNAL = 4.1; EXPRESSED IN ADULT LIVER, SIGNAL = 2.6; EXPRESSED IN HEART, SIGNAL =   3; EST_HUMAN HIT: AA551280.1, EVALUE 7.00e-05
IPVGLGACRPLQGLQALAPLRGQSPCPHMSLPAPCRQSFGCRGCRHQKCLGGTVPVACLPGLVGGCWGKGLGAGPAPLGTRACWRAPRWPVPVAGPRKQGRVPG

SEQ ID NO: 39073 - protein, 117 aa, Homo sapiens
  MAP TO AC004408.1; EXPRESSED IN BONE MARROW, SIGNAL = 3.1; EXPRESSED IN PLACENTA, SIGNAL = 3.1; EXPRESSED IN LUNG, SIGNAL = 3.1; EXPRESSED IN HELA, SIGNAL = 3.3; EXPRESSED IN FETAL LIVER, SIGNAL = 3.3; EXPRESSED IN BRAIN, SIGNAL = 4.1; EXPRESSED IN ADULT LIVER, SIGNAL = 2.6; EXPRESSED IN HEART, SIGNAL =   3; SWISSPROT HIT: P03290, EVALUE 3.50e-01; EST_HUMAN HIT: AA551280.1, EVALUE 7.00e-22
LTRDPTLLPGTSHWNGPPGSTPACTSTQGSWASPQAFTPAATHQAGQARYGHCPAKTLLMPTPPAAETLPTRSWETHVWTWRLTPQRGQGLETLQGAARPQPDRDPGRTRKKTMRKS

SEQ ID NO: 39074 - protein, 59 aa, Homo sapiens
  MAP TO AC004485.1; EXPRESSED IN PLACENTA, SIGNAL = 2.4; EXPRESSED IN HELA, SIGNAL = 2.4; EXPRESSED IN HEART, SIGNAL = 2.2; EXPRESSED IN BONE MARROW, SIGNAL = 2.2; EXPRESSED IN ADULT LIVER, SIGNAL = 2.3; EXPRESSED IN BRAIN, SIGNAL = 2.2; EXPRESSED IN FETAL LIVER, SIGNAL =   2; EXPRESSED IN LUNG, SIGNAL = 2.6; SWISSPROT HIT: P27284, EVALUE 4.60e+00
SSNNSTAGITKRKVERSKNINYTITKKGNIRTGGNLLSIMGTTLLEPKTLEKRSFLLEH

SEQ ID NO: 39075 - protein, 33 aa, Homo sapiens
  MAP TO AC005040.2; EXPRESSED IN LUNG, SIGNAL = 3.4; EXPRESSED IN ADULT LIVER, SIGNAL =   4; EXPRESSED IN PLACENTA, SIGNAL = 3.5; EXPRESSED IN HELA, SIGNAL = 3.8; EXPRESSED IN HEART, SIGNAL = 4.1; EXPRESSED IN FETAL LIVER, SIGNAL =   4; EXPRESSED IN BRAIN, SIGNAL = 3.8; EXPRESSED IN BONE MARROW, SIGNAL = 3.7; EST_HUMAN HIT: BE350127.1, EVALUE 3.00e-08
VFRGSNTHGTAITYESNAFFWNPPEGPAWGCFT

SEQ ID NO: 39076 - protein, 19 aa, Homo sapiens
  MAP TO AC005040.2; EXPRESSED IN LUNG, SIGNAL = 3.4; EXPRESSED IN ADULT LIVER, SIGNAL =   4; EXPRESSED IN PLACENTA, SIGNAL = 3.5; EXPRESSED IN HELA, SIGNAL = 3.8; EXPRESSED IN HEART, SIGNAL = 4.1; EXPRESSED IN FETAL LIVER, SIGNAL =   4; EXPRESSED IN BRAIN, SIGNAL = 3.8; EXPRESSED IN BONE MARROW, SIGNAL = 3.7; EST_HUMAN HIT: T85889.1, EVALUE 3.70e-02
NITVFHLPHLVPLEGLQGQ

SEQ ID NO: 39077 - protein, 36 aa, Homo sapiens
  MAP TO AC004988.2; EXPRESSED IN PLACENTA, SIGNAL = 1.3; EXPRESSED IN LUNG, SIGNAL = 1.3; EXPRESSED IN FETAL LIVER, SIGNAL = 1.5; EXPRESSED IN BRAIN, SIGNAL = 1.9; EXPRESSED IN BONE MARROW, SIGNAL = 1.3; EXPRESSED IN ADULT LIVER, SIGNAL = 1.4; EXPRESSED IN HEART, SIGNAL = 1.4
KDRSIEIIQSEEEREQKIAPSYSKQEITDPQEPIQQ

SEQ ID NO: 39078 - protein, 58 aa, Homo sapiens
  MAP TO AC005740.1; EXPRESSED IN BONE MARROW, SIGNAL = 9.7; EXPRESSED IN ADULT LIVER, SIGNAL =   9; EXPRESSED IN PLACENTA, SIGNAL = 9.3; EXPRESSED IN LUNG, SIGNAL =  10; EXPRESSED IN HELA, SIGNAL = 9.3; EXPRESSED IN FETAL LIVER, SIGNAL =  10; EXPRESSED IN HEART, SIGNAL = 9.2; EXPRESSED IN BRAIN, SIGNAL =  10; EST_HUMAN HIT: BE742675.1, EVALUE 1.00e-27; SWISSPROT HIT: O88958, EVALUE 9.00e-29
VMILITGAHKAFALYKAIEEGVNHMWTVSAFQQHPRTVFVCDEDATLELKVKTVKYFK

SEQ ID NO: 39079 - protein, 61 aa, Homo sapiens
  MAP TO AC004912.1; EXPRESSED IN LUNG, SIGNAL = 1.9; EXPRESSED IN ADULT LIVER, SIGNAL =   2; EXPRESSED IN PLACENTA, SIGNAL = 1.8; EXPRESSED IN HELA, SIGNAL = 1.8; EXPRESSED IN HEART, SIGNAL = 1.5; EXPRESSED IN FETAL LIVER, SIGNAL =   2; EXPRESSED IN BRAIN, SIGNAL = 1.8; EXPRESSED IN BONE MARROW, SIGNAL = 1.7; SWISSPROT HIT: Q09322, EVALUE 3.50e+00
SISHYDDDDDDDDDDDDLMLLKIVCLKCSVFHKVFKEFTKIANNIKLIDNETEVKGTHGLE

SEQ ID NO: 39080 - protein, 47 aa, Homo sapiens
  MAP TO AC006238.1; EXPRESSED IN LUNG, SIGNAL = 7.4; EXPRESSED IN FETAL LIVER, SIGNAL =   9; EXPRESSED IN BONE MARROW, SIGNAL = 7.2; EXPRESSED IN PLACENTA, SIGNAL = 8.1; EXPRESSED IN HELA, SIGNAL = 7.5; EXPRESSED IN BRAIN, SIGNAL = 7.4; EXPRESSED IN ADULT LIVER, SIGNAL =  10; EXPRESSED IN HEART, SIGNAL = 6.7; SWISSPROT HIT: Q16943, EVALUE 4.20e-01; EST_HUMAN HIT: AW957031.1, EVALUE 2.00e-19
DEGLRLRKVAHSDKPGSTSTASFRDNVTSPLPSLLVVIAAIFIGFFL

SEQ ID NO: 39081 - protein, 97 aa, Homo sapiens
  MAP TO AC004456.1; EXPRESSED IN PLACENTA, SIGNAL =   3; EXPRESSED IN LUNG, SIGNAL = 2.5; EXPRESSED IN HELA, SIGNAL =   2; EXPRESSED IN HEART, SIGNAL = 2.1; EXPRESSED IN BRAIN, SIGNAL = 2.3; EXPRESSED IN FETAL LIVER, SIGNAL = 2.2; EXPRESSED IN ADULT LIVER, SIGNAL = 2.6; EXPRESSED IN BONE MARROW, SIGNAL = 1.8; SWISSPROT HIT: O95859, EVALUE 2.00e-51; EST_HUMAN HIT: BF338835.1, EVALUE 7.00e-50
QGCGKKMYSFLRGTKQLQVLRFLGISIGVTQILAMILTITLLWALYYDRREPGTDQMMSLKNDNSQHLSCPSVELLKPSLSRIFEHTSMANSFNTHF

SEQ ID NO: 39082 - protein, 35 aa, Homo sapiens
  MAP TO AC005225.2; EXPRESSED IN ADULT LIVER, SIGNAL = 5.9; EXPRESSED IN PLACENTA, SIGNAL = 4.6; EXPRESSED IN HEART, SIGNAL = 4.1; EXPRESSED IN FETAL LIVER, SIGNAL = 4.7; EXPRESSED IN BRAIN, SIGNAL = 5.3; EXPRESSED IN BONE MARROW, SIGNAL =   5; EXPRESSED IN LUNG, SIGNAL =   5; EXPRESSED IN HELA, SIGNAL = 4.7; SWISSPROT HIT: Q13370, EVALUE 8.40e+00; EST_HUMAN HIT: AI764973.1, EVALUE 4.00e-12
SPERTFGCCSIKSTASSKYSRCTSFRSSGRSSNLK

SEQ ID NO: 39083 - protein, 38 aa, Homo sapiens
  MAP TO AC004150.8; EXPRESSED IN PLACENTA, SIGNAL = 3.1; EXPRESSED IN LUNG, SIGNAL = 3.2; EXPRESSED IN FETAL LIVER, SIGNAL = 3.2; EXPRESSED IN BRAIN, SIGNAL = 3.1; EXPRESSED IN BONE MARROW, SIGNAL = 2.8; EXPRESSED IN ADULT LIVER, SIGNAL = 3.6; EXPRESSED IN HELA, SIGNAL = 3.2; EXPRESSED IN HEART, SIGNAL = 2.9; SWISSPROT HIT: Q9UQL6, EVALUE 1.00e-07; EST_HUMAN HIT: BE273983.1, EVALUE 7.00e-15
MLQTIYETESCFSADGMSGREPSLEILPRTSLHSIPVT

SEQ ID NO: 39084 - protein, 28 aa, Homo sapiens
  MAP TO AC004953.1; EXPRESSED IN HELA, SIGNAL = 3.5; EXPRESSED IN HEART, SIGNAL =   4; EXPRESSED IN BRAIN, SIGNAL =   4; EXPRESSED IN PLACENTA, SIGNAL = 3.8; EXPRESSED IN LUNG, SIGNAL = 3.9; EXPRESSED IN FETAL LIVER, SIGNAL = 4.2; EXPRESSED IN BONE MARROW, SIGNAL = 3.9; EXPRESSED IN ADULT LIVER, SIGNAL = 4.8; EST_HUMAN HIT: T08756.1, EVALUE 2.00e-07
GEGVQQLREALKILAERVLILEHMIGIH

SEQ ID NO: 39085 - protein, 38 aa, Homo sapiens
  MAP TO AC004387.1; EXPRESSED IN PLACENTA, SIGNAL = 4.4; EXPRESSED IN LUNG, SIGNAL = 5.9; EXPRESSED IN HELA, SIGNAL = 4.5; EXPRESSED IN HEART, SIGNAL = 4.3; EXPRESSED IN FETAL LIVER, SIGNAL = 4.5; EXPRESSED IN ADULT LIVER, SIGNAL = 4.8; EXPRESSED IN BRAIN, SIGNAL =   5; EXPRESSED IN BONE MARROW, SIGNAL = 5.1; EST_HUMAN HIT: BF684261.1, EVALUE 7.30e+00
AASQRGAFGIVLAFVVPGNHPQQDLLGLNTHPQGQEGE

SEQ ID NO: 39086 - protein, 38 aa, Homo sapiens
  MAP TO AC004387.1; EXPRESSED IN PLACENTA, SIGNAL = 4.4; EXPRESSED IN LUNG, SIGNAL = 5.9; EXPRESSED IN HELA, SIGNAL = 4.5; EXPRESSED IN HEART, SIGNAL = 4.3; EXPRESSED IN FETAL LIVER, SIGNAL = 4.5; EXPRESSED IN ADULT LIVER, SIGNAL = 4.8; EXPRESSED IN BRAIN, SIGNAL =   5; EXPRESSED IN BONE MARROW, SIGNAL = 5.1; SWISSPROT HIT: Q9R1E0, EVALUE 8.40e+00; EST_HUMAN HIT: BE613118.1, EVALUE 2.50e-02
GCLPTWGLRHCSGLCGSWKSPTAGSVRPEYPSTRAGGR

SEQ ID NO: 39087 - protein, 125 aa, Homo sapiens
  MAP TO AC003954.1; EXPRESSED IN PLACENTA, SIGNAL = 2.7; EXPRESSED IN HELA, SIGNAL = 2.6; EXPRESSED IN BRAIN, SIGNAL = 3.2; EXPRESSED IN ADULT LIVER, SIGNAL = 3.2; EXPRESSED IN HEART, SIGNAL = 3.3; EXPRESSED IN LUNG, SIGNAL = 2.4; EXPRESSED IN FETAL LIVER, SIGNAL = 3.3; EXPRESSED IN BONE MARROW, SIGNAL = 2.6; SWISSPROT HIT: P53076, EVALUE 5.20e+00
RSLKKGPECRGLGRGSRDWKSEKVQSLSLSLGKTLSLSTLSSRTEAGEPAQAYKILALFPAAAPNPAQGGGGGTGRNLNNNSSCDGVEKQTYLYKSTLTGMSLGSEGVEGKCQSKHTEALEQTGV

SEQ ID NO: 39088 - protein, 24 aa, Homo sapiens
  MAP TO AC003954.1; EXPRESSED IN PLACENTA, SIGNAL = 2.7; EXPRESSED IN HELA, SIGNAL = 2.6; EXPRESSED IN BRAIN, SIGNAL = 3.2; EXPRESSED IN ADULT LIVER, SIGNAL = 3.2; EXPRESSED IN HEART, SIGNAL = 3.3; EXPRESSED IN LUNG, SIGNAL = 2.4; EXPRESSED IN FETAL LIVER, SIGNAL = 3.3; EXPRESSED IN BONE MARROW, SIGNAL = 2.6
LNSCLFQSFCVFGLTLSFNPFRTQ

SEQ ID NO: 39089 - protein, 50 aa, Homo sapiens
  MAP TO AC005549.1; EXPRESSED IN BONE MARROW, SIGNAL = 1.3; EXPRESSED IN PLACENTA, SIGNAL = 1.5; EXPRESSED IN LUNG, SIGNAL = 1.1; EXPRESSED IN FETAL LIVER, SIGNAL = 1.9; EXPRESSED IN ADULT LIVER, SIGNAL = 1.4; EXPRESSED IN HEART, SIGNAL = 1.4; EXPRESSED IN BRAIN, SIGNAL = 1.2; EST_HUMAN HIT: AV653637.1, EVALUE 1.00e-04; SWISSPROT HIT: Q9VRB3, EVALUE 8.10e+00
THFCVGSAQISLSSLVLKLWSRKETVRWNTLRVQPGSVTKSMGNLSSPSA

SEQ ID NO: 39090 - protein, 62 aa, Homo sapiens
  MAP TO AC004126.1; EXPRESSED IN PLACENTA, SIGNAL = 5.2; EXPRESSED IN LUNG, SIGNAL = 4.7; EXPRESSED IN HELA, SIGNAL = 5.3; EXPRESSED IN FETAL LIVER, SIGNAL = 5.3; EXPRESSED IN BRAIN, SIGNAL = 5.4; EXPRESSED IN BONE MARROW, SIGNAL = 4.9; EXPRESSED IN ADULT LIVER, SIGNAL = 6.3; EXPRESSED IN HEART, SIGNAL = 5.2; SWISSPROT HIT: Q00193, EVALUE 2.00e-18; EST_HUMAN HIT: BE780206.1, EVALUE 2.00e+00
ETFSSYYGEDDYPIVRLLREPVHVEVRLLQRTDPNLVLLLHQCWGAPSANPFQQPQWPILSD

SEQ ID NO: 39091 - protein, 59 aa, Homo sapiens
  MAP TO AC006007.1; EXPRESSED IN ADULT LIVER, SIGNAL = 1.7; EXPRESSED IN PLACENTA, SIGNAL = 1.3; EXPRESSED IN LUNG, SIGNAL = 1.7; EXPRESSED IN HEART, SIGNAL = 1.4; EXPRESSED IN BRAIN, SIGNAL = 1.5; EXPRESSED IN FETAL LIVER, SIGNAL = 1.5; EXPRESSED IN BONE MARROW, SIGNAL = 1.2; EST_HUMAN HIT: AU116990.1, EVALUE 5.00e-08; SWISSPROT HIT: P09327, EVALUE 6.00e+00
YQGNANQNHSKITLFMCYNGYCFKKIPSFNEDEEKLESLYTVDRNDKLYSCYGKYYAVS

SEQ ID NO: 39092 - protein, 35 aa, Homo sapiens
  MAP TO AC004594.1; EXPRESSED IN ADULT LIVER, SIGNAL =  15; EXPRESSED IN PLACENTA, SIGNAL =  11; EXPRESSED IN LUNG, SIGNAL =  11; EXPRESSED IN HEART, SIGNAL =  18; EXPRESSED IN BRAIN, SIGNAL =  14; EXPRESSED IN HELA, SIGNAL =  12; EXPRESSED IN FETAL LIVER, SIGNAL =  12; EXPRESSED IN BONE MARROW, SIGNAL =  10; EST_HUMAN HIT: BE386106.1, EVALUE 2.00e-12
ATPIPAEEVKKVVRKCLEKAALINYTRLTEYAKIE

SEQ ID NO: 39093 - protein, 26 aa, Homo sapiens
  MAP TO AC004594.1; EXPRESSED IN ADULT LIVER, SIGNAL =  15; EXPRESSED IN PLACENTA, SIGNAL =  11; EXPRESSED IN LUNG, SIGNAL =  11; EXPRESSED IN HEART, SIGNAL =  18; EXPRESSED IN BRAIN, SIGNAL =  14; EXPRESSED IN HELA, SIGNAL =  12; EXPRESSED IN FETAL LIVER, SIGNAL =  12; EXPRESSED IN BONE MARROW, SIGNAL =  10; EST_HUMAN HIT: BE386106.1, EVALUE 7.00e-09
CHSHTSRRGEESGQKMSRESCLDQLH

SEQ ID NO: 39094 - protein, 121 aa, Homo sapiens
  MAP TO AC003958.1; EXPRESSED IN LUNG, SIGNAL = 1.7; EXPRESSED IN HELA, SIGNAL = 2.2; EXPRESSED IN FETAL LIVER, SIGNAL = 2.3; EXPRESSED IN BRAIN, SIGNAL = 1.9; EXPRESSED IN BONE MARROW, SIGNAL = 1.8; EXPRESSED IN ADULT LIVER, SIGNAL = 2.4; EXPRESSED IN PLACENTA, SIGNAL = 2.1; EXPRESSED IN HEART, SIGNAL = 1.7; SWISSPROT HIT: O76009, EVALUE 3.00e-51; EST_HUMAN HIT: BF569905.1, EVALUE 2.00e-46
MSYSCGLPSLSCRTSCSSRPCVPPSCHGCTLPGACNIPANVSNCNWFCEGSFNGSEKETMQFLNDRLASYLEKVRQLERDNAELENLIRERSQQQEPLVCASYQSYFKTIEELQQKVRSGR

SEQ ID NO: 39095 - protein, 70 aa, Homo sapiens
  MAP TO AC005230.1; EXPRESSED IN HELA, SIGNAL = 2.7; EXPRESSED IN HEART, SIGNAL = 3.3; EXPRESSED IN BRAIN, SIGNAL = 3.2; EXPRESSED IN BONE MARROW, SIGNAL = 3.4; EXPRESSED IN PLACENTA, SIGNAL = 2.7; EXPRESSED IN LUNG, SIGNAL =   2; EXPRESSED IN FETAL LIVER, SIGNAL = 4.7; EXPRESSED IN ADULT LIVER, SIGNAL = 3.3; EST_HUMAN HIT: BE867469.1, EVALUE 5.00e-27; SWISSPROT HIT: Q14416, EVALUE 6.30e+00
SDDNNLNSIFYEHLTRSLQHSLCGDLLLGRWGNYSTGDCFILASDYLNALVHLIEIGNGLVTFQLRGLEF

SEQ ID NO: 39096 - protein, 19 aa, Homo sapiens
  MAP TO AC005871.2; EXPRESSED IN BRAIN, SIGNAL = 3.4; EXPRESSED IN ADULT LIVER, SIGNAL = 3.4; EXPRESSED IN BONE MARROW, SIGNAL = 3.5; EXPRESSED IN PLACENTA, SIGNAL = 3.3; EXPRESSED IN LUNG, SIGNAL = 3.4; EXPRESSED IN HELA, SIGNAL = 3.1; EXPRESSED IN FETAL LIVER, SIGNAL = 3.2; EXPRESSED IN HEART, SIGNAL = 3.1
MSYQAALPQGRKGRDQDRH

SEQ ID NO: 39097 - protein, 39 aa, Homo sapiens
  MAP TO AC003670.1; EXPRESSED IN FETAL LIVER, SIGNAL =   2; EXPRESSED IN BONE MARROW, SIGNAL = 2.4; EXPRESSED IN LUNG, SIGNAL = 2.1; EXPRESSED IN BRAIN, SIGNAL = 2.3; EXPRESSED IN ADULT LIVER, SIGNAL = 2.1; EXPRESSED IN PLACENTA, SIGNAL = 2.2; EXPRESSED IN HELA, SIGNAL = 1.9; EXPRESSED IN HEART, SIGNAL = 2.1; SWISSPROT HIT: Q10135, EVALUE 5.60e-01
YIYATEGLPTSAVDSYLEHFAEKCGKEKCNLFPRNIYPK

SEQ ID NO: 39098 - protein, 59 aa, Homo sapiens
  MAP TO AC005753.1; EXPRESSED IN BRAIN, SIGNAL = 5.3; EXPRESSED IN BONE MARROW, SIGNAL =   5; EXPRESSED IN ADULT LIVER, SIGNAL = 4.5; EXPRESSED IN PLACENTA, SIGNAL = 5.1; EXPRESSED IN LUNG, SIGNAL = 4.8; EXPRESSED IN HELA, SIGNAL = 4.7; EXPRESSED IN HEART, SIGNAL = 4.7; EXPRESSED IN FETAL LIVER, SIGNAL =   5; EST_HUMAN HIT: R00520.1, EVALUE 2.10e+00; SWISSPROT HIT: P39653, EVALUE 3.50e+00
LLPGTIKIPNPKRTASNKAVSCTPSSQENNGNAVEPFCHFDSSFPFTLSKGAAITMGTS

SEQ ID NO: 39099 - protein, 54 aa, Homo sapiens
  MAP TO AC005848.1; EXPRESSED IN BRAIN, SIGNAL = 1.5; EXPRESSED IN BONE MARROW, SIGNAL = 1.5; EXPRESSED IN ADULT LIVER, SIGNAL = 1.4; EXPRESSED IN PLACENTA, SIGNAL = 1.3; EXPRESSED IN LUNG, SIGNAL = 2.1e+02; EXPRESSED IN FETAL LIVER, SIGNAL = 1.6; EXPRESSED IN HEART, SIGNAL = 1.5; EST_HUMAN HIT: BE870344.1, EVALUE 3.00e-26; SWISSPROT HIT: Q01970, EVALUE 3.00e-27
VISGQFLSDRKVGIYVEVDMFGLPVDTRRKYRTRTSQGNSFNPVWDEEPFDFPK

SEQ ID NO: 39100 - protein, 24 aa, Homo sapiens
  MAP TO AC005848.1; EXPRESSED IN BRAIN, SIGNAL = 1.5; EXPRESSED IN BONE MARROW, SIGNAL = 1.5; EXPRESSED IN ADULT LIVER, SIGNAL = 1.4; EXPRESSED IN PLACENTA, SIGNAL = 1.3; EXPRESSED IN LUNG, SIGNAL = 2.1e+02; EXPRESSED IN FETAL LIVER, SIGNAL = 1.6; EXPRESSED IN HEART, SIGNAL = 1.5; EST_HUMAN HIT: BE866897.1, EVALUE 1.00e-08
DLRAVPVRQEGGHLRGGGHVWPPC

SEQ ID NO: 39101 - protein, 69 aa, Homo sapiens
  MAP TO AC004465.1; EXPRESSED IN BONE MARROW, SIGNAL = 1.5; EXPRESSED IN ADULT LIVER, SIGNAL = 1.5; EXPRESSED IN PLACENTA, SIGNAL = 1.4; EXPRESSED IN HEART, SIGNAL = 1.4; EXPRESSED IN LUNG, SIGNAL = 1.6; EXPRESSED IN FETAL LIVER, SIGNAL = 1.5; EXPRESSED IN BRAIN, SIGNAL = 3.2; EST_HUMAN HIT: R20871.1, EVALUE 1.70e-01; SWISSPROT HIT: O84172, EVALUE 9.20e+00
LIPGEARNPHLLKMSLGAAVMKQGCSCMFPVLISLQRWLRATLGPLPHPERREQGESGATQQLEPERTE

SEQ ID NO: 39102 - protein, 40 aa, Homo sapiens
  MAP TO AC005873.2; EXPRESSED IN LUNG, SIGNAL = 2.1; EXPRESSED IN PLACENTA, SIGNAL = 2.3; EXPRESSED IN HELA, SIGNAL = 2.1; EXPRESSED IN HEART, SIGNAL = 2.4; EXPRESSED IN FETAL LIVER, SIGNAL = 2.2; EXPRESSED IN BRAIN, SIGNAL = 2.5; EXPRESSED IN BONE MARROW, SIGNAL = 2.3; EXPRESSED IN ADULT LIVER, SIGNAL = 1.9
IDNTYDDDDDDDDDDRRASQFPTFMLLCSHQWKSPSKGTK

SEQ ID NO: 39103 - protein, 58 aa, Homo sapiens
  MAP TO AC005729.1; EXPRESSED IN LUNG, SIGNAL = 5.2; EXPRESSED IN PLACENTA, SIGNAL =   4; EXPRESSED IN HELA, SIGNAL = 5.3; EXPRESSED IN HEART, SIGNAL = 3.7; EXPRESSED IN FETAL LIVER, SIGNAL = 7.8; EXPRESSED IN BRAIN, SIGNAL = 2.6; EXPRESSED IN BONE MARROW, SIGNAL = 4.5; EXPRESSED IN ADULT LIVER, SIGNAL =   8; EST_HUMAN HIT: AA378336.1, EVALUE 2.00e-25; SWISSPROT HIT: P49393, EVALUE 4.00e-26
VILRDSHGVAQVRFVTGNKILRILKSKGLAPDLPEDLYHLIKKAVAVRKHLERNRKVS

SEQ ID NO: 39104 - protein, 49 aa, Homo sapiens
  MAP TO AC004582.1; EXPRESSED IN PLACENTA, SIGNAL = 7.1; EXPRESSED IN LUNG, SIGNAL = 8.6; EXPRESSED IN HEART, SIGNAL = 5.6; EXPRESSED IN BRAIN, SIGNAL = 8.2; EXPRESSED IN HELA, SIGNAL =   5; EXPRESSED IN FETAL LIVER, SIGNAL = 6.7; EXPRESSED IN BONE MARROW, SIGNAL =   6; EXPRESSED IN ADULT LIVER, SIGNAL = 5.9; SWISSPROT HIT: P32483, EVALUE 2.10e+00; EST_HUMAN HIT: AA363044.1, EVALUE 7.00e-14
RCMEIPGCPDKILLQWWGLHGELLLEQCGREMWGQSPDTDSLLGHCLVE

SEQ ID NO: 39105 - protein, 45 aa, Homo sapiens
  MAP TO AC000065.1; EXPRESSED IN HEART, SIGNAL = 2.1; EXPRESSED IN BRAIN, SIGNAL = 2.2; EXPRESSED IN PLACENTA, SIGNAL = 1.6; EXPRESSED IN LUNG, SIGNAL = 1.6; EXPRESSED IN HELA, SIGNAL = 1.8; EXPRESSED IN FETAL LIVER, SIGNAL = 1.7; EXPRESSED IN BONE MARROW, SIGNAL =   2; EXPRESSED IN ADULT LIVER, SIGNAL = 1.6; SWISSPROT HIT: Q00534, EVALUE 8.00e-21; EST_HUMAN HIT: AA412560.1, EVALUE 1.00e-19
VIGLPGEEDWPRDVALPRQAFHSKSAQPIEKFVTDIDELGKDLLL

SEQ ID NO: 39106 - protein, 40 aa, Homo sapiens
  MAP TO AC003665.1; EXPRESSED IN BONE MARROW, SIGNAL = 2.5; EXPRESSED IN PLACENTA, SIGNAL = 2.4; EXPRESSED IN LUNG, SIGNAL = 3.3; EXPRESSED IN HELA, SIGNAL = 2.7; EXPRESSED IN FETAL LIVER, SIGNAL = 2.5; EXPRESSED IN ADULT LIVER, SIGNAL = 2.9; EXPRESSED IN HEART, SIGNAL = 2.5; EXPRESSED IN BRAIN, SIGNAL =   3; EST_HUMAN HIT: BF373541.1, EVALUE 1.00e-15; SWISSPROT HIT: P38713, EVALUE 8.40e-02
YLEEGNIQAAEAQKRRIEQLQRDRRKVMEENNIVHQARFF

SEQ ID NO: 39107 - protein, 60 aa, Homo sapiens
  MAP TO AC003665.1; EXPRESSED IN BONE MARROW, SIGNAL = 2.5; EXPRESSED IN PLACENTA, SIGNAL = 2.4; EXPRESSED IN LUNG, SIGNAL = 3.3; EXPRESSED IN HELA, SIGNAL = 2.7; EXPRESSED IN FETAL LIVER, SIGNAL = 2.5; EXPRESSED IN ADULT LIVER, SIGNAL = 2.9; EXPRESSED IN HEART, SIGNAL = 2.5; EXPRESSED IN BRAIN, SIGNAL =   3; EST_HUMAN HIT: BF373556.1, EVALUE 3.00e-11; SWISSPROT HIT: P48207, EVALUE 3.50e+00
YRPLRPRREGSSSCSETGAKSWRKTTSYTRLASSGASASPSALGLPMSPAWSRAGVGGST

SEQ ID NO: 39108 - protein, 159 aa, Homo sapiens
  MAP TO AC004447.1; EXPRESSED IN LUNG, SIGNAL = 6.7; EXPRESSED IN BRAIN, SIGNAL = 6.9; EXPRESSED IN BONE MARROW, SIGNAL = 6.6; EXPRESSED IN PLACENTA, SIGNAL = 6.9; EXPRESSED IN HELA, SIGNAL = 6.9; EXPRESSED IN HEART, SIGNAL = 6.4; EXPRESSED IN FETAL LIVER, SIGNAL = 6.6; EXPRESSED IN ADULT LIVER, SIGNAL = 6.7; EST_HUMAN HIT: BF696135.1, EVALUE 2.00e-42
FLHDQNSSAFKFYRKKVFELCPSICFTSSPHNLHTGGGDTTGSQESPVDLMEGEAEFEDEPPPREAELESPEVMPEEEDEDDEDGGEEAPAPGGAGKSEGSTPADGLPGEAAEDDLAGAPALSQASSGTCFPRKRISSKSLKVGMIPAPKRVCLIQEPK

SEQ ID NO: 39109 - protein, 46 aa, Homo sapiens
  MAP TO AC004514.1; EXPRESSED IN ADULT LIVER, SIGNAL = 3.2; EXPRESSED IN PLACENTA, SIGNAL = 3.6; EXPRESSED IN LUNG, SIGNAL = 4.1; EXPRESSED IN HEART, SIGNAL = 3.4; EXPRESSED IN BRAIN, SIGNAL = 3.2; EXPRESSED IN HELA, SIGNAL = 3.5; EXPRESSED IN FETAL LIVER, SIGNAL = 3.1; EXPRESSED IN BONE MARROW, SIGNAL = 3.3
YYAGQITQQDRVKNPHVKCSKYEPQHKVVLDPISPLIFFFFFFFFY

SEQ ID NO: 39110 - protein, 147 aa, Homo sapiens
  MAP TO AC004217.1; EXPRESSED IN LUNG, SIGNAL =   2; EXPRESSED IN HEART, SIGNAL = 2.4; EXPRESSED IN FETAL LIVER, SIGNAL =   3; EXPRESSED IN BRAIN, SIGNAL = 2.5; EXPRESSED IN HELA, SIGNAL = 2.4; EXPRESSED IN BONE MARROW, SIGNAL = 2.4; EXPRESSED IN PLACENTA, SIGNAL = 2.1; EXPRESSED IN ADULT LIVER, SIGNAL = 2.3
LCTYIQCTYFLCTYTICTYIHCTYTLCTYVQCTYIHCTYTLCTYIYCTYTLCAYILCTYTICIYIHCTYTLCTYILCTHIHSTYTFCTYHLLRLYPLHPHPLHLHPLHPHPLHLHPLHLHPLYLHPLHLHALHLPLSAPTTVCTYIH

SEQ ID NO: 39111 - protein, 26 aa, Homo sapiens
  MAP TO AC004605.1; EXPRESSED IN LUNG, SIGNAL = 2.6; EXPRESSED IN HEART, SIGNAL = 2.1; EXPRESSED IN FETAL LIVER, SIGNAL = 2.4; EXPRESSED IN BRAIN, SIGNAL = 2.2; EXPRESSED IN HELA, SIGNAL = 2.4; EXPRESSED IN BONE MARROW, SIGNAL = 2.1; EXPRESSED IN PLACENTA, SIGNAL = 2.5; EXPRESSED IN ADULT LIVER, SIGNAL = 2.7
AVASLKAIKSKVTGSKSEKYFHLIDG

SEQ ID NO: 39112 - protein, 46 aa, Homo sapiens
  MAP TO AC005137.1; EXPRESSED IN HEART, SIGNAL =   2; EXPRESSED IN BRAIN, SIGNAL = 1.9; EXPRESSED IN BONE MARROW, SIGNAL = 1.9; EXPRESSED IN PLACENTA, SIGNAL = 1.8; EXPRESSED IN LUNG, SIGNAL = 2.1; EXPRESSED IN HELA, SIGNAL = 2.2; EXPRESSED IN FETAL LIVER, SIGNAL =   2; EXPRESSED IN ADULT LIVER, SIGNAL =   2; SWISSPROT HIT: P31007, EVALUE 1.10e-01; EST_HUMAN HIT: BE731162.1, EVALUE 2.40e-02
KLKEVRLDRLHPEGLGLSVRGGLEFGCGLFISHLIKGGQADSVGLQ

SEQ ID NO: 39113 - protein, 45 aa, Homo sapiens
  MAP TO AC005137.1; EXPRESSED IN HEART, SIGNAL =   2; EXPRESSED IN BRAIN, SIGNAL = 1.9; EXPRESSED IN BONE MARROW, SIGNAL = 1.9; EXPRESSED IN PLACENTA, SIGNAL = 1.8; EXPRESSED IN LUNG, SIGNAL = 2.1; EXPRESSED IN HELA, SIGNAL = 2.2; EXPRESSED IN FETAL LIVER, SIGNAL =   2; EXPRESSED IN ADULT LIVER, SIGNAL =   2; EST_HUMAN HIT: BE266204.1, EVALUE 5.30e+00
PSPTSPVWQEAEGGASGPSAPRRPRPECAWWPGVWLWALHLPPHQ

SEQ ID NO: 39114 - protein, 24 aa, Homo sapiens
  MAP TO AC005703.1; EXPRESSED IN BRAIN, SIGNAL =  11; EXPRESSED IN ADULT LIVER, SIGNAL = 8.3; EXPRESSED IN BONE MARROW, SIGNAL = 7.8; EXPRESSED IN PLACENTA, SIGNAL =  10; EXPRESSED IN LUNG, SIGNAL = 8.1; EXPRESSED IN HELA, SIGNAL = 7.9; EXPRESSED IN FETAL LIVER, SIGNAL = 9.1; EXPRESSED IN HEART, SIGNAL =  12
MSLLLLLLLLLLLLLLLFKWKRRV

SEQ ID NO: 39115 - protein, 19 aa, Homo sapiens
  MAP TO AC005703.1; EXPRESSED IN BRAIN, SIGNAL =  11; EXPRESSED IN ADULT LIVER, SIGNAL = 8.3; EXPRESSED IN BONE MARROW, SIGNAL = 7.8; EXPRESSED IN PLACENTA, SIGNAL =  10; EXPRESSED IN LUNG, SIGNAL = 8.1; EXPRESSED IN HELA, SIGNAL = 7.9; EXPRESSED IN FETAL LIVER, SIGNAL = 9.1; EXPRESSED IN HEART, SIGNAL =  12
SSSSSNSKLMTINRLCEEL

SEQ ID NO: 39116 - protein, 84 aa, Homo sapiens
  MAP TO AC006203.1; EXPRESSED IN ADULT LIVER, SIGNAL = 2.4; EXPRESSED IN PLACENTA, SIGNAL = 2.1; EXPRESSED IN LUNG, SIGNAL = 1.6; EXPRESSED IN FETAL LIVER, SIGNAL = 3.1; EXPRESSED IN HELA, SIGNAL = 2.1; EXPRESSED IN HEART, SIGNAL = 2.5; EXPRESSED IN BRAIN, SIGNAL = 2.4; EXPRESSED IN BONE MARROW, SIGNAL = 2.3; SWISSPROT HIT: P55280, EVALUE 3.00e-22; EST_HUMAN HIT: BE932654.1, EVALUE 2.00e-19
PLSFESKKSYTLKVEGANPHLEMRFLNLGPFQDTTTVHISVEDVDEPPVFEPGFYFVEVPEDVAIGTTIQIISAKDPDVTNNSI

SEQ ID NO: 39117 - protein, 78 aa, Homo sapiens
  MAP TO AC004587.1; EXPRESSED IN BRAIN, SIGNAL = 1.8; EXPRESSED IN ADULT LIVER, SIGNAL = 2.1; EXPRESSED IN BONE MARROW, SIGNAL = 2.4; EXPRESSED IN PLACENTA, SIGNAL = 4.7; EXPRESSED IN LUNG, SIGNAL = 5.2; EXPRESSED IN HELA, SIGNAL = 2.4; EXPRESSED IN HEART, SIGNAL = 1.9; EXPRESSED IN FETAL LIVER, SIGNAL = 2.3; EST_HUMAN HIT: BE828144.1, EVALUE 3.00e-38; SWISSPROT HIT: P46940, EVALUE 3.00e-33
NAEDPPMVVVRKFVHLLDQSDQDFQEELDLMKMREEVITLIRSNQQLENDLNLMDIKIGLLVKNKITLQVWPSASGGL

SEQ ID NO: 39118 - protein, 52 aa, Homo sapiens
  MAP TO AC003669.1; EXPRESSED IN PLACENTA, SIGNAL = 1.4; EXPRESSED IN HEART, SIGNAL = 1.5; EXPRESSED IN FETAL LIVER, SIGNAL = 1.4; EXPRESSED IN BRAIN, SIGNAL = 1.7; EXPRESSED IN LUNG, SIGNAL = 1.7; EXPRESSED IN BONE MARROW, SIGNAL = 1.5; EXPRESSED IN ADULT LIVER, SIGNAL = 1.4; EST_HUMAN HIT: AA831079.1, EVALUE 1.00e-08; SWISSPROT HIT: P51813, EVALUE 1.00e-16
YDNSQVVLKVSQGHRLYRPHLASDTIYQIMYSCWHEASVFSGWAGRGLRHIR

SEQ ID NO: 39119 - protein, 75 aa, Homo sapiens
  MAP TO AC004945.1; EXPRESSED IN LUNG, SIGNAL =   3; EXPRESSED IN HEART, SIGNAL = 2.6; EXPRESSED IN FETAL LIVER, SIGNAL = 2.2; EXPRESSED IN BRAIN, SIGNAL = 2.6; EXPRESSED IN HELA, SIGNAL = 2.5; EXPRESSED IN BONE MARROW, SIGNAL = 2.3; EXPRESSED IN PLACENTA, SIGNAL = 2.5; EXPRESSED IN ADULT LIVER, SIGNAL = 2.6; SWISSPROT HIT: Q01901, EVALUE 2.30e+00
ELHKDLLYSSLSSLVQQIFIECQLFVKLCVKGCEENRNEPYLDFLIKMPQRKLKRKLKFKSVNAIFQKCLLKAGL

SEQ ID NO: 39120 - protein, 37 aa, Homo sapiens
  MAP TO AC005912.1; EXPRESSED IN PLACENTA, SIGNAL =   2; EXPRESSED IN LUNG, SIGNAL = 1.8; EXPRESSED IN FETAL LIVER, SIGNAL = 2.1; EXPRESSED IN BRAIN, SIGNAL =   2; EXPRESSED IN BONE MARROW, SIGNAL = 1.9; EXPRESSED IN ADULT LIVER, SIGNAL = 2.1; EXPRESSED IN HELA, SIGNAL =   2; EXPRESSED IN HEART, SIGNAL =   3
SSHKKVISQTRALPRKNKSTMDWQSGRTQRERALSWH

SEQ ID NO: 39121 - protein, 51 aa, Homo sapiens
  MAP TO AC005042.1; EXPRESSED IN PLACENTA, SIGNAL = 1.2; EXPRESSED IN HELA, SIGNAL = 2.9; EXPRESSED IN BRAIN, SIGNAL = 2.3; EXPRESSED IN ADULT LIVER, SIGNAL = 1.1; EXPRESSED IN HEART, SIGNAL = 1.4; EXPRESSED IN LUNG, SIGNAL = 1.3; EXPRESSED IN FETAL LIVER, SIGNAL = 1.2; EXPRESSED IN BONE MARROW, SIGNAL = 0.91; SWISSPROT HIT: P05508, EVALUE 8.00e+00; EST_HUMAN HIT: AA359471.1, EVALUE 6.00e-22
INSCIIVKMTPTERTLMHTDCICSLLIAMKILILMTEFTFQLLLITQHSMD

SEQ ID NO: 39122 - protein, 46 aa, Homo sapiens
  MAP TO AC004525.1; EXPRESSED IN PLACENTA, SIGNAL = 2.9; EXPRESSED IN HEART, SIGNAL = 1.9; EXPRESSED IN ADULT LIVER, SIGNAL = 2.3; EXPRESSED IN LUNG, SIGNAL =   2; EXPRESSED IN FETAL LIVER, SIGNAL = 2.3; EXPRESSED IN BRAIN, SIGNAL = 1.8; EXPRESSED IN BONE MARROW, SIGNAL = 2.7; EXPRESSED IN HELA, SIGNAL = 1.9; SWISSPROT HIT: P24394, EVALUE 7.00e-24; EST_HUMAN HIT: BE696075.1, EVALUE 9.00e-23
KPRAPGNLTVHTNVSDTLLLTWSNPYPPDNYLYNHLTYAVNIWSEN

SEQ ID NO: 39123 - protein, 28 aa, Homo sapiens
  MAP TO AC004525.1; EXPRESSED IN PLACENTA, SIGNAL = 2.9; EXPRESSED IN HEART, SIGNAL = 1.9; EXPRESSED IN ADULT LIVER, SIGNAL = 2.3; EXPRESSED IN LUNG, SIGNAL =   2; EXPRESSED IN FETAL LIVER, SIGNAL = 2.3; EXPRESSED IN BRAIN, SIGNAL = 1.8; EXPRESSED IN BONE MARROW, SIGNAL = 2.7; EXPRESSED IN HELA, SIGNAL = 1.9; EST_HUMAN HIT: BE696075.1, EVALUE 6.00e-10
ETQGPRKPDSSHQCLRHSAADLEQPVSP

SEQ ID NO: 39124 - protein, 40 aa, Homo sapiens
  MAP TO AC003042.1; EXPRESSED IN PLACENTA, SIGNAL = 1.1; EXPRESSED IN LUNG, SIGNAL = 1.1; EXPRESSED IN HEART, SIGNAL = 1.3; EXPRESSED IN FETAL LIVER, SIGNAL = 1.2; EXPRESSED IN BONE MARROW, SIGNAL = 1.1; EXPRESSED IN ADULT LIVER, SIGNAL = 1.1; EXPRESSED IN BRAIN, SIGNAL = 1.2; EST_HUMAN HIT: R56833.1, EVALUE 3.20e+00
ISEENLNGADTYFSTSSLYACCKIFGLGDLFALHECICAD

SEQ ID NO: 39125 - protein, 54 aa, Homo sapiens
  MAP TO AC005180.1; EXPRESSED IN LUNG, SIGNAL = 5.5; EXPRESSED IN FETAL LIVER, SIGNAL = 5.1; EXPRESSED IN BONE MARROW, SIGNAL = 5.2; EXPRESSED IN PLACENTA, SIGNAL =   5; EXPRESSED IN HELA, SIGNAL = 5.3; EXPRESSED IN HEART, SIGNAL =   5; EXPRESSED IN BRAIN, SIGNAL = 5.6; EXPRESSED IN ADULT LIVER, SIGNAL = 4.8; SWISSPROT HIT: O15016, EVALUE 3.50e+00; EST_HUMAN HIT: AW139565.1, EVALUE 1.00e-25
PHLMPCAPLPRRQHLQSAQHRSFALEAHLYAEVDRIIAQLSHSFADIPFQAGLP

SEQ ID NO: 39126 - protein, 35 aa, Homo sapiens
  MAP TO AC005180.1; EXPRESSED IN LUNG, SIGNAL = 5.5; EXPRESSED IN FETAL LIVER, SIGNAL = 5.1; EXPRESSED IN BONE MARROW, SIGNAL = 5.2; EXPRESSED IN PLACENTA, SIGNAL =   5; EXPRESSED IN HELA, SIGNAL = 5.3; EXPRESSED IN HEART, SIGNAL =   5; EXPRESSED IN BRAIN, SIGNAL = 5.6; EXPRESSED IN ADULT LIVER, SIGNAL = 4.8; EST_HUMAN HIT: AW139565.1, EVALUE 3.40e-02
TGALPWKPIYMQKWTGSLLSSATALQTSLSRLASP

SEQ ID NO: 39127 - protein, 48 aa, Homo sapiens
  MAP TO AC004952.1; EXPRESSED IN PLACENTA, SIGNAL = 3.3; EXPRESSED IN LUNG, SIGNAL = 3.5; EXPRESSED IN HEART, SIGNAL = 3.3; EXPRESSED IN BRAIN, SIGNAL = 3.6; EXPRESSED IN ADULT LIVER, SIGNAL = 3.9; EXPRESSED IN FETAL LIVER, SIGNAL = 3.1; EXPRESSED IN BONE MARROW, SIGNAL = 3.1; EXPRESSED IN HELA, SIGNAL = 3.4; SWISSPROT HIT: Q12860, EVALUE 2.80e-02; EST_HUMAN HIT: AU133045.1, EVALUE 2.00e-10
MKVLFLPEPVVRLKNLTSHTKYLVSISAFNAAGDGPKSDPQQGRTHQA

SEQ ID NO: 39128 - protein, 22 aa, Homo sapiens
  MAP TO AC004952.1; EXPRESSED IN PLACENTA, SIGNAL = 3.3; EXPRESSED IN LUNG, SIGNAL = 3.5; EXPRESSED IN HEART, SIGNAL = 3.3; EXPRESSED IN BRAIN, SIGNAL = 3.6; EXPRESSED IN ADULT LIVER, SIGNAL = 3.9; EXPRESSED IN FETAL LIVER, SIGNAL = 3.1; EXPRESSED IN BONE MARROW, SIGNAL = 3.1; EXPRESSED IN HELA, SIGNAL = 3.4
QPLAVPNRFTTGRQTARTKRRK

SEQ ID NO: 39129 - protein, 22 aa, Homo sapiens
  MAP TO AC002040.1; EXPRESSED IN HELA, SIGNAL = 6.9; EXPRESSED IN HEART, SIGNAL = 5.9; EXPRESSED IN BONE MARROW, SIGNAL = 0.82; EXPRESSED IN PLACENTA, SIGNAL = 0.78; EXPRESSED IN LUNG, SIGNAL = 0.7; EXPRESSED IN FETAL LIVER, SIGNAL = 0.92; EXPRESSED IN ADULT LIVER, SIGNAL = 0.86; EXPRESSED IN BRAIN, SIGNAL = 0.79
KGPRNHVLFPLPWQALYNKPRT

SEQ ID NO: 39130 - protein, 66 aa, Homo sapiens
  MAP TO AC005940.3; EXPRESSED IN PLACENTA, SIGNAL = 1.7; EXPRESSED IN LUNG, SIGNAL =   2; EXPRESSED IN HEART, SIGNAL = 1.8; EXPRESSED IN BRAIN, SIGNAL = 2.2; EXPRESSED IN BONE MARROW, SIGNAL = 1.8; EXPRESSED IN ADULT LIVER, SIGNAL =   2; EXPRESSED IN HELA, SIGNAL =   2; EXPRESSED IN FETAL LIVER, SIGNAL = 1.9; SWISSPROT HIT: P50526, EVALUE 8.00e-12; EST_HUMAN HIT: BE268349.1, EVALUE 1.00e-23
HCQKIVHRDIKPSNLLLGDDGHVKIADFGVSNQFEGNDAQLSSTAGTPAFMAPEAISDSGQSFSGK

SEQ ID NO: 39131 - protein, 17 aa, Homo sapiens
  MAP TO AC005940.3; EXPRESSED IN PLACENTA, SIGNAL = 1.7; EXPRESSED IN LUNG, SIGNAL =   2; EXPRESSED IN HEART, SIGNAL = 1.8; EXPRESSED IN BRAIN, SIGNAL = 2.2; EXPRESSED IN BONE MARROW, SIGNAL = 1.8; EXPRESSED IN ADULT LIVER, SIGNAL =   2; EXPRESSED IN HELA, SIGNAL =   2; EXPRESSED IN FETAL LIVER, SIGNAL = 1.9
STGTSSHPTCSWGMMGT

SEQ ID NO: 39132 - protein, 58 aa, Homo sapiens
  MAP TO AC004222.1; EXPRESSED IN PLACENTA, SIGNAL =  11; EXPRESSED IN LUNG, SIGNAL =  12; EXPRESSED IN HEART, SIGNAL = 9.1; EXPRESSED IN BRAIN, SIGNAL =  10; EXPRESSED IN ADULT LIVER, SIGNAL = 8.8; EXPRESSED IN FETAL LIVER, SIGNAL = 9.3; EXPRESSED IN BONE MARROW, SIGNAL =  11; EXPRESSED IN HELA, SIGNAL =  10; EST_HUMAN HIT: BE937906.1, EVALUE 1.00e-27; SWISSPROT HIT: Q04690, EVALUE 2.00e-29
QPKDTMRLDETMLVKQLLPEICHFLHTCREGNQHAAELRNSASGVLFSLSCNNFNAVF

SEQ ID NO: 39133 - protein, 44 aa, Homo sapiens
  MAP TO AC006208.3; EXPRESSED IN LUNG, SIGNAL = 4.4; EXPRESSED IN ADULT LIVER, SIGNAL = 3.6; EXPRESSED IN PLACENTA, SIGNAL = 3.5; EXPRESSED IN HEART, SIGNAL = 3.9; EXPRESSED IN FETAL LIVER, SIGNAL = 3.9; EXPRESSED IN BRAIN, SIGNAL = 4.2; EXPRESSED IN BONE MARROW, SIGNAL = 4.2; EXPRESSED IN HELA, SIGNAL = 4.1; SWISSPROT HIT: P39057, EVALUE 1.00e-04; EST_HUMAN HIT: BF351696.1, EVALUE 5.00e-17
MRQELKDIEDQILYRLSSSEGNPVDDMELIKVLEASKMKAAEIQ

SEQ ID NO: 39134 - protein, 40 aa, Homo sapiens
  MAP TO AC005726.1; EXPRESSED IN FETAL LIVER, SIGNAL = 1.8; EXPRESSED IN BRAIN, SIGNAL = 1.8; EXPRESSED IN BONE MARROW, SIGNAL = 1.6; EXPRESSED IN ADULT LIVER, SIGNAL = 1.6; EXPRESSED IN LUNG, SIGNAL = 1.8; EXPRESSED IN PLACENTA, SIGNAL = 1.7; EXPRESSED IN HELA, SIGNAL = 1.6; EXPRESSED IN HEART, SIGNAL = 1.7; SWISSPROT HIT: Q13183, EVALUE 3.00e-03
PLLLHTMATCWQALWAYRSYLIVFFVPILLLPLPILVPSK

SEQ ID NO: 39135 - protein, 44 aa, Homo sapiens
  MAP TO AC005041.2; EXPRESSED IN PLACENTA, SIGNAL = 1.5; EXPRESSED IN LUNG, SIGNAL = 1.6; EXPRESSED IN HEART, SIGNAL = 1.9; EXPRESSED IN BRAIN, SIGNAL = 2.4; EXPRESSED IN HELA, SIGNAL = 1.9; EXPRESSED IN FETAL LIVER, SIGNAL = 1.5; EXPRESSED IN BONE MARROW, SIGNAL = 1.6; EXPRESSED IN ADULT LIVER, SIGNAL = 1.3; EST_HUMAN HIT: BE794083.1, EVALUE 5.00e-18; SWISSPROT HIT: Q14203, EVALUE 4.00e-19
AIPGQAPGSVPGPGLVKDSPLLLQQISAMRLHISQLQHENSILK

SEQ ID NO: 39136 - protein, 19 aa, Homo sapiens
  MAP TO AC005041.2; EXPRESSED IN PLACENTA, SIGNAL = 1.5; EXPRESSED IN LUNG, SIGNAL = 1.6; EXPRESSED IN HEART, SIGNAL = 1.9; EXPRESSED IN BRAIN, SIGNAL = 2.4; EXPRESSED IN HELA, SIGNAL = 1.9; EXPRESSED IN FETAL LIVER, SIGNAL = 1.5; EXPRESSED IN BONE MARROW, SIGNAL = 1.6; EXPRESSED IN ADULT LIVER, SIGNAL = 1.3; EST_HUMAN HIT: AA348813.1, EVALUE 3.00e-03
SPQEPSLGRLQGLCQAQGW

SEQ ID NO: 39137 - protein, 71 aa, Homo sapiens
  MAP TO AB019440.1; EXPRESSED IN PLACENTA, SIGNAL = 2.8; EXPRESSED IN HEART, SIGNAL = 3.1; EXPRESSED IN FETAL LIVER, SIGNAL = 3.2; EXPRESSED IN LUNG, SIGNAL = 2.9; EXPRESSED IN HELA, SIGNAL = 3.4; EXPRESSED IN BRAIN, SIGNAL = 3.8; EXPRESSED IN BONE MARROW, SIGNAL = 3.6; EXPRESSED IN ADULT LIVER, SIGNAL = 3.1; EST_HUMAN HIT: BE827693.1, EVALUE 3.00e-14; SWISSPROT HIT: P31795, EVALUE 7.00e-20
LLEATETGRPDLQDVLLRKADATVFTDGSSFLEQGIRKAGAAVTTETDVLWVQALPASTSAQKAELIALTQ

SEQ ID NO: 39138 - protein, 76 aa, Homo sapiens
  MAP TO AC003098.1; EXPRESSED IN PLACENTA, SIGNAL = 3.5; EXPRESSED IN LUNG, SIGNAL = 3.5; EXPRESSED IN HELA, SIGNAL = 3.4; EXPRESSED IN FETAL LIVER, SIGNAL = 3.2; EXPRESSED IN BONE MARROW, SIGNAL = 3.6; EXPRESSED IN ADULT LIVER, SIGNAL = 3.8; EXPRESSED IN HEART, SIGNAL = 3.4; EXPRESSED IN BRAIN, SIGNAL = 3.8; SWISSPROT HIT: P51452, EVALUE 6.00e-38; EST_HUMAN HIT: BE771213.1, EVALUE 5.00e-37
RSVAQDIPKLQKLGITHVLNAAEGRSFMHVNTNANFYKDSGITYLGIKANDTQEFNLSAYFERAADFIDQALAQKN

SEQ ID NO: 39139 - protein, 40 aa, Homo sapiens
  MAP TO AC005088.2; EXPRESSED IN PLACENTA, SIGNAL = 4.6; EXPRESSED IN ADULT LIVER, SIGNAL = 4.8; EXPRESSED IN LUNG, SIGNAL = 2.3; EXPRESSED IN HEART, SIGNAL = 3.5; EXPRESSED IN FETAL LIVER, SIGNAL = 6.4; EXPRESSED IN BRAIN, SIGNAL = 3.9; EXPRESSED IN BONE MARROW, SIGNAL = 5.9; EXPRESSED IN HELA, SIGNAL =   4; EST_HUMAN HIT: BF241972.1, EVALUE 5.50e+00
YGSAEKPEQGEPVPLKQGHLCHPVSLQQSGQTEFTTKIEL

SEQ ID NO: 39140 - protein, 40 aa, Homo sapiens
  MAP TO AC005922.1; EXPRESSED IN PLACENTA, SIGNAL =  23; EXPRESSED IN HEART, SIGNAL =  21; EXPRESSED IN LUNG, SIGNAL =  26; EXPRESSED IN FETAL LIVER, SIGNAL =  20; EXPRESSED IN BRAIN, SIGNAL =  27; EXPRESSED IN BONE MARROW, SIGNAL =  23; EXPRESSED IN ADULT LIVER, SIGNAL =  21; EXPRESSED IN HELA, SIGNAL =  22; SWISSPROT HIT: P78363, EVALUE 1.10e-01; EST_HUMAN HIT: AA029504.1, EVALUE 1.00e-14
HLKSKFGKDYLLEMKLKNLAQMEPLHAEILRLFPQAAQQE

SEQ ID NO: 39141 - protein, 150 aa, Homo sapiens
  MAP TO AC005058.1; EXPRESSED IN LUNG, SIGNAL = 0.91; EXPRESSED IN FETAL LIVER, SIGNAL = 0.96; EXPRESSED IN BONE MARROW, SIGNAL = 0.67; EXPRESSED IN PLACENTA, SIGNAL = 0.96; EXPRESSED IN HEART, SIGNAL = 1.7; EXPRESSED IN BRAIN, SIGNAL = 1.2; EXPRESSED IN ADULT LIVER, SIGNAL = 2.2; SWISSPROT HIT: Q05646, EVALUE 1.00e-04; EST_HUMAN HIT: BF031742.1, EVALUE 8.00e-74
YETLSDANRRKEYDTLGHSAFTSGKGQRGSGSSFEQSFNFNFDDLFKDFGFFGQNQNTGSKKRFENHFQTRQDGGSSRQRHHFQEFSFGGGLFDDMFEDMEKMFSFSGFDSTNQHTVQTENRFHGSSKHCRTVTQRRGNMVTTYTDCSGQ

SEQ ID NO: 39142 - protein, 151 aa, Homo sapiens
  MAP TO AC005058.1; EXPRESSED IN LUNG, SIGNAL = 0.91; EXPRESSED IN FETAL LIVER, SIGNAL = 0.96; EXPRESSED IN BONE MARROW, SIGNAL = 0.67; EXPRESSED IN PLACENTA, SIGNAL = 0.96; EXPRESSED IN HEART, SIGNAL = 1.7; EXPRESSED IN BRAIN, SIGNAL = 1.2; EXPRESSED IN ADULT LIVER, SIGNAL = 2.2; SWISSPROT HIT: P54804, EVALUE 2.40e+00; EST_HUMAN HIT: BF031742.1, EVALUE 6.00e-66
QMLIDEKSMIHLDTVLLLVVKDKEVVEVLLSSHLTSILMTYLKTLAFLVKTKTLDPRSVLKIISRHARMVVPVDKGIISKNFLLEVDYLMTCLKIWRKCFLLVVLTLPISIQYRLKIDFMDLASTAGLSLNEEEIWLLHTLTVQDSSSYSI

SEQ ID NO: 39143 - protein, 56 aa, Homo sapiens
  MAP TO AC000001.1; EXPRESSED IN BONE MARROW, SIGNAL = 1.4; EXPRESSED IN PLACENTA, SIGNAL = 1.1; EXPRESSED IN LUNG, SIGNAL = 1.3; EXPRESSED IN HEART, SIGNAL = 1.3; EXPRESSED IN FETAL LIVER, SIGNAL = 1.2; EXPRESSED IN BRAIN, SIGNAL = 1.3; EXPRESSED IN ADULT LIVER, SIGNAL = 0.92; SWISSPROT HIT: P50747, EVALUE 2.00e-27; EST_HUMAN HIT: AA256749.1, EVALUE 3.00e-26
GQQVHLGSAEGPKVSIVGLDDSGFLQVHQEGGEVVTVHPDGNSFDMLRNLILPKRR

SEQ ID NO: 39144 - protein, 54 aa, Homo sapiens
  MAP TO AC000001.1; EXPRESSED IN BONE MARROW, SIGNAL = 1.4; EXPRESSED IN PLACENTA, SIGNAL = 1.1; EXPRESSED IN LUNG, SIGNAL = 1.3; EXPRESSED IN HEART, SIGNAL = 1.3; EXPRESSED IN FETAL LIVER, SIGNAL = 1.2; EXPRESSED IN BRAIN, SIGNAL = 1.3; EXPRESSED IN ADULT LIVER, SIGNAL = 0.92; EST_HUMAN HIT: AA262507.1, EVALUE 3.00e-26; SWISSPROT HIT: P52679, EVALUE 2.10e+00
AVLPFQWSASPSGQRRGTKGVHRWPGRFWLPPGSPGGRRGCDCAPGRQLLRHAE

SEQ ID NO: 39145 - protein, 84 aa, Homo sapiens
  MAP TO AC004691.1; EXPRESSED IN PLACENTA, SIGNAL =   2; EXPRESSED IN LUNG, SIGNAL = 2.2; EXPRESSED IN HEART, SIGNAL = 1.9; EXPRESSED IN BRAIN, SIGNAL = 1.6; EXPRESSED IN BONE MARROW, SIGNAL =   2; EXPRESSED IN ADULT LIVER, SIGNAL = 1.9; EXPRESSED IN HELA, SIGNAL = 2.3; EXPRESSED IN FETAL LIVER, SIGNAL = 2.3; EST_HUMAN HIT: AW470102.1, EVALUE 4.30e-01; SWISSPROT HIT: P01842, EVALUE 1.90e+00
GTDVQVPTDSNPFWMVWARNGPSKADARKSADQRYLELFPEQMENHRKQLDPFWAISCWKCHVEPHDGGGIKGPEVLTKQPEGW

SEQ ID NO: 39146 - protein, 31 aa, Homo sapiens
  MAP TO AC004691.1; EXPRESSED IN PLACENTA, SIGNAL =   2; EXPRESSED IN LUNG, SIGNAL = 2.2; EXPRESSED IN HEART, SIGNAL = 1.9; EXPRESSED IN BRAIN, SIGNAL = 1.6; EXPRESSED IN BONE MARROW, SIGNAL =   2; EXPRESSED IN ADULT LIVER, SIGNAL = 1.9; EXPRESSED IN HELA, SIGNAL = 2.3; EXPRESSED IN FETAL LIVER, SIGNAL = 2.3; EST_HUMAN HIT: H82117.1, EVALUE 5.90e+00
WNRCAGTYRQQPLLDGVGEKWPKQGRRQEER

SEQ ID NO: 39147 - protein, 107 aa, Homo sapiens
  MAP TO AC004775.1; EXPRESSED IN LUNG, SIGNAL = 2.1; EXPRESSED IN FETAL LIVER, SIGNAL = 1.8; EXPRESSED IN BRAIN, SIGNAL = 2.6; EXPRESSED IN BONE MARROW, SIGNAL = 1.7; EXPRESSED IN PLACENTA, SIGNAL = 1.7; EXPRESSED IN HEART, SIGNAL = 1.7; EXPRESSED IN ADULT LIVER, SIGNAL = 1.7; SWISSPROT HIT: Q92599, EVALUE 5.00e-33; EST_HUMAN HIT: AW161406.1, EVALUE 3.00e-30
WPRALSPPSPKPLISAGSLLGDGAVCSYRPIVDYIDAQFENYLQEELKIRRSLFDYHDTRIHVCLYFITPTGHSLKSLDLVTMKKLDSKVSLSPPAVTGSIVFCCDA

SEQ ID NO: 39148 - protein, 72 aa, Homo sapiens
  MAP TO AC005191.1; EXPRESSED IN LUNG, SIGNAL = 1.5; EXPRESSED IN FETAL LIVER, SIGNAL = 1.4; EXPRESSED IN BRAIN, SIGNAL = 1.5; EXPRESSED IN BONE MARROW, SIGNAL = 1.8; EXPRESSED IN PLACENTA, SIGNAL = 1.9; EXPRESSED IN HELA, SIGNAL = 1.6; EXPRESSED IN HEART, SIGNAL = 1.9; EXPRESSED IN ADULT LIVER, SIGNAL = 1.5; SWISSPROT HIT: Q9UL62, EVALUE 3.00e-37; EST_HUMAN HIT: AA629948.1, EVALUE 2.00e-27
MTIGFLFPMLSIAYLISPRSNLGLFIKKPFIKFICHTASYLTFLFMLLLASQHIVRTDLHVQGPPPTVVEWM

SEQ ID NO: 39149 - protein, 54 aa, Homo sapiens
  MAP TO AC005848.1; EXPRESSED IN PLACENTA, SIGNAL =   6; EXPRESSED IN ADULT LIVER, SIGNAL = 7.7; EXPRESSED IN LUNG, SIGNAL = 5.8; EXPRESSED IN HEART, SIGNAL =   6; EXPRESSED IN FETAL LIVER, SIGNAL = 9.2; EXPRESSED IN BRAIN, SIGNAL = 7.1; EXPRESSED IN HELA, SIGNAL = 7.2; EXPRESSED IN BONE MARROW, SIGNAL = 7.1; SWISSPROT HIT: O00567, EVALUE 1.60e+00; EST_HUMAN HIT: AI143876.1, EVALUE 1.00e-18
QFRGFSAEDVQRVVDTNRKQRFALQLGDPSTGLLIRANQGHSLQVGVRGQVRDE

SEQ ID NO: 39150 - protein, 20 aa, Homo sapiens
  MAP TO AC005848.1; EXPRESSED IN PLACENTA, SIGNAL =   6; EXPRESSED IN ADULT LIVER, SIGNAL = 7.7; EXPRESSED IN LUNG, SIGNAL = 5.8; EXPRESSED IN HEART, SIGNAL =   6; EXPRESSED IN FETAL LIVER, SIGNAL = 9.2; EXPRESSED IN BRAIN, SIGNAL = 7.1; EXPRESSED IN HELA, SIGNAL = 7.2; EXPRESSED IN BONE MARROW, SIGNAL = 7.1; SWISSPROT HIT: Q15643, EVALUE 8.80e+00; EST_HUMAN HIT: BE393921.1, EVALUE 7.30e-01
SRLALVPSPRPAGNGPGWPG

SEQ ID NO: 39151 - protein, 33 aa, Homo sapiens
  MAP TO AC002064.1; EXPRESSED IN PLACENTA, SIGNAL = 1.4; EXPRESSED IN HELA, SIGNAL = 1.8; EXPRESSED IN HEART, SIGNAL = 2.7; EXPRESSED IN FETAL LIVER, SIGNAL = 1.7; EXPRESSED IN ADULT LIVER, SIGNAL = 1.4; EXPRESSED IN LUNG, SIGNAL = 1.6; EXPRESSED IN BRAIN, SIGNAL = 1.9; EXPRESSED IN BONE MARROW, SIGNAL = 1.8; EST_HUMAN HIT: AI394234.1, EVALUE 7.70e-02
SMFSRPIASTLFGNWLKAHILGPHPDLLKQRLC

SEQ ID NO: 39152 - protein, 34 aa, Homo sapiens
  MAP TO AC002064.1; EXPRESSED IN PLACENTA, SIGNAL = 1.4; EXPRESSED IN HELA, SIGNAL = 1.8; EXPRESSED IN HEART, SIGNAL = 2.7; EXPRESSED IN FETAL LIVER, SIGNAL = 1.7; EXPRESSED IN ADULT LIVER, SIGNAL = 1.4; EXPRESSED IN LUNG, SIGNAL = 1.6; EXPRESSED IN BRAIN, SIGNAL = 1.9; EXPRESSED IN BONE MARROW, SIGNAL = 1.8; EST_HUMAN HIT: AI745407.1, EVALUE 1.30e-01
KYVLQTNSINIVWELVKSTYPWASPRLTEAETLQ

SEQ ID NO: 39153 - protein, 38 aa, Homo sapiens
  MAP TO AC004828.2; EXPRESSED IN PLACENTA, SIGNAL = 1.7; EXPRESSED IN LUNG, SIGNAL = 1.8; EXPRESSED IN HEART, SIGNAL = 1.6; EXPRESSED IN BRAIN, SIGNAL = 1.6; EXPRESSED IN BONE MARROW, SIGNAL = 1.5; EXPRESSED IN FETAL LIVER, SIGNAL = 1.8; EXPRESSED IN ADULT LIVER, SIGNAL = 1.7; EST_HUMAN HIT: AU135297.1, EVALUE 7.30e+00
LYNPGSFKCSSHECFKELKPYQNQEFGNEWGHLWLSVE

SEQ ID NO: 39154 - protein, 40 aa, Homo sapiens
  MAP TO AC004828.2; EXPRESSED IN PLACENTA, SIGNAL = 1.7; EXPRESSED IN LUNG, SIGNAL = 1.8; EXPRESSED IN HEART, SIGNAL = 1.6; EXPRESSED IN BRAIN, SIGNAL = 1.6; EXPRESSED IN BONE MARROW, SIGNAL = 1.5; EXPRESSED IN FETAL LIVER, SIGNAL = 1.8; EXPRESSED IN ADULT LIVER, SIGNAL = 1.7; EST_HUMAN HIT: BF337052.1, EVALUE 7.20e+00
TTLVPSSAPHMNVLKSSSPIRIRSLAMSGGTCGFPWRYVI

SEQ ID NO: 39155 - protein, 43 aa, Homo sapiens
  MAP TO AC005738.1; EXPRESSED IN LUNG, SIGNAL = 1.2; EXPRESSED IN PLACENTA, SIGNAL = 1.1; EXPRESSED IN HEART, SIGNAL = 1.6; EXPRESSED IN FETAL LIVER, SIGNAL = 1.5; EXPRESSED IN BRAIN, SIGNAL = 1.5; EXPRESSED IN BONE MARROW, SIGNAL = 1.4; EXPRESSED IN ADULT LIVER, SIGNAL = 1.1
HMNLQMQLMTGDGNVVGTLLSHSRIGDRAVNALHRVCKATGQC

SEQ ID NO: 39156 - protein, 30 aa, Homo sapiens
  MAP TO AC005738.1; EXPRESSED IN LUNG, SIGNAL = 1.2; EXPRESSED IN PLACENTA, SIGNAL = 1.1; EXPRESSED IN HEART, SIGNAL = 1.6; EXPRESSED IN FETAL LIVER, SIGNAL = 1.5; EXPRESSED IN BRAIN, SIGNAL = 1.5; EXPRESSED IN BONE MARROW, SIGNAL = 1.4; EXPRESSED IN ADULT LIVER, SIGNAL = 1.1
AYDRRRECCGHLTQPLTYWGQGSQCTAPSL

SEQ ID NO: 39157 - protein, 136 aa, Homo sapiens
  MAP TO AC004506.1; EXPRESSED IN PLACENTA, SIGNAL = 2.1; EXPRESSED IN HEART, SIGNAL = 1.8; EXPRESSED IN LUNG, SIGNAL = 2.2; EXPRESSED IN HELA, SIGNAL =   2; EXPRESSED IN FETAL LIVER, SIGNAL = 1.8; EXPRESSED IN BRAIN, SIGNAL = 1.9; EXPRESSED IN BONE MARROW, SIGNAL = 2.1; EXPRESSED IN ADULT LIVER, SIGNAL = 1.9; EST_HUMAN HIT: BF346065.1, EVALUE 9.00e-43; SWISSPROT HIT: Q10164, EVALUE 6.60e-01
EQLIAQKKGEIGSKMQQKAKQNEVASPQPPYPGEITNAHNSSSVSNKFANDGSFLQQFLKLQMAQTSTDAPHPQRQGAQCPSRHAYLLRREEVPPHQQADRPRAGQPARPVKSYSTRTPSSCLWRTARVSSSPTTR

SEQ ID NO: 39158 - protein, 73 aa, Homo sapiens
  MAP TO AC005865.1; EXPRESSED IN BRAIN, SIGNAL = 0.85; EXPRESSED IN LUNG, SIGNAL = 0.91; EXPRESSED IN FETAL LIVER, SIGNAL = 0.8; EXPRESSED IN BONE MARROW, SIGNAL = 0.53; EXPRESSED IN ADULT LIVER, SIGNAL = 0.86; EXPRESSED IN PLACENTA, SIGNAL = 1.4; EXPRESSED IN HEART, SIGNAL =   2; SWISSPROT HIT: O46567, EVALUE 3.50e+00; EST_HUMAN HIT: AI936997.1, EVALUE 5.30e+00
QKTHEAPGPTVQLQHLSAESLRPDVSAPESALWGFLRRRLKLLTRKPGQGTRAGQLCSNVGLPHIPSAPLPLS

SEQ ID NO: 39159 - protein, 27 aa, Homo sapiens
  MAP TO AC004787.1; EXPRESSED IN LUNG, SIGNAL = 0.93; EXPRESSED IN FETAL LIVER, SIGNAL = 0.83; EXPRESSED IN BONE MARROW, SIGNAL = 0.93; EXPRESSED IN PLACENTA, SIGNAL = 0.79; EXPRESSED IN ADULT LIVER, SIGNAL = 0.89; EXPRESSED IN HEART, SIGNAL = 1.6
AAAERSPAMSKNTVIVTITITICTGQT

SEQ ID NO: 39160 - protein, 29 aa, Homo sapiens
  MAP TO AC005201.1; EXPRESSED IN HELA, SIGNAL = 4.6; EXPRESSED IN PLACENTA, SIGNAL = 1.4; EXPRESSED IN LUNG, SIGNAL = 1.4; EXPRESSED IN FETAL LIVER, SIGNAL = 1.5; EXPRESSED IN BONE MARROW, SIGNAL = 1.6; EXPRESSED IN BRAIN, SIGNAL = 1.8; EXPRESSED IN ADULT LIVER, SIGNAL = 1.5; EXPRESSED IN HEART, SIGNAL = 1.5; EST_HUMAN HIT: BF244040.1, EVALUE 1.00e-03; SWISSPROT HIT: Q60716, EVALUE 8.00e-05
QLLITHLEEDDEWDIIRYYNVMSEEEIKR

SEQ ID NO: 39161 - protein, 154 aa, Homo sapiens
  MAP TO AC005070.1; EXPRESSED IN LUNG, SIGNAL = 1.7; EXPRESSED IN PLACENTA, SIGNAL = 1.7; EXPRESSED IN HEART, SIGNAL = 1.5; EXPRESSED IN FETAL LIVER, SIGNAL = 1.4; EXPRESSED IN BRAIN, SIGNAL = 3.2; EXPRESSED IN BONE MARROW, SIGNAL = 1.4; EXPRESSED IN ADULT LIVER, SIGNAL = 1.3; SWISSPROT HIT: P05622, EVALUE 6.20e-01; EST_HUMAN HIT: AU124932.1, EVALUE 2.00e-47
EAEDQEEKEDAEKENIEKDEDDVDQELANIDPTWIESPKTNGHIENGPFSLEQQLDDEDDDEEDCPNPEEYNLDEPNAESDYTYSSSYEQFNGELPNGRHKIPESQFPEFSTSLFSGSLEPVACGSVLSEGSPLTEQEESSPSHDRSRTVSASS

SEQ ID NO: 39162 - protein, 23 aa, Homo sapiens
  MAP TO AC005070.1; EXPRESSED IN LUNG, SIGNAL = 1.7; EXPRESSED IN PLACENTA, SIGNAL = 1.7; EXPRESSED IN HEART, SIGNAL = 1.5; EXPRESSED IN FETAL LIVER, SIGNAL = 1.4; EXPRESSED IN BRAIN, SIGNAL = 3.2; EXPRESSED IN BONE MARROW, SIGNAL = 1.4; EXPRESSED IN ADULT LIVER, SIGNAL = 1.3
VKLRTRKRKKMLRKKTLKKMKMM

SEQ ID NO: 39163 - protein, 33 aa, Homo sapiens
  MAP TO AC004801.1; EXPRESSED IN HELA, SIGNAL = 5.7; EXPRESSED IN FETAL LIVER, SIGNAL = 5.9; EXPRESSED IN BRAIN, SIGNAL = 6.6; EXPRESSED IN BONE MARROW, SIGNAL = 6.2; EXPRESSED IN ADULT LIVER, SIGNAL = 6.2; EXPRESSED IN PLACENTA, SIGNAL = 6.1; EXPRESSED IN HEART, SIGNAL = 6.4; EXPRESSED IN LUNG, SIGNAL = 6.5; SWISSPROT HIT: gi8039778, EVALUE 1.70e+00
GAPGEDGRPGPPGPQGARGQPGVMGFPGPKGAN

SEQ ID NO: 39164 - protein, 142 aa, Homo sapiens
  MAP TO AC005209.1; EXPRESSED IN PLACENTA, SIGNAL = 3.4; EXPRESSED IN HELA, SIGNAL = 3.3; EXPRESSED IN HEART, SIGNAL = 3.6; EXPRESSED IN FETAL LIVER, SIGNAL = 3.1; EXPRESSED IN BRAIN, SIGNAL = 3.3; EXPRESSED IN BONE MARROW, SIGNAL = 2.8; EXPRESSED IN LUNG, SIGNAL = 3.2; EXPRESSED IN ADULT LIVER, SIGNAL = 2.8; EST_HUMAN HIT: BE280197.1, EVALUE 6.00e-60; SWISSPROT HIT: P23098, EVALUE 1.00e-57
TNLTELKSFGSPPLAVSNVSAAVMVLMAPRGRVPKDRSWKAAKVTMAKVDGFLDSLINFNKENIHENCLKAIRPYLQDPEFNPEFVATKSYAAAGLCSWVINIVRFYEVFCDVEPKRQALNKATADLTAAQEKLAAIKAKIA

SEQ ID NO: 39165 - protein, 37 aa, Homo sapiens
  MAP TO AC005899.1; EXPRESSED IN PLACENTA, SIGNAL = 1.3; EXPRESSED IN ADULT LIVER, SIGNAL = 1.4; EXPRESSED IN LUNG, SIGNAL = 1.6; EXPRESSED IN HEART, SIGNAL = 1.6; EXPRESSED IN FETAL LIVER, SIGNAL = 1.5; EXPRESSED IN BRAIN, SIGNAL = 1.2; EXPRESSED IN BONE MARROW, SIGNAL = 1.3; EST_HUMAN HIT: BE778475.1, EVALUE 5.00e-03; SWISSPROT HIT: P20350, EVALUE 7.40e-01
IEHLGLNVVLQLLVGVPLEMVHGATRIGLVYVAGVVA

SEQ ID NO: 39166 - protein, 31 aa, Homo sapiens
  MAP TO AC005899.1; EXPRESSED IN PLACENTA, SIGNAL = 1.3; EXPRESSED IN ADULT LIVER, SIGNAL = 1.4; EXPRESSED IN LUNG, SIGNAL = 1.6; EXPRESSED IN HEART, SIGNAL = 1.6; EXPRESSED IN FETAL LIVER, SIGNAL = 1.5; EXPRESSED IN BRAIN, SIGNAL = 1.2; EXPRESSED IN BONE MARROW, SIGNAL = 1.3; EST_HUMAN HIT: BE778475.1, EVALUE 7.00e-05
CGAAAAGGGAPGDGAWSHPNWACLRGRCCGR

SEQ ID NO: 39167 - protein, 36 aa, Homo sapiens
  MAP TO AC004666.7; EXPRESSED IN PLACENTA, SIGNAL = 5.3; EXPRESSED IN LUNG, SIGNAL =   6; EXPRESSED IN FETAL LIVER, SIGNAL = 4.8; EXPRESSED IN BONE MARROW, SIGNAL = 5.6; EXPRESSED IN HELA, SIGNAL = 5.1; EXPRESSED IN BRAIN, SIGNAL = 6.1; EXPRESSED IN ADULT LIVER, SIGNAL = 5.2; EXPRESSED IN HEART, SIGNAL = 5.7; EST_HUMAN HIT: AV695172.1, EVALUE 5.00e-12
VAVVLQFMIHNGNLRVKAKFEARVPAFYYIPQANDC

SEQ ID NO: 39168 - protein, 17 aa, Homo sapiens
  MAP TO AC004666.7; EXPRESSED IN PLACENTA, SIGNAL = 5.3; EXPRESSED IN LUNG, SIGNAL =   6; EXPRESSED IN FETAL LIVER, SIGNAL = 4.8; EXPRESSED IN BONE MARROW, SIGNAL = 5.6; EXPRESSED IN HELA, SIGNAL = 5.1; EXPRESSED IN BRAIN, SIGNAL = 6.1; EXPRESSED IN ADULT LIVER, SIGNAL = 5.2; EXPRESSED IN HEART, SIGNAL = 5.7; EST_HUMAN HIT: AV695172.1, EVALUE 7.00e-03
RSQSPSFLLHPPGQRLP

SEQ ID NO: 39169 - protein, 77 aa, Homo sapiens
  MAP TO AC005077.1; EXPRESSED IN PLACENTA, SIGNAL = 2.3; EXPRESSED IN LUNG, SIGNAL = 2.5; EXPRESSED IN FETAL LIVER, SIGNAL = 2.1; EXPRESSED IN BONE MARROW, SIGNAL = 2.2; EXPRESSED IN ADULT LIVER, SIGNAL =   4; EXPRESSED IN HELA, SIGNAL = 2.8; EXPRESSED IN HEART, SIGNAL = 5.9; EXPRESSED IN BRAIN, SIGNAL = 4.4; SWISSPROT HIT: P40926, EVALUE 6.00e-26; EST_HUMAN HIT: W42822.1, EVALUE 1.00e-30
NNAKVAVLGASGGIGQPLSLLLKNSPLVSRLTLYDIAHTPGVAADLSHIETKAAVKGTGRADPGDLLPVPSRPGFEF

SEQ ID NO: 39170 - protein, 24 aa, Homo sapiens
  MAP TO AC005214.1; EXPRESSED IN PLACENTA, SIGNAL = 2.4; EXPRESSED IN LUNG, SIGNAL = 2.4; EXPRESSED IN HEART, SIGNAL = 2.7; EXPRESSED IN FETAL LIVER, SIGNAL = 1.9; EXPRESSED IN BONE MARROW, SIGNAL = 2.3; EXPRESSED IN ADULT LIVER, SIGNAL = 2.4; EXPRESSED IN HELA, SIGNAL = 2.7; EXPRESSED IN BRAIN, SIGNAL = 2.6
FPGTPFPVPLQQLLPAPCPCISLR

SEQ ID NO: 39171 - protein, 45 aa, Homo sapiens
  MAP TO AC005153.1; EXPRESSED IN PLACENTA, SIGNAL = 1.9; EXPRESSED IN LUNG, SIGNAL = 1.9; EXPRESSED IN HEART, SIGNAL = 2.4; EXPRESSED IN BRAIN, SIGNAL = 2.1; EXPRESSED IN BONE MARROW, SIGNAL = 1.9; EXPRESSED IN ADULT LIVER, SIGNAL =   2; EXPRESSED IN HELA, SIGNAL = 1.8; EXPRESSED IN FETAL LIVER, SIGNAL =   2; SWISSPROT HIT: Q13322, EVALUE 6.00e-22; EST_HUMAN HIT: BE386788.1, EVALUE 7.00e-21
DGTSKVVEILADMTARDLCQLLVYKSHCVDDNSWTLVEHHPHLGL

SEQ ID NO: 39172 - protein, 30 aa, Homo sapiens
  MAP TO AC005153.1; EXPRESSED IN PLACENTA, SIGNAL = 1.9; EXPRESSED IN LUNG, SIGNAL = 1.9; EXPRESSED IN HEART, SIGNAL = 2.4; EXPRESSED IN BRAIN, SIGNAL = 2.1; EXPRESSED IN BONE MARROW, SIGNAL = 1.9; EXPRESSED IN ADULT LIVER, SIGNAL =   2; EXPRESSED IN HELA, SIGNAL = 1.8; EXPRESSED IN FETAL LIVER, SIGNAL =   2; EST_HUMAN HIT: BE384766.1, EVALUE 3.00e-11
RWDKQSGGDSSRHDSQRPVPIAGLQKSLCG

SEQ ID NO: 39173 - protein, 38 aa, Homo sapiens
  MAP TO AC004672.1; EXPRESSED IN PLACENTA, SIGNAL = 1.2; EXPRESSED IN HEART, SIGNAL = 1.4; EXPRESSED IN FETAL LIVER, SIGNAL =   1; EXPRESSED IN BRAIN, SIGNAL = 1.1; EXPRESSED IN BONE MARROW, SIGNAL = 0.94; EXPRESSED IN LUNG, SIGNAL = 1.1; EXPRESSED IN ADULT LIVER, SIGNAL = 1.1; EST_HUMAN HIT: AW392705.1, EVALUE 3.00e-12
QEALLAAISEKDANIALLELSSSKKKTQEEVAALKREK

SEQ ID NO: 39174 - protein, 55 aa, Homo sapiens
  MAP TO AC004812.1; EXPRESSED IN PLACENTA, SIGNAL = 2.8; EXPRESSED IN LUNG, SIGNAL = 3.4; EXPRESSED IN FETAL LIVER, SIGNAL = 3.1; EXPRESSED IN ADULT LIVER, SIGNAL = 3.3; EXPRESSED IN HELA, SIGNAL = 3.6; EXPRESSED IN HEART, SIGNAL = 3.5; EXPRESSED IN BRAIN, SIGNAL = 3.3; EXPRESSED IN BONE MARROW, SIGNAL = 3.1; EST_HUMAN HIT: BE274860.1, EVALUE 2.00e-11; SWISSPROT HIT: P33892, EVALUE 1.00e-03
IAARTLGDLVRKLGEKILPEIIPILEEGLRSQKSDERQGVCIGLSEIMKSTSRDA

SEQ ID NO: 39175 - protein, 24 aa, Homo sapiens
  MAP TO AC004812.1; EXPRESSED IN PLACENTA, SIGNAL = 2.8; EXPRESSED IN LUNG, SIGNAL = 3.4; EXPRESSED IN FETAL LIVER, SIGNAL = 3.1; EXPRESSED IN ADULT LIVER, SIGNAL = 3.3; EXPRESSED IN HELA, SIGNAL = 3.6; EXPRESSED IN HEART, SIGNAL = 3.5; EXPRESSED IN BRAIN, SIGNAL = 3.3; EXPRESSED IN BONE MARROW, SIGNAL = 3.1; EST_HUMAN HIT: BE274860.1, EVALUE 1.00e-08
CSENIGRSCAEVRGENPPRDHPHP

SEQ ID NO: 39176 - protein, 37 aa, Homo sapiens
  MAP TO AC005218.1; EXPRESSED IN PLACENTA, SIGNAL = 2.5; EXPRESSED IN LUNG, SIGNAL = 2.5; EXPRESSED IN FETAL LIVER, SIGNAL = 2.5; EXPRESSED IN ADULT LIVER, SIGNAL = 2.4; EXPRESSED IN HELA, SIGNAL = 2.6; EXPRESSED IN HEART, SIGNAL = 2.7; EXPRESSED IN BRAIN, SIGNAL =   3; EXPRESSED IN BONE MARROW, SIGNAL = 2.1
MDSACLQVLVPKAYTLARQQYKSLSEQVYSCHQGTLN

SEQ ID NO: 39177 - protein, 25 aa, Homo sapiens
  MAP TO AC005911.6; EXPRESSED IN PLACENTA, SIGNAL =   5; EXPRESSED IN HEART, SIGNAL = 4.2; EXPRESSED IN BONE MARROW, SIGNAL =   4; EXPRESSED IN ADULT LIVER, SIGNAL = 4.9; EXPRESSED IN LUNG, SIGNAL = 4.9; EXPRESSED IN HELA, SIGNAL = 4.5; EXPRESSED IN FETAL LIVER, SIGNAL = 4.4; EXPRESSED IN BRAIN, SIGNAL = 7.4
PQGKTQIPPVPNTVLVWTKTMAATQ

SEQ ID NO: 39178 - protein, 27 aa, Homo sapiens
  MAP TO AC005274.1; EXPRESSED IN PLACENTA, SIGNAL = 4.8; EXPRESSED IN HEART, SIGNAL = 4.1; EXPRESSED IN BONE MARROW, SIGNAL = 4.6; EXPRESSED IN ADULT LIVER, SIGNAL = 4.2; EXPRESSED IN LUNG, SIGNAL = 5.2; EXPRESSED IN HELA, SIGNAL = 4.5; EXPRESSED IN FETAL LIVER, SIGNAL =   4; EXPRESSED IN BRAIN, SIGNAL = 4.7
SQHFWKQISNHFPHQLCNQQQQGTHLL

SEQ ID NO: 39179 - protein, 33 aa, Homo sapiens
  MAP TO AC004682.1; EXPRESSED IN PLACENTA, SIGNAL = 1.5; EXPRESSED IN LUNG, SIGNAL = 1.3; EXPRESSED IN FETAL LIVER, SIGNAL =  57; EXPRESSED IN ADULT LIVER, SIGNAL = 1.2e+02; EXPRESSED IN HEART, SIGNAL = 2.3; EXPRESSED IN BRAIN, SIGNAL = 1.6; EXPRESSED IN BONE MARROW, SIGNAL = 2.8; EST_HUMAN HIT: AV698541.1, EVALUE 3.00e-14; SWISSPROT HIT: P00739, EVALUE 2.00e-15
DRFPKPPEIANGYVEHLFRYQCKNYYRLRTEGD

SEQ ID NO: 39180 - protein, 75 aa, Homo sapiens
  MAP TO AC005165.1; EXPRESSED IN PLACENTA, SIGNAL = 3.6; EXPRESSED IN HEART, SIGNAL = 3.5; EXPRESSED IN BRAIN, SIGNAL = 3.7; EXPRESSED IN BONE MARROW, SIGNAL = 3.2; EXPRESSED IN ADULT LIVER, SIGNAL = 3.3; EXPRESSED IN LUNG, SIGNAL = 4.2; EXPRESSED IN HELA, SIGNAL =   3; EXPRESSED IN FETAL LIVER, SIGNAL =   3; EST_HUMAN HIT: AI871122.1, EVALUE 2.00e-05; SWISSPROT HIT: P43602, EVALUE 3.10e+00
SDKSSLLGLQMANFSLFLHMVKRESKRKKRENECSDVSPNKDTNSINQSPTHMTSSSLNYFCNGLVTKYSHILSG

SEQ ID NO: 39181 - protein, 37 aa, Homo sapiens
  MAP TO AC005291.1; EXPRESSED IN BRAIN, SIGNAL = 5.2; EXPRESSED IN PLACENTA, SIGNAL = 7.2; EXPRESSED IN LUNG, SIGNAL =  11; EXPRESSED IN HEART, SIGNAL =   8; EXPRESSED IN BONE MARROW, SIGNAL =  14; EXPRESSED IN ADULT LIVER, SIGNAL =  13; EXPRESSED IN HELA, SIGNAL =  12; EXPRESSED IN FETAL LIVER, SIGNAL =  18
MQADVVLSQLNLTLPPKPMILTGGCKKMLHHGAIESQ

SEQ ID NO: 39182 - protein, 25 aa, Homo sapiens
  MAP TO AC002426.1; EXPRESSED IN PLACENTA, SIGNAL = 1.7; EXPRESSED IN LUNG, SIGNAL = 1.3; EXPRESSED IN FETAL LIVER, SIGNAL = 1.5; EXPRESSED IN BONE MARROW, SIGNAL = 1.5; EXPRESSED IN ADULT LIVER, SIGNAL = 1.5; EXPRESSED IN HEART, SIGNAL = 1.6; EXPRESSED IN BRAIN, SIGNAL = 1.1
MATLIHDGLVLVGQLLLIFQPLSHQ

SEQ ID NO: 39183 - protein, 133 aa, Homo sapiens
  MAP TO AC002426.1; EXPRESSED IN PLACENTA, SIGNAL = 1.7; EXPRESSED IN LUNG, SIGNAL = 1.3; EXPRESSED IN FETAL LIVER, SIGNAL = 1.5; EXPRESSED IN BONE MARROW, SIGNAL = 1.5; EXPRESSED IN ADULT LIVER, SIGNAL = 1.5; EXPRESSED IN HEART, SIGNAL = 1.6; EXPRESSED IN BRAIN, SIGNAL = 1.1; EST_HUMAN HIT: AI003019.1, EVALUE 2.00e-30; SWISSPROT HIT: Q02563, EVALUE 3.00e-27
IAQGATRQSQNQGMDDYKYQDNYGGYAPSDGYYRGNESNPEEDAQSDVTEGHDEEDEIYEGEYQGIPHPDDVKAKQAKMAPSRMDSLRGQTDLMAERLEDEEQLAHQYETIMDECGHGRFQWILFFVLGLALM

SEQ ID NO: 39184 - protein, 34 aa, Homo sapiens
  MAP TO AC005244.1; EXPRESSED IN PLACENTA, SIGNAL = 8.2; EXPRESSED IN LUNG, SIGNAL = 6.1; EXPRESSED IN HEART, SIGNAL = 6.7; EXPRESSED IN FETAL LIVER, SIGNAL =  12; EXPRESSED IN BRAIN, SIGNAL = 9.9; EXPRESSED IN BONE MARROW, SIGNAL = 8.3; EXPRESSED IN ADULT LIVER, SIGNAL = 9.7; EXPRESSED IN HELA, SIGNAL = 6.4; EST_HUMAN HIT: AL133959.1, EVALUE 2.00e-12; SWISSPROT HIT: P47809, EVALUE 2.00e-13
RIRSTVDEKEQKQLLMDLDVVMRSSDCPYIVQFY

SEQ ID NO: 39185 - protein, 19 aa, Homo sapiens
  MAP TO AC005244.1; EXPRESSED IN PLACENTA, SIGNAL = 8.2; EXPRESSED IN LUNG, SIGNAL = 6.1; EXPRESSED IN HEART, SIGNAL = 6.7; EXPRESSED IN FETAL LIVER, SIGNAL =  12; EXPRESSED IN BRAIN, SIGNAL = 9.9; EXPRESSED IN BONE MARROW, SIGNAL = 8.3; EXPRESSED IN ADULT LIVER, SIGNAL = 9.7; EXPRESSED IN HELA, SIGNAL = 6.4; EST_HUMAN HIT: AU140569.1, EVALUE 9.00e-06
EFGQQWMKKNKNNFLWIWM

SEQ ID NO: 39186 - protein, 62 aa, Homo sapiens
  MAP TO AC005015.2; EXPRESSED IN PLACENTA, SIGNAL = 4.1; EXPRESSED IN HEART, SIGNAL = 3.7; EXPRESSED IN BRAIN, SIGNAL = 3.7; EXPRESSED IN BONE MARROW, SIGNAL = 3.6; EXPRESSED IN ADULT LIVER, SIGNAL = 4.3; EXPRESSED IN LUNG, SIGNAL = 5.1; EXPRESSED IN HELA, SIGNAL = 4.3; EXPRESSED IN FETAL LIVER, SIGNAL = 3.5; EST_HUMAN HIT: BF081645.1, EVALUE 3.00e-17; SWISSPROT HIT: Q13625, EVALUE 6.80e-01
DKEKSLSDQRRYSLIDRSSAPELLRLQHQLMSTEDALRDALDQAQQVEKLMEAMRSCPDKAQ

SEQ ID NO: 39187 - protein, 61 aa, Homo sapiens
  MAP TO AC005015.2; EXPRESSED IN PLACENTA, SIGNAL = 4.1; EXPRESSED IN HEART, SIGNAL = 3.7; EXPRESSED IN BRAIN, SIGNAL = 3.7; EXPRESSED IN BONE MARROW, SIGNAL = 3.6; EXPRESSED IN ADULT LIVER, SIGNAL = 4.3; EXPRESSED IN LUNG, SIGNAL = 5.1; EXPRESSED IN HELA, SIGNAL = 4.3; EXPRESSED IN FETAL LIVER, SIGNAL = 3.5; EST_HUMAN HIT: AW503503.1, EVALUE 3.00e-06
TLLPLPGQREIPVGSEALLPHRPVLGARASAAAAPADEHGGRPAGCAGPGSAGGEADGGHE

SEQ ID NO: 39188 - protein, 25 aa, Homo sapiens
  MAP TO AC005252.1; EXPRESSED IN PLACENTA, SIGNAL = 1.7; EXPRESSED IN LUNG, SIGNAL = 1.8; EXPRESSED IN FETAL LIVER, SIGNAL = 1.4; EXPRESSED IN BRAIN, SIGNAL = 3.1; EXPRESSED IN ADULT LIVER, SIGNAL = 1.7; EXPRESSED IN HELA, SIGNAL = 1.9; EXPRESSED IN HEART, SIGNAL = 1.9; EXPRESSED IN BONE MARROW, SIGNAL = 1.7
PIADKHKRQAQAAEDVQMESEALRI

SEQ ID NO: 39189 - protein, 22 aa, Homo sapiens
  MAP TO AC005252.1; EXPRESSED IN PLACENTA, SIGNAL = 1.7; EXPRESSED IN LUNG, SIGNAL = 1.8; EXPRESSED IN FETAL LIVER, SIGNAL = 1.4; EXPRESSED IN BRAIN, SIGNAL = 3.1; EXPRESSED IN ADULT LIVER, SIGNAL = 1.7; EXPRESSED IN HELA, SIGNAL = 1.9; EXPRESSED IN HEART, SIGNAL = 1.9; EXPRESSED IN BONE MARROW, SIGNAL = 1.7
PLQTSIRGRLRLQRMCRWNLRP

SEQ ID NO: 39190 - protein, 41 aa, Homo sapiens
  MAP TO AC005154.1; EXPRESSED IN PLACENTA, SIGNAL = 2.3; EXPRESSED IN LUNG, SIGNAL = 2.4; EXPRESSED IN HEART, SIGNAL = 2.6; EXPRESSED IN FETAL LIVER, SIGNAL = 2.3; EXPRESSED IN BRAIN, SIGNAL = 2.8; EXPRESSED IN BONE MARROW, SIGNAL = 2.2; EXPRESSED IN ADULT LIVER, SIGNAL = 2.1; EXPRESSED IN HELA, SIGNAL = 2.7; EST_HUMAN HIT: AA418116.1, EVALUE 2.00e-18; SWISSPROT HIT: P41250, EVALUE 2.00e-19
DFGPVGCALKNNIIQTWRQHFIQEEQILEIDCTMLTPEPVL

SEQ ID NO: 39191 - protein, 28 aa, Homo sapiens
  MAP TO AC005164.1; EXPRESSED IN PLACENTA, SIGNAL = 2.7; EXPRESSED IN LUNG, SIGNAL =   3; EXPRESSED IN HEART, SIGNAL = 3.3; EXPRESSED IN BRAIN, SIGNAL = 3.5; EXPRESSED IN FETAL LIVER, SIGNAL = 3.4; EXPRESSED IN BONE MARROW, SIGNAL =   3; EXPRESSED IN ADULT LIVER, SIGNAL = 3.1; EXPRESSED IN HELA, SIGNAL = 3.5; EST_HUMAN HIT: BE875422.1, EVALUE 3.00e-09
MQAAVAVSVPFLLLCVLGTCPPARCGQA

SEQ ID NO: 39192 - protein, 86 aa, Homo sapiens
  MAP TO AC003684.1; EXPRESSED IN LUNG, SIGNAL = 4.8; EXPRESSED IN HELA, SIGNAL = 4.2; EXPRESSED IN HEART, SIGNAL = 4.2; EXPRESSED IN FETAL LIVER, SIGNAL =   4; EXPRESSED IN BONE MARROW, SIGNAL = 3.6; EXPRESSED IN PLACENTA, SIGNAL = 4.1; EXPRESSED IN BRAIN, SIGNAL = 4.2; EXPRESSED IN ADULT LIVER, SIGNAL = 4.3; SWISSPROT HIT: O70311, EVALUE 3.90e+00
RSFHEPEFRILTYRSMPPKRRLWVCLYHKIQRNVQSENVHNGSKVEACSPALGVLEGVYHEAPTLPVQKGKKIESCQAAFKNLDVQ

SEQ ID NO: 39193 - protein, 34 aa, Homo sapiens
  MAP TO AC005533.2; EXPRESSED IN FETAL LIVER, SIGNAL = 5.6; EXPRESSED IN BONE MARROW, SIGNAL = 6.3; EXPRESSED IN HELA, SIGNAL = 6.7; EXPRESSED IN PLACENTA, SIGNAL = 6.6; EXPRESSED IN LUNG, SIGNAL = 7.3; EXPRESSED IN HEART, SIGNAL = 5.3; EXPRESSED IN BRAIN, SIGNAL =   7; EXPRESSED IN ADULT LIVER, SIGNAL = 5.4; EST_HUMAN HIT: BE739008.1, EVALUE 9.90e+00
RVDFGTWITTLFSTPNLPLSLVTPLSMKGTHLIC

SEQ ID NO: 39194 - protein, 32 aa, Homo sapiens
  MAP TO AC005538.2; EXPRESSED IN PLACENTA, SIGNAL = 4.7; EXPRESSED IN BONE MARROW, SIGNAL = 4.8; EXPRESSED IN ADULT LIVER, SIGNAL = 4.6; EXPRESSED IN LUNG, SIGNAL = 4.8; EXPRESSED IN HELA, SIGNAL = 4.5; EXPRESSED IN HEART, SIGNAL = 4.3; EXPRESSED IN FETAL LIVER, SIGNAL = 4.8; EXPRESSED IN BRAIN, SIGNAL = 5.4
MEGEDVEDDQLLQKLRASRRRFQRRMQRLIEK

SEQ ID NO: 39195 - protein, 27 aa, Homo sapiens
  MAP TO AC005538.2; EXPRESSED IN PLACENTA, SIGNAL = 4.7; EXPRESSED IN BONE MARROW, SIGNAL = 4.8; EXPRESSED IN ADULT LIVER, SIGNAL = 4.6; EXPRESSED IN LUNG, SIGNAL = 4.8; EXPRESSED IN HELA, SIGNAL = 4.5; EXPRESSED IN HEART, SIGNAL = 4.3; EXPRESSED IN FETAL LIVER, SIGNAL = 4.8; EXPRESSED IN BRAIN, SIGNAL = 5.4; EST_HUMAN HIT: BE897563.1, EVALUE 3.00e-09
RARTWKTTSCCRSSGPVAAASRGACSG

SEQ ID NO: 39196 - protein, 63 aa, Homo sapiens
  MAP TO AC004946.1; EXPRESSED IN PLACENTA, SIGNAL =  10; EXPRESSED IN HELA, SIGNAL =  10; EXPRESSED IN HEART, SIGNAL =  11; EXPRESSED IN FETAL LIVER, SIGNAL =  10; EXPRESSED IN BONE MARROW, SIGNAL =  10; EXPRESSED IN LUNG, SIGNAL =  12; EXPRESSED IN BRAIN, SIGNAL =  11; EXPRESSED IN ADULT LIVER, SIGNAL =  11; EST_HUMAN HIT: AI369146.1, EVALUE 3.00e-06; SWISSPROT HIT: Q10977, EVALUE 2.80e-01
VAAFCKGSGYRVDACGLGAYAGSPEAGEEKDPRCSHCAECEWHPLPDVAGHPGTLPRHSTGQF

SEQ ID NO: 39197 - protein, 39 aa, Homo sapiens
  MAP TO AC005342.1; EXPRESSED IN FETAL LIVER, SIGNAL = 1.3; EXPRESSED IN PLACENTA, SIGNAL = 1.4; EXPRESSED IN LUNG, SIGNAL = 1.9; EXPRESSED IN HEART, SIGNAL = 1.4; EXPRESSED IN BRAIN, SIGNAL = 1.4; EXPRESSED IN BONE MARROW, SIGNAL = 1.5; EXPRESSED IN ADULT LIVER, SIGNAL = 1.4
MSESFMGELAFLLAYSVVDGWKQLLAGRSMSINDQQFEE

SEQ ID NO: 39198 - protein, 33 aa, Homo sapiens
  MAP TO AC006529.1; EXPRESSED IN PLACENTA, SIGNAL = 3.5; EXPRESSED IN BRAIN, SIGNAL = 3.7; EXPRESSED IN BONE MARROW, SIGNAL = 4.2; EXPRESSED IN ADULT LIVER, SIGNAL = 3.2; EXPRESSED IN LUNG, SIGNAL = 3.8; EXPRESSED IN HELA, SIGNAL = 3.7; EXPRESSED IN HEART, SIGNAL =   3; EXPRESSED IN FETAL LIVER, SIGNAL = 3.3; EST_HUMAN HIT: AA884632.1, EVALUE 4.00e-11
EALVSKGLATVIRYRQDDDQRSSHYDELLAAEA

SEQ ID NO: 39199 - protein, 172 aa, Homo sapiens
  MAP TO AC005544.1; EXPRESSED IN ADULT LIVER, SIGNAL = 1.3; EXPRESSED IN PLACENTA, SIGNAL = 1.3; EXPRESSED IN LUNG, SIGNAL = 1.4; EXPRESSED IN HEART, SIGNAL = 1.3; EXPRESSED IN BRAIN, SIGNAL = 1.2; EXPRESSED IN BONE MARROW, SIGNAL = 1.4; EXPRESSED IN FETAL LIVER, SIGNAL = 1.4; EST_HUMAN HIT: BE694267.1, EVALUE 6.00e-50; SWISSPROT HIT: P42694, EVALUE 3.00e-55
FQDLIRELSHRDQSETRELAEMPPPQSRLLQYRQVQSRSPPAVPSPPSSTDHSSHFSNFNDNSRDIEVASNPAFPQRLPPQIFNSPFSLPSEHLAPPPLKYLAPDGAWTFANLQQNHLMGPGFPYGLPPLPHRPPQNPFVQIQNHQHAIGQEPFHPLSSRTVSSSSLPSLEE

SEQ ID NO: 39200 - protein, 26 aa, Homo sapiens
  MAP TO AC005544.1; EXPRESSED IN ADULT LIVER, SIGNAL = 1.3; EXPRESSED IN PLACENTA, SIGNAL = 1.3; EXPRESSED IN LUNG, SIGNAL = 1.4; EXPRESSED IN HEART, SIGNAL = 1.3; EXPRESSED IN BRAIN, SIGNAL = 1.2; EXPRESSED IN BONE MARROW, SIGNAL = 1.4; EXPRESSED IN FETAL LIVER, SIGNAL = 1.4; EST_HUMAN HIT: BE694267.1, EVALUE 2.00e-10
TVVCTGWGRWDCWWASTLYLSILQKS

SEQ ID NO: 39201 - protein, 62 aa, Homo sapiens
  MAP TO AC003957.1; EXPRESSED IN PLACENTA, SIGNAL =   3; EXPRESSED IN LUNG, SIGNAL = 3.9; EXPRESSED IN HEART, SIGNAL = 3.6; EXPRESSED IN FETAL LIVER, SIGNAL = 3.4; EXPRESSED IN BRAIN, SIGNAL = 3.3; EXPRESSED IN BONE MARROW, SIGNAL = 3.1; EXPRESSED IN ADULT LIVER, SIGNAL = 3.4; EXPRESSED IN HELA, SIGNAL = 3.5; EST_HUMAN HIT: AA418402.1, EVALUE 3.50e+00; SWISSPROT HIT: P04495, EVALUE 2.60e+00
VPLSKPTGSSQPSSLESAQATQPSSQVKEGAQWSLCILLMDRPLLGGLEASKMQLQNPGGPM

SEQ ID NO: 39202 - protein, 34 aa, Homo sapiens
  MAP TO AC004993.1; EXPRESSED IN PLACENTA, SIGNAL = 7.6; EXPRESSED IN LUNG, SIGNAL = 8.2; EXPRESSED IN HELA, SIGNAL = 9.7; EXPRESSED IN HEART, SIGNAL = 7.8; EXPRESSED IN BONE MARROW, SIGNAL = 8.3; EXPRESSED IN FETAL LIVER, SIGNAL = 7.5; EXPRESSED IN BRAIN, SIGNAL = 7.6; EXPRESSED IN ADULT LIVER, SIGNAL = 8.5
TSELYEAMHLFLRSINCRDMNLSISRAENCSRSI

SEQ ID NO: 39203 - protein, 34 aa, Homo sapiens
  MAP TO AC004993.1; EXPRESSED IN PLACENTA, SIGNAL = 7.6; EXPRESSED IN LUNG, SIGNAL = 8.2; EXPRESSED IN HELA, SIGNAL = 9.7; EXPRESSED IN HEART, SIGNAL = 7.8; EXPRESSED IN BONE MARROW, SIGNAL = 8.3; EXPRESSED IN FETAL LIVER, SIGNAL = 7.5; EXPRESSED IN BRAIN, SIGNAL = 7.6; EXPRESSED IN ADULT LIVER, SIGNAL = 8.5
MLLEQFSALEIDKFMSLQLILLRNKCMASYNSLV

SEQ ID NO: 39204 - protein, 43 aa, Homo sapiens
  MAP TO AC004901.1; EXPRESSED IN PLACENTA, SIGNAL = 6.1; EXPRESSED IN BRAIN, SIGNAL = 6.4; EXPRESSED IN BONE MARROW, SIGNAL =   5; EXPRESSED IN ADULT LIVER, SIGNAL = 5.7; EXPRESSED IN LUNG, SIGNAL = 6.4; EXPRESSED IN HELA, SIGNAL = 5.1; EXPRESSED IN HEART, SIGNAL = 4.7; EXPRESSED IN FETAL LIVER, SIGNAL = 5.6; EST_HUMAN HIT: H64670.1, EVALUE 4.00e-07
LRKLTIMAEDEGEASTLYYWGAGKIKRRGKCHTLLNNQILGEL

SEQ ID NO: 39205 - protein, 24 aa, Homo sapiens
  MAP TO AC004901.1; EXPRESSED IN PLACENTA, SIGNAL = 6.1; EXPRESSED IN BRAIN, SIGNAL = 6.4; EXPRESSED IN BONE MARROW, SIGNAL =   5; EXPRESSED IN ADULT LIVER, SIGNAL = 5.7; EXPRESSED IN LUNG, SIGNAL = 6.4; EXPRESSED IN HELA, SIGNAL = 5.1; EXPRESSED IN HEART, SIGNAL = 4.7; EXPRESSED IN FETAL LIVER, SIGNAL = 5.6; EST_HUMAN HIT: AW338373.1, EVALUE 1.00e-03
SGNLQSWQKMKGKQAHFTIGEQER

SEQ ID NO: 39206 - protein, 64 aa, Homo sapiens
  MAP TO AC005553.1; EXPRESSED IN PLACENTA, SIGNAL = 1.6; EXPRESSED IN ADULT LIVER, SIGNAL = 1.6; EXPRESSED IN LUNG, SIGNAL = 1.5; EXPRESSED IN HELA, SIGNAL = 1.7; EXPRESSED IN HEART, SIGNAL = 1.6; EXPRESSED IN FETAL LIVER, SIGNAL = 1.4; EXPRESSED IN BRAIN, SIGNAL = 1.6; EXPRESSED IN BONE MARROW, SIGNAL = 1.6
PWWREREREKEEEEEEEEKKKRRRRRKKKKKRRRRRTRMRTRTRTRRTRTRTRTRTGTTRRGES

SEQ ID NO: 39207 - protein, 52 aa, Homo sapiens
  MAP TO AC000066.1; EXPRESSED IN PLACENTA, SIGNAL = 1.3; EXPRESSED IN BONE MARROW, SIGNAL = 1.3; EXPRESSED IN ADULT LIVER, SIGNAL = 1.1; EXPRESSED IN LUNG, SIGNAL = 1.4; EXPRESSED IN HEART, SIGNAL = 2.1; EXPRESSED IN FETAL LIVER, SIGNAL = 1.2; EXPRESSED IN BRAIN, SIGNAL = 1.5; SWISSPROT HIT: O67368, EVALUE 8.00e+00; EST_HUMAN HIT: BE002098.1, EVALUE 9.00e-21
TLCSVLGEYYTPALKCEVNAEDKENSGDYISENEDPELQDYRYEVQGNKSLP

SEQ ID NO: 39208 - protein, 58 aa, Homo sapiens
  MAP TO AC003678.1; EXPRESSED IN PLACENTA, SIGNAL =  13; EXPRESSED IN HEART, SIGNAL =  11; EXPRESSED IN FETAL LIVER, SIGNAL =  11; EXPRESSED IN BONE MARROW, SIGNAL =  12; EXPRESSED IN ADULT LIVER, SIGNAL =  12; EXPRESSED IN HELA, SIGNAL =  12; EXPRESSED IN LUNG, SIGNAL =  14; EXPRESSED IN BRAIN, SIGNAL =  14
VPVWSPDEQQFLSSPSISITVTIIITITVTIIITITVTITNTLKVFTLPGLLHINSPS

SEQ ID NO: 39209 - protein, 24 aa, Homo sapiens
  MAP TO AC005773.1; EXPRESSED IN BRAIN, SIGNAL = 1.7; EXPRESSED IN PLACENTA, SIGNAL = 1.7; EXPRESSED IN LUNG, SIGNAL = 1.5; EXPRESSED IN HEART, SIGNAL = 1.5; EXPRESSED IN BONE MARROW, SIGNAL = 1.6; EXPRESSED IN ADULT LIVER, SIGNAL = 1.6; EXPRESSED IN FETAL LIVER, SIGNAL = 1.8
CFLPLSVSLKFWFSEGLCFHQRTQ

SEQ ID NO: 39210 - protein, 39 aa, Homo sapiens
  MAP TO AC005137.1; EXPRESSED IN PLACENTA, SIGNAL = 4.6; EXPRESSED IN ADULT LIVER, SIGNAL = 4.5; EXPRESSED IN LUNG, SIGNAL = 5.3; EXPRESSED IN HEART, SIGNAL = 3.6; EXPRESSED IN FETAL LIVER, SIGNAL = 4.3; EXPRESSED IN BRAIN, SIGNAL = 4.7; EXPRESSED IN BONE MARROW, SIGNAL = 6.6; EXPRESSED IN HELA, SIGNAL =   4; EST_HUMAN HIT: BF664517.1, EVALUE 7.20e+00; SWISSPROT HIT: P80010, EVALUE 6.40e+00
MATYTVRATQGCCTYLVSRIHSSQNDSGGTWTYASGSAG

SEQ ID NO: 39211 - protein, 46 aa, Homo sapiens
  MAP TO AC005137.1; EXPRESSED IN PLACENTA, SIGNAL = 4.6; EXPRESSED IN ADULT LIVER, SIGNAL = 4.5; EXPRESSED IN LUNG, SIGNAL = 5.3; EXPRESSED IN HEART, SIGNAL = 3.6; EXPRESSED IN FETAL LIVER, SIGNAL = 4.3; EXPRESSED IN BRAIN, SIGNAL = 4.7; EXPRESSED IN BONE MARROW, SIGNAL = 6.6; EXPRESSED IN HELA, SIGNAL =   4; EST_HUMAN HIT: AW381237.1, EVALUE 1.60e-01; SWISSPROT HIT: Q28295, EVALUE 1.00e-02
IRDTKYVQQPCVALTVYVAMCHKFHVCIEWRRSDYCREFAGQGDPP

SEQ ID NO: 39212 - protein, 39 aa, Homo sapiens
  MAP TO AC005803.1; EXPRESSED IN LUNG, SIGNAL = 3.3; EXPRESSED IN HELA, SIGNAL = 3.2; EXPRESSED IN HEART, SIGNAL = 2.9; EXPRESSED IN FETAL LIVER, SIGNAL = 3.1; EXPRESSED IN PLACENTA, SIGNAL =   3; EXPRESSED IN BRAIN, SIGNAL = 3.4; EXPRESSED IN BONE MARROW, SIGNAL = 3.1; EXPRESSED IN ADULT LIVER, SIGNAL = 3.2; EST_HUMAN HIT: AW405827.1, EVALUE 1.00e-04; SWISSPROT HIT: P40259, EVALUE 1.00e-05
FSTLAQLKQRNTLKDGIIMIQTLLIILFIIVPIFLLLDK

SEQ ID NO: 39213 - protein, 68 aa, Homo sapiens
  MAP TO AC004837.1; EXPRESSED IN PLACENTA, SIGNAL = 2.1; EXPRESSED IN HEART, SIGNAL = 1.7; EXPRESSED IN BONE MARROW, SIGNAL = 1.5; EXPRESSED IN LUNG, SIGNAL = 1.9; EXPRESSED IN FETAL LIVER, SIGNAL = 1.6; EXPRESSED IN BRAIN, SIGNAL =   2; EXPRESSED IN ADULT LIVER, SIGNAL = 1.8; EST_HUMAN HIT: BE440057.1, EVALUE 4.00e-33; SWISSPROT HIT: P05810, EVALUE 3.00e-34
FVEDYEPTKADSYRKKVVLDGEEVQIDILDTAGQEDYAAIRDNYFRSGEGFLCVFSITEMESFAATAD

SEQ ID NO: 39214 - protein, 51 aa, Homo sapiens
  MAP TO AC004736.1; EXPRESSED IN LUNG, SIGNAL =  12; EXPRESSED IN HEART, SIGNAL =  10; EXPRESSED IN FETAL LIVER, SIGNAL =  11; EXPRESSED IN BRAIN, SIGNAL =  12; EXPRESSED IN BONE MARROW, SIGNAL =  11; EXPRESSED IN ADULT LIVER, SIGNAL =  11; EXPRESSED IN PLACENTA, SIGNAL =  12; EXPRESSED IN HELA, SIGNAL =  12; EST_HUMAN HIT: BE294561.1, EVALUE 1.00e-15; SWISSPROT HIT: P03290, EVALUE 6.10e+00
AFPAATHSTPSFLFLAEPWITPAPAILMSSPSPGDSCCMRTKAGPRRGLEG

SEQ ID NO: 39215 - protein, 54 aa, Homo sapiens
  MAP TO AC003049.1; EXPRESSED IN PLACENTA, SIGNAL = 5.2; EXPRESSED IN ADULT LIVER, SIGNAL = 5.2; EXPRESSED IN LUNG, SIGNAL = 6.2; EXPRESSED IN HEART, SIGNAL = 5.5; EXPRESSED IN FETAL LIVER, SIGNAL = 5.1; EXPRESSED IN BRAIN, SIGNAL = 5.5; EXPRESSED IN BONE MARROW, SIGNAL = 5.6; EXPRESSED IN HELA, SIGNAL = 5.5
SESREEEEEKEEDEEEEEEEEEEYEKEEEKEEEEEEEERDLEFSKGPFLSSVES

SEQ ID NO: 39216 - protein, 17 aa, Homo sapiens
  MAP TO AC005809.1; EXPRESSED IN BRAIN, SIGNAL = 3.1; EXPRESSED IN ADULT LIVER, SIGNAL = 2.6; EXPRESSED IN PLACENTA, SIGNAL = 2.7; EXPRESSED IN LUNG, SIGNAL = 2.8; EXPRESSED IN HELA, SIGNAL = 3.1; EXPRESSED IN HEART, SIGNAL = 2.5; EXPRESSED IN BONE MARROW, SIGNAL = 2.7; EXPRESSED IN FETAL LIVER, SIGNAL = 2.3
PGVGLGLQLTVVPRQNS

SEQ ID NO: 39217 - protein, 28 aa, Homo sapiens
  MAP TO AC005809.1; EXPRESSED IN BRAIN, SIGNAL = 3.1; EXPRESSED IN ADULT LIVER, SIGNAL = 2.6; EXPRESSED IN PLACENTA, SIGNAL = 2.7; EXPRESSED IN LUNG, SIGNAL = 2.8; EXPRESSED IN HELA, SIGNAL = 3.1; EXPRESSED IN HEART, SIGNAL = 2.5; EXPRESSED IN BONE MARROW, SIGNAL = 2.7; EXPRESSED IN FETAL LIVER, SIGNAL = 2.3
PGPRAEKGWKRWRRRRRRRRRRRRRRGV

SEQ ID NO: 39218 - protein, 116 aa, Homo sapiens
  MAP TO AC003689.1; EXPRESSED IN LUNG, SIGNAL =  10; EXPRESSED IN FETAL LIVER, SIGNAL =  13; EXPRESSED IN BRAIN, SIGNAL =  17; EXPRESSED IN BONE MARROW, SIGNAL =  12; EXPRESSED IN HELA, SIGNAL = 9.4; EXPRESSED IN PLACENTA, SIGNAL =  10; EXPRESSED IN HEART, SIGNAL =  13; EXPRESSED IN ADULT LIVER, SIGNAL =  13; SWISSPROT HIT: P30203, EVALUE 2.00e-46; EST_HUMAN HIT: AA295332.1, EVALUE 2.00e-07
ERLPVRLTNGSSSCSGTVEVRLEASWEPACGALWDSRAAEAVCRALGCGGAEAASQLAPPTPELPPPPAAGNTSVAANATLAGAPALLCSGAEWRLCEVVEHACRSDGRRARVTCA

SEQ ID NO: 39219 - protein, 47 aa, Homo sapiens
  MAP TO AC003689.1; EXPRESSED IN LUNG, SIGNAL =  10; EXPRESSED IN FETAL LIVER, SIGNAL =  13; EXPRESSED IN BRAIN, SIGNAL =  17; EXPRESSED IN BONE MARROW, SIGNAL =  12; EXPRESSED IN HELA, SIGNAL = 9.4; EXPRESSED IN PLACENTA, SIGNAL =  10; EXPRESSED IN HEART, SIGNAL =  13; EXPRESSED IN ADULT LIVER, SIGNAL =  13; EST_HUMAN HIT: BE908104.1, EVALUE 4.00e+00
RRRVAALRGGGARVPQRREAGPCHLCRYERTPYTGPHLPHSPGLQPL

SEQ ID NO: 39220 - protein, 66 aa, Homo sapiens
  MAP TO AC005410.1; EXPRESSED IN LUNG, SIGNAL = 4.4; EXPRESSED IN BRAIN, SIGNAL = 4.2; EXPRESSED IN BONE MARROW, SIGNAL = 3.8; EXPRESSED IN PLACENTA, SIGNAL =   4; EXPRESSED IN HELA, SIGNAL =   4; EXPRESSED IN HEART, SIGNAL = 4.3; EXPRESSED IN FETAL LIVER, SIGNAL = 4.3; EXPRESSED IN ADULT LIVER, SIGNAL = 4.4; EST_HUMAN HIT: AW968635.1, EVALUE 1.00e-31; SWISSPROT HIT: O95125, EVALUE 2.00e-19
WLQPEVHTKEQILEILMLEQFLTILPGEIQMWVRKQCPGSGEEAVTLVESLKGDPQRLWQWVSRGY

SEQ ID NO: 39221 - protein, 55 aa, Homo sapiens
  MAP TO AC005722.1; EXPRESSED IN LUNG, SIGNAL =   4; EXPRESSED IN FETAL LIVER, SIGNAL = 3.7; EXPRESSED IN BRAIN, SIGNAL =   4; EXPRESSED IN BONE MARROW, SIGNAL = 3.9; EXPRESSED IN HELA, SIGNAL = 3.9; EXPRESSED IN PLACENTA, SIGNAL =   4; EXPRESSED IN HEART, SIGNAL =   4; EXPRESSED IN ADULT LIVER, SIGNAL =   5
LRQPQQEARGRDPAAGRAGPAPLLPPLLGALPQHPAHPAALPAGPGRVQVRWAPA

SEQ ID NO: 39222 - protein, 80 aa, Homo sapiens
  MAP TO AC004741.1; EXPRESSED IN PLACENTA, SIGNAL = 2.2; EXPRESSED IN HELA, SIGNAL = 2.1; EXPRESSED IN HEART, SIGNAL = 1.9; EXPRESSED IN BONE MARROW, SIGNAL =   2; EXPRESSED IN LUNG, SIGNAL = 2.4; EXPRESSED IN FETAL LIVER, SIGNAL =   2; EXPRESSED IN BRAIN, SIGNAL = 1.9; EXPRESSED IN ADULT LIVER, SIGNAL = 2.2; EST_HUMAN HIT: AA173071.1, EVALUE 2.90e+00; SWISSPROT HIT: P79340, EVALUE 7.90e+00
FWYCPEKDDNPQLCQITDDCRTQVTASTDDKVEPVILPEHSQQYYLTSEHRKQPSPIREADTKVCLSCVVISGPIQIPKY

SEQ ID NO: 39223 - protein, 44 aa, Homo sapiens
  MAP TO AC006504.1; EXPRESSED IN ADULT LIVER, SIGNAL = 2.4; EXPRESSED IN PLACENTA, SIGNAL = 2.8; EXPRESSED IN LUNG, SIGNAL = 2.9; EXPRESSED IN HEART, SIGNAL = 2.4; EXPRESSED IN BRAIN, SIGNAL =   3; EXPRESSED IN HELA, SIGNAL = 2.6; EXPRESSED IN FETAL LIVER, SIGNAL = 2.3; EXPRESSED IN BONE MARROW, SIGNAL =   3; SWISSPROT HIT: O00507, EVALUE 4.00e-03
NVEKLKLMGIDFIWKITMKLPDEEIANEAIQLIIKYSYGNLNPS

SEQ ID NO: 39224 - protein, 136 aa, Homo sapiens
  MAP TO AC003070.1; EXPRESSED IN ADULT LIVER, SIGNAL = 4.5; EXPRESSED IN PLACENTA, SIGNAL = 4.3; EXPRESSED IN LUNG, SIGNAL = 4.3; EXPRESSED IN HEART, SIGNAL = 4.4; EXPRESSED IN BRAIN, SIGNAL = 4.5; EXPRESSED IN HELA, SIGNAL = 4.8; EXPRESSED IN FETAL LIVER, SIGNAL = 4.4; EXPRESSED IN BONE MARROW, SIGNAL = 4.5; EST_HUMAN HIT: BE247284.1, EVALUE 2.00e-17; SWISSPROT HIT: P46942, EVALUE 5.00e-02
VDDPPEPVYANIERQPRATSPGAAAAPLPSPVWETHTDAGTGRPYYYNPDTGVTTWESPFEAAEGAASPATSPASVDSHVSLETEWGQYWDEESRRVFFYNPLTGETAWEDEAENEPEEELEMQPGLSPGSPGDPR

SEQ ID NO: 39225 - protein, 38 aa, Homo sapiens
  MAP TO AC000002.1; EXPRESSED IN BRAIN, SIGNAL = 1.8; EXPRESSED IN PLACENTA, SIGNAL = 1.4; EXPRESSED IN LUNG, SIGNAL = 1.5; EXPRESSED IN HEART, SIGNAL = 1.8; EXPRESSED IN BONE MARROW, SIGNAL = 1.5; EXPRESSED IN ADULT LIVER, SIGNAL = 1.8; EXPRESSED IN HELA, SIGNAL = 1.7; EXPRESSED IN FETAL LIVER, SIGNAL = 1.6
SRNPAWPSTKPEEDASSAAADSIQQQNSKQGGHLPRRL

SEQ ID NO: 39226 - protein, 50 aa, Homo sapiens
  MAP TO AC005846.1; EXPRESSED IN PLACENTA, SIGNAL = 1.7; EXPRESSED IN LUNG, SIGNAL = 1.6; EXPRESSED IN HEART, SIGNAL = 1.6; EXPRESSED IN BRAIN, SIGNAL = 1.4; EXPRESSED IN ADULT LIVER, SIGNAL = 1.6; EXPRESSED IN FETAL LIVER, SIGNAL = 1.4; EXPRESSED IN BONE MARROW, SIGNAL = 1.4; SWISSPROT HIT: P04275, EVALUE 3.00e-24; EST_HUMAN HIT: AU140938.1, EVALUE 4.00e-23
TAPSVCQDRKWNCTDHVCDATCSTIGMAHYLTFDGLKYLFPGECQYVLVQ

SEQ ID NO: 39227 - protein, 61 aa, Homo sapiens
  MAP TO AC004650.1; EXPRESSED IN PLACENTA, SIGNAL = 2.2; EXPRESSED IN LUNG, SIGNAL = 4.4; EXPRESSED IN FETAL LIVER, SIGNAL = 6.6; EXPRESSED IN BRAIN, SIGNAL = 4.2; EXPRESSED IN BONE MARROW, SIGNAL = 3.1; EXPRESSED IN ADULT LIVER, SIGNAL =  18; EXPRESSED IN HELA, SIGNAL = 4.9; EXPRESSED IN HEART, SIGNAL = 1.7; SWISSPROT HIT: P49773, EVALUE 3.00e-28; EST_HUMAN HIT: AA988812.1, EVALUE 2.00e-31
KLFFLFQLLGHLMIVGKKCAADLGLNKGYRMVVNEGSDGGQSVYHVHLHVLGGRQMHWPPG

SEQ ID NO: 39228 - protein, 73 aa, Homo sapiens
  MAP TO AC005690.7; EXPRESSED IN LUNG, SIGNAL = 1.9; EXPRESSED IN BRAIN, SIGNAL = 1.8; EXPRESSED IN ADULT LIVER, SIGNAL = 1.8; EXPRESSED IN PLACENTA, SIGNAL = 1.9; EXPRESSED IN HELA, SIGNAL = 1.9; EXPRESSED IN HEART, SIGNAL = 1.4; EXPRESSED IN BONE MARROW, SIGNAL = 2.1; EXPRESSED IN FETAL LIVER, SIGNAL = 1.6
DDDDDNGGHGVGNDVGDNDDDAVDNDFGDDDDVDEDDNEEEDVTGDDDAGDENDFNEDYDEDDDIIGDDDAGR

SEQ ID NO: 39229 - protein, 26 aa, Homo sapiens
  MAP TO AC004752.1; EXPRESSED IN LUNG, SIGNAL =  21; EXPRESSED IN BRAIN, SIGNAL =  18; EXPRESSED IN HEART, SIGNAL =  13; EXPRESSED IN FETAL LIVER, SIGNAL =  14; EXPRESSED IN BONE MARROW, SIGNAL =  15; EXPRESSED IN ADULT LIVER, SIGNAL =  15; EXPRESSED IN PLACENTA, SIGNAL =  17; EXPRESSED IN HELA, SIGNAL =  16
LIHFLCFHSQHLLSTREKPNSPLLLG

SEQ ID NO: 39230 - protein, 30 aa, Homo sapiens
  MAP TO AC005826.1; EXPRESSED IN HELA, SIGNAL =   3; EXPRESSED IN HEART, SIGNAL = 2.9; EXPRESSED IN BONE MARROW, SIGNAL =   3; EXPRESSED IN PLACENTA, SIGNAL = 3.1; EXPRESSED IN LUNG, SIGNAL = 3.6; EXPRESSED IN FETAL LIVER, SIGNAL = 3.4; EXPRESSED IN BRAIN, SIGNAL = 3.4; EXPRESSED IN ADULT LIVER, SIGNAL = 3.4; EST_HUMAN HIT: AW664610.1, EVALUE 7.00e-05; SWISSPROT HIT: Q9UMR3, EVALUE 1.00e-11
MAKIACSLETKELWDKFHELGTEMIITKSG

SEQ ID NO: 39231 - protein, 18 aa, Homo sapiens
  MAP TO AC005826.1; EXPRESSED IN HELA, SIGNAL =   3; EXPRESSED IN HEART, SIGNAL = 2.9; EXPRESSED IN BONE MARROW, SIGNAL =   3; EXPRESSED IN PLACENTA, SIGNAL = 3.1; EXPRESSED IN LUNG, SIGNAL = 3.6; EXPRESSED IN FETAL LIVER, SIGNAL = 3.4; EXPRESSED IN BRAIN, SIGNAL = 3.4; EXPRESSED IN ADULT LIVER, SIGNAL = 3.4
WGVWWRQWQQPVLLLSVH

SEQ ID NO: 39232 - protein, 25 aa, Homo sapiens
  MAP TO AC005164.1; EXPRESSED IN PLACENTA, SIGNAL = 2.5; EXPRESSED IN LUNG, SIGNAL = 2.9; EXPRESSED IN HEART, SIGNAL = 2.2; EXPRESSED IN BRAIN, SIGNAL = 2.3; EXPRESSED IN BONE MARROW, SIGNAL = 2.5; EXPRESSED IN ADULT LIVER, SIGNAL = 2.5; EXPRESSED IN HELA, SIGNAL = 2.6; EXPRESSED IN FETAL LIVER, SIGNAL = 2.2; EST_HUMAN HIT: BE875422.1, EVALUE 1.00e-06
LTHVDQASFQVDAFGTSFILDVVLN

SEQ ID NO: 39233 - protein, 31 aa, Homo sapiens
  MAP TO AC005730.1; EXPRESSED IN PLACENTA, SIGNAL =   6; EXPRESSED IN LUNG, SIGNAL = 6.5; EXPRESSED IN HEART, SIGNAL = 5.3; EXPRESSED IN BRAIN, SIGNAL = 6.3; EXPRESSED IN BONE MARROW, SIGNAL = 5.5; EXPRESSED IN ADULT LIVER, SIGNAL = 6.2; EXPRESSED IN HELA, SIGNAL = 5.9; EXPRESSED IN FETAL LIVER, SIGNAL = 6.5
AKEALEGQEVGRTTTTFEHEKSGQGPPLSLS

SEQ ID NO: 39234 - protein, 47 aa, Homo sapiens
  MAP TO AC002536.1; EXPRESSED IN LUNG, SIGNAL = 2.2; EXPRESSED IN FETAL LIVER, SIGNAL = 3.7; EXPRESSED IN BRAIN, SIGNAL = 3.3; EXPRESSED IN BONE MARROW, SIGNAL = 3.9; EXPRESSED IN ADULT LIVER, SIGNAL = 4.5; EXPRESSED IN PLACENTA, SIGNAL = 3.7; EXPRESSED IN HELA, SIGNAL = 4.1; EXPRESSED IN HEART, SIGNAL = 3.6; EST_HUMAN HIT: F07924.1, EVALUE 4.00e-02
RSTHRCMPEVLPTGKIPLHHCLRDIPQGLQGCSCPLSGSVCILSRTI

SEQ ID NO: 39235 - protein, 47 aa, Homo sapiens
  MAP TO AC000055.1; EXPRESSED IN BRAIN, SIGNAL = 9.8; EXPRESSED IN ADULT LIVER, SIGNAL = 7.5; EXPRESSED IN PLACENTA, SIGNAL = 9.4; EXPRESSED IN LUNG, SIGNAL = 9.4; EXPRESSED IN HELA, SIGNAL = 9.2; EXPRESSED IN HEART, SIGNAL = 9.1; EXPRESSED IN BONE MARROW, SIGNAL = 8.8; EXPRESSED IN FETAL LIVER, SIGNAL = 9.1; SWISSPROT HIT: Q09625, EVALUE 4.70e+00
KCGSSDNVYEESSTPSIGTNTFSAHTKDKNKASYSTDNTTESWDAKT

SEQ ID NO: 39236 - protein, 43 aa, Homo sapiens
  MAP TO AC003661.1; EXPRESSED IN LUNG, SIGNAL = 9.4; EXPRESSED IN HELA, SIGNAL = 7.9; EXPRESSED IN HEART, SIGNAL =   7; EXPRESSED IN FETAL LIVER, SIGNAL = 7.8; EXPRESSED IN BONE MARROW, SIGNAL =   8; EXPRESSED IN PLACENTA, SIGNAL = 7.7; EXPRESSED IN BRAIN, SIGNAL = 9.4; EXPRESSED IN ADULT LIVER, SIGNAL = 8.2
DGEESQYSIGRSKWASLRMGFLTRYLKNMWDLKKQIFWGKVFQ

SEQ ID NO: 39237 - protein, 31 aa, Homo sapiens
  MAP TO AC006538.1; EXPRESSED IN PLACENTA, SIGNAL = 2.3; EXPRESSED IN LUNG, SIGNAL = 2.3; EXPRESSED IN HEART, SIGNAL = 2.3; EXPRESSED IN BRAIN, SIGNAL = 2.3; EXPRESSED IN ADULT LIVER, SIGNAL = 2.1; EXPRESSED IN FETAL LIVER, SIGNAL = 2.3; EXPRESSED IN BONE MARROW, SIGNAL = 2.5; EXPRESSED IN HELA, SIGNAL = 2.4
GAVEPVPGHARPGRHQSRGSEAATSLPQSRH

SEQ ID NO: 39238 - protein, 69 aa, Homo sapiens
  MAP TO AC005833.1; EXPRESSED IN PLACENTA, SIGNAL = 2.6; EXPRESSED IN LUNG, SIGNAL =   3; EXPRESSED IN FETAL LIVER, SIGNAL = 2.4; EXPRESSED IN BRAIN, SIGNAL = 2.6; EXPRESSED IN BONE MARROW, SIGNAL = 2.4; EXPRESSED IN ADULT LIVER, SIGNAL = 2.4; EXPRESSED IN HELA, SIGNAL = 2.4; EXPRESSED IN HEART, SIGNAL = 2.1; SWISSPROT HIT: P94926, EVALUE 1.90e+00
MFWRKLPKALFIGLTLAIAVNLLLVFSSKGTLQNLFTGGLHRELPLHLNKRYGAVIKRLSHLEVELQDL

SEQ ID NO: 39239 - protein, 59 aa, Homo sapiens
  MAP TO AC004706.1; EXPRESSED IN BONE MARROW, SIGNAL = 2.7; EXPRESSED IN ADULT LIVER, SIGNAL =   5; EXPRESSED IN PLACENTA, SIGNAL = 2.6; EXPRESSED IN HELA, SIGNAL = 2.4; EXPRESSED IN HEART, SIGNAL = 2.4; EXPRESSED IN FETAL LIVER, SIGNAL = 3.5; EXPRESSED IN BRAIN, SIGNAL = 2.4; EXPRESSED IN LUNG, SIGNAL = 2.9; SWISSPROT HIT: P70545, EVALUE 3.00e-11; EST_HUMAN HIT: BF092079.1, EVALUE 2.00e-06
LMLGFMGVTALLSMWISNTATTAMMVPIVEAILQQMEATSAATEAGLELVDKGKAKELP

SEQ ID NO: 39240 - protein, 50 aa, Homo sapiens
  MAP TO AC005701.1; EXPRESSED IN LUNG, SIGNAL = 3.6; EXPRESSED IN BRAIN, SIGNAL = 3.4; EXPRESSED IN PLACENTA, SIGNAL = 3.4; EXPRESSED IN HEART, SIGNAL = 2.6; EXPRESSED IN FETAL LIVER, SIGNAL = 3.2; EXPRESSED IN BONE MARROW, SIGNAL = 3.1; EXPRESSED IN ADULT LIVER, SIGNAL = 2.9; EXPRESSED IN HELA, SIGNAL = 3.2; SWISSPROT HIT: P39057, EVALUE 2.00e-04
LLDIAGNLLERPLVARDTSDKYLVLIQMFNKDLDAVRMIYSQHVQEEAEL

SEQ ID NO: 39241 - protein, 70 aa, Homo sapiens
  MAP TO AC005866.3; EXPRESSED IN LUNG, SIGNAL = 1.4; EXPRESSED IN HEART, SIGNAL = 1.3; EXPRESSED IN FETAL LIVER, SIGNAL = 1.5; EXPRESSED IN BRAIN, SIGNAL = 1.2; EXPRESSED IN BONE MARROW, SIGNAL = 1.4; EXPRESSED IN PLACENTA, SIGNAL = 1.3; EXPRESSED IN ADULT LIVER, SIGNAL = 1.4; SWISSPROT HIT: Q01815, EVALUE 1.00e-20; EST_HUMAN HIT: AA927640.1, EVALUE 2.00e-16
LLYRSIDSHTEDKGPIYNYRVEISIFFIIYIIIIAFFMMNIFVGFVIVTFQEQGEQEYKNCELDKNQVAS

SEQ ID NO: 39242 - protein, 37 aa, Homo sapiens
  MAP TO AC004228.2; EXPRESSED IN LUNG, SIGNAL = 2.5; EXPRESSED IN BRAIN, SIGNAL = 2.5; EXPRESSED IN PLACENTA, SIGNAL = 2.5; EXPRESSED IN HEART, SIGNAL = 2.1; EXPRESSED IN FETAL LIVER, SIGNAL = 2.3; EXPRESSED IN BONE MARROW, SIGNAL =   2; EXPRESSED IN ADULT LIVER, SIGNAL = 2.1; EXPRESSED IN HELA, SIGNAL = 2.5; SWISSPROT HIT: P31879, EVALUE 8.40e+00; EST_HUMAN HIT: BF329906.1, EVALUE 5.60e+00
PGPRAYGCRGRRWCLGGQYLPMKANRVHMCVQQCGSH

SEQ ID NO: 39243 - protein, 78 aa, Homo sapiens
  MAP TO AC001228.1; EXPRESSED IN PLACENTA, SIGNAL = 3.8; EXPRESSED IN LUNG, SIGNAL = 4.9; EXPRESSED IN HEART, SIGNAL = 2.9; EXPRESSED IN FETAL LIVER, SIGNAL = 4.8; EXPRESSED IN BONE MARROW, SIGNAL = 4.3; EXPRESSED IN ADULT LIVER, SIGNAL = 4.8; EXPRESSED IN HELA, SIGNAL = 4.4; EXPRESSED IN BRAIN, SIGNAL = 3.7; EST_HUMAN HIT: BE410139.1, EVALUE 1.60e+00
MSTCWARTFEASLLFSRYQPRLRVPRRRPLWPPGRCPSRPRAGFLWFLPQDPHMGWPCLLEHPPLSLASRPFSFSRPQ

SEQ ID NO: 39244 - protein, 104 aa, Homo sapiens
  MAP TO AC004685.1; EXPRESSED IN LUNG, SIGNAL = 3.4; EXPRESSED IN HEART, SIGNAL = 3.4; EXPRESSED IN FETAL LIVER, SIGNAL = 4.9; EXPRESSED IN BRAIN, SIGNAL = 3.9; EXPRESSED IN BONE MARROW, SIGNAL = 4.3; EXPRESSED IN HELA, SIGNAL = 4.3; EXPRESSED IN PLACENTA, SIGNAL = 4.3; EXPRESSED IN ADULT LIVER, SIGNAL = 5.5; SWISSPROT HIT: P32399, EVALUE 3.50e-01; EST_HUMAN HIT: AA307123.1, EVALUE 5.60e-02
VIHKRCEEMKYCKKQCRRLGHRVLGLIKPLEMLQDQGKRSVPSEKLTTAMNRFKAALEEANGEIEKFSNRSNICRFLTASQDKILFKDVNRKLSDVWKELSLLL

SEQ ID NO: 39245 - protein, 21 aa, Homo sapiens
  MAP TO AC004685.1; EXPRESSED IN LUNG, SIGNAL = 3.4; EXPRESSED IN HEART, SIGNAL = 3.4; EXPRESSED IN FETAL LIVER, SIGNAL = 4.9; EXPRESSED IN BRAIN, SIGNAL = 3.9; EXPRESSED IN BONE MARROW, SIGNAL = 4.3; EXPRESSED IN HELA, SIGNAL = 4.3; EXPRESSED IN PLACENTA, SIGNAL = 4.3; EXPRESSED IN ADULT LIVER, SIGNAL = 5.5; EST_HUMAN HIT: AA307123.1, EVALUE 2.00e-04
SSRHGKFEAYYHPWPGHPQTV

SEQ ID NO: 39246 - protein, 180 aa, Homo sapiens
  MAP TO AC004743.1; EXPRESSED IN PLACENTA, SIGNAL = 4.7; EXPRESSED IN HELA, SIGNAL = 4.1; EXPRESSED IN FETAL LIVER, SIGNAL = 5.8; EXPRESSED IN LUNG, SIGNAL = 4.8; EXPRESSED IN HEART, SIGNAL = 4.4; EXPRESSED IN BRAIN, SIGNAL = 4.7; EXPRESSED IN BONE MARROW, SIGNAL = 4.2; EXPRESSED IN ADULT LIVER, SIGNAL = 4.7; SWISSPROT HIT: Q01850, EVALUE 7.10e+00
VPEDQNPFSFTCKASRYFQTGSYTLWGYMPRGSRVRISCLVTSKVFTTEESPLVNKSEASLSTVLTVVLPYLCLKRRLRNSHSVQESSQVKVLGTMKTVFCSIPLAVKEFCCLISLFGYRKQYVPHLGILLGALLWLVCKPATLEHSPESPLETNQQAVAHSQPLALHRLTTSLYDELGI

SEQ ID NO: 39247 - protein, 30 aa, Homo sapiens
  MAP TO AC005669.1; EXPRESSED IN FETAL LIVER, SIGNAL = 1.7; EXPRESSED IN BONE MARROW, SIGNAL = 1.6; EXPRESSED IN ADULT LIVER, SIGNAL = 1.5; EXPRESSED IN PLACENTA, SIGNAL = 1.8; EXPRESSED IN LUNG, SIGNAL = 1.6; EXPRESSED IN HEART, SIGNAL = 1.4; EXPRESSED IN BRAIN, SIGNAL = 1.9
ALFLTWLMTMALNPHLPWKTTLTSTSLTST

SEQ ID NO: 39248 - protein, 30 aa, Homo sapiens
  MAP TO AC005753.1; EXPRESSED IN LUNG, SIGNAL = 4.6; EXPRESSED IN HELA, SIGNAL =   4; EXPRESSED IN HEART, SIGNAL =   4; EXPRESSED IN FETAL LIVER, SIGNAL = 4.8; EXPRESSED IN BONE MARROW, SIGNAL = 4.5; EXPRESSED IN PLACENTA, SIGNAL = 5.3; EXPRESSED IN BRAIN, SIGNAL = 4.9; EXPRESSED IN ADULT LIVER, SIGNAL =   4
GKPGLSLLPWSICSLKSQEETRKVGTCRKH

SEQ ID NO: 39249 - protein, 30 aa, Homo sapiens
  MAP TO AC005753.1; EXPRESSED IN LUNG, SIGNAL = 4.6; EXPRESSED IN HELA, SIGNAL =   4; EXPRESSED IN HEART, SIGNAL =   4; EXPRESSED IN FETAL LIVER, SIGNAL = 4.8; EXPRESSED IN BONE MARROW, SIGNAL = 4.5; EXPRESSED IN PLACENTA, SIGNAL = 5.3; EXPRESSED IN BRAIN, SIGNAL = 4.9; EXPRESSED IN ADULT LIVER, SIGNAL =   4
ESQVYLFSPGVSVPLRAKKRQGRWEPAENI

SEQ ID NO: 39250 - protein, 81 aa, Homo sapiens
  MAP TO AC004924.2; EXPRESSED IN FETAL LIVER, SIGNAL =  13; EXPRESSED IN BONE MARROW, SIGNAL =  19; EXPRESSED IN HELA, SIGNAL =  15; EXPRESSED IN PLACENTA, SIGNAL = 8.4; EXPRESSED IN LUNG, SIGNAL = 7.5; EXPRESSED IN HEART, SIGNAL = 6.8; EXPRESSED IN BRAIN, SIGNAL = 4.9; EXPRESSED IN ADULT LIVER, SIGNAL =  20; EST_HUMAN HIT: BF679574.1, EVALUE 5.00e-34; SWISSPROT HIT: P97351, EVALUE 2.00e-33
NDEVAFRKFKLITEDVQGKNCLTNFYGMGLTCDKICSKVEKCSTMIEAHVDVKTTDGYFFLMFCVGFTKKHNNLILKTSYA

SEQ ID NO: 39251 - protein, 45 aa, Homo sapiens
  MAP TO AC005874.2; EXPRESSED IN PLACENTA, SIGNAL =   2; EXPRESSED IN BRAIN, SIGNAL = 1.3; EXPRESSED IN BONE MARROW, SIGNAL = 2.2; EXPRESSED IN ADULT LIVER, SIGNAL = 1.9; EXPRESSED IN LUNG, SIGNAL = 1.9; EXPRESSED IN HELA, SIGNAL = 1.9; EXPRESSED IN HEART, SIGNAL = 1.9; EXPRESSED IN FETAL LIVER, SIGNAL =   2
QSFNETEKYSEGMCVADGVFGQLLTTEAKAWGYRGGGQGDGEQST

SEQ ID NO: 39252 - protein, 91 aa, Homo sapiens
  MAP TO AC004626.1; EXPRESSED IN ADULT LIVER, SIGNAL = 2.3; EXPRESSED IN PLACENTA, SIGNAL = 1.8; EXPRESSED IN LUNG, SIGNAL = 1.8; EXPRESSED IN HEART, SIGNAL = 2.6; EXPRESSED IN BRAIN, SIGNAL = 2.4; EXPRESSED IN HELA, SIGNAL =   2; EXPRESSED IN FETAL LIVER, SIGNAL = 2.5; EXPRESSED IN BONE MARROW, SIGNAL = 1.9; EST_HUMAN HIT: BE792168.1, EVALUE 8.20e-02; SWISSPROT HIT: Q14814, EVALUE 2.00e+00
LDTHYYHFKLINKGRRIQQLFWMNDSFRPQAKLSKKGRVKKGHAHVQPQPSGSQEPRDPQSPVFHLHPASMELYPGQAIDVILEGYSATPR

SEQ ID NO: 39253 - protein, 59 aa, Homo sapiens
  MAP TO AC004757.1; EXPRESSED IN BRAIN, SIGNAL = 3.6; EXPRESSED IN ADULT LIVER, SIGNAL = 4.9; EXPRESSED IN PLACENTA, SIGNAL = 3.9; EXPRESSED IN HELA, SIGNAL = 3.7; EXPRESSED IN HEART, SIGNAL = 3.2; EXPRESSED IN FETAL LIVER, SIGNAL = 4.1; EXPRESSED IN BONE MARROW, SIGNAL = 3.8; EXPRESSED IN LUNG, SIGNAL = 3.7; EST_HUMAN HIT: AU135016.1, EVALUE 1.20e+00; SWISSPROT HIT: P23477, EVALUE 2.00e-03
YADGNDPVEMENLMLQMREWIIAGVMLFNKQEKKGSSVREEGLASDRHMDDSFIMRGGK

SEQ ID NO: 39254 - protein, 18 aa, Homo sapiens
  MAP TO AC004757.1; EXPRESSED IN BRAIN, SIGNAL = 3.6; EXPRESSED IN ADULT LIVER, SIGNAL = 4.9; EXPRESSED IN PLACENTA, SIGNAL = 3.9; EXPRESSED IN HELA, SIGNAL = 3.7; EXPRESSED IN HEART, SIGNAL = 3.2; EXPRESSED IN FETAL LIVER, SIGNAL = 4.1; EXPRESSED IN BONE MARROW, SIGNAL = 3.8; EXPRESSED IN LUNG, SIGNAL = 3.7
LLYPISMLMGMIQLRWKI

SEQ ID NO: 39255 - protein, 135 aa, Homo sapiens
  MAP TO AC005815.1; EXPRESSED IN FETAL LIVER, SIGNAL = 5.4; EXPRESSED IN BONE MARROW, SIGNAL = 4.2; EXPRESSED IN HELA, SIGNAL = 3.4; EXPRESSED IN PLACENTA, SIGNAL = 2.6; EXPRESSED IN LUNG, SIGNAL = 2.8; EXPRESSED IN HEART, SIGNAL = 7.6; EXPRESSED IN BRAIN, SIGNAL = 4.2; EXPRESSED IN ADULT LIVER, SIGNAL = 5.3; EST_HUMAN HIT: BE739207.1, EVALUE 9.10e+00; SWISSPROT HIT: P32588, EVALUE 1.60e+00
KCTVQRDAQPQRCRNAELEPITCSNREKAKALGSVLRMCSCFFVTKYQKTDCNVVQQAIFCTETSEGIMKLFSKSSLNNVIKGYLVWGKPGMNICTIIPHTNKHVHLCEAEFPTHHHLQTNTKPLPNKAEEENQK

SEQ ID NO: 39256 - protein, 43 aa, Homo sapiens
  MAP TO AC005815.1; EXPRESSED IN FETAL LIVER, SIGNAL = 5.4; EXPRESSED IN BONE MARROW, SIGNAL = 4.2; EXPRESSED IN HELA, SIGNAL = 3.4; EXPRESSED IN PLACENTA, SIGNAL = 2.6; EXPRESSED IN LUNG, SIGNAL = 2.8; EXPRESSED IN HEART, SIGNAL = 7.6; EXPRESSED IN BRAIN, SIGNAL = 4.2; EXPRESSED IN ADULT LIVER, SIGNAL = 5.3; EST_HUMAN HIT: AA680144.1, EVALUE 4.10e+00; SWISSPROT HIT: Q62210, EVALUE 4.80e+00
SAQFRGMPSHRGAETQNWNQSPAPTERRRKHWAACSECALASL

SEQ ID NO: 39257 - protein, 49 aa, Homo sapiens
  MAP TO AC004254.1; EXPRESSED IN PLACENTA, SIGNAL = 4.8; EXPRESSED IN HELA, SIGNAL = 4.7; EXPRESSED IN HEART, SIGNAL = 4.8; EXPRESSED IN FETAL LIVER, SIGNAL = 4.4; EXPRESSED IN BONE MARROW, SIGNAL = 4.5; EXPRESSED IN LUNG, SIGNAL = 4.7; EXPRESSED IN BRAIN, SIGNAL = 4.7; EXPRESSED IN ADULT LIVER, SIGNAL = 5.2; EST_HUMAN HIT: R24593.1, EVALUE 8.70e+00; SWISSPROT HIT: O05519, EVALUE 6.20e+00
PGSLYTTYPAAPSREIRSYSYTYVLSGDEDASQCYSESTAFPPFCENPY

SEQ ID NO: 39258 - protein, 45 aa, Homo sapiens
  MAP TO AC005725.1; EXPRESSED IN PLACENTA, SIGNAL = 1.7; EXPRESSED IN BRAIN, SIGNAL = 1.5; EXPRESSED IN BONE MARROW, SIGNAL = 1.8; EXPRESSED IN ADULT LIVER, SIGNAL = 1.9; EXPRESSED IN LUNG, SIGNAL = 1.3; EXPRESSED IN HELA, SIGNAL = 1.6; EXPRESSED IN HEART, SIGNAL = 1.4; EXPRESSED IN FETAL LIVER, SIGNAL = 1.6
MTITTAIDITTTIITITTIIIITTAVNTIITTTIITIIIIIIFEP

SEQ ID NO: 39259 - protein, 37 aa, Homo sapiens
  MAP TO AC003962.1; EXPRESSED IN PLACENTA, SIGNAL = 2.2; EXPRESSED IN BONE MARROW, SIGNAL = 1.9; EXPRESSED IN ADULT LIVER, SIGNAL =   2; EXPRESSED IN LUNG, SIGNAL = 1.6; EXPRESSED IN HELA, SIGNAL = 1.8; EXPRESSED IN HEART, SIGNAL = 1.7; EXPRESSED IN FETAL LIVER, SIGNAL = 2.1; EXPRESSED IN BRAIN, SIGNAL = 1.9; EST_HUMAN HIT: AI124874.1, EVALUE 9.00e-15
EESDIIDLEKRYWLLKAQSRTGRFDLETFGPLVSPPI

SEQ ID NO: 39260 - protein, 110 aa, Homo sapiens
  MAP TO AC004578.3; EXPRESSED IN LUNG, SIGNAL = 4.7; EXPRESSED IN HELA, SIGNAL = 4.5; EXPRESSED IN ADULT LIVER, SIGNAL = 4.8; EXPRESSED IN PLACENTA, SIGNAL = 4.3; EXPRESSED IN HEART, SIGNAL = 3.9; EXPRESSED IN FETAL LIVER, SIGNAL = 5.3; EXPRESSED IN BRAIN, SIGNAL = 4.7; EXPRESSED IN BONE MARROW, SIGNAL = 4.7
LSGLTQHLMLTRRLIPAQHVTLTQNLNPVQSMTPTQSLTLTLRLTLKWLMTLTRSLTPRRSLTPRWCLTPTKLLTQTQHLTPTRSLTPTRSLTPTRRLTPTQSLTPTHST

SEQ ID NO: 39261 - protein, 37 aa, Homo sapiens
  MAP TO AC002527.1; EXPRESSED IN ADULT LIVER, SIGNAL = 3.4; EXPRESSED IN PLACENTA, SIGNAL = 3.2; EXPRESSED IN LUNG, SIGNAL = 3.5; EXPRESSED IN HEART, SIGNAL = 3.3; EXPRESSED IN BRAIN, SIGNAL = 3.2; EXPRESSED IN HELA, SIGNAL = 3.4; EXPRESSED IN FETAL LIVER, SIGNAL = 3.2; EXPRESSED IN BONE MARROW, SIGNAL = 3.5; EST_HUMAN HIT: BE796537.1, EVALUE 3.00e-14
MPFHHVTAGLLYKGNYLNRSLSAGSDSEQLANISVEE

SEQ ID NO: 39262 - protein, 42 aa, Homo sapiens
  MAP TO AC004783.1; EXPRESSED IN PLACENTA, SIGNAL = 4.9; EXPRESSED IN LUNG, SIGNAL =   5; EXPRESSED IN HEART, SIGNAL = 4.2; EXPRESSED IN BRAIN, SIGNAL = 5.5; EXPRESSED IN ADULT LIVER, SIGNAL =   5; EXPRESSED IN FETAL LIVER, SIGNAL = 5.2; EXPRESSED IN BONE MARROW, SIGNAL = 4.9; EXPRESSED IN HELA, SIGNAL = 4.8; EST_HUMAN HIT: AA703000.1, EVALUE 2.00e-17; SWISSPROT HIT: P79772, EVALUE 4.80e+00
TKIKPLGPARASGLSKKPASIQKRKHHNAENKPGLQIKLNEL

SEQ ID NO: 39263 - protein, 28 aa, Homo sapiens
  MAP TO AC005823.1; EXPRESSED IN PLACENTA, SIGNAL = 1.7; EXPRESSED IN ADULT LIVER, SIGNAL = 1.7; EXPRESSED IN LUNG, SIGNAL = 1.8; EXPRESSED IN HEART, SIGNAL = 1.5; EXPRESSED IN FETAL LIVER, SIGNAL = 1.8; EXPRESSED IN BRAIN, SIGNAL = 2.1; EXPRESSED IN BONE MARROW, SIGNAL = 1.6; EXPRESSED IN HELA, SIGNAL = 1.6; SWISSPROT HIT: P01977, EVALUE 8.60e+00
MLCKNHPIQFIPHTHSAMRQMLPLAPFY

SEQ ID NO: 39264 - protein, 72 aa, Homo sapiens
  MAP TO AC005919.1; EXPRESSED IN PLACENTA, SIGNAL = 6.7; EXPRESSED IN HELA, SIGNAL = 6.8; EXPRESSED IN HEART, SIGNAL = 7.2; EXPRESSED IN BRAIN, SIGNAL = 7.7; EXPRESSED IN ADULT LIVER, SIGNAL = 6.6; EXPRESSED IN LUNG, SIGNAL = 7.3; EXPRESSED IN FETAL LIVER, SIGNAL = 5.8; EXPRESSED IN BONE MARROW, SIGNAL = 7.4; EST_HUMAN HIT: AI150703.1, EVALUE 1.00e-25; SWISSPROT HIT: P13645, EVALUE 4.00e-12
KHSLECSLTETESNYCAQLAQIQAQIGALEEQLHQVRTETEGQKLEYEQLLDIKLHLEKEIETYCLLIGGDD

SEQ ID NO: 39265 - protein, 33 aa, Homo sapiens
  MAP TO AC004381.1; EXPRESSED IN PLACENTA, SIGNAL =  12; EXPRESSED IN HEART, SIGNAL = 8.9; EXPRESSED IN LUNG, SIGNAL =  12; EXPRESSED IN FETAL LIVER, SIGNAL = 9.3; EXPRESSED IN BRAIN, SIGNAL =  11; EXPRESSED IN BONE MARROW, SIGNAL =  10; EXPRESSED IN ADULT LIVER, SIGNAL =  11; EXPRESSED IN HELA, SIGNAL = 9.6; EST_HUMAN HIT: AI635448.1, EVALUE 5.00e-12; SWISSPROT HIT: O67293, EVALUE 4.90e+00
NGNVLPPGQEGDIGIQVLPNRPFGLFTHYVVSD

SEQ ID NO: 39266 - protein, 45 aa, Homo sapiens
  MAP TO AC004087.1; EXPRESSED IN PLACENTA, SIGNAL = 2.6; EXPRESSED IN HEART, SIGNAL = 1.9; EXPRESSED IN FETAL LIVER, SIGNAL = 1.8; EXPRESSED IN BONE MARROW, SIGNAL = 2.3; EXPRESSED IN ADULT LIVER, SIGNAL = 2.2; EXPRESSED IN HELA, SIGNAL = 2.1; EXPRESSED IN LUNG, SIGNAL =   2; EXPRESSED IN BRAIN, SIGNAL = 2.2; SWISSPROT HIT: P54309, EVALUE 8.20e+00; EST_HUMAN HIT: AA203124.1, EVALUE 7.00e-10
MVISGTSKAKEVRSGNTGKQSFHPKKNLSMTLETPQRKQNTPYKE

SEQ ID NO: 39267 - protein, 23 aa, Homo sapiens
  MAP TO AC005104.1; EXPRESSED IN LUNG, SIGNAL =   6; EXPRESSED IN HELA, SIGNAL = 5.2; EXPRESSED IN BRAIN, SIGNAL = 5.7; EXPRESSED IN BONE MARROW, SIGNAL = 5.7; EXPRESSED IN ADULT LIVER, SIGNAL = 6.5; EXPRESSED IN PLACENTA, SIGNAL = 4.9; EXPRESSED IN HEART, SIGNAL = 6.9; EXPRESSED IN FETAL LIVER, SIGNAL = 6.5
MQEKHLHLRVKLLDNTMEIFDIE

SEQ ID NO: 39268 - protein, 39 aa, Homo sapiens
  MAP TO AC005104.1; EXPRESSED IN LUNG, SIGNAL =   6; EXPRESSED IN HELA, SIGNAL = 5.2; EXPRESSED IN BRAIN, SIGNAL = 5.7; EXPRESSED IN BONE MARROW, SIGNAL = 5.7; EXPRESSED IN ADULT LIVER, SIGNAL = 6.5; EXPRESSED IN PLACENTA, SIGNAL = 4.9; EXPRESSED IN HEART, SIGNAL = 6.9; EXPRESSED IN FETAL LIVER, SIGNAL = 6.5; EST_HUMAN HIT: AI904491.1, EVALUE 1.90e+00; SWISSPROT HIT: P48190, EVALUE 8.30e+00
ESCRLQGCAWVPRPLWELAPLSLGRLSCPECKRSTCTSE

SEQ ID NO: 39269 - protein, 27 aa, Homo sapiens
  MAP TO AC005728.1; EXPRESSED IN PLACENTA, SIGNAL = 1.1; EXPRESSED IN BONE MARROW, SIGNAL = 1.1; EXPRESSED IN FETAL LIVER, SIGNAL = 1.1; EXPRESSED IN HEART, SIGNAL = 3.3; EXPRESSED IN HELA, SIGNAL = 3.4; EXPRESSED IN LUNG, SIGNAL = 0.99; EXPRESSED IN BRAIN, SIGNAL = 1.2; EXPRESSED IN ADULT LIVER, SIGNAL = 1.1
NIARKPKTTERQEELEEKAVWNYESSQ

SEQ ID NO: 39270 - protein, 141 aa, Homo sapiens
  MAP TO AC004130.1; EXPRESSED IN PLACENTA, SIGNAL = 1.3; EXPRESSED IN LUNG, SIGNAL = 1.5; EXPRESSED IN HEART, SIGNAL = 1.4; EXPRESSED IN BRAIN, SIGNAL = 1.4; EXPRESSED IN BONE MARROW, SIGNAL = 1.2; EXPRESSED IN FETAL LIVER, SIGNAL = 1.2; EXPRESSED IN ADULT LIVER, SIGNAL = 1.3; EST_HUMAN HIT: AU137772.1, EVALUE 3.00e-84; SWISSPROT HIT: P26012, EVALUE 3.00e-85
VLFNVTVTMKKCDVTGGKNYAIIKPIGFNETAKIHIHRNCSCQCEDNRGPKGKCVDETFLDSKCFQCDENKCHFDEDQFSSESCKSHKDQPVCSGRGVCVCGKCSCHKIKLGKVYGKYCEKDDFSCPYHHGNLCAGEYKYI

SEQ ID NO: 39271 - protein, 34 aa, Homo sapiens
  MAP TO AC004583.1; EXPRESSED IN PLACENTA, SIGNAL = 2.3; EXPRESSED IN LUNG, SIGNAL = 2.2; EXPRESSED IN HELA, SIGNAL = 2.3; EXPRESSED IN HEART, SIGNAL =   2; EXPRESSED IN FETAL LIVER, SIGNAL = 2.7; EXPRESSED IN ADULT LIVER, SIGNAL = 2.3; EXPRESSED IN BRAIN, SIGNAL = 2.1; EXPRESSED IN BONE MARROW, SIGNAL =   2; EST_HUMAN HIT: AA832005.1, EVALUE 4.00e-08
HQEKDMSNPTCISVFNHLESRRAWAAKQKDSEGI

SEQ ID NO: 39272 - protein, 18 aa, Homo sapiens
  MAP TO AC004583.1; EXPRESSED IN PLACENTA, SIGNAL = 2.3; EXPRESSED IN LUNG, SIGNAL = 2.2; EXPRESSED IN HELA, SIGNAL = 2.3; EXPRESSED IN HEART, SIGNAL =   2; EXPRESSED IN FETAL LIVER, SIGNAL = 2.7; EXPRESSED IN ADULT LIVER, SIGNAL = 2.3; EXPRESSED IN BRAIN, SIGNAL = 2.1; EXPRESSED IN BONE MARROW, SIGNAL =   2; EST_HUMAN HIT: AA832005.1, EVALUE 7.00e-04
CPLNLSVWLPRLASTPNG

SEQ ID NO: 39273 - protein, 65 aa, Homo sapiens
  MAP TO AC005666.1; EXPRESSED IN PLACENTA, SIGNAL = 6.1; EXPRESSED IN HEART, SIGNAL = 5.1; EXPRESSED IN FETAL LIVER, SIGNAL = 5.8; EXPRESSED IN BRAIN, SIGNAL = 6.1; EXPRESSED IN BONE MARROW, SIGNAL = 6.3; EXPRESSED IN HELA, SIGNAL = 5.8; EXPRESSED IN ADULT LIVER, SIGNAL = 5.9; EXPRESSED IN LUNG, SIGNAL = 7.2; EST_HUMAN HIT: AW501961.1, EVALUE 2.00e-20; SWISSPROT HIT: Q9Y217, EVALUE 2.30e-01
HLRNGAAIARCSQPEISWWGWRNADDEYLVTSIAKACALDPGTRATGGSLSTGNNDTSEACDADF

SEQ ID NO: 39274 - protein, 75 aa, Homo sapiens
  MAP TO AC005666.1; EXPRESSED IN PLACENTA, SIGNAL = 6.1; EXPRESSED IN HEART, SIGNAL = 5.1; EXPRESSED IN FETAL LIVER, SIGNAL = 5.8; EXPRESSED IN BRAIN, SIGNAL = 6.1; EXPRESSED IN BONE MARROW, SIGNAL = 6.3; EXPRESSED IN HELA, SIGNAL = 5.8; EXPRESSED IN ADULT LIVER, SIGNAL = 5.9; EXPRESSED IN LUNG, SIGNAL = 7.2; EST_HUMAN HIT: BE070230.1, EVALUE 1.00e-08; SWISSPROT HIT: Q14031, EVALUE 5.60e+00
SSVLSDTCAMGLPSPAAASQRSAGGAGAMLMMSTWSRPLLKPVPWTRGQGPLGAPSAPGIMIPARRVMLTLVRCG

SEQ ID NO: 39275 - protein, 55 aa, Homo sapiens
  MAP TO AC004940.1; EXPRESSED IN LUNG, SIGNAL = 3.3; EXPRESSED IN HELA, SIGNAL = 3.6; EXPRESSED IN FETAL LIVER, SIGNAL = 3.2; EXPRESSED IN BRAIN, SIGNAL = 3.9; EXPRESSED IN PLACENTA, SIGNAL = 3.5; EXPRESSED IN HEART, SIGNAL = 3.2; EXPRESSED IN BONE MARROW, SIGNAL = 3.2; EXPRESSED IN ADULT LIVER, SIGNAL =   4; EST_HUMAN HIT: BE383078.1, EVALUE 1.00e-17
LQFKRSEVSEEVTENGTEEAAKKPKKKKKKKDPETYEVDSGTTKLADDADDTPME

SEQ ID NO: 39276 - protein, 54 aa, Homo sapiens
  MAP TO AC004801.1; EXPRESSED IN PLACENTA, SIGNAL = 3.9; EXPRESSED IN BONE MARROW, SIGNAL = 3.7; EXPRESSED IN ADULT LIVER, SIGNAL = 3.7; EXPRESSED IN LUNG, SIGNAL = 4.2; EXPRESSED IN HELA, SIGNAL = 4.3; EXPRESSED IN HEART, SIGNAL = 4.5; EXPRESSED IN FETAL LIVER, SIGNAL = 3.3; EXPRESSED IN BRAIN, SIGNAL =   5; EST_HUMAN HIT: BE794390.1, EVALUE 6.00e-24; SWISSPROT HIT: P08237, EVALUE 5.00e-25
KITDEEATKSSYLNIVGLVGSIDNDFCGTDMTIGTDSALHRIMEIVDAITTTAQ

SEQ ID NO: 39277 - protein, 43 aa, Homo sapiens
  MAP TO AC005849.1; EXPRESSED IN PLACENTA, SIGNAL = 3.3; EXPRESSED IN LUNG, SIGNAL = 3.4; EXPRESSED IN FETAL LIVER, SIGNAL = 3.2; EXPRESSED IN BRAIN, SIGNAL = 3.1; EXPRESSED IN ADULT LIVER, SIGNAL =   3; EXPRESSED IN HELA, SIGNAL = 3.4; EXPRESSED IN HEART, SIGNAL = 3.2; EXPRESSED IN BONE MARROW, SIGNAL = 3.1; SWISSPROT HIT: P91620, EVALUE 4.80e+00
MKLPQPHPRILPQGPLRTQPHLLPLKEKAPAAPRQRRPRAQAP

SEQ ID NO: 39278 - protein, 51 aa, Homo sapiens
  MAP TO AC005799.1; EXPRESSED IN LUNG, SIGNAL = 1.5; EXPRESSED IN ADULT LIVER, SIGNAL = 1.7; EXPRESSED IN PLACENTA, SIGNAL = 1.8; EXPRESSED IN HEART, SIGNAL = 3.1; EXPRESSED IN FETAL LIVER, SIGNAL = 1.8; EXPRESSED IN BRAIN, SIGNAL = 1.8; EXPRESSED IN BONE MARROW, SIGNAL = 1.5; EST_HUMAN HIT: AA487824.1, EVALUE 9.00e-23; SWISSPROT HIT: P10644, EVALUE 7.00e-24
QNLQKAGTRTDSREDEISPPPPNPVVKGRRRRGAISAEVYTEEDAASYVRK

SEQ ID NO: 39279 - protein, 175 aa, Homo sapiens
  MAP TO AC004977.1; EXPRESSED IN LUNG, SIGNAL = 1.5; EXPRESSED IN BRAIN, SIGNAL = 1.5; EXPRESSED IN ADULT LIVER, SIGNAL = 1.6; EXPRESSED IN PLACENTA, SIGNAL = 1.4; EXPRESSED IN HEART, SIGNAL = 1.7; EXPRESSED IN FETAL LIVER, SIGNAL = 1.6; EXPRESSED IN BONE MARROW, SIGNAL = 1.4; EST_HUMAN HIT: AU132002.1, EVALUE 2.00e-18; SWISSPROT HIT: P51915, EVALUE 1.00e-22
MCGRFLRRLLAEESRRSTPVGRLLLPVLLGFRLVLLAASGPGVYGDEQSEFVCHTQQPGCKAACFDAFHPLSPLRFWVFQVILVAVPSALYMGFTLYHVIWHWELSGKGKEEETLIQGREGNTDVPGAGSLRLLWAYVAQLGARLVLEGAALGLQYHLYGFQMPSSFACRREPCL

SEQ ID NO: 39280 - protein, 90 aa, Homo sapiens
  MAP TO AC004977.1; EXPRESSED IN LUNG, SIGNAL = 1.5; EXPRESSED IN BRAIN, SIGNAL = 1.5; EXPRESSED IN ADULT LIVER, SIGNAL = 1.6; EXPRESSED IN PLACENTA, SIGNAL = 1.4; EXPRESSED IN HEART, SIGNAL = 1.7; EXPRESSED IN FETAL LIVER, SIGNAL = 1.6; EXPRESSED IN BONE MARROW, SIGNAL = 1.4; SWISSPROT HIT: Q53046, EVALUE 2.40e+00; EST_HUMAN HIT: BF677910.1, EVALUE 3.00e-26
CWRRRAGAPPPWGASCFPCSWDSALCCWLPVGLESMVMSRVNSCVTPSSRAARLPASMPSTPSPRCVSGSSRSSWWLYPAPSIWVSLCIT

SEQ ID NO: 39281 - protein, 44 aa, Homo sapiens
  MAP TO AC004553.1; EXPRESSED IN LUNG, SIGNAL = 2.2; EXPRESSED IN FETAL LIVER, SIGNAL = 2.2; EXPRESSED IN PLACENTA, SIGNAL = 2.5; EXPRESSED IN HELA, SIGNAL = 2.5; EXPRESSED IN BRAIN, SIGNAL = 2.5; EXPRESSED IN BONE MARROW, SIGNAL = 2.4; EXPRESSED IN ADULT LIVER, SIGNAL = 2.2; EXPRESSED IN HEART, SIGNAL = 2.5
SGRRRRRRRRGRGRRGGGGEKGEKREKEEKEEKEKKSLSCCSGL

SEQ ID NO: 39282 - protein, 41 aa, Homo sapiens
  MAP TO AC004139.1; EXPRESSED IN PLACENTA, SIGNAL =   5; EXPRESSED IN HEART, SIGNAL = 3.9; EXPRESSED IN BONE MARROW, SIGNAL = 4.2; EXPRESSED IN ADULT LIVER, SIGNAL = 4.3; EXPRESSED IN LUNG, SIGNAL = 4.2; EXPRESSED IN HELA, SIGNAL = 4.4; EXPRESSED IN FETAL LIVER, SIGNAL = 4.4; EXPRESSED IN BRAIN, SIGNAL = 4.6; EST_HUMAN HIT: W04767.1, EVALUE 7.00e-17; SWISSPROT HIT: P49993, EVALUE 3.70e+00
GNGLQTGQLLSAAGTGFRLMFLTWNIEFVSKQTFTNRYVLI

SEQ ID NO: 39283 - protein, 21 aa, Homo sapiens
  MAP TO AC004139.1; EXPRESSED IN PLACENTA, SIGNAL =   5; EXPRESSED IN HEART, SIGNAL = 3.9; EXPRESSED IN BONE MARROW, SIGNAL = 4.2; EXPRESSED IN ADULT LIVER, SIGNAL = 4.3; EXPRESSED IN LUNG, SIGNAL = 4.2; EXPRESSED IN HELA, SIGNAL = 4.4; EXPRESSED IN FETAL LIVER, SIGNAL = 4.4; EXPRESSED IN BRAIN, SIGNAL = 4.6; EST_HUMAN HIT: W04767.1, EVALUE 3.00e-06
EMGCRPGSYCQPLELASGSCF

SEQ ID NO: 39284 - protein, 20 aa, Homo sapiens
  MAP TO AC005669.1; EXPRESSED IN PLACENTA, SIGNAL = 3.3; EXPRESSED IN LUNG, SIGNAL =   4; EXPRESSED IN FETAL LIVER, SIGNAL = 3.4; EXPRESSED IN BONE MARROW, SIGNAL = 3.7; EXPRESSED IN ADULT LIVER, SIGNAL = 3.5; EXPRESSED IN HELA, SIGNAL = 3.4; EXPRESSED IN HEART, SIGNAL = 3.4; EXPRESSED IN BRAIN, SIGNAL = 3.8
LVLHKSEDHDRHVPFEFGNC

SEQ ID NO: 39285 - protein, 76 aa, Homo sapiens
  MAP TO AC004477.1; EXPRESSED IN PLACENTA, SIGNAL = 2.2; EXPRESSED IN LUNG, SIGNAL = 2.4; EXPRESSED IN HELA, SIGNAL = 2.2; EXPRESSED IN HEART, SIGNAL = 2.7; EXPRESSED IN FETAL LIVER, SIGNAL = 2.2; EXPRESSED IN ADULT LIVER, SIGNAL = 2.1; EXPRESSED IN BRAIN, SIGNAL = 2.2; EXPRESSED IN BONE MARROW, SIGNAL = 1.9; SWISSPROT HIT: Q14494, EVALUE 1.00e-38; EST_HUMAN HIT: BE897190.1, EVALUE 8.00e-37
DIDLIDILWRQDIDLGAGREVFDYSHRQKEQDVEKELRDGGEQDTWAGEGAEALARNLLVDGETGESFPAQVPSPL

SEQ ID NO: 39286 - protein, 45 aa, Homo sapiens
  MAP TO AC004671.1; EXPRESSED IN PLACENTA, SIGNAL = 4.5; EXPRESSED IN BONE MARROW, SIGNAL = 4.8; EXPRESSED IN ADULT LIVER, SIGNAL = 4.5; EXPRESSED IN LUNG, SIGNAL = 4.9; EXPRESSED IN HELA, SIGNAL = 4.5; EXPRESSED IN HEART, SIGNAL = 4.4; EXPRESSED IN FETAL LIVER, SIGNAL = 4.5; EXPRESSED IN BRAIN, SIGNAL = 4.8; SWISSPROT HIT: P56125, EVALUE 8.20e+00
LQDELEKGERDNAELQEFANAILQQIADHCPDILEQVVNALEESS

SEQ ID NO: 39287 - protein, 26 aa, Homo sapiens
  MAP TO AC004671.1; EXPRESSED IN PLACENTA, SIGNAL = 4.5; EXPRESSED IN BONE MARROW, SIGNAL = 4.8; EXPRESSED IN ADULT LIVER, SIGNAL = 4.5; EXPRESSED IN LUNG, SIGNAL = 4.9; EXPRESSED IN HELA, SIGNAL = 4.5; EXPRESSED IN HEART, SIGNAL = 4.4; EXPRESSED IN FETAL LIVER, SIGNAL = 4.5; EXPRESSED IN BRAIN, SIGNAL = 4.8
RHSSADSRPLSRHPRASGQRPGRVLL

SEQ ID NO: 39288 - protein, 48 aa, Homo sapiens
  MAP TO AC005057.1; EXPRESSED IN BONE MARROW, SIGNAL = 4.8; EXPRESSED IN ADULT LIVER, SIGNAL = 5.9; EXPRESSED IN PLACENTA, SIGNAL = 5.8; EXPRESSED IN HELA, SIGNAL = 5.1; EXPRESSED IN HEART, SIGNAL = 5.4; EXPRESSED IN FETAL LIVER, SIGNAL = 5.7; EXPRESSED IN BRAIN, SIGNAL = 6.4; EXPRESSED IN LUNG, SIGNAL = 5.7; EST_HUMAN HIT: BF516215.1, EVALUE 2.00e-21; SWISSPROT HIT: P53667, EVALUE 1.00e-22
IDLLIQETSRLLQLTLEHDPHDTLGHGLGPETSPLSSPAYTPSGEAGS

SEQ ID NO: 39289 - protein, 130 aa, Homo sapiens
  MAP TO AC004590.1; EXPRESSED IN LUNG, SIGNAL = 1.9; EXPRESSED IN BONE MARROW, SIGNAL = 1.6; EXPRESSED IN PLACENTA, SIGNAL = 1.9; EXPRESSED IN HELA, SIGNAL = 1.7; EXPRESSED IN HEART, SIGNAL = 1.3; EXPRESSED IN FETAL LIVER, SIGNAL = 1.7; EXPRESSED IN BRAIN, SIGNAL = 1.7; EXPRESSED IN ADULT LIVER, SIGNAL = 1.7; EST_HUMAN HIT: BE787143.1, EVALUE 2.00e-45; SWISSPROT HIT: Q09214, EVALUE 3.00e-31
GYSTCHWCHMMEEESFQNEEIGRLLSEDFVSVKVDREERPDVDKVYMTFVQVSSPPRECMRHMGSEQLPSPSPSLRQATSSGGGWPMNVWLTPNLQPFVGGTYFPPEDGLTRVGFRTVLLRIREQVGVPP

SEQ ID NO: 39290 - protein, 51 aa, Homo sapiens
  MAP TO AC002542.1; EXPRESSED IN PLACENTA, SIGNAL = 4.6; EXPRESSED IN LUNG, SIGNAL = 5.1; EXPRESSED IN HEART, SIGNAL =   5; EXPRESSED IN BRAIN, SIGNAL = 4.7; EXPRESSED IN BONE MARROW, SIGNAL =   5; EXPRESSED IN ADULT LIVER, SIGNAL = 4.5; EXPRESSED IN HELA, SIGNAL = 5.3; EXPRESSED IN FETAL LIVER, SIGNAL = 4.8; EST_HUMAN HIT: BE545086.1, EVALUE 4.00e-07
CATAYILLAEEEATTIAEAEKLFKQALKAGDGCYRRSQQLQHHGSQYEAQH

SEQ ID NO: 39291 - protein, 52 aa, Homo sapiens
  MAP TO AC004812.1; EXPRESSED IN PLACENTA, SIGNAL = 3.6; EXPRESSED IN HEART, SIGNAL = 3.4; EXPRESSED IN BONE MARROW, SIGNAL = 3.6; EXPRESSED IN ADULT LIVER, SIGNAL = 3.6; EXPRESSED IN LUNG, SIGNAL = 4.1; EXPRESSED IN HELA, SIGNAL = 3.5; EXPRESSED IN FETAL LIVER, SIGNAL = 3.3; EXPRESSED IN BRAIN, SIGNAL = 3.6; SWISSPROT HIT: Q92351, EVALUE 4.10e-01; EST_HUMAN HIT: BF092116.1, EVALUE 2.00e-03
IKMLSDRKRELEHRLSATLEENDLLQGTVEELQDRVLILERQGHDKDLQVLG

SEQ ID NO: 39292 - protein, 85 aa, Homo sapiens
  MAP TO AC004836.2; EXPRESSED IN LUNG, SIGNAL = 6.7; EXPRESSED IN BRAIN, SIGNAL = 6.9; EXPRESSED IN HEART, SIGNAL = 5.9; EXPRESSED IN FETAL LIVER, SIGNAL = 5.7; EXPRESSED IN BONE MARROW, SIGNAL =   6; EXPRESSED IN ADULT LIVER, SIGNAL = 6.1; EXPRESSED IN PLACENTA, SIGNAL = 6.5; EXPRESSED IN HELA, SIGNAL =   6; EST_HUMAN HIT: T77322.1, EVALUE 3.00e-11
NVNNHFTFSPNAGSNVTRLLLTSRFDYAGGFDKIWDYKLLVYVTDDNLMSDRKKAEALVETGTVTLSIKVIPHPTTIITTTPRVR

SEQ ID NO: 39293 - protein, 63 aa, Homo sapiens
  MAP TO AC004414.1; EXPRESSED IN PLACENTA, SIGNAL = 1.5; EXPRESSED IN ADULT LIVER, SIGNAL = 1.6; EXPRESSED IN LUNG, SIGNAL = 1.5; EXPRESSED IN HEART, SIGNAL = 1.4; EXPRESSED IN FETAL LIVER, SIGNAL = 1.4; EXPRESSED IN BRAIN, SIGNAL = 1.5; EXPRESSED IN BONE MARROW, SIGNAL = 1.2; SWISSPROT HIT: P37458, EVALUE 2.60e+00; EST_HUMAN HIT: AI806418.1, EVALUE 1.00e-06
SQVAAAYRGSTGGKVEASPGLAPIPLQVHLYSPTWGQFGHPSDPNMCSLGTWEDMSAARENPC

SEQ ID NO: 39294 - protein, 62 aa, Homo sapiens
  MAP TO AC005865.1; EXPRESSED IN PLACENTA, SIGNAL = 2.8; EXPRESSED IN LUNG, SIGNAL =   3; EXPRESSED IN FETAL LIVER, SIGNAL = 2.7; EXPRESSED IN BRAIN, SIGNAL = 2.5; EXPRESSED IN BONE MARROW, SIGNAL = 2.5; EXPRESSED IN ADULT LIVER, SIGNAL = 2.6; EXPRESSED IN HELA, SIGNAL = 2.8; EXPRESSED IN HEART, SIGNAL = 2.7
HLSLSKASEEGSFFPSSLLSIPPNLEGSRECDHCLQLGDSVLRALLIHLGASGSQLKCGLGG

SEQ ID NO: 39295 - protein, 26 aa, Homo sapiens
  MAP TO AC005865.1; EXPRESSED IN PLACENTA, SIGNAL = 2.8; EXPRESSED IN LUNG, SIGNAL =   3; EXPRESSED IN FETAL LIVER, SIGNAL = 2.7; EXPRESSED IN BRAIN, SIGNAL = 2.5; EXPRESSED IN BONE MARROW, SIGNAL = 2.5; EXPRESSED IN ADULT LIVER, SIGNAL = 2.6; EXPRESSED IN HELA, SIGNAL = 2.8; EXPRESSED IN HEART, SIGNAL = 2.7; SWISSPROT HIT: P47312, EVALUE 2.90e+00
PPKPHFSCDPEAPRWINRALSTESPS

SEQ ID NO: 39296 - protein, 55 aa, Homo sapiens
  MAP TO AC004047.1; EXPRESSED IN PLACENTA, SIGNAL = 1.7; EXPRESSED IN HEART, SIGNAL = 1.3; EXPRESSED IN BRAIN, SIGNAL = 1.1; EXPRESSED IN BONE MARROW, SIGNAL = 1.8; EXPRESSED IN ADULT LIVER, SIGNAL = 2.2; EXPRESSED IN LUNG, SIGNAL = 1.5; EXPRESSED IN FETAL LIVER, SIGNAL = 2.4
KSSWRVGERVSASKKKKRKERRKKEKKEREKERKERMEHKRGLRVKIWIDQMTET

SEQ ID NO: 39297 - protein, 56 aa, Homo sapiens
  MAP TO AC005189.1; EXPRESSED IN HEART, SIGNAL =   4; EXPRESSED IN BONE MARROW, SIGNAL = 3.7; EXPRESSED IN ADULT LIVER, SIGNAL = 4.3; EXPRESSED IN PLACENTA, SIGNAL = 4.1; EXPRESSED IN HELA, SIGNAL = 3.6; EXPRESSED IN FETAL LIVER, SIGNAL = 5.3; EXPRESSED IN BRAIN, SIGNAL = 4.2; EXPRESSED IN LUNG, SIGNAL = 3.7; EST_HUMAN HIT: AI074573.1, EVALUE 2.00e-04; SWISSPROT HIT: P29982, EVALUE 6.00e+00
YLKARVPQWLKEQMLEPDCMNLNPSSTTYSLISAPLGMLLNLSVPQFTHLQNERDD

SEQ ID NO: 39298 - protein, 140 aa, Homo sapiens
  MAP TO AC005815.1; EXPRESSED IN PLACENTA, SIGNAL = 4.3; EXPRESSED IN LUNG, SIGNAL = 4.9; EXPRESSED IN FETAL LIVER, SIGNAL = 4.1; EXPRESSED IN ADULT LIVER, SIGNAL = 4.2; EXPRESSED IN HELA, SIGNAL = 4.1; EXPRESSED IN HEART, SIGNAL = 4.1; EXPRESSED IN BRAIN, SIGNAL = 4.5; EXPRESSED IN BONE MARROW, SIGNAL = 4.5; EST_HUMAN HIT: AA204740.1, EVALUE 3.00e-57; SWISSPROT HIT: Q62786, EVALUE 1.00e-15
IPDSLQTTAMPQTLHRVEQDPLELTCEVASETIQHSHLSVAWLRQKVGEKPVEVISLSRDFMLHSSSEYAQRQSLGEVRLDKLGRTTFRLTIFHLQPSDQGEFYCEAAEWIQDPDGSWYAMTRKRSEGAVVNVQPTGQSL

SEQ ID NO: 39299 - protein, 106 aa, Homo sapiens
  MAP TO AC004707.1; EXPRESSED IN HELA, SIGNAL = 3.9; EXPRESSED IN HEART, SIGNAL = 3.6; EXPRESSED IN BONE MARROW, SIGNAL =   4; EXPRESSED IN LUNG, SIGNAL = 3.9; EXPRESSED IN FETAL LIVER, SIGNAL = 3.7; EXPRESSED IN BRAIN, SIGNAL =   4; EXPRESSED IN ADULT LIVER, SIGNAL = 3.9; EXPRESSED IN PLACENTA, SIGNAL = 3.9; EST_HUMAN HIT: AA306503.1, EVALUE 5.00e-37; SWISSPROT HIT: P33642, EVALUE 1.60e+00
VGTDWDPKERLFRNFGGLLGPLDEPVAVQRWARGPNLTATVVWIDPTYVVATSYDITVDTETEVTQYKPPLSRPLRPGPWTVRLLQFWEPLGETRFLVLPLTFNRK

SEQ ID NO: 39300 - protein, 57 aa, Homo sapiens
  MAP TO AC004707.1; EXPRESSED IN HELA, SIGNAL = 3.9; EXPRESSED IN HEART, SIGNAL = 3.6; EXPRESSED IN BONE MARROW, SIGNAL =   4; EXPRESSED IN LUNG, SIGNAL = 3.9; EXPRESSED IN FETAL LIVER, SIGNAL = 3.7; EXPRESSED IN BRAIN, SIGNAL =   4; EXPRESSED IN ADULT LIVER, SIGNAL = 3.9; EXPRESSED IN PLACENTA, SIGNAL = 3.9; SWISSPROT HIT: P03204, EVALUE 1.10e-01; EST_HUMAN HIT: AA306503.1, EVALUE 2.00e-30
LALIGTPKSVFSGTLGGYWGRWTSLWPCSAGPGAPTSQPQWSGSTQPMWWPHLMTSQ

SEQ ID NO: 39301 - protein, 52 aa, Homo sapiens
  MAP TO AC005155.1; EXPRESSED IN FETAL LIVER, SIGNAL = 1.5; EXPRESSED IN BRAIN, SIGNAL = 1.4; EXPRESSED IN BONE MARROW, SIGNAL = 1.4; EXPRESSED IN PLACENTA, SIGNAL = 2.8; EXPRESSED IN HEART, SIGNAL = 1.5; EXPRESSED IN ADULT LIVER, SIGNAL = 1.2; EXPRESSED IN LUNG, SIGNAL = 1.4; SWISSPROT HIT: P29972, EVALUE 2.00e-24; EST_HUMAN HIT: BF477059.1, EVALUE 3.00e-23
FIGGALAVLIYDFILAPRSSDLTDRVKVWTSGQVEEYDLDADDINSRVEMKP

SEQ ID NO: 39302 - protein, 57 aa, Homo sapiens
  MAP TO AC004593.1; EXPRESSED IN PLACENTA, SIGNAL = 3.5; EXPRESSED IN LUNG, SIGNAL = 3.1; EXPRESSED IN HELA, SIGNAL =  28; EXPRESSED IN FETAL LIVER, SIGNAL = 3.2; EXPRESSED IN ADULT LIVER, SIGNAL = 3.1; EXPRESSED IN HEART, SIGNAL = 2.4; EXPRESSED IN BRAIN, SIGNAL = 3.1; EXPRESSED IN BONE MARROW, SIGNAL = 3.2; EST_HUMAN HIT: BF210881.1, EVALUE 1.60e+00; SWISSPROT HIT: P07131, EVALUE 7.00e-01
RSKEFKQKMTYDRVLGTLENHDCSSSNSLVTTTHTQHWLPGTGHENLCELPQKNHTY

SEQ ID NO: 39303 - protein, 71 aa, Homo sapiens
  MAP TO AC005160.1; EXPRESSED IN LUNG, SIGNAL = 1.4; EXPRESSED IN FETAL LIVER, SIGNAL = 1.3; EXPRESSED IN BONE MARROW, SIGNAL = 1.4; EXPRESSED IN PLACENTA, SIGNAL = 1.3; EXPRESSED IN BRAIN, SIGNAL = 1.4; EXPRESSED IN ADULT LIVER, SIGNAL = 1.3; EXPRESSED IN HEART, SIGNAL = 1.4; SWISSPROT HIT: Q61559, EVALUE 7.20e+00
VAQGPPPPSSSGAAARPSQRSIGQALGRADDRLCFPDLETWLILFLKQPPASLRISNHLVIQCPEQTPWSC

SEQ ID NO: 39304 - protein, 46 aa, Homo sapiens
  MAP TO AC002525.1; EXPRESSED IN BONE MARROW, SIGNAL = 2.7; EXPRESSED IN HELA, SIGNAL =   2; EXPRESSED IN FETAL LIVER, SIGNAL = 1.8; EXPRESSED IN BRAIN, SIGNAL = 1.9; EXPRESSED IN ADULT LIVER, SIGNAL = 1.9; EXPRESSED IN PLACENTA, SIGNAL = 1.9; EXPRESSED IN LUNG, SIGNAL = 2.1; EXPRESSED IN HEART, SIGNAL = 1.7
LFQRMVFGTMLRNGIWQHCLGLEKRVGRLKEGSQIRMQIKIMRAGS

SEQ ID NO: 39305 - protein, 27 aa, Homo sapiens
  MAP TO AC005751.1; EXPRESSED IN PLACENTA, SIGNAL =   2; EXPRESSED IN HELA, SIGNAL = 2.2; EXPRESSED IN HEART, SIGNAL = 1.9; EXPRESSED IN ADULT LIVER, SIGNAL =   2; EXPRESSED IN BONE MARROW, SIGNAL = 1.8; EXPRESSED IN BRAIN, SIGNAL = 2.3; EXPRESSED IN FETAL LIVER, SIGNAL = 1.9; EXPRESSED IN LUNG, SIGNAL = 2.1
KIRGTGTSELRIFHKYPVKIPISNKCG

SEQ ID NO: 39306 - protein, 19 aa, Homo sapiens
  MAP TO AC005751.1; EXPRESSED IN PLACENTA, SIGNAL =   2; EXPRESSED IN HELA, SIGNAL = 2.2; EXPRESSED IN HEART, SIGNAL = 1.9; EXPRESSED IN ADULT LIVER, SIGNAL =   2; EXPRESSED IN BONE MARROW, SIGNAL = 1.8; EXPRESSED IN BRAIN, SIGNAL = 2.3; EXPRESSED IN FETAL LIVER, SIGNAL = 1.9; EXPRESSED IN LUNG, SIGNAL = 2.1
STLITDGNFHWILVEDPKL

SEQ ID NO: 39307 - protein, 147 aa, Homo sapiens
  MAP TO AC005899.1; EXPRESSED IN LUNG, SIGNAL =   5; EXPRESSED IN ADULT LIVER, SIGNAL =   2; EXPRESSED IN PLACENTA, SIGNAL = 2.1; EXPRESSED IN HELA, SIGNAL = 1.9; EXPRESSED IN HEART, SIGNAL = 2.8; EXPRESSED IN FETAL LIVER, SIGNAL = 1.9; EXPRESSED IN BRAIN, SIGNAL = 2.5; EXPRESSED IN BONE MARROW, SIGNAL =   4; EST_HUMAN HIT: AA351652.1, EVALUE 3.00e-43
EHGVWAGRVAPLPPVGLSPVPSPKLCGALGWRGRGHHPGRGGPEELRAEAPGPVTVVDFCGHVHRLRAVRCLLEHLCLHPAGLKAAASPLRAGGPRSGRGGKSSTHRERLRGFFSSPAQLGRADKDRRLWATVMFVFRFGHTVETLF

SEQ ID NO: 39308 - protein, 56 aa, Homo sapiens
  MAP TO AC001237.1; EXPRESSED IN LUNG, SIGNAL = 1.5; EXPRESSED IN FETAL LIVER, SIGNAL = 1.2; EXPRESSED IN BRAIN, SIGNAL = 1.3; EXPRESSED IN BONE MARROW, SIGNAL = 1.1; EXPRESSED IN ADULT LIVER, SIGNAL = 1.6; EXPRESSED IN PLACENTA, SIGNAL = 1.2; EXPRESSED IN HEART, SIGNAL = 1.4; EST_HUMAN HIT: AJ003565.1, EVALUE 7.20e-01
PCLWAESQPDPDRAGPELQCAHGCWSQTPLPETETAELQATATAVIVLGGQGEVEG

SEQ ID NO: 39309 - protein, 70 aa, Homo sapiens
  MAP TO AC005828.1; EXPRESSED IN PLACENTA, SIGNAL = 2.1; EXPRESSED IN LUNG, SIGNAL = 2.1; EXPRESSED IN HELA, SIGNAL = 1.9; EXPRESSED IN FETAL LIVER, SIGNAL = 1.8; EXPRESSED IN ADULT LIVER, SIGNAL = 1.8; EXPRESSED IN HEART, SIGNAL = 1.7; EXPRESSED IN BRAIN, SIGNAL = 1.8; EXPRESSED IN BONE MARROW, SIGNAL = 1.8
KPLLFEVPSITTESVFVGRDWVFHEIDAQLQSSNASVNQGVVIVGNIGFGKTAIISRLVALSCHGTRMRQ

SEQ ID NO: 39310 - protein, 25 aa, Homo sapiens
  MAP TO AC005828.1; EXPRESSED IN PLACENTA, SIGNAL = 2.1; EXPRESSED IN LUNG, SIGNAL = 2.1; EXPRESSED IN HELA, SIGNAL = 1.9; EXPRESSED IN FETAL LIVER, SIGNAL = 1.8; EXPRESSED IN ADULT LIVER, SIGNAL = 1.8; EXPRESSED IN HEART, SIGNAL = 1.7; EXPRESSED IN BRAIN, SIGNAL = 1.8; EXPRESSED IN BONE MARROW, SIGNAL = 1.8; SWISSPROT HIT: Q43654, EVALUE 5.10e+00
SLCSLKCPASLQSQCLLAEIGFSTK

SEQ ID NO: 39311 - protein, 32 aa, Homo sapiens
  MAP TO AC005165.1; EXPRESSED IN LUNG, SIGNAL = 4.2; EXPRESSED IN HELA, SIGNAL =   4; EXPRESSED IN FETAL LIVER, SIGNAL =   4; EXPRESSED IN BRAIN, SIGNAL = 4.4; EXPRESSED IN BONE MARROW, SIGNAL = 4.1; EXPRESSED IN ADULT LIVER, SIGNAL = 4.2; EXPRESSED IN PLACENTA, SIGNAL = 3.8; EXPRESSED IN HEART, SIGNAL = 3.3
FDNQTQLQTLPRTQLRTTEQVKQPQNDRKFSK

SEQ ID NO: 39312 - protein, 42 aa, Homo sapiens
  MAP TO AC003682.1; EXPRESSED IN PLACENTA, SIGNAL = 1.6; EXPRESSED IN HEART, SIGNAL = 1.4; EXPRESSED IN BONE MARROW, SIGNAL =   2; EXPRESSED IN ADULT LIVER, SIGNAL = 1.5; EXPRESSED IN LUNG, SIGNAL = 1.5; EXPRESSED IN FETAL LIVER, SIGNAL = 1.6; EXPRESSED IN BRAIN, SIGNAL = 1.5
DKPTVDNTAKSENPLKCNFWMLYLPIPYLGPPIAKHQLLQLC

SEQ ID NO: 39313 - protein, 26 aa, Homo sapiens
  MAP TO AC003682.1; EXPRESSED IN PLACENTA, SIGNAL = 1.6; EXPRESSED IN HEART, SIGNAL = 1.4; EXPRESSED IN BONE MARROW, SIGNAL =   2; EXPRESSED IN ADULT LIVER, SIGNAL = 1.5; EXPRESSED IN LUNG, SIGNAL = 1.5; EXPRESSED IN FETAL LIVER, SIGNAL = 1.6; EXPRESSED IN BRAIN, SIGNAL = 1.5
TAGGADAWLLEAPDKGWGGRASRSCI

SEQ ID NO: 39314 - protein, 39 aa, Homo sapiens
  MAP TO AC005876.2; EXPRESSED IN PLACENTA, SIGNAL = 2.4; EXPRESSED IN ADULT LIVER, SIGNAL = 1.9; EXPRESSED IN LUNG, SIGNAL = 2.3; EXPRESSED IN HEART, SIGNAL =   2; EXPRESSED IN FETAL LIVER, SIGNAL = 2.1; EXPRESSED IN BRAIN, SIGNAL = 2.1; EXPRESSED IN HELA, SIGNAL = 2.2; EXPRESSED IN BONE MARROW, SIGNAL =   2; EST_HUMAN HIT: BE273923.1, EVALUE 1.00e-18; SWISSPROT HIT: O04425, EVALUE 1.00e-04
PYDSADDWSEHISSSGKKYYYNCRTEVSQWEKPKEWLER

SEQ ID NO: 39315 - protein, 76 aa, Homo sapiens
  MAP TO AC004060.1; EXPRESSED IN PLACENTA, SIGNAL = 1.8; EXPRESSED IN LUNG, SIGNAL = 1.3; EXPRESSED IN FETAL LIVER, SIGNAL = 2.1; EXPRESSED IN BRAIN, SIGNAL = 1.8; EXPRESSED IN BONE MARROW, SIGNAL = 1.7; EXPRESSED IN ADULT LIVER, SIGNAL = 1.6; EXPRESSED IN HELA, SIGNAL = 1.7; EXPRESSED IN HEART, SIGNAL = 1.9; SWISSPROT HIT: P49137, EVALUE 8.30e+00; EST_HUMAN HIT: AI741083.1, EVALUE 3.00e+00
KANTAIGGLLLHKRSVLLPSPGLTSAMSSAESSGLGEASEGRNLKRAQGLSPCSVFSAPAPGPSPEQDRTISTPIH

SEQ ID NO: 39316 - protein, 37 aa, Homo sapiens
  MAP TO AC005153.1; EXPRESSED IN BONE MARROW, SIGNAL = 1.9; EXPRESSED IN PLACENTA, SIGNAL = 1.6; EXPRESSED IN LUNG, SIGNAL = 7.3; EXPRESSED IN HELA, SIGNAL =   2; EXPRESSED IN FETAL LIVER, SIGNAL = 2.2; EXPRESSED IN ADULT LIVER, SIGNAL = 2.6; EXPRESSED IN HEART, SIGNAL = 3.4; EXPRESSED IN BRAIN, SIGNAL = 1.9; SWISSPROT HIT: Q13322, EVALUE 4.00e-16; EST_HUMAN HIT: BE894863.1, EVALUE 6.00e-15
EPRHLQLLADLEDSNIFSLIAGRKQYNAPTDHGLCIK

SEQ ID NO: 39317 - protein, 43 aa, Homo sapiens
  MAP TO AC005153.1; EXPRESSED IN BONE MARROW, SIGNAL = 1.9; EXPRESSED IN PLACENTA, SIGNAL = 1.6; EXPRESSED IN LUNG, SIGNAL = 7.3; EXPRESSED IN HELA, SIGNAL =   2; EXPRESSED IN FETAL LIVER, SIGNAL = 2.2; EXPRESSED IN ADULT LIVER, SIGNAL = 2.6; EXPRESSED IN HEART, SIGNAL = 3.4; EXPRESSED IN BRAIN, SIGNAL = 1.9; EST_HUMAN HIT: BF088558.1, EVALUE 1.00e-07
LLWAAEHARRLWTARGYLYAEPVVCRGVVLLPASDQGEDVAVL

SEQ ID NO: 39318 - protein, 99 aa, Homo sapiens
  MAP TO AC006078.1; EXPRESSED IN PLACENTA, SIGNAL = 3.2; EXPRESSED IN HEART, SIGNAL = 2.8; EXPRESSED IN BONE MARROW, SIGNAL = 3.7; EXPRESSED IN ADULT LIVER, SIGNAL = 3.7; EXPRESSED IN LUNG, SIGNAL =   3; EXPRESSED IN HELA, SIGNAL = 4.7; EXPRESSED IN FETAL LIVER, SIGNAL = 3.6; EXPRESSED IN BRAIN, SIGNAL = 2.9; SWISSPROT HIT: Q9XAB7, EVALUE 8.20e-01; EST_HUMAN HIT: BE257163.1, EVALUE 1.00e-50
LTSLGMGLPRSMLVTPAPLPSVKWVVCFSGGPPTPPMNLPCTQKQCRTSAAGESGAWLVGRAASLWQPMRAPSAGAHHRPLGNWATGITSPSLPLQPRR

SEQ ID NO: 39319 - protein, 50 aa, Homo sapiens
  MAP TO AC005911.6; EXPRESSED IN HEART, SIGNAL = 3.8; EXPRESSED IN BRAIN, SIGNAL = 4.7; EXPRESSED IN BONE MARROW, SIGNAL = 3.8; EXPRESSED IN PLACENTA, SIGNAL = 4.1; EXPRESSED IN LUNG, SIGNAL = 4.6; EXPRESSED IN HELA, SIGNAL =   4; EXPRESSED IN FETAL LIVER, SIGNAL = 4.1; EXPRESSED IN ADULT LIVER, SIGNAL = 4.1; SWISSPROT HIT: O75386, EVALUE 3.00e-12; EST_HUMAN HIT: AI733479.1, EVALUE 1.00e-22
DTGTSGSATAAQPADNLLGDIDDLEDFVYSPAPQGVTVRCRIIRDKRGMD

SEQ ID NO: 39320 - protein, 29 aa, Homo sapiens
  MAP TO AC002288.1; EXPRESSED IN PLACENTA, SIGNAL = 3.7; EXPRESSED IN LUNG, SIGNAL = 3.2; EXPRESSED IN HEART, SIGNAL = 3.6; EXPRESSED IN FETAL LIVER, SIGNAL = 3.8; EXPRESSED IN BONE MARROW, SIGNAL = 4.5; EXPRESSED IN HELA, SIGNAL = 3.4; EXPRESSED IN BRAIN, SIGNAL = 3.5; EXPRESSED IN ADULT LIVER, SIGNAL = 3.4
GTPSHKSFLPRLGKTLLVLWHGPSFSPRV

SEQ ID NO: 39321 - protein, 24 aa, Homo sapiens
  MAP TO AC002288.1; EXPRESSED IN PLACENTA, SIGNAL = 3.7; EXPRESSED IN LUNG, SIGNAL = 3.2; EXPRESSED IN HEART, SIGNAL = 3.6; EXPRESSED IN FETAL LIVER, SIGNAL = 3.8; EXPRESSED IN BONE MARROW, SIGNAL = 4.5; EXPRESSED IN HELA, SIGNAL = 3.4; EXPRESSED IN BRAIN, SIGNAL = 3.5; EXPRESSED IN ADULT LIVER, SIGNAL = 3.4
TLGENEGPCHKTNSVFPNLGRKDL

SEQ ID NO: 39322 - protein, 28 aa, Homo sapiens
  MAP TO AC005157.1; EXPRESSED IN PLACENTA, SIGNAL = 1.6; EXPRESSED IN HEART, SIGNAL = 1.5; EXPRESSED IN FETAL LIVER, SIGNAL = 1.7; EXPRESSED IN BRAIN, SIGNAL = 1.6; EXPRESSED IN LUNG, SIGNAL = 1.7; EXPRESSED IN HELA, SIGNAL = 1.6; EXPRESSED IN BONE MARROW, SIGNAL = 1.6; EXPRESSED IN ADULT LIVER, SIGNAL = 1.5; SWISSPROT HIT: O46530, EVALUE 8.60e+00
GLFQNFAATNNAAKMSVFNHLHNCFSSL

SEQ ID NO: 39323 - protein, 69 aa, Homo sapiens
  MAP TO AC006084.1; EXPRESSED IN PLACENTA, SIGNAL = 2.9; EXPRESSED IN BRAIN, SIGNAL = 3.2; EXPRESSED IN ADULT LIVER, SIGNAL = 3.4; EXPRESSED IN LUNG, SIGNAL = 4.1; EXPRESSED IN HELA, SIGNAL = 4.1; EXPRESSED IN HEART, SIGNAL = 3.7; EXPRESSED IN FETAL LIVER, SIGNAL = 3.5; EXPRESSED IN BONE MARROW, SIGNAL = 3.2; EST_HUMAN HIT: BF217923.1, EVALUE 2.00e-33; SWISSPROT HIT: P11799, EVALUE 8.00e-08
VSGLPAPDVSWYLNGRTVQSDDLHKMIVSEKGLHSLIFEVVRASDAGAYACVAKNRAGEATFTVQLDVL

SEQ ID NO: 39324 - protein, 18 aa, Homo sapiens
  MAP TO AC005179.1; EXPRESSED IN PLACENTA, SIGNAL = 1.7; EXPRESSED IN LUNG, SIGNAL = 1.6; EXPRESSED IN HEART, SIGNAL = 1.5; EXPRESSED IN FETAL LIVER, SIGNAL = 1.6; EXPRESSED IN BONE MARROW, SIGNAL = 1.8; EXPRESSED IN HELA, SIGNAL = 1.9; EXPRESSED IN BRAIN, SIGNAL = 1.8; EXPRESSED IN ADULT LIVER, SIGNAL = 1.8
GKGVGQGSRTSRSSIWVE

SEQ ID NO: 39325 - protein, 20 aa, Homo sapiens
  MAP TO AC004853.1; EXPRESSED IN PLACENTA, SIGNAL = 3.7; EXPRESSED IN ADULT LIVER, SIGNAL = 4.2; EXPRESSED IN LUNG, SIGNAL =   5; EXPRESSED IN HEART, SIGNAL = 3.5; EXPRESSED IN FETAL LIVER, SIGNAL = 3.7; EXPRESSED IN BRAIN, SIGNAL = 3.9; EXPRESSED IN HELA, SIGNAL =   4; EXPRESSED IN BONE MARROW, SIGNAL = 3.6
METIITFQLPVSRCYQSLCL

SEQ ID NO: 39326 - protein, 44 aa, Homo sapiens
  MAP TO AC005293.1; EXPRESSED IN LUNG, SIGNAL = 1.9; EXPRESSED IN PLACENTA, SIGNAL = 1.7; EXPRESSED IN HEART, SIGNAL = 1.8; EXPRESSED IN FETAL LIVER, SIGNAL = 1.7; EXPRESSED IN BRAIN, SIGNAL = 1.8; EXPRESSED IN BONE MARROW, SIGNAL = 1.9; EXPRESSED IN HELA, SIGNAL = 1.9; EXPRESSED IN ADULT LIVER, SIGNAL = 1.6
KHSSLLFIHLLPSYLISGAPSGLLTTECTALTVPDTWAEMYTSN

SEQ ID NO: 39327 - protein, 40 aa, Homo sapiens
  MAP TO AC004064.1; EXPRESSED IN LUNG, SIGNAL = 0.82; EXPRESSED IN BRAIN, SIGNAL = 1.5; EXPRESSED IN ADULT LIVER, SIGNAL = 1.1; EXPRESSED IN PLACENTA, SIGNAL = 1.2; EXPRESSED IN HEART, SIGNAL = 1.3; EXPRESSED IN FETAL LIVER, SIGNAL = 1.5; EXPRESSED IN BONE MARROW, SIGNAL = 1.4; EST_HUMAN HIT: BE142715.1, EVALUE 7.20e+00
LLNQTSRMDAQMPETFLSTNKLENQLLLQRQKLQQLQGQN

SEQ ID NO: 39328 - protein, 86 aa, Homo sapiens
  MAP TO AC003043.1; EXPRESSED IN PLACENTA, SIGNAL = 1.3; EXPRESSED IN HEART, SIGNAL = 1.5; EXPRESSED IN BRAIN, SIGNAL = 1.5; EXPRESSED IN BONE MARROW, SIGNAL = 1.3; EXPRESSED IN ADULT LIVER, SIGNAL = 1.5; EXPRESSED IN LUNG, SIGNAL = 1.4; EXPRESSED IN FETAL LIVER, SIGNAL = 1.4; SWISSPROT HIT: P02730, EVALUE 3.00e-31; EST_HUMAN HIT: BF526005.1, EVALUE 3.00e-21
LIVSKPERKMVKGSGFHLDLLLVVGMGGVAALFGMPWLSATTVRSVTHANALTVMGKASTPGAAAQIQEVKEQRISGLLVAVLVGE

SEQ ID NO: 39329 - protein, 34 aa, Homo sapiens
  MAP TO AC003687.1; EXPRESSED IN BRAIN, SIGNAL = 1.4; EXPRESSED IN PLACENTA, SIGNAL = 1.6; EXPRESSED IN LUNG, SIGNAL = 1.7; EXPRESSED IN HEART, SIGNAL = 1.7; EXPRESSED IN BONE MARROW, SIGNAL = 1.5; EXPRESSED IN ADULT LIVER, SIGNAL = 1.5; EXPRESSED IN HELA, SIGNAL = 2.1; EXPRESSED IN FETAL LIVER, SIGNAL = 1.4
PRLPAEAIDKLETVTQEAVEVTEGEKQALWQPGK

SEQ ID NO: 39330 - protein, 44 aa, Homo sapiens
  MAP TO AC005162.1; EXPRESSED IN BONE MARROW, SIGNAL = 5.8; EXPRESSED IN PLACENTA, SIGNAL = 4.9; EXPRESSED IN LUNG, SIGNAL = 6.1; EXPRESSED IN HELA, SIGNAL = 5.5; EXPRESSED IN HEART, SIGNAL = 6.3; EXPRESSED IN FETAL LIVER, SIGNAL = 5.8; EXPRESSED IN ADULT LIVER, SIGNAL = 5.8; EXPRESSED IN BRAIN, SIGNAL =   6; SWISSPROT HIT: Q9ZE90, EVALUE 6.30e+00; EST_HUMAN HIT: BF350915.1, EVALUE 7.00e-21
IIGGYAEFLYQIGLLDEKQKKYFQKQCHECIEHIRKQNWFEAFE

SEQ ID NO: 39331 - protein, 19 aa, Homo sapiens
  MAP TO AC005162.1; EXPRESSED IN BONE MARROW, SIGNAL = 5.8; EXPRESSED IN PLACENTA, SIGNAL = 4.9; EXPRESSED IN LUNG, SIGNAL = 6.1; EXPRESSED IN HELA, SIGNAL = 5.5; EXPRESSED IN HEART, SIGNAL = 6.3; EXPRESSED IN FETAL LIVER, SIGNAL = 5.8; EXPRESSED IN ADULT LIVER, SIGNAL = 5.8; EXPRESSED IN BRAIN, SIGNAL =   6; EST_HUMAN HIT: BF375650.1, EVALUE 1.30e-02
LSSDYRGLCRIPVPNWLVG

SEQ ID NO: 39332 - protein, 65 aa, Homo sapiens
  MAP TO AC002066.1; EXPRESSED IN PLACENTA, SIGNAL = 1.2; EXPRESSED IN LUNG, SIGNAL = 1.4; EXPRESSED IN FETAL LIVER, SIGNAL = 1.2; EXPRESSED IN BONE MARROW, SIGNAL = 1.2; EXPRESSED IN ADULT LIVER, SIGNAL = 1.3; EXPRESSED IN HEART, SIGNAL = 1.4; EXPRESSED IN BRAIN, SIGNAL = 1.3; EST_HUMAN HIT: AW341063.1, EVALUE 7.50e+00
ASWPFAKEQVQKDTHILFGSGPTSNRYGLVPRCLLTEEAKNTAPCSHQWTPPQQQGLPSPLPMRE

SEQ ID NO: 39333 - protein, 20 aa, Homo sapiens
  MAP TO AC005368.1; EXPRESSED IN LUNG, SIGNAL = 2.3; EXPRESSED IN PLACENTA, SIGNAL = 2.1; EXPRESSED IN HEART, SIGNAL = 2.4; EXPRESSED IN FETAL LIVER, SIGNAL = 2.2; EXPRESSED IN BRAIN, SIGNAL = 1.9; EXPRESSED IN BONE MARROW, SIGNAL = 1.9; EXPRESSED IN ADULT LIVER, SIGNAL = 3.2; EXPRESSED IN HELA, SIGNAL =   2; EST_HUMAN HIT: AI904707.1, EVALUE 5.00e-04
LYSSFPTSIWTRSARQSLKT

SEQ ID NO: 39334 - protein, 47 aa, Homo sapiens
  MAP TO AC002544.1; EXPRESSED IN LUNG, SIGNAL = 6.2; EXPRESSED IN HELA, SIGNAL = 5.7; EXPRESSED IN HEART, SIGNAL = 4.3; EXPRESSED IN ADULT LIVER, SIGNAL = 5.3; EXPRESSED IN BONE MARROW, SIGNAL = 6.4; EXPRESSED IN BRAIN, SIGNAL = 5.8; EXPRESSED IN FETAL LIVER, SIGNAL = 5.3; EXPRESSED IN PLACENTA, SIGNAL = 5.2; EST_HUMAN HIT: BE409594.1, EVALUE 5.00e-19; SWISSPROT HIT: Q99613, EVALUE 4.00e-20
AAQIELLQLLVQIAAENNLGEGVIVKIKFNIIASLYDYNPNLATYMK

SEQ ID NO: 39335 - protein, 43 aa, Homo sapiens
  MAP TO AC004134.1; EXPRESSED IN LUNG, SIGNAL =   2; EXPRESSED IN BRAIN, SIGNAL =   2; EXPRESSED IN PLACENTA, SIGNAL = 1.7; EXPRESSED IN HEART, SIGNAL =   2; EXPRESSED IN FETAL LIVER, SIGNAL = 1.8; EXPRESSED IN BONE MARROW, SIGNAL = 1.9; EXPRESSED IN ADULT LIVER, SIGNAL = 1.8; EXPRESSED IN HELA, SIGNAL = 1.9; SWISSPROT HIT: P21851, EVALUE 8.00e-19; EST_HUMAN HIT: BF696172.1, EVALUE 1.00e-17
VGQSFIPSSVPATFAPSPTPAVVSSGLNDLFELSTGIGMAPGG

SEQ ID NO: 39336 - protein, 26 aa, Homo sapiens
  MAP TO AC004134.1; EXPRESSED IN LUNG, SIGNAL =   2; EXPRESSED IN BRAIN, SIGNAL =   2; EXPRESSED IN PLACENTA, SIGNAL = 1.7; EXPRESSED IN HEART, SIGNAL =   2; EXPRESSED IN FETAL LIVER, SIGNAL = 1.8; EXPRESSED IN BONE MARROW, SIGNAL = 1.9; EXPRESSED IN ADULT LIVER, SIGNAL = 1.8; EXPRESSED IN HELA, SIGNAL = 1.9
WDNPSSHHRCLQPLLLHLHLLWSAVD

SEQ ID NO: 39337 - protein, 36 aa, Homo sapiens
  MAP TO AC004583.1; EXPRESSED IN LUNG, SIGNAL =   8; EXPRESSED IN FETAL LIVER, SIGNAL = 7.2; EXPRESSED IN BONE MARROW, SIGNAL =   7; EXPRESSED IN PLACENTA, SIGNAL = 7.3; EXPRESSED IN HELA, SIGNAL = 6.7; EXPRESSED IN BRAIN, SIGNAL = 6.8; EXPRESSED IN ADULT LIVER, SIGNAL = 6.5; EXPRESSED IN HEART, SIGNAL = 5.8; SWISSPROT HIT: P34664, EVALUE 7.00e-04; EST_HUMAN HIT: AA147560.1, EVALUE 3.00e-17
GSRFKCRNCDDFDFCETCFKTKKHNTRHTFGRINEP

SEQ ID NO: 39338 - protein, 32 aa, Homo sapiens
  MAP TO AC004583.1; EXPRESSED IN LUNG, SIGNAL =   8; EXPRESSED IN FETAL LIVER, SIGNAL = 7.2; EXPRESSED IN BONE MARROW, SIGNAL =   7; EXPRESSED IN PLACENTA, SIGNAL = 7.3; EXPRESSED IN HELA, SIGNAL = 6.7; EXPRESSED IN BRAIN, SIGNAL = 6.8; EXPRESSED IN ADULT LIVER, SIGNAL = 6.5; EXPRESSED IN HEART, SIGNAL = 5.8; EST_HUMAN HIT: BE899374.1, EVALUE 3.00e-11
DPDSNAETVMTLIFVKRVSRPKNTIPGIHLAE

SEQ ID NO: 39339 - protein, 97 aa, Homo sapiens
  MAP TO AC004126.1; EXPRESSED IN HEART, SIGNAL = 1.4; EXPRESSED IN FETAL LIVER, SIGNAL = 1.5; EXPRESSED IN BONE MARROW, SIGNAL = 1.8; EXPRESSED IN ADULT LIVER, SIGNAL = 1.8; EXPRESSED IN PLACENTA, SIGNAL = 1.3; EXPRESSED IN LUNG, SIGNAL = 1.2; EXPRESSED IN BRAIN, SIGNAL = 1.1; EXPRESSED IN HELA, SIGNAL = 1.7; SWISSPROT HIT: P46032, EVALUE 4.00e-11; EST_HUMAN HIT: W53019.1, EVALUE 7.00e-27
VMDLGRDATRRFFNWFYWSINLGAVLSLLVVAFIQQNISFLLGYSIPVGCVGLAFFIFLFATPVFITKPPMGSQVSSMLKLALQNCCPQLWQRHSAR

SEQ ID NO: 39340 - protein, 28 aa, Homo sapiens
  MAP TO AC004472.1; EXPRESSED IN LUNG, SIGNAL = 3.7; EXPRESSED IN FETAL LIVER, SIGNAL = 2.7; EXPRESSED IN BRAIN, SIGNAL = 2.7; EXPRESSED IN BONE MARROW, SIGNAL = 3.1; EXPRESSED IN PLACENTA, SIGNAL = 3.1; EXPRESSED IN HELA, SIGNAL = 2.7; EXPRESSED IN HEART, SIGNAL = 2.4; EXPRESSED IN ADULT LIVER, SIGNAL = 2.6
RPEVRSSPEGQKLNLPCRPRMASRRPSH

SEQ ID NO: 39341 - protein, 154 aa, Homo sapiens
  MAP TO AC005924.2; EXPRESSED IN PLACENTA, SIGNAL = 4.3; EXPRESSED IN HEART, SIGNAL = 3.8; EXPRESSED IN FETAL LIVER, SIGNAL = 4.2; EXPRESSED IN BRAIN, SIGNAL = 4.2; EXPRESSED IN LUNG, SIGNAL = 3.8; EXPRESSED IN HELA, SIGNAL = 3.9; EXPRESSED IN BONE MARROW, SIGNAL = 3.5; EXPRESSED IN ADULT LIVER, SIGNAL = 3.8; SWISSPROT HIT: P37370, EVALUE 4.00e-01; EST_HUMAN HIT: AA331675.1, EVALUE 6.00e-35
NPHKFFPDERFGDESPLLTMRQPGRCRVNSTPPAETMFTDLDSFVAFHPPLPPPPPPYHPPATPIHNQLKAGWKQRPPSQHPSRSFSYPCNHSLFHSRTAPKAGPPPVYLPSVKAAPPDCTSTAGLGRQTVAAAAATTTSTATAAAAAASEKQV

SEQ ID NO: 39342 - protein, 31 aa, Homo sapiens
  MAP TO AC005924.2; EXPRESSED IN PLACENTA, SIGNAL = 4.3; EXPRESSED IN HEART, SIGNAL = 3.8; EXPRESSED IN FETAL LIVER, SIGNAL = 4.2; EXPRESSED IN BRAIN, SIGNAL = 4.2; EXPRESSED IN LUNG, SIGNAL = 3.8; EXPRESSED IN HELA, SIGNAL = 3.9; EXPRESSED IN BONE MARROW, SIGNAL = 3.5; EXPRESSED IN ADULT LIVER, SIGNAL = 3.8; SWISSPROT HIT: Q00145, EVALUE 2.20e+00; EST_HUMAN HIT: BE257729.1, EVALUE 5.00e-12
QPPSVCPVLQCWYNQAVQLSHSASRLGEGQL

SEQ ID NO: 39343 - protein, 45 aa, Homo sapiens
  MAP TO AC002069.1; EXPRESSED IN PLACENTA, SIGNAL = 1.3; EXPRESSED IN HEART, SIGNAL = 1.9; EXPRESSED IN FETAL LIVER, SIGNAL = 1.4; EXPRESSED IN BRAIN, SIGNAL = 1.5; EXPRESSED IN BONE MARROW, SIGNAL = 1.4; EXPRESSED IN LUNG, SIGNAL = 1.6; EXPRESSED IN ADULT LIVER, SIGNAL = 1.6; SWISSPROT HIT: P30345, EVALUE 3.60e+00; EST_HUMAN HIT: BF092896.1, EVALUE 5.30e+00
FNHFSSPLLLLLAWGTITFHLDYFQPCNMDPCCNPIPSTTAHSFI

SEQ ID NO: 39344 - protein, 21 aa, Homo sapiens
  MAP TO AC002069.1; EXPRESSED IN PLACENTA, SIGNAL = 1.3; EXPRESSED IN HEART, SIGNAL = 1.9; EXPRESSED IN FETAL LIVER, SIGNAL = 1.4; EXPRESSED IN BRAIN, SIGNAL = 1.5; EXPRESSED IN BONE MARROW, SIGNAL = 1.4; EXPRESSED IN LUNG, SIGNAL = 1.6; EXPRESSED IN ADULT LIVER, SIGNAL = 1.6
IQPLLITFTAPTGLGHHHLPP

SEQ ID NO: 39345 - protein, 45 aa, Homo sapiens
  MAP TO AC004844.1; EXPRESSED IN PLACENTA, SIGNAL = 6.6; EXPRESSED IN LUNG, SIGNAL = 7.2; EXPRESSED IN HEART, SIGNAL = 6.5; EXPRESSED IN BONE MARROW, SIGNAL = 7.3; EXPRESSED IN ADULT LIVER, SIGNAL = 6.2; EXPRESSED IN HELA, SIGNAL = 6.9; EXPRESSED IN FETAL LIVER, SIGNAL = 6.5; EXPRESSED IN BRAIN, SIGNAL = 7.4
VLAFRGRREEDRVAGGGGPGGMDPWNPEQFQLLKQQQHLLLPRGQ

SEQ ID NO: 39346 - protein, 62 aa, Homo sapiens
  MAP TO AC005091.1; EXPRESSED IN PLACENTA, SIGNAL = 2.8; EXPRESSED IN HELA, SIGNAL = 2.8; EXPRESSED IN HEART, SIGNAL = 2.5; EXPRESSED IN FETAL LIVER, SIGNAL = 2.9; EXPRESSED IN ADULT LIVER, SIGNAL = 2.6; EXPRESSED IN LUNG, SIGNAL = 3.4; EXPRESSED IN BRAIN, SIGNAL = 2.9; EXPRESSED IN BONE MARROW, SIGNAL = 2.7; SWISSPROT HIT: Q15393, EVALUE 2.60e+00; EST_HUMAN HIT: AA420859.1, EVALUE 1.00e-30
YYLPNDDGEFYQFCYVTHKGEIRGASTPFQFRASSPVEELLTMEDEGNSDMLVVTTKAGLLE

SEQ ID NO: 39347 - protein, 29 aa, Homo sapiens
  MAP TO AC003962.1; EXPRESSED IN PLACENTA, SIGNAL = 2.1; EXPRESSED IN HEART, SIGNAL = 1.9; EXPRESSED IN FETAL LIVER, SIGNAL = 1.3; EXPRESSED IN BRAIN, SIGNAL = 1.6; EXPRESSED IN ADULT LIVER, SIGNAL = 1.9; EXPRESSED IN LUNG, SIGNAL = 1.3; EXPRESSED IN BONE MARROW, SIGNAL = 1.3; SWISSPROT HIT: Q09711, EVALUE 1.30e-02
LFNAFDENRDNHIDFKEISCGLSACCRGP

SEQ ID NO: 39348 - protein, 43 aa, Homo sapiens
  MAP TO AC006330.2; EXPRESSED IN LUNG, SIGNAL = 2.1; EXPRESSED IN ADULT LIVER, SIGNAL =   2; EXPRESSED IN PLACENTA, SIGNAL = 1.7; EXPRESSED IN HEART, SIGNAL = 2.2; EXPRESSED IN FETAL LIVER, SIGNAL = 2.3; EXPRESSED IN BRAIN, SIGNAL = 2.5; EXPRESSED IN BONE MARROW, SIGNAL = 2.2; EXPRESSED IN HELA, SIGNAL = 2.4; EST_HUMAN HIT: AU131977.1, EVALUE 6.00e-18; SWISSPROT HIT: P16435, EVALUE 1.00e-19
GRNIIVFYGSQTGTAEEFANRLSKDAHRYGMRGMSADPEEYDL

SEQ ID NO: 39349 - protein, 35 aa, Homo sapiens
  MAP TO AC006330.2; EXPRESSED IN LUNG, SIGNAL = 2.1; EXPRESSED IN ADULT LIVER, SIGNAL =   2; EXPRESSED IN PLACENTA, SIGNAL = 1.7; EXPRESSED IN HEART, SIGNAL = 2.2; EXPRESSED IN FETAL LIVER, SIGNAL = 2.3; EXPRESSED IN BRAIN, SIGNAL = 2.5; EXPRESSED IN BONE MARROW, SIGNAL = 2.2; EXPRESSED IN HELA, SIGNAL = 2.4; EST_HUMAN HIT: BE297981.1, EVALUE 7.00e-15
APRRGLQRSLPTACPRTPTATGCEACQRTLRSMTW

SEQ ID NO: 39350 - protein, 40 aa, Homo sapiens
  MAP TO AC006121.1; EXPRESSED IN LUNG, SIGNAL = 2.6; EXPRESSED IN BRAIN, SIGNAL = 1.9; EXPRESSED IN ADULT LIVER, SIGNAL = 3.6; EXPRESSED IN PLACENTA, SIGNAL = 2.8; EXPRESSED IN HELA, SIGNAL = 2.7; EXPRESSED IN HEART, SIGNAL = 2.4; EXPRESSED IN BONE MARROW, SIGNAL = 2.5; EXPRESSED IN FETAL LIVER, SIGNAL = 2.6; EST_HUMAN HIT: AW629048.1, EVALUE 7.00e-19; SWISSPROT HIT: Q93008, EVALUE 6.00e-20
NNHVHGQPYTGPAAHHMNNPQRTGQRAQENYEGSEEVSPP

SEQ ID NO: 39351 - protein, 54 aa, Homo sapiens
  MAP TO AC004743.1; EXPRESSED IN PLACENTA, SIGNAL = 3.2; EXPRESSED IN BRAIN, SIGNAL =   3; EXPRESSED IN ADULT LIVER, SIGNAL =   3; EXPRESSED IN LUNG, SIGNAL = 3.4; EXPRESSED IN HELA, SIGNAL =   3; EXPRESSED IN HEART, SIGNAL = 2.7; EXPRESSED IN FETAL LIVER, SIGNAL = 2.7; EXPRESSED IN BONE MARROW, SIGNAL = 2.9; EST_HUMAN HIT: AW362312.1, EVALUE 8.40e+00
LRVRYAKEMRELHHTEMSAAPHTLLLYIRMTYSLPVPRKAKLQIIQFCIIFTKW

SEQ ID NO: 39352 - protein, 48 aa, Homo sapiens
  MAP TO AC005234.1; EXPRESSED IN LUNG, SIGNAL = 2.4; EXPRESSED IN HELA, SIGNAL = 2.3; EXPRESSED IN BRAIN, SIGNAL = 2.3; EXPRESSED IN BONE MARROW, SIGNAL = 2.2; EXPRESSED IN ADULT LIVER, SIGNAL = 2.2; EXPRESSED IN PLACENTA, SIGNAL = 2.3; EXPRESSED IN HEART, SIGNAL = 2.2; EXPRESSED IN FETAL LIVER, SIGNAL = 2.4
AGPLGTRSPGTSLWGTRVARPLQSACNPEQRLHAADQAHGPCALSGLC

SEQ ID NO: 39353 - protein, 167 aa, Homo sapiens
  MAP TO AC005509.1; EXPRESSED IN LUNG, SIGNAL = 1.7; EXPRESSED IN BRAIN, SIGNAL = 1.8; EXPRESSED IN HEART, SIGNAL = 2.1; EXPRESSED IN BONE MARROW, SIGNAL = 1.7; EXPRESSED IN ADULT LIVER, SIGNAL = 1.9; EXPRESSED IN PLACENTA, SIGNAL = 1.9; EXPRESSED IN HELA, SIGNAL = 1.8; EXPRESSED IN FETAL LIVER, SIGNAL = 1.9; EST_HUMAN HIT: AW888221.1, EVALUE 3.00e+00; SWISSPROT HIT: Q05793, EVALUE 4.70e+00
IQESPEEGVRWSIMSLTGISSKDAGDYKCKAKNLAGMSEAVVTVTVLGITTTPIPPDTSERTGDHPEWDVQPGSGRSTSVSSASSYLWSSSFSPTSSFSASTLSPPSTASFSLSPFSSSTVSSTTTLSTSISASTTMANKRSFQLHQGGKRNLKVAKNGSKLPPAST

SEQ ID NO: 39354 - protein, 24 aa, Homo sapiens
  MAP TO AC005509.1; EXPRESSED IN LUNG, SIGNAL = 1.7; EXPRESSED IN BRAIN, SIGNAL = 1.8; EXPRESSED IN HEART, SIGNAL = 2.1; EXPRESSED IN BONE MARROW, SIGNAL = 1.7; EXPRESSED IN ADULT LIVER, SIGNAL = 1.9; EXPRESSED IN PLACENTA, SIGNAL = 1.9; EXPRESSED IN HELA, SIGNAL = 1.8; EXPRESSED IN FETAL LIVER, SIGNAL = 1.9
LPKTLGITNVRPKIWLGCQKLWLL

SEQ ID NO: 39355 - protein, 28 aa, Homo sapiens
  MAP TO AC004988.2; EXPRESSED IN PLACENTA, SIGNAL = 1.8; EXPRESSED IN BONE MARROW, SIGNAL = 1.8; EXPRESSED IN ADULT LIVER, SIGNAL = 1.7; EXPRESSED IN LUNG, SIGNAL = 1.2; EXPRESSED IN HELA, SIGNAL = 1.9; EXPRESSED IN HEART, SIGNAL = 1.8; EXPRESSED IN FETAL LIVER, SIGNAL = 1.9; EXPRESSED IN BRAIN, SIGNAL = 1.6
AVLCIPVNVDAEGLGDDVVKVVKTQPYT

SEQ ID NO: 39356 - protein, 91 aa, Homo sapiens
  MAP TO AC004148.1; EXPRESSED IN ADULT LIVER, SIGNAL = 1.8; EXPRESSED IN PLACENTA, SIGNAL =   2; EXPRESSED IN LUNG, SIGNAL = 1.7; EXPRESSED IN HEART, SIGNAL = 1.8; EXPRESSED IN BRAIN, SIGNAL = 1.9; EXPRESSED IN HELA, SIGNAL = 1.7; EXPRESSED IN FETAL LIVER, SIGNAL =   2; EXPRESSED IN BONE MARROW, SIGNAL = 1.7; EST_HUMAN HIT: AW051226.1, EVALUE 1.50e+00; SWISSPROT HIT: O00268, EVALUE 1.10e+00
MPEEAGFPPAKRFRPGSGPPSRAGSFPPGRQVVMLLTAGSGGRGGGGGRRQQPPLAQPSASPYPEAVELQRRSLPIFQARGQLLAQLRNLD

SEQ ID NO: 39357 - protein, 51 aa, Homo sapiens
  MAP TO AC004590.1; EXPRESSED IN LUNG, SIGNAL = 2.7; EXPRESSED IN FETAL LIVER, SIGNAL = 2.5; EXPRESSED IN BONE MARROW, SIGNAL = 2.2; EXPRESSED IN PLACENTA, SIGNAL = 2.5; EXPRESSED IN HELA, SIGNAL = 2.5; EXPRESSED IN HEART, SIGNAL =   2; EXPRESSED IN BRAIN, SIGNAL = 2.2; EXPRESSED IN ADULT LIVER, SIGNAL = 2.7; SWISSPROT HIT: O15438, EVALUE 4.00e-10; EST_HUMAN HIT: BF690441.1, EVALUE 2.90e+00
ASVSLKRIQQFLSQEELDPQSVERKTISPGLESPYLGCLPQSLLQKNLCFK

SEQ ID NO: 39358 - protein, 19 aa, Homo sapiens
  MAP TO AC004389.1; EXPRESSED IN PLACENTA, SIGNAL = 2.1; EXPRESSED IN LUNG, SIGNAL = 2.6; EXPRESSED IN HEART, SIGNAL = 1.6; EXPRESSED IN BRAIN, SIGNAL = 1.6; EXPRESSED IN BONE MARROW, SIGNAL = 1.8; EXPRESSED IN ADULT LIVER, SIGNAL = 2.3; EXPRESSED IN HELA, SIGNAL = 1.7; EXPRESSED IN FETAL LIVER, SIGNAL = 1.7; EST_HUMAN HIT: AI648470.1, EVALUE 3.70e+00
QQQNQTSRRKNDRACRQGF

SEQ ID NO: 39359 - protein, 40 aa, Homo sapiens
  MAP TO AC004894.1; EXPRESSED IN BRAIN, SIGNAL = 1.5; EXPRESSED IN PLACENTA, SIGNAL = 1.7; EXPRESSED IN LUNG, SIGNAL = 1.6; EXPRESSED IN HEART, SIGNAL = 1.5; EXPRESSED IN BONE MARROW, SIGNAL = 1.4; EXPRESSED IN ADULT LIVER, SIGNAL = 1.6; EXPRESSED IN HELA, SIGNAL = 1.7; EXPRESSED IN FETAL LIVER, SIGNAL = 1.4
FVCFLSYYFYKSKQKQDVEELKVDELVYLQRAVVHHMPLY

SEQ ID NO: 39360 - protein, 68 aa, Homo sapiens
  MAP TO AC006531.1; EXPRESSED IN PLACENTA, SIGNAL = 0.68; EXPRESSED IN BONE MARROW, SIGNAL = 0.89; EXPRESSED IN FETAL LIVER, SIGNAL = 0.71; EXPRESSED IN HEART, SIGNAL = 2.1; EXPRESSED IN LUNG, SIGNAL = 0.77; EXPRESSED IN BRAIN, SIGNAL = 0.8; EXPRESSED IN ADULT LIVER, SIGNAL = 0.76; EST_HUMAN HIT: BE832017.1, EVALUE 5.00e-18; SWISSPROT HIT: Q00959, EVALUE 4.00e-36
VGKWENHTLSLRHAVWPRYKSFSDCEPDDNHLSIVTLEEAPFVIVEDIDPLTETCVRNTVPCRKFVKI

SEQ ID NO: 39361 - protein, 29 aa, Homo sapiens
  MAP TO AC006531.1; EXPRESSED IN PLACENTA, SIGNAL = 0.68; EXPRESSED IN BONE MARROW, SIGNAL = 0.89; EXPRESSED IN FETAL LIVER, SIGNAL = 0.71; EXPRESSED IN HEART, SIGNAL = 2.1; EXPRESSED IN LUNG, SIGNAL = 0.77; EXPRESSED IN BRAIN, SIGNAL = 0.8; EXPRESSED IN ADULT LIVER, SIGNAL = 0.76; EST_HUMAN HIT: BE545547.1, EVALUE 4.60e+00
LPLQKSAAEESTAVSLCLCCRWASGRTIR

SEQ ID NO: 39362 - protein, 20 aa, Homo sapiens
  MAP TO AC006191.1; EXPRESSED IN ADULT LIVER, SIGNAL = 3.2; EXPRESSED IN PLACENTA, SIGNAL = 2.9; EXPRESSED IN LUNG, SIGNAL = 1.7; EXPRESSED IN FETAL LIVER, SIGNAL = 7.5; EXPRESSED IN HELA, SIGNAL = 3.8; EXPRESSED IN HEART, SIGNAL = 3.5; EXPRESSED IN BRAIN, SIGNAL = 5.2; EXPRESSED IN BONE MARROW, SIGNAL = 4.4
LSAEIDSRVGGLEEEDPPSM

SEQ ID NO: 39363 - protein, 76 aa, Homo sapiens
  MAP TO AC004130.1; EXPRESSED IN BONE MARROW, SIGNAL = 5.5; EXPRESSED IN PLACENTA, SIGNAL = 5.7; EXPRESSED IN LUNG, SIGNAL = 5.9; EXPRESSED IN HELA, SIGNAL = 6.1; EXPRESSED IN FETAL LIVER, SIGNAL = 5.9; EXPRESSED IN ADULT LIVER, SIGNAL = 6.1; EXPRESSED IN HEART, SIGNAL = 6.8; EXPRESSED IN BRAIN, SIGNAL = 5.3; SWISSPROT HIT: P26012, EVALUE 2.00e-40; EST_HUMAN HIT: AW367936.1, EVALUE 2.00e-39
MLKVHPLKKYPVDLYYLVDVSASMHNNIEKLNSVGNDLSRKMAFFSRDFRLGFGSYVDKTVSPYISIHPERIHNQC

SEQ ID NO: 39364 - protein, 27 aa, Homo sapiens
  MAP TO AC006347.2; EXPRESSED IN PLACENTA, SIGNAL = 1.3; EXPRESSED IN LUNG, SIGNAL = 1.4; EXPRESSED IN FETAL LIVER, SIGNAL = 1.5; EXPRESSED IN BONE MARROW, SIGNAL = 1.3; EXPRESSED IN HEART, SIGNAL = 1.4; EXPRESSED IN BRAIN, SIGNAL = 1.2; EXPRESSED IN ADULT LIVER, SIGNAL = 1.9
VLQGSMTQQEKEVEITRIKLNALETQK

SEQ ID NO: 39365 - protein, 27 aa, Homo sapiens
  MAP TO AC006347.2; EXPRESSED IN PLACENTA, SIGNAL = 1.3; EXPRESSED IN LUNG, SIGNAL = 1.4; EXPRESSED IN FETAL LIVER, SIGNAL = 1.5; EXPRESSED IN BONE MARROW, SIGNAL = 1.3; EXPRESSED IN HEART, SIGNAL = 1.4; EXPRESSED IN BRAIN, SIGNAL = 1.2; EXPRESSED IN ADULT LIVER, SIGNAL = 1.9
SSPRIYDTTRERSGDNKNKTECSRDTK

SEQ ID NO: 39366 - protein, 43 aa, Homo sapiens
  MAP TO AC004757.1; EXPRESSED IN PLACENTA, SIGNAL = 2.2; EXPRESSED IN LUNG, SIGNAL = 2.8; EXPRESSED IN HEART, SIGNAL = 2.2; EXPRESSED IN BONE MARROW, SIGNAL = 2.3; EXPRESSED IN ADULT LIVER, SIGNAL = 2.5; EXPRESSED IN HELA, SIGNAL = 2.5; EXPRESSED IN FETAL LIVER, SIGNAL = 2.3; EXPRESSED IN BRAIN, SIGNAL = 2.4
ELEELLFWRDCCWSSLLLSSPPPEGRAEEFSASSSYPQPAKKT

SEQ ID NO: 39367 - protein, 63 aa, Homo sapiens
  MAP TO AC004585.1; EXPRESSED IN BONE MARROW, SIGNAL =  13; EXPRESSED IN ADULT LIVER, SIGNAL =  15; EXPRESSED IN PLACENTA, SIGNAL =  13; EXPRESSED IN LUNG, SIGNAL =  12; EXPRESSED IN HELA, SIGNAL =  11; EXPRESSED IN HEART, SIGNAL =  12; EXPRESSED IN FETAL LIVER, SIGNAL =  21; EXPRESSED IN BRAIN, SIGNAL =  13; SWISSPROT HIT: O67289, EVALUE 1.20e+00
ERVKESQLSTRGHSRTIQLNISKLRLLLGLRETRSQEKLKNQGGVSRGNPEEEVVSHYRSRAD

SEQ ID NO: 39368 - protein, 27 aa, Homo sapiens
  MAP TO AC004851.1; EXPRESSED IN BRAIN, SIGNAL = 4.3; EXPRESSED IN ADULT LIVER, SIGNAL = 4.2; EXPRESSED IN PLACENTA, SIGNAL = 3.8; EXPRESSED IN LUNG, SIGNAL = 4.8; EXPRESSED IN HELA, SIGNAL = 4.3; EXPRESSED IN HEART, SIGNAL =   4; EXPRESSED IN BONE MARROW, SIGNAL = 3.8; EXPRESSED IN FETAL LIVER, SIGNAL = 4.2
MALEDGDLDRSVGPETGRDGGAAALAP

SEQ ID NO: 39369 - protein, 32 aa, Homo sapiens
  MAP TO AC005145.1; EXPRESSED IN LUNG, SIGNAL =  41; EXPRESSED IN HELA, SIGNAL =  37; EXPRESSED IN BRAIN, SIGNAL =  40; EXPRESSED IN BONE MARROW, SIGNAL =  39; EXPRESSED IN ADULT LIVER, SIGNAL =  31; EXPRESSED IN PLACENTA, SIGNAL =  36; EXPRESSED IN HEART, SIGNAL =  33; EXPRESSED IN FETAL LIVER, SIGNAL =  35
KVFTEFTTAMFVFFSSSIVDSSSYIQSSLIQQ

SEQ ID NO: 39370 - protein, 29 aa, Homo sapiens
  MAP TO AC002485.1; EXPRESSED IN LUNG, SIGNAL = 1.2; EXPRESSED IN BONE MARROW, SIGNAL = 1.1; EXPRESSED IN ADULT LIVER, SIGNAL = 1.1; EXPRESSED IN PLACENTA, SIGNAL = 1.1; EXPRESSED IN HEART, SIGNAL = 1.3; EXPRESSED IN FETAL LIVER, SIGNAL = 1.2; EXPRESSED IN BRAIN, SIGNAL = 1.1
VANFFKSKSGIYEEKNTKTQGTLYLVVQV

SEQ ID NO: 39371 - protein, 42 aa, Homo sapiens
  MAP TO AC005245.1; EXPRESSED IN LUNG, SIGNAL = 2.1; EXPRESSED IN FETAL LIVER, SIGNAL =   2; EXPRESSED IN PLACENTA, SIGNAL = 1.9; EXPRESSED IN HELA, SIGNAL =   2; EXPRESSED IN BRAIN, SIGNAL = 2.3; EXPRESSED IN BONE MARROW, SIGNAL =   4; EXPRESSED IN ADULT LIVER, SIGNAL = 2.1; EXPRESSED IN HEART, SIGNAL =   2
SVEAGGTGCHVGPHREAPGGSGGRGRGGSISKGLYWGFHRRN

SEQ ID NO: 39372 - protein, 52 aa, Homo sapiens
  MAP TO AC002524.1; EXPRESSED IN PLACENTA, SIGNAL = 2.5; EXPRESSED IN LUNG, SIGNAL = 2.8; EXPRESSED IN HEART, SIGNAL = 2.2; EXPRESSED IN FETAL LIVER, SIGNAL = 2.5; EXPRESSED IN BONE MARROW, SIGNAL = 2.5; EXPRESSED IN HELA, SIGNAL = 2.5; EXPRESSED IN BRAIN, SIGNAL = 2.4; EXPRESSED IN ADULT LIVER, SIGNAL = 2.3; SWISSPROT HIT: P52483, EVALUE 2.00e-24; EST_HUMAN HIT: BE562759.1, EVALUE 3.00e-23
KELAEITLDPPPNCSAGPKGDNICEWRSTILGPLGSVYEGGVFFLDITFSSD

SEQ ID NO: 39373 - protein, 28 aa, Homo sapiens
  MAP TO AC004168.2; EXPRESSED IN LUNG, SIGNAL = 1.9; EXPRESSED IN HEART, SIGNAL = 1.8; EXPRESSED IN FETAL LIVER, SIGNAL = 1.7; EXPRESSED IN BRAIN, SIGNAL = 2.1; EXPRESSED IN HELA, SIGNAL = 1.7; EXPRESSED IN BONE MARROW, SIGNAL = 1.7; EXPRESSED IN PLACENTA, SIGNAL = 1.7; EXPRESSED IN ADULT LIVER, SIGNAL = 1.7
INIIYVGGNVLPTELGIVGAVWLCITGN

SEQ ID NO: 39374 - protein, 65 aa, Homo sapiens
  MAP TO AC005908.1; EXPRESSED IN HELA, SIGNAL = 2.1; EXPRESSED IN BRAIN, SIGNAL = 2.2; EXPRESSED IN BONE MARROW, SIGNAL =  15; EXPRESSED IN ADULT LIVER, SIGNAL = 2.2; EXPRESSED IN PLACENTA, SIGNAL = 2.3; EXPRESSED IN HEART, SIGNAL = 1.8; EXPRESSED IN FETAL LIVER, SIGNAL = 2.4; EXPRESSED IN LUNG, SIGNAL = 2.3; EST_HUMAN HIT: AL047570.1, EVALUE 8.70e-01; SWISSPROT HIT: P76639, EVALUE 8.90e-01
GPDGSQAKAAAASYLAEPPGSPTPGPFSYTKASVVLFLPNPRPNIFKLHSKEQLAECHQYLQSNM

SEQ ID NO: 39375 - protein, 64 aa, Homo sapiens
  MAP TO AC005908.1; EXPRESSED IN HELA, SIGNAL = 2.1; EXPRESSED IN BRAIN, SIGNAL = 2.2; EXPRESSED IN BONE MARROW, SIGNAL =  15; EXPRESSED IN ADULT LIVER, SIGNAL = 2.2; EXPRESSED IN PLACENTA, SIGNAL = 2.3; EXPRESSED IN HEART, SIGNAL = 1.8; EXPRESSED IN FETAL LIVER, SIGNAL = 2.4; EXPRESSED IN LUNG, SIGNAL = 2.3; EST_HUMAN HIT: AA297117.1, EVALUE 3.00e-01; SWISSPROT HIT: Q95203, EVALUE 1.00e-03
GQMGAKPRLQQPATWLSLQAAPHLGRSPTQKPLWSYSSLTQGPIFLNCIPKNNSLSATNTCKAI

SEQ ID NO: 39376 - protein, 34 aa, Homo sapiens
  MAP TO AC004098.1; EXPRESSED IN LUNG, SIGNAL = 3.7; EXPRESSED IN HEART, SIGNAL = 2.8; EXPRESSED IN FETAL LIVER, SIGNAL = 3.2; EXPRESSED IN BRAIN, SIGNAL = 3.1; EXPRESSED IN HELA, SIGNAL = 3.3; EXPRESSED IN BONE MARROW, SIGNAL = 3.7; EXPRESSED IN ADULT LIVER, SIGNAL = 3.6; EXPRESSED IN PLACENTA, SIGNAL = 3.5; EST_HUMAN HIT: AW615804.1, EVALUE 2.00e-13; SWISSPROT HIT: O93477, EVALUE 3.80e+00
TEIFPENPSPASTRIGEKVQWEACRLYRSEENSA

SEQ ID NO: 39377 - protein, 54 aa, Homo sapiens
  MAP TO AC004477.1; EXPRESSED IN BONE MARROW, SIGNAL = 7.4; EXPRESSED IN ADULT LIVER, SIGNAL = 7.9; EXPRESSED IN LUNG, SIGNAL =   8; EXPRESSED IN HELA, SIGNAL =   7; EXPRESSED IN PLACENTA, SIGNAL = 7.6; EXPRESSED IN HEART, SIGNAL = 7.1; EXPRESSED IN FETAL LIVER, SIGNAL =   7; EXPRESSED IN BRAIN, SIGNAL = 7.5; SWISSPROT HIT: P50198, EVALUE 8.00e+00
FLPLSFSPSSSSFSAICPTLTKSIPFSISSVSLLSGVFPLTPAISFCFIHLAQT

SEQ ID NO: 39378 - protein, 163 aa, Homo sapiens
  MAP TO AC001226.1; EXPRESSED IN PLACENTA, SIGNAL = 4.5; EXPRESSED IN BRAIN, SIGNAL = 6.3; EXPRESSED IN BONE MARROW, SIGNAL =   5; EXPRESSED IN ADULT LIVER, SIGNAL = 5.8; EXPRESSED IN LUNG, SIGNAL = 3.6; EXPRESSED IN HELA, SIGNAL = 3.9; EXPRESSED IN HEART, SIGNAL = 4.2; EXPRESSED IN FETAL LIVER, SIGNAL = 5.3; EST_HUMAN HIT: H01255.1, EVALUE 5.00e-59; SWISSPROT HIT: O75503, EVALUE 2.00e-96
AKWVKQDNETGIYYETWNVKASPEKGAETWFDSYDCSKFVLRTFNKLAEFGAEFKNIETNYTRIFLYSGEPTYLGNETSVFGPTGNKTLGLAIKRFYYPFKPHLPTKEFLLSLLQIFDAVIVHKQFYLFYNFEYWFLPMKFPFIKITYEEIPLPIRNKTLSGL

SEQ ID NO: 39379 - protein, 25 aa, Homo sapiens
  MAP TO AC005181.1; EXPRESSED IN BONE MARROW, SIGNAL = 3.1; EXPRESSED IN PLACENTA, SIGNAL = 3.6; EXPRESSED IN LUNG, SIGNAL = 4.1; EXPRESSED IN HELA, SIGNAL = 3.4; EXPRESSED IN FETAL LIVER, SIGNAL = 2.9; EXPRESSED IN ADULT LIVER, SIGNAL = 2.9; EXPRESSED IN HEART, SIGNAL = 3.3; EXPRESSED IN BRAIN, SIGNAL = 3.4; EST_HUMAN HIT: BE302970.1, EVALUE 5.00e-03
SFGCMVTHQLDQLFDHELDPLKVLK

SEQ ID NO: 39380 - protein, 17 aa, Homo sapiens
  MAP TO AC002038.1; EXPRESSED IN PLACENTA, SIGNAL = 4.4; EXPRESSED IN HELA, SIGNAL = 5.2; EXPRESSED IN HEART, SIGNAL = 6.1; EXPRESSED IN FETAL LIVER, SIGNAL = 5.2; EXPRESSED IN BRAIN, SIGNAL = 6.5; EXPRESSED IN ADULT LIVER, SIGNAL =   4; EXPRESSED IN LUNG, SIGNAL = 5.8; EXPRESSED IN BONE MARROW, SIGNAL = 5.6; EST_HUMAN HIT: BE252337.1, EVALUE 4.20e-01
WRPQKSLRRNTVTFALI

SEQ ID NO: 39381 - protein, 62 aa, Homo sapiens
  MAP TO AC006206.3; EXPRESSED IN PLACENTA, SIGNAL = 2.9; EXPRESSED IN LUNG, SIGNAL = 2.5; EXPRESSED IN HELA, SIGNAL = 4.2; EXPRESSED IN FETAL LIVER, SIGNAL = 4.3; EXPRESSED IN HEART, SIGNAL = 3.3; EXPRESSED IN BRAIN, SIGNAL = 3.9; EXPRESSED IN BONE MARROW, SIGNAL = 3.9; EXPRESSED IN ADULT LIVER, SIGNAL = 3.1; SWISSPROT HIT: Q00335, EVALUE 2.00e+00; EST_HUMAN HIT: BE266641.1, EVALUE 5.90e+00
VNLQLCRRGLGKELLAGILMPLVRLPTVSVMSEWLGVKEQLLSKPFLKFWEPLVKEGVPTAL

SEQ ID NO: 39382 - protein, 55 aa, Homo sapiens
  MAP TO AC006241.1; EXPRESSED IN PLACENTA, SIGNAL = 4.4; EXPRESSED IN LUNG, SIGNAL = 5.1; EXPRESSED IN HEART, SIGNAL = 3.7; EXPRESSED IN FETAL LIVER, SIGNAL = 3.7; EXPRESSED IN BRAIN, SIGNAL = 5.1; EXPRESSED IN BONE MARROW, SIGNAL = 4.4; EXPRESSED IN ADULT LIVER, SIGNAL = 4.2; EXPRESSED IN HELA, SIGNAL = 4.4; SWISSPROT HIT: Q62011, EVALUE 4.60e+00; EST_HUMAN HIT: AI972538.1, EVALUE 2.80e+00
MADLDHTENRSNPVLFPSLGSVFSWQHGQGPTLHTALTGQKSAALSCQEALQSGP

SEQ ID NO: 39383 - protein, 93 aa, Homo sapiens
  MAP TO AC005151.1; EXPRESSED IN PLACENTA, SIGNAL = 1.6; EXPRESSED IN HEART, SIGNAL = 1.7; EXPRESSED IN BRAIN, SIGNAL = 2.2; EXPRESSED IN ADULT LIVER, SIGNAL = 1.9; EXPRESSED IN LUNG, SIGNAL = 1.6; EXPRESSED IN FETAL LIVER, SIGNAL = 2.1; EXPRESSED IN BONE MARROW, SIGNAL = 1.9; EST_HUMAN HIT: AA631223.1, EVALUE 3.40e-01; SWISSPROT HIT: O62537, EVALUE 5.40e+00
TQMWCPWRQQTDPTSSFTSQPTGLWSWLSGRAVTPSNSMPPSCCTGGHGRQAWWPWSPWPSPAPSSMCRARCWPCGCTNTQRCSAGAHSSAFW

SEQ ID NO: 39384 - protein, 31 aa, Homo sapiens
  MAP TO AC005151.1; EXPRESSED IN PLACENTA, SIGNAL = 1.6; EXPRESSED IN HEART, SIGNAL = 1.7; EXPRESSED IN BRAIN, SIGNAL = 2.2; EXPRESSED IN ADULT LIVER, SIGNAL = 1.9; EXPRESSED IN LUNG, SIGNAL = 1.6; EXPRESSED IN FETAL LIVER, SIGNAL = 2.1; EXPRESSED IN BONE MARROW, SIGNAL = 1.9
VLCRPRCGVPGGSRQTQLLPSRHSQRVSGAG

SEQ ID NO: 39385 - protein, 78 aa, Homo sapiens
  MAP TO AC004687.1; EXPRESSED IN LUNG, SIGNAL =   2; EXPRESSED IN BRAIN, SIGNAL = 1.6; EXPRESSED IN ADULT LIVER, SIGNAL = 1.7; EXPRESSED IN PLACENTA, SIGNAL = 1.7; EXPRESSED IN HELA, SIGNAL = 1.7; EXPRESSED IN HEART, SIGNAL =   2; EXPRESSED IN BONE MARROW, SIGNAL = 8.1; EXPRESSED IN FETAL LIVER, SIGNAL = 3.3; EST_HUMAN HIT: AW467424.1, EVALUE 2.00e-38; SWISSPROT HIT: P05164, EVALUE 2.00e-42
YNAWRRFCGLPQPETVGQLGTVLRNLKLARKLMEQYGTPNNIDIWMGGVSEPLKRKGRVGPLLACIIGTQFRKLRDGD

SEQ ID NO: 39386 - protein, 68 aa, Homo sapiens
  MAP TO AC005252.1; EXPRESSED IN LUNG, SIGNAL = 1.6; EXPRESSED IN FETAL LIVER, SIGNAL = 1.6; EXPRESSED IN BRAIN, SIGNAL = 1.5; EXPRESSED IN BONE MARROW, SIGNAL = 1.4; EXPRESSED IN PLACENTA, SIGNAL = 1.5; EXPRESSED IN HEART, SIGNAL = 1.6; EXPRESSED IN ADULT LIVER, SIGNAL = 1.6; EST_HUMAN HIT: BE387997.1, EVALUE 8.40e-01; SWISSPROT HIT: Q39054, EVALUE 3.40e+00
TAGRHCPIPGSLLGAEPCLLRACHPEEEGAPSDSLKDIKPGKPLTFGLSSRKDTIPQTGIIPIVHSLP

SEQ ID NO: 39387 - protein, 48 aa, Homo sapiens
  MAP TO AC004593.1; EXPRESSED IN BRAIN, SIGNAL = 3.1; EXPRESSED IN BONE MARROW, SIGNAL = 2.5; EXPRESSED IN LUNG, SIGNAL = 3.2; EXPRESSED IN ADULT LIVER, SIGNAL = 3.5; EXPRESSED IN PLACENTA, SIGNAL = 2.9; EXPRESSED IN HELA, SIGNAL = 2.5; EXPRESSED IN HEART, SIGNAL = 2.8; EXPRESSED IN FETAL LIVER, SIGNAL = 3.1; SWISSPROT HIT: P39066, EVALUE 2.80e+00; EST_HUMAN HIT: H70646.1, EVALUE 3.00e+00
MLSAISDIEKSLSLSNHFLCARIMLNTLYTLSYTHNNPEVRIVILIFH

SEQ ID NO: 39388 - protein, 57 aa, Homo sapiens
  MAP TO AC002303.1; EXPRESSED IN PLACENTA, SIGNAL =   2; EXPRESSED IN BRAIN, SIGNAL =   2; EXPRESSED IN ADULT LIVER, SIGNAL = 1.7; EXPRESSED IN LUNG, SIGNAL = 1.9; EXPRESSED IN HELA, SIGNAL = 1.6; EXPRESSED IN HEART, SIGNAL = 1.5; EXPRESSED IN FETAL LIVER, SIGNAL = 1.9; EXPRESSED IN BONE MARROW, SIGNAL = 1.7; EST_HUMAN HIT: BE514271.1, EVALUE 2.00e-15; SWISSPROT HIT: Q04996, EVALUE 7.00e-01
GMERKLCSPKPPPTKASLPTDPPGWGCPDLVCYTDYLQTVICILEMWNLHPSTLTLT

SEQ ID NO: 39389 - protein, 48 aa, Homo sapiens
  MAP TO AC004827.1; EXPRESSED IN PLACENTA, SIGNAL = 8.2; EXPRESSED IN LUNG, SIGNAL =  10; EXPRESSED IN FETAL LIVER, SIGNAL = 7.5; EXPRESSED IN BRAIN, SIGNAL = 9.6; EXPRESSED IN ADULT LIVER, SIGNAL =   9; EXPRESSED IN HELA, SIGNAL = 8.2; EXPRESSED IN HEART, SIGNAL = 7.8; EXPRESSED IN BONE MARROW, SIGNAL =   8; EST_HUMAN HIT: BF032018.1, EVALUE 8.00e-20; SWISSPROT HIT: Q99972, EVALUE 9.40e-01
VETEIQRVSEAYENLVKSSSKREALEKAMRNKLEGEIRRMHDFNRDLR

SEQ ID NO: 39390 - protein, 72 aa, Homo sapiens
  MAP TO AC004150.8; EXPRESSED IN PLACENTA, SIGNAL = 4.3; EXPRESSED IN LUNG, SIGNAL = 4.3; EXPRESSED IN HELA, SIGNAL = 4.4; EXPRESSED IN FETAL LIVER, SIGNAL = 4.2; EXPRESSED IN BRAIN, SIGNAL = 4.7; EXPRESSED IN BONE MARROW, SIGNAL = 3.9; EXPRESSED IN ADULT LIVER, SIGNAL = 4.5; EXPRESSED IN HEART, SIGNAL = 4.2; EST_HUMAN HIT: BE261742.1, EVALUE 2.00e-36; SWISSPROT HIT: P35575, EVALUE 7.00e-05
MESTLGAGIVIAEALQNQLAWLENVWLWITFLGDPKILFLFYFPAAYYASRRVGIAVLWISLITEWLNLIFK

SEQ ID NO: 39391 - protein, 24 aa, Homo sapiens
  MAP TO AC004150.8; EXPRESSED IN PLACENTA, SIGNAL = 4.3; EXPRESSED IN LUNG, SIGNAL = 4.3; EXPRESSED IN HELA, SIGNAL = 4.4; EXPRESSED IN FETAL LIVER, SIGNAL = 4.2; EXPRESSED IN BRAIN, SIGNAL = 4.7; EXPRESSED IN BONE MARROW, SIGNAL = 3.9; EXPRESSED IN ADULT LIVER, SIGNAL = 4.5; EXPRESSED IN HEART, SIGNAL = 4.2; EST_HUMAN HIT: BE797269.1, EVALUE 9.00e-08
SALEQAGAWSAAGPPWSPRWARAS

SEQ ID NO: 39392 - protein, 27 aa, Homo sapiens
  MAP TO AC005959.1; EXPRESSED IN PLACENTA, SIGNAL = 1.7; EXPRESSED IN LUNG, SIGNAL = 1.9; EXPRESSED IN BONE MARROW, SIGNAL = 1.6; EXPRESSED IN ADULT LIVER, SIGNAL = 1.5; EXPRESSED IN HELA, SIGNAL = 1.8; EXPRESSED IN HEART, SIGNAL = 1.8; EXPRESSED IN FETAL LIVER, SIGNAL = 1.7; EXPRESSED IN BRAIN, SIGNAL = 1.7; EST_HUMAN HIT: T95763.1, EVALUE 2.10e+00
FIDDDDDDDDDDDKEIQGNVNTLTVHS

SEQ ID NO: 39393 - protein, 32 aa, Homo sapiens
  MAP TO AC005529.7; EXPRESSED IN LUNG, SIGNAL =   2; EXPRESSED IN HEART, SIGNAL = 3.9; EXPRESSED IN FETAL LIVER, SIGNAL = 2.4; EXPRESSED IN BRAIN, SIGNAL = 1.7; EXPRESSED IN BONE MARROW, SIGNAL = 1.3; EXPRESSED IN ADULT LIVER, SIGNAL =   3; EXPRESSED IN PLACENTA, SIGNAL = 1.7
PPPSPSPSSWASCSSSAPSIKARTLSTTTSTR

SEQ ID NO: 39394 - protein, 18 aa, Homo sapiens
  MAP TO AC005529.7; EXPRESSED IN LUNG, SIGNAL =   2; EXPRESSED IN HEART, SIGNAL = 3.9; EXPRESSED IN FETAL LIVER, SIGNAL = 2.4; EXPRESSED IN BRAIN, SIGNAL = 1.7; EXPRESSED IN BONE MARROW, SIGNAL = 1.3; EXPRESSED IN ADULT LIVER, SIGNAL =   3; EXPRESSED IN PLACENTA, SIGNAL = 1.7; EST_HUMAN HIT: BF696164.1, EVALUE 4.00e-03
AGPRSGMAQALTPSLMWS

SEQ ID NO: 39395 - protein, 49 aa, Homo sapiens
  MAP TO AC006078.1; EXPRESSED IN BONE MARROW, SIGNAL = 1.5; EXPRESSED IN ADULT LIVER, SIGNAL = 1.5; EXPRESSED IN HEART, SIGNAL = 1.5; EXPRESSED IN FETAL LIVER, SIGNAL = 1.6; EXPRESSED IN BRAIN, SIGNAL = 1.6; EXPRESSED IN PLACENTA, SIGNAL = 1.3; EXPRESSED IN LUNG, SIGNAL = 1.7
AFLLNVCPLIFQMSSIPHIEEEKSRAEKRESKDYGGKGGTFNSVLWTLA

SEQ ID NO: 39396 - protein, 50 aa, Homo sapiens
  MAP TO AC006078.1; EXPRESSED IN BONE MARROW, SIGNAL = 1.5; EXPRESSED IN ADULT LIVER, SIGNAL = 1.5; EXPRESSED IN HEART, SIGNAL = 1.5; EXPRESSED IN FETAL LIVER, SIGNAL = 1.6; EXPRESSED IN BRAIN, SIGNAL = 1.6; EXPRESSED IN PLACENTA, SIGNAL = 1.3; EXPRESSED IN LUNG, SIGNAL = 1.7; SWISSPROT HIT: P07129, EVALUE 6.20e+00
RPSFSTSALSSFKCPLFRILRKKRVELKRGKAKIMGGKVGLLTAYCGPWL

SEQ ID NO: 39397 - protein, 103 aa, Homo sapiens
  MAP TO AC005913.1; EXPRESSED IN LUNG, SIGNAL =  15; EXPRESSED IN FETAL LIVER, SIGNAL = 1.7e+02; EXPRESSED IN BONE MARROW, SIGNAL =  28; EXPRESSED IN PLACENTA, SIGNAL =  52; EXPRESSED IN HELA, SIGNAL =  23; EXPRESSED IN HEART, SIGNAL =  12; EXPRESSED IN BRAIN, SIGNAL =  16; EXPRESSED IN ADULT LIVER, SIGNAL = 1.3e+02; SWISSPROT HIT: Q61941, EVALUE 3.60e+00; EST_HUMAN HIT: BF237732.1, EVALUE 1.00e-43
EVTLQEVTEMGVRASRTQGMKIQKSLIQFSLRGHGGFHGVRGLTPLIFSWLLDVLEESTAATLVLHLQETLVALALFLSQFAEEVAHAFQSHMIAVEIEAQRE

SEQ ID NO: 39398 - protein, 148 aa, Homo sapiens
  MAP TO AC005913.1; EXPRESSED IN LUNG, SIGNAL =  15; EXPRESSED IN FETAL LIVER, SIGNAL = 1.7e+02; EXPRESSED IN BONE MARROW, SIGNAL =  28; EXPRESSED IN PLACENTA, SIGNAL =  52; EXPRESSED IN HELA, SIGNAL =  23; EXPRESSED IN HEART, SIGNAL =  12; EXPRESSED IN BRAIN, SIGNAL =  16; EXPRESSED IN ADULT LIVER, SIGNAL = 1.3e+02; SWISSPROT HIT: P02792, EVALUE 3.00e-69; EST_HUMAN HIT: BF315364.1, EVALUE 1.00e-75
FLWLAPSCRPTMSSQIRQNYSTDVDAAVNSLVNLYLQASYTYLSLGFYFDGDHVALEGVSHFFRELAEEKCKGYERLLKMQNQRGSRALFQDIKKPAEDEWGKTPDTMKAAMAPERKLNQALLDLHALGSARTDPHLCDFLESHFLDE

SEQ ID NO: 39399 - protein, 85 aa, Homo sapiens
  MAP TO AC002539.1; EXPRESSED IN PLACENTA, SIGNAL =   2; EXPRESSED IN LUNG, SIGNAL = 2.6; EXPRESSED IN FETAL LIVER, SIGNAL = 1.9; EXPRESSED IN BONE MARROW, SIGNAL = 2.2; EXPRESSED IN ADULT LIVER, SIGNAL = 2.1; EXPRESSED IN HELA, SIGNAL = 2.2; EXPRESSED IN HEART, SIGNAL = 1.7; EXPRESSED IN BRAIN, SIGNAL = 2.3
FYPWKKEKEKEEEEEEEEEKEEEEEEEEGEGKGRRRKNKKKKKRRRRRRRGEGEGEGEEEEEEEEEEEEEEKKKSSSSIILAPTQ

SEQ ID NO: 39400 - protein, 42 aa, Homo sapiens
  MAP TO AC002539.1; EXPRESSED IN PLACENTA, SIGNAL =   2; EXPRESSED IN LUNG, SIGNAL = 2.6; EXPRESSED IN FETAL LIVER, SIGNAL = 1.9; EXPRESSED IN BONE MARROW, SIGNAL = 2.2; EXPRESSED IN ADULT LIVER, SIGNAL = 2.1; EXPRESSED IN HELA, SIGNAL = 2.2; EXPRESSED IN HEART, SIGNAL = 1.7; EXPRESSED IN BRAIN, SIGNAL = 2.3
FFCLVLSLEEGEGERGGGGGGGGEGRRRRRRGGGGEGEEKEE

SEQ ID NO: 39401 - protein, 133 aa, Homo sapiens
  MAP TO AC006210.1; EXPRESSED IN BONE MARROW, SIGNAL = 1.6; EXPRESSED IN ADULT LIVER, SIGNAL = 1.2; EXPRESSED IN LUNG, SIGNAL = 0.84; EXPRESSED IN HELA, SIGNAL = 1.7; EXPRESSED IN PLACENTA, SIGNAL = 1.2; EXPRESSED IN HEART, SIGNAL = 1.5; EXPRESSED IN FETAL LIVER, SIGNAL = 1.7; EXPRESSED IN BRAIN, SIGNAL = 1.6; EST_HUMAN HIT: BF326822.1, EVALUE 6.00e-24; SWISSPROT HIT: Q19196, EVALUE 1.20e+00
TTFIFSNKAEIVSMLQKDHKFLYEVFAQLKDETTHDDRRCELLFFFKELCSFSQALQPQSKDALFETLIQLGVLPALKIVMIRDDLQVRSAAAVICAYLVEYSPSRIREFIISEAHVCKDSDLFINVIIKQMI

SEQ ID NO: 39402 - protein, 43 aa, Homo sapiens
  MAP TO AC004502.1; EXPRESSED IN PLACENTA, SIGNAL = 2.2; EXPRESSED IN LUNG, SIGNAL = 2.5; EXPRESSED IN HELA, SIGNAL = 2.1; EXPRESSED IN FETAL LIVER, SIGNAL = 2.2; EXPRESSED IN HEART, SIGNAL = 2.2; EXPRESSED IN BRAIN, SIGNAL = 2.4; EXPRESSED IN BONE MARROW, SIGNAL = 2.3; EXPRESSED IN ADULT LIVER, SIGNAL = 2.6; SWISSPROT HIT: Q9UKP4, EVALUE 2.00e-03; EST_HUMAN HIT: AW938686.1, EVALUE 2.40e+00
VLLFQDQNYGLHYEYTIPSDPLPENQSSKAPEPLFMWTHTSWE

SEQ ID NO: 39403 - protein, 35 aa, Homo sapiens
  MAP TO AC004166.4; EXPRESSED IN LUNG, SIGNAL = 2.4; EXPRESSED IN BRAIN, SIGNAL = 2.5; EXPRESSED IN BONE MARROW, SIGNAL = 2.4; EXPRESSED IN PLACENTA, SIGNAL = 2.3; EXPRESSED IN HELA, SIGNAL = 2.8; EXPRESSED IN HEART, SIGNAL = 2.1; EXPRESSED IN FETAL LIVER, SIGNAL = 2.2; EXPRESSED IN ADULT LIVER, SIGNAL = 2.2; EST_HUMAN HIT: AA770647.1, EVALUE 6.00e-14; SWISSPROT HIT: P45444, EVALUE 4.90e+00
NFIPMLMADIRKEERNHLCRSSRRTWTILDRAEYS

SEQ ID NO: 39404 - protein, 70 aa, Homo sapiens
  MAP TO AC004703.1; EXPRESSED IN PLACENTA, SIGNAL = 9.5; EXPRESSED IN LUNG, SIGNAL =  15; EXPRESSED IN FETAL LIVER, SIGNAL =  21; EXPRESSED IN BRAIN, SIGNAL = 9.8; EXPRESSED IN ADULT LIVER, SIGNAL =  19; EXPRESSED IN HELA, SIGNAL =  15; EXPRESSED IN HEART, SIGNAL =  13; EXPRESSED IN BONE MARROW, SIGNAL =  19; SWISSPROT HIT: P02383, EVALUE 3.00e-25; EST_HUMAN HIT: BE906293.1, EVALUE 2.00e-24
MTKKRRNNGRAKKGRGHVQPIRCTNCARCVPKDKAIKKFVIRNIVEAAAVRDISEVSVFDAYVLPKLYVK

SEQ ID NO: 39405 - protein, 78 aa, Homo sapiens
  MAP TO AC006329.2; EXPRESSED IN ADULT LIVER, SIGNAL = 9.5; EXPRESSED IN LUNG, SIGNAL = 6.1; EXPRESSED IN HEART, SIGNAL =  73; EXPRESSED IN FETAL LIVER, SIGNAL =   2; SWISSPROT HIT: Q64726, EVALUE 6.00e-27; EST_HUMAN HIT: BF677910.1, EVALUE 2.00e-39
HYSLTYLYTGLSRPGKGTHRLQGTVFLNGRAFFHYNSEDRKPEPLGPWRHVEGVEDWEKQSQVQKAREDIFMETLNNI

SEQ ID NO: 39406 - protein, 125 aa, Homo sapiens
  MAP TO AC004797.1; EXPRESSED IN PLACENTA, SIGNAL = 1.7; EXPRESSED IN LUNG, SIGNAL = 1.8; EXPRESSED IN FETAL LIVER, SIGNAL =   2; EXPRESSED IN BONE MARROW, SIGNAL = 1.6; EXPRESSED IN ADULT LIVER, SIGNAL = 1.9; EXPRESSED IN HEART, SIGNAL = 1.6; EXPRESSED IN BRAIN, SIGNAL = 1.5; SWISSPROT HIT: P55709, EVALUE 3.80e+00; EST_HUMAN HIT: AI989483.1, EVALUE 3.00e-57
LGHLPMSHTASSCQELVENCAVHVAGMAQEDSRRGQVPSSFYHGANQELDLSTKVYKRESGSPYSVLVDTKMSKPHLHETEEQPYFRETRAVSDVHAVKEDRENSDDTEEEEEEVSYKREQIIVE

SEQ ID NO: 39407 - protein, 25 aa, Homo sapiens
  MAP TO AC005972.1; EXPRESSED IN BONE MARROW, SIGNAL = 1.5; EXPRESSED IN ADULT LIVER, SIGNAL = 1.5; EXPRESSED IN HEART, SIGNAL = 1.5; EXPRESSED IN FETAL LIVER, SIGNAL = 1.5; EXPRESSED IN BRAIN, SIGNAL = 1.4; EXPRESSED IN PLACENTA, SIGNAL = 1.5; EXPRESSED IN LUNG, SIGNAL = 1.4; EST_HUMAN HIT: AI538274.1, EVALUE 8.20e-02
NKLIWLMVLEVEKSKIKALNLVRAF

SEQ ID NO: 39408 - protein, 38 aa, Homo sapiens
  MAP TO AC006095.1; EXPRESSED IN HEART, SIGNAL = 2.7; EXPRESSED IN BONE MARROW, SIGNAL = 2.7; EXPRESSED IN ADULT LIVER, SIGNAL = 2.3; EXPRESSED IN HELA, SIGNAL = 2.8; EXPRESSED IN FETAL LIVER, SIGNAL = 2.7; EXPRESSED IN BRAIN, SIGNAL =   3; EXPRESSED IN PLACENTA, SIGNAL = 2.4; EXPRESSED IN LUNG, SIGNAL = 2.8; SWISSPROT HIT: Q37875, EVALUE 6.40e+00; EST_HUMAN HIT: BF246051.1, EVALUE 5.60e+00
TTEMLDMGCHQILRNVSKSLLDMLHKWSHRTPWCFLCT

SEQ ID NO: 39409 - protein, 29 aa, Homo sapiens
  MAP TO AC005544.1; EXPRESSED IN PLACENTA, SIGNAL = 2.2; EXPRESSED IN ADULT LIVER, SIGNAL = 3.4; EXPRESSED IN LUNG, SIGNAL = 2.1; EXPRESSED IN HEART, SIGNAL = 1.9; EXPRESSED IN FETAL LIVER, SIGNAL = 2.3; EXPRESSED IN BRAIN, SIGNAL = 1.7; EXPRESSED IN BONE MARROW, SIGNAL = 2.3; EXPRESSED IN HELA, SIGNAL = 1.8; EST_HUMAN HIT: AA359454.1, EVALUE 2.00e-03
QHIHLQHGLTHVLNPLLRPTALLVGGGGG

SEQ ID NO: 39410 - protein, 67 aa, Homo sapiens
  MAP TO AC006226.4; EXPRESSED IN PLACENTA, SIGNAL = 4.1; EXPRESSED IN LUNG, SIGNAL = 2.8; EXPRESSED IN HELA, SIGNAL = 4.2; EXPRESSED IN FETAL LIVER, SIGNAL = 2.8; EXPRESSED IN HEART, SIGNAL = 4.8; EXPRESSED IN BRAIN, SIGNAL = 6.9; EXPRESSED IN BONE MARROW, SIGNAL = 1.8; EXPRESSED IN ADULT LIVER, SIGNAL = 2.5; EST_HUMAN HIT: BE242222.1, EVALUE 6.00e-29; SWISSPROT HIT: P34058, EVALUE 1.00e-29
MPEEVHLGEKEVETFAFQAEIAQLMSLIINTFYSNKEIFLWELISNASDALDKIRYESLTDPSKLDS

SEQ ID NO: 39411 - protein, 36 aa, Homo sapiens
  MAP TO AC006226.4; EXPRESSED IN PLACENTA, SIGNAL = 4.1; EXPRESSED IN LUNG, SIGNAL = 2.8; EXPRESSED IN HELA, SIGNAL = 4.2; EXPRESSED IN FETAL LIVER, SIGNAL = 2.8; EXPRESSED IN HEART, SIGNAL = 4.8; EXPRESSED IN BRAIN, SIGNAL = 6.9; EXPRESSED IN BONE MARROW, SIGNAL = 1.8; EXPRESSED IN ADULT LIVER, SIGNAL = 2.5; EST_HUMAN HIT: BE242423.1, EVALUE 9.00e-13
LERRRWRLLPFRQKLPNSCLLSSIPSIPTRRFSFGS

SEQ ID NO: 39412 - protein, 48 aa, Homo sapiens
  MAP TO AC004836.2; EXPRESSED IN PLACENTA, SIGNAL = 2.8; EXPRESSED IN LUNG, SIGNAL = 3.2; EXPRESSED IN FETAL LIVER, SIGNAL = 2.3; EXPRESSED IN BRAIN, SIGNAL = 2.7; EXPRESSED IN BONE MARROW, SIGNAL = 2.6; EXPRESSED IN ADULT LIVER, SIGNAL = 2.9; EXPRESSED IN HELA, SIGNAL = 2.6; EXPRESSED IN HEART, SIGNAL = 2.7; EST_HUMAN HIT: AW895972.1, EVALUE 5.10e+00
RTQACDIGSVDWMQYDEISVWKSEKPGRSCCMELFLVMGRNMVEGHGT

SEQ ID NO: 39413 - protein, 29 aa, Homo sapiens
  MAP TO AC004836.2; EXPRESSED IN PLACENTA, SIGNAL = 2.8; EXPRESSED IN LUNG, SIGNAL = 3.2; EXPRESSED IN FETAL LIVER, SIGNAL = 2.3; EXPRESSED IN BRAIN, SIGNAL = 2.7; EXPRESSED IN BONE MARROW, SIGNAL = 2.6; EXPRESSED IN ADULT LIVER, SIGNAL = 2.9; EXPRESSED IN HELA, SIGNAL = 2.6; EXPRESSED IN HEART, SIGNAL = 2.7
GSMSLHHVPPHHQEQFHAAASPWLFTLPD

SEQ ID NO: 39414 - protein, 57 aa, Homo sapiens
  MAP TO AC002529.1; EXPRESSED IN PLACENTA, SIGNAL = 1.4; EXPRESSED IN LUNG, SIGNAL = 1.7; EXPRESSED IN HELA, SIGNAL = 1.7; EXPRESSED IN FETAL LIVER, SIGNAL = 1.5; EXPRESSED IN BRAIN, SIGNAL = 1.6; EXPRESSED IN ADULT LIVER, SIGNAL = 1.2; EXPRESSED IN HEART, SIGNAL = 1.9; EXPRESSED IN BONE MARROW, SIGNAL = 1.4
PKEEEKKIRRQRKRSRRGKKNSNKITMEFTIDCLNTNYILITIKSVFITLQNMLSYS

SEQ ID NO: 39415 - protein, 82 aa, Homo sapiens
  MAP TO AC004664.1; EXPRESSED IN PLACENTA, SIGNAL = 4.5; EXPRESSED IN LUNG, SIGNAL = 4.9; EXPRESSED IN HELA, SIGNAL = 4.6; EXPRESSED IN HEART, SIGNAL = 4.6; EXPRESSED IN FETAL LIVER, SIGNAL = 4.6; EXPRESSED IN ADULT LIVER, SIGNAL = 4.5; EXPRESSED IN BRAIN, SIGNAL = 5.5; EXPRESSED IN BONE MARROW, SIGNAL = 4.9; EST_HUMAN HIT: BE549135.1, EVALUE 1.50e+00
KIPTALALHLKPEHMLFLLLPTPFTDTACCSALQAQVQRSILRVVYLRHSQKGGFLPQCFTTPIDGPVWDLCPHVDSELLSR

SEQ ID NO: 39416 - protein, 36 aa, Homo sapiens
  MAP TO AC004664.1; EXPRESSED IN PLACENTA, SIGNAL = 4.5; EXPRESSED IN LUNG, SIGNAL = 4.9; EXPRESSED IN HELA, SIGNAL = 4.6; EXPRESSED IN HEART, SIGNAL = 4.6; EXPRESSED IN FETAL LIVER, SIGNAL = 4.6; EXPRESSED IN ADULT LIVER, SIGNAL = 4.5; EXPRESSED IN BRAIN, SIGNAL = 5.5; EXPRESSED IN BONE MARROW, SIGNAL = 4.9; SWISSPROT HIT: P36382, EVALUE 2.20e+00; EST_HUMAN HIT: BE568919.1, EVALUE 1.50e+00
LERSSLSTWGHRSHTGPSIGVVKHCGRKPPFWECLR

SEQ ID NO: 39417 - protein, 48 aa, Homo sapiens
  MAP TO AC004520.1; EXPRESSED IN BONE MARROW, SIGNAL = 1.1; EXPRESSED IN BRAIN, SIGNAL = 1.3; EXPRESSED IN ADULT LIVER, SIGNAL = 1.6; EXPRESSED IN PLACENTA, SIGNAL = 1.1; EXPRESSED IN LUNG, SIGNAL = 1.3; EXPRESSED IN FETAL LIVER, SIGNAL = 1.2; EXPRESSED IN HEART, SIGNAL = 1.3
SQQEEIKEDQDQTSIDLSVSREQVHFTGLYKRQFAALYFRAESKDQVT

SEQ ID NO: 39418 - protein, 78 aa, Homo sapiens
  MAP TO AC006377.3; EXPRESSED IN BONE MARROW, SIGNAL = 1.9; EXPRESSED IN ADULT LIVER, SIGNAL = 1.7; EXPRESSED IN PLACENTA, SIGNAL = 1.5; EXPRESSED IN LUNG, SIGNAL = 1.3; EXPRESSED IN HELA, SIGNAL = 1.8; EXPRESSED IN FETAL LIVER, SIGNAL = 2.1; EXPRESSED IN HEART, SIGNAL = 2.7; EXPRESSED IN BRAIN, SIGNAL = 2.6; EST_HUMAN HIT: AI903153.1, EVALUE 2.00e-09
QRRRPRRKQRKRLAWPQRSSKRKWKPKARLKKAHLAKLRKRRLEKLRIKSMEHGQTKVTTLVGKTPKPRSHQENSNRM

SEQ ID NO: 39419 - protein, 64 aa, Homo sapiens
  MAP TO AC004707.1; EXPRESSED IN LUNG, SIGNAL =  16; EXPRESSED IN BRAIN, SIGNAL =  18; EXPRESSED IN PLACENTA, SIGNAL =  16; EXPRESSED IN HEART, SIGNAL =  16; EXPRESSED IN FETAL LIVER, SIGNAL =  19; EXPRESSED IN BONE MARROW, SIGNAL =  17; EXPRESSED IN ADULT LIVER, SIGNAL =  18; EXPRESSED IN HELA, SIGNAL =  19; EST_HUMAN HIT: BE280742.1, EVALUE 7.60e+00
PHGDTGSVEGAPQPTDNGFTPKCEIVGKDALSALARASTKQCQQEIANVVCLHQAGSLMPKAVP

SEQ ID NO: 39420 - protein, 65 aa, Homo sapiens
  MAP TO AC004707.1; EXPRESSED IN LUNG, SIGNAL =  16; EXPRESSED IN BRAIN, SIGNAL =  18; EXPRESSED IN PLACENTA, SIGNAL =  16; EXPRESSED IN HEART, SIGNAL =  16; EXPRESSED IN FETAL LIVER, SIGNAL =  19; EXPRESSED IN BONE MARROW, SIGNAL =  17; EXPRESSED IN ADULT LIVER, SIGNAL =  18; EXPRESSED IN HELA, SIGNAL =  19; SWISSPROT HIT: Q03391, EVALUE 1.00e+00; EST_HUMAN HIT: AI352110.1, EVALUE 5.30e-01
HHTEIQGAWRAPPSPRTMASPPSARSWARTHCLHWPGPAPSSASRRSPMWCACTRLGASCPRLCP

SEQ ID NO: 39421 - protein, 53 aa, Homo sapiens
  MAP TO AC004804.1; EXPRESSED IN LUNG, SIGNAL = 1.6; EXPRESSED IN BONE MARROW, SIGNAL = 1.8; EXPRESSED IN PLACENTA, SIGNAL = 1.5; EXPRESSED IN HEART, SIGNAL = 1.7; EXPRESSED IN FETAL LIVER, SIGNAL = 1.5; EXPRESSED IN BRAIN, SIGNAL =   2; EXPRESSED IN ADULT LIVER, SIGNAL = 1.4; SWISSPROT HIT: P22311, EVALUE 1.20e-02; EST_HUMAN HIT: BE812769.1, EVALUE 6.00e-20
VEELLMAMEKVKQELESMKAKLSSTQQSLAEKETHLTNLRAERRKHLEEVLEM

SEQ ID NO: 39422 - protein, 29 aa, Homo sapiens
  MAP TO AC006238.1; EXPRESSED IN BRAIN, SIGNAL = 1.8; EXPRESSED IN BONE MARROW, SIGNAL =   1; EXPRESSED IN LUNG, SIGNAL = 1.1; EXPRESSED IN ADULT LIVER, SIGNAL = 1.1; EXPRESSED IN PLACENTA, SIGNAL = 1.4; EXPRESSED IN HELA, SIGNAL = 1.8; EXPRESSED IN HEART, SIGNAL = 1.6; EXPRESSED IN FETAL LIVER, SIGNAL = 1.5; SWISSPROT HIT: Q04235, EVALUE 8.60e+00; EST_HUMAN HIT: AI277492.1, EVALUE 4.00e-07
VRVYVKVMDEYLYDQNNTTLYENGVKEVK

SEQ ID NO: 39423 - protein, 142 aa, Homo sapiens [sequence omitted]

SEQ ID NO: 39424 - protein, 39 aa, Homo sapiens
  MAP TO AC002537.1; EXPRESSED IN LUNG, SIGNAL = 0.83; EXPRESSED IN BRAIN, SIGNAL = 0.98; EXPRESSED IN BONE MARROW, SIGNAL = 0.92; EXPRESSED IN ADULT LIVER, SIGNAL = 0.97; EXPRESSED IN PLACENTA, SIGNAL = 0.88; EXPRESSED IN HEART, SIGNAL = 1.7; EXPRESSED IN FETAL LIVER, SIGNAL = 0.85; EST_HUMAN HIT: AU119028.1, EVALUE 5.00e-17; SWISSPROT HIT: Q9Z1G4, EVALUE 4.00e-18
FDFGDTMVHQAIHTIEYCLGCISNTASYLRLWALSLAHA

SEQ ID NO: 39425 - protein, 60 aa, Homo sapiens
  MAP TO AC004217.1; EXPRESSED IN LUNG, SIGNAL = 2.8; EXPRESSED IN HELA, SIGNAL = 2.5; EXPRESSED IN FETAL LIVER, SIGNAL = 2.4; EXPRESSED IN BRAIN, SIGNAL = 2.5; EXPRESSED IN BONE MARROW, SIGNAL = 2.5; EXPRESSED IN ADULT LIVER, SIGNAL = 2.4; EXPRESSED IN PLACENTA, SIGNAL = 2.7; EXPRESSED IN HEART, SIGNAL = 2.2; EST_HUMAN HIT: BE566486.1, EVALUE 2.00e-29; SWISSPROT HIT: P48631, EVALUE 4.60e+00
AMCIHQLNLLATNPNLPITSVLGKQHPIEAHHLSSICDIMEKAMVNGDTCIIRCILVVFQ

SEQ ID NO: 39426 - protein, 27 aa, Homo sapiens
  MAP TO AC002479.1; EXPRESSED IN PLACENTA, SIGNAL = 2.1; EXPRESSED IN ADULT LIVER, SIGNAL = 1.8; EXPRESSED IN LUNG, SIGNAL =   2; EXPRESSED IN HELA, SIGNAL =   2; EXPRESSED IN HEART, SIGNAL = 2.2; EXPRESSED IN FETAL LIVER, SIGNAL =   2; EXPRESSED IN BRAIN, SIGNAL = 2.4; EXPRESSED IN BONE MARROW, SIGNAL =   2
ILLLRRSHGFHSQEMWGSDGMSMFLYV

SEQ ID NO: 39427 - protein, 26 aa, Homo sapiens
  MAP TO AC002479.1; EXPRESSED IN PLACENTA, SIGNAL = 2.1; EXPRESSED IN ADULT LIVER, SIGNAL = 1.8; EXPRESSED IN LUNG, SIGNAL =   2; EXPRESSED IN HELA, SIGNAL =   2; EXPRESSED IN HEART, SIGNAL = 2.2; EXPRESSED IN FETAL LIVER, SIGNAL =   2; EXPRESSED IN BRAIN, SIGNAL = 2.4; EXPRESSED IN BONE MARROW, SIGNAL =   2
SPPEKKPWISQPGDVGLRRDEYVPLR

SEQ ID NO: 39428 - protein, 31 aa, Homo sapiens
  MAP TO AC005293.1; EXPRESSED IN HELA, SIGNAL = 3.3; EXPRESSED IN HEART, SIGNAL = 4.3; EXPRESSED IN BRAIN, SIGNAL = 3.2; EXPRESSED IN BONE MARROW, SIGNAL = 3.1; EXPRESSED IN PLACENTA, SIGNAL =  48; EXPRESSED IN LUNG, SIGNAL = 3.4; EXPRESSED IN FETAL LIVER, SIGNAL = 3.9; EXPRESSED IN ADULT LIVER, SIGNAL = 4.1
GRQKGPGAAEALGEVSFCTVDALGPTLSIAQ

SEQ ID NO: 39429 - protein, 50 aa, Homo sapiens
  MAP TO AC005348.1; EXPRESSED IN PLACENTA, SIGNAL =  26; EXPRESSED IN LUNG, SIGNAL =  19; EXPRESSED IN HEART, SIGNAL =  18; EXPRESSED IN BRAIN, SIGNAL =  27; EXPRESSED IN ADULT LIVER, SIGNAL =  19; EXPRESSED IN FETAL LIVER, SIGNAL =  27; EXPRESSED IN BONE MARROW, SIGNAL =  20; EXPRESSED IN HELA, SIGNAL =  15; SWISSPROT HIT: Q09763, EVALUE 3.60e+00
TKVREQKQTKGILFPNNQGLTVLSYPVLLYKIIDVFEVNGSSESQSLLLS

SEQ ID NO: 39430 - protein, 20 aa, Homo sapiens
  MAP TO AC005348.1; EXPRESSED IN PLACENTA, SIGNAL =  26; EXPRESSED IN LUNG, SIGNAL =  19; EXPRESSED IN HEART, SIGNAL =  18; EXPRESSED IN BRAIN, SIGNAL =  27; EXPRESSED IN ADULT LIVER, SIGNAL =  19; EXPRESSED IN FETAL LIVER, SIGNAL =  27; EXPRESSED IN BONE MARROW, SIGNAL =  20; EXPRESSED IN HELA, SIGNAL =  15
RQKSGSKSRQKGFCFRITKD

SEQ ID NO: 39431 - protein, 44 aa, Homo sapiens
  MAP TO AC005549.1; EXPRESSED IN FETAL LIVER, SIGNAL = 1.4; EXPRESSED IN BONE MARROW, SIGNAL = 1.3; EXPRESSED IN ADULT LIVER, SIGNAL = 1.4; EXPRESSED IN PLACENTA, SIGNAL = 1.5; EXPRESSED IN LUNG, SIGNAL = 1.4; EXPRESSED IN HEART, SIGNAL = 1.4; EXPRESSED IN BRAIN, SIGNAL = 1.3; SWISSPROT HIT: P43379, EVALUE 8.20e+00
RSKQVFLIDLSDGPHHTCSLDLWEDERVKLLCGLSLHALPMDAP

SEQ ID NO: 39432 - protein, 52 aa, Homo sapiens
  MAP TO AC004674.1; EXPRESSED IN LUNG, SIGNAL = 5.6; EXPRESSED IN BRAIN, SIGNAL = 5.5; EXPRESSED IN BONE MARROW, SIGNAL = 5.4; EXPRESSED IN PLACENTA, SIGNAL = 5.6; EXPRESSED IN HELA, SIGNAL = 5.4; EXPRESSED IN HEART, SIGNAL = 5.1; EXPRESSED IN FETAL LIVER, SIGNAL = 4.9; EXPRESSED IN ADULT LIVER, SIGNAL = 5.7; EST_HUMAN HIT: N80979.1, EVALUE 6.00e-03
MRSVVLMSVMLKYCMRKICIAQQTNIFLTTNMVLQNCAWVKDTFKMQDVPMG

SEQ ID NO: 39433 - protein, 46 aa, Homo sapiens
  MAP TO AC002350.1; EXPRESSED IN PLACENTA, SIGNAL = 2.6; EXPRESSED IN LUNG, SIGNAL = 1.8; EXPRESSED IN HELA, SIGNAL = 2.6; EXPRESSED IN FETAL LIVER, SIGNAL = 5.5; EXPRESSED IN BONE MARROW, SIGNAL = 2.9; EXPRESSED IN ADULT LIVER, SIGNAL = 2.2; EXPRESSED IN HEART, SIGNAL = 2.9; EXPRESSED IN BRAIN, SIGNAL = 3.6; EST_HUMAN HIT: AW750372.1, EVALUE 8.00e-16; SWISSPROT HIT: P38797, EVALUE 4.80e-02
NLGDSGFLVVRGGEVVHRSDEQQHYFNTPFQLSIAPPEAEGVVLSD

SEQ ID NO: 39434 - protein, 43 aa, Homo sapiens
  MAP TO AC002350.1; EXPRESSED IN PLACENTA, SIGNAL = 2.6; EXPRESSED IN LUNG, SIGNAL = 1.8; EXPRESSED IN HELA, SIGNAL = 2.6; EXPRESSED IN FETAL LIVER, SIGNAL = 5.5; EXPRESSED IN BONE MARROW, SIGNAL = 2.9; EXPRESSED IN ADULT LIVER, SIGNAL = 2.2; EXPRESSED IN HEART, SIGNAL = 2.9; EXPRESSED IN BRAIN, SIGNAL = 3.6; EST_HUMAN HIT: AW750372.1, EVALUE 7.00e-06
TWAIQASWLSGVVKSCTDQMSSSITSTLHSSSQSLPLKPRESS

SEQ ID NO: 39435 - protein, 45 aa, Homo sapiens
  MAP TO AC004583.1; EXPRESSED IN ADULT LIVER, SIGNAL =   2; EXPRESSED IN PLACENTA, SIGNAL = 2.3; EXPRESSED IN HELA, SIGNAL = 2.5; EXPRESSED IN HEART, SIGNAL =   3; EXPRESSED IN LUNG, SIGNAL = 2.7; EXPRESSED IN FETAL LIVER, SIGNAL = 4.7; EXPRESSED IN BRAIN, SIGNAL = 3.1; EXPRESSED IN BONE MARROW, SIGNAL = 2.9; EST_HUMAN HIT: BF341197.1, EVALUE 2.00e-06
VEALVGWLLDHSDIQVTELSDADTVSDEYSDEEVVEDVDDAAYSM

SEQ ID NO: 39436 - protein, 41 aa, Homo sapiens
  MAP TO AC004583.1; EXPRESSED IN ADULT LIVER, SIGNAL =   2; EXPRESSED IN PLACENTA, SIGNAL = 2.3; EXPRESSED IN HELA, SIGNAL = 2.5; EXPRESSED IN HEART, SIGNAL =   3; EXPRESSED IN LUNG, SIGNAL = 2.7; EXPRESSED IN FETAL LIVER, SIGNAL = 4.7; EXPRESSED IN BRAIN, SIGNAL = 3.1; EXPRESSED IN BONE MARROW, SIGNAL = 2.9; EST_HUMAN HIT: BF371385.1, EVALUE 6.00e-05
TTPTYRSRSSQMQTRCPTSILTRRWWRTWMMPPTPWSVPPM

SEQ ID NO: 39437 - protein, 58 aa, Homo sapiens
  MAP TO AB003151.1; EXPRESSED IN LUNG, SIGNAL = 4.6; EXPRESSED IN FETAL LIVER, SIGNAL = 5.2; EXPRESSED IN BONE MARROW, SIGNAL = 4.9; EXPRESSED IN HELA, SIGNAL = 5.6; EXPRESSED IN BRAIN, SIGNAL =   4; EXPRESSED IN ADULT LIVER, SIGNAL = 4.2; EXPRESSED IN PLACENTA, SIGNAL = 3.8; EXPRESSED IN HEART, SIGNAL = 4.2; SWISSPROT HIT: P38732, EVALUE 3.50e+00; EST_HUMAN HIT: AA887484.1, EVALUE 3.00e-30
VKAAFNEETHSYEIRTTSRWRKHEEVFICYGPHDNQRLFLEYGFVSVHNPHACVYVSR

SEQ ID NO: 39438 - protein, 30 aa, Homo sapiens
  MAP TO AC006143.1; EXPRESSED IN BRAIN, SIGNAL = 1.3; EXPRESSED IN BONE MARROW, SIGNAL =   1; EXPRESSED IN ADULT LIVER, SIGNAL = 2.1; EXPRESSED IN HELA, SIGNAL = 2.8; EXPRESSED IN FETAL LIVER, SIGNAL = 1.6; EXPRESSED IN HEART, SIGNAL = 2.8; EXPRESSED IN PLACENTA, SIGNAL = 1.5; EXPRESSED IN LUNG, SIGNAL = 1.1
PLELQLECAPCLCSQQFPNWYQSYQQSMSS

SEQ ID NO: 39439 - protein, 56 aa, Homo sapiens
  MAP TO AC001237.1; EXPRESSED IN HELA, SIGNAL = 3.9; EXPRESSED IN HEART, SIGNAL = 3.2; EXPRESSED IN BRAIN, SIGNAL =   4; EXPRESSED IN ADULT LIVER, SIGNAL = 4.1; EXPRESSED IN LUNG, SIGNAL = 4.5; EXPRESSED IN FETAL LIVER, SIGNAL =   4; EXPRESSED IN BONE MARROW, SIGNAL = 3.9; EXPRESSED IN PLACENTA, SIGNAL = 3.8; SWISSPROT HIT: P36754, EVALUE 3.50e+00; EST_HUMAN HIT: AA287703.1, EVALUE 3.00e-08
VMREAVTVEIEFCVWDQFLGEINPQHSWMVAGPLLDIKAEPGAVEAVHLPHFVALQ

SEQ ID NO: 39440 - protein, 31 aa, Homo sapiens
  MAP TO AC006070.1; EXPRESSED IN BRAIN, SIGNAL = 1.5; EXPRESSED IN ADULT LIVER, SIGNAL = 1.2; EXPRESSED IN HEART, SIGNAL = 1.3; EXPRESSED IN BONE MARROW, SIGNAL = 1.3; EXPRESSED IN LUNG, SIGNAL = 1.5; EXPRESSED IN FETAL LIVER, SIGNAL = 1.4; EXPRESSED IN PLACENTA, SIGNAL = 1.3; EST_HUMAN HIT: AA779269.1, EVALUE 5.20e-02
GSLLPCPTAHTSRGSMQMGRLWGSDPTAASR

SEQ ID NO: 39441 - protein, 83 aa, Homo sapiens
  MAP TO AC004682.1; EXPRESSED IN PLACENTA, SIGNAL = 2.1; EXPRESSED IN LUNG, SIGNAL = 2.1; EXPRESSED IN HELA, SIGNAL =   2; EXPRESSED IN FETAL LIVER, SIGNAL = 1.9; EXPRESSED IN BRAIN, SIGNAL = 2.3; EXPRESSED IN ADULT LIVER, SIGNAL = 2.2; EXPRESSED IN HEART, SIGNAL = 2.1; EXPRESSED IN BONE MARROW, SIGNAL = 1.9
DKKQAQALAFEESEVEFGSSKQCHLRQLQQLKKKLLVLQQELEFHTEELQTSYYSLRQYQSILEKQTSDLVLLHHHCKLKEDE

SEQ ID NO: 39442 - protein, 73 aa, Homo sapiens
  MAP TO AC004586.1; EXPRESSED IN FETAL LIVER, SIGNAL = 2.8; EXPRESSED IN BONE MARROW, SIGNAL = 2.7; EXPRESSED IN LUNG, SIGNAL = 2.6; EXPRESSED IN BRAIN, SIGNAL = 2.6; EXPRESSED IN ADULT LIVER, SIGNAL = 2.9; EXPRESSED IN PLACENTA, SIGNAL = 2.4; EXPRESSED IN HELA, SIGNAL = 2.4; EXPRESSED IN HEART, SIGNAL = 2.8; EST_HUMAN HIT: AI909324.1, EVALUE 6.00e-06; SWISSPROT HIT: P07332, EVALUE 1.00e-36
LPPPLQLIPEVQKPLHEQLWYHGAIPRAEVAELLVHSGDFLVRESQGKQEYVLSVLWDGLPRHFIIQSLDVSG

SEQ ID NO: 39443 - protein, 36 aa, Homo sapiens
  MAP TO AC004141.1; EXPRESSED IN LUNG, SIGNAL =  12; EXPRESSED IN PLACENTA, SIGNAL =  13; EXPRESSED IN HEART, SIGNAL =  12; EXPRESSED IN FETAL LIVER, SIGNAL =  12; EXPRESSED IN BRAIN, SIGNAL =  13; EXPRESSED IN BONE MARROW, SIGNAL =  13; EXPRESSED IN HELA, SIGNAL =  13; EXPRESSED IN ADULT LIVER, SIGNAL =  11; SWISSPROT HIT: P36626, EVALUE 4.90e+00
EVLLGMKVQGDIKECGQGYRYQAMACYDQNGRLVET

SEQ ID NO: 39444 - protein, 37 aa, Homo sapiens
  MAP TO AC004141.1; EXPRESSED IN LUNG, SIGNAL =  12; EXPRESSED IN PLACENTA, SIGNAL =  13; EXPRESSED IN HEART, SIGNAL =  12; EXPRESSED IN FETAL LIVER, SIGNAL =  12; EXPRESSED IN BRAIN, SIGNAL =  13; EXPRESSED IN BONE MARROW, SIGNAL =  13; EXPRESSED IN HELA, SIGNAL =  13; EXPRESSED IN ADULT LIVER, SIGNAL =  11
GSVAGNESTRRHQGMRTRISLPSNGMLRSKWQACGNI

SEQ ID NO: 39445 - protein, 72 aa, Homo sapiens
  MAP TO AC002468.1; EXPRESSED IN LUNG, SIGNAL = 1.5; EXPRESSED IN HELA, SIGNAL =   5; EXPRESSED IN BONE MARROW, SIGNAL = 1.4; EXPRESSED IN ADULT LIVER, SIGNAL = 2.3; EXPRESSED IN PLACENTA, SIGNAL =   2; EXPRESSED IN HEART, SIGNAL = 2.1; EXPRESSED IN FETAL LIVER, SIGNAL = 1.5; EXPRESSED IN BRAIN, SIGNAL = 1.6; SWISSPROT HIT: P10724, EVALUE 7.80e+00
QGCFSIWMEICDQDQTKLVVCLIHTRPHIVAEAQDSGDLTTCRSISGAKTTSSSVSPWFSSFFLLGTSGDNI

SEQ ID NO: 39446 - protein, 45 aa, Homo sapiens
  MAP TO AC004485.1; EXPRESSED IN ADULT LIVER, SIGNAL = 1.4; EXPRESSED IN PLACENTA, SIGNAL = 1.3; EXPRESSED IN HEART, SIGNAL = 1.3; EXPRESSED IN LUNG, SIGNAL = 1.3; EXPRESSED IN FETAL LIVER, SIGNAL = 2.6; EXPRESSED IN BRAIN, SIGNAL = 1.3; EXPRESSED IN BONE MARROW, SIGNAL = 2.7; EST_HUMAN HIT: R97478.1, EVALUE 1.80e+00
KDHQKQLYLNKLDDFLSLIAAKENAYHREQGLMARRLEEGRRKHL

SEQ ID NO: 39447 - protein, 64 aa, Homo sapiens
  MAP TO AC005500.1; EXPRESSED IN PLACENTA, SIGNAL = 8.5; EXPRESSED IN HELA, SIGNAL = 8.4; EXPRESSED IN BRAIN, SIGNAL = 9.5; EXPRESSED IN BONE MARROW, SIGNAL =  24; EXPRESSED IN ADULT LIVER, SIGNAL = 7.8; EXPRESSED IN HEART, SIGNAL = 8.5; EXPRESSED IN LUNG, SIGNAL = 8.7; EXPRESSED IN FETAL LIVER, SIGNAL = 8.3; SWISSPROT HIT: Q04652, EVALUE 2.00e-06; EST_HUMAN HIT: AI807705.1, EVALUE 1.00e-33
YDPRHNRWFQIQSLQQEHADLSVCVVGRYIYAVAGRDYHNDLNAVERYDPATNSWAYVAPLKRE

SEQ ID NO: 39448 - protein, 25 aa, Homo sapiens
  MAP TO AC005500.1; EXPRESSED IN PLACENTA, SIGNAL = 8.5; EXPRESSED IN HELA, SIGNAL = 8.4; EXPRESSED IN BRAIN, SIGNAL = 9.5; EXPRESSED IN BONE MARROW, SIGNAL =  24; EXPRESSED IN ADULT LIVER, SIGNAL = 7.8; EXPRESSED IN HEART, SIGNAL = 8.5; EXPRESSED IN LUNG, SIGNAL = 8.7; EXPRESSED IN FETAL LIVER, SIGNAL = 8.3
MTHGTTAGSRSSPCSRSTPTCPCVL

SEQ ID NO: 39449 - protein, 36 aa, Homo sapiens
  MAP TO AC005950.1; EXPRESSED IN BRAIN, SIGNAL = 1.8; EXPRESSED IN BONE MARROW, SIGNAL =   2; EXPRESSED IN ADULT LIVER, SIGNAL = 1.6; EXPRESSED IN HELA, SIGNAL = 1.9; EXPRESSED IN HEART, SIGNAL = 1.8; EXPRESSED IN FETAL LIVER, SIGNAL = 2.3; EXPRESSED IN PLACENTA, SIGNAL = 1.5; EXPRESSED IN LUNG, SIGNAL = 1.8; SWISSPROT HIT: P14349, EVALUE 3.70e+00; EST_HUMAN HIT: BE409676.1, EVALUE 2.00e-15
MTEDRPRALILPGDWPWSLGARAPCILDRRSRETQE

SEQ ID NO: 39450 - protein, 51 aa, Homo sapiens
  MAP TO AC005950.1; EXPRESSED IN BRAIN, SIGNAL = 1.8; EXPRESSED IN BONE MARROW, SIGNAL =   2; EXPRESSED IN ADULT LIVER, SIGNAL = 1.6; EXPRESSED IN HELA, SIGNAL = 1.9; EXPRESSED IN HEART, SIGNAL = 1.8; EXPRESSED IN FETAL LIVER, SIGNAL = 2.3; EXPRESSED IN PLACENTA, SIGNAL = 1.5; EXPRESSED IN LUNG, SIGNAL = 1.8; EST_HUMAN HIT: BE644947.1, EVALUE 4.00e-10
MSALGRSSVILLTYVLAATELTCLFMQFSIVPVSNTPQPLQPQPGLNRCSS

SEQ ID NO: 39451 - protein, 70 aa, Homo sapiens
  MAP TO AC006075.1; EXPRESSED IN HELA, SIGNAL =   2; EXPRESSED IN FETAL LIVER, SIGNAL = 2.1; EXPRESSED IN PLACENTA, SIGNAL = 1.9; EXPRESSED IN LUNG, SIGNAL = 2.1; EXPRESSED IN HEART, SIGNAL = 2.3; EXPRESSED IN BRAIN, SIGNAL = 2.6; EXPRESSED IN BONE MARROW, SIGNAL =   2; EXPRESSED IN ADULT LIVER, SIGNAL = 1.9; SWISSPROT HIT: Q09457, EVALUE 5.00e-03; EST_HUMAN HIT: AU118435.1, EVALUE 8.00e-37
MAQPYASAQFAPPQNGIPAEYTAPHPHPAPEYTGQTTVPEHTLNLYPPAQTHSEQSPADTSAQTVSGTAT

SEQ ID NO: 39452 - protein, 37 aa, Homo sapiens
  MAP TO AC002365.1; EXPRESSED IN PLACENTA, SIGNAL =   1; EXPRESSED IN LUNG, SIGNAL = 0.91; EXPRESSED IN FETAL LIVER, SIGNAL = 1.2; EXPRESSED IN ADULT LIVER, SIGNAL = 0.94; EXPRESSED IN HEART, SIGNAL = 1.5; EXPRESSED IN BRAIN, SIGNAL = 1.6; EXPRESSED IN BONE MARROW, SIGNAL = 1.2; SWISSPROT HIT: Q13796, EVALUE 8.00e-15; EST_HUMAN HIT: BF057621.1, EVALUE 1.00e-13
LAGDEIVGINDIGLSGFRQEAICLVKGSHKTLKLVVK

SEQ ID NO: 39453 - protein, 73 aa, Homo sapiens
  MAP TO AC004590.1; EXPRESSED IN LUNG, SIGNAL = 4.1; EXPRESSED IN FETAL LIVER, SIGNAL = 4.9; EXPRESSED IN BRAIN, SIGNAL = 4.7; EXPRESSED IN BONE MARROW, SIGNAL =   5; EXPRESSED IN ADULT LIVER, SIGNAL = 4.5; EXPRESSED IN HELA, SIGNAL = 4.3; EXPRESSED IN PLACENTA, SIGNAL =   4; EXPRESSED IN HEART, SIGNAL = 4.3; SWISSPROT HIT: O15438, EVALUE 2.00e-31; EST_HUMAN HIT: AW449756.1, EVALUE 2.00e-32
VKQMKLKDSRIKLMSEILNGIKVLKLYAWEPSFLKQVEGIRQGELQLLRTAAYLHTTTTFTWMCSPFLVRLGT

SEQ ID NO: 39454 - protein, 57 aa, Homo sapiens
  MAP TO AC002302.1; EXPRESSED IN ADULT LIVER, SIGNAL =  31; EXPRESSED IN LUNG, SIGNAL =  38; EXPRESSED IN HEART, SIGNAL =  28; EXPRESSED IN FETAL LIVER, SIGNAL =  30; EXPRESSED IN BRAIN, SIGNAL =  33; EXPRESSED IN BONE MARROW, SIGNAL =  32; EXPRESSED IN PLACENTA, SIGNAL =  34; EXPRESSED IN HELA, SIGNAL =  31; EST_HUMAN HIT: AW407528.1, EVALUE 1.00e-10; SWISSPROT HIT: Q99653, EVALUE 1.00e-11
VLRLMVGVQVTEEQLENIADRTVQEADEDGDGAVSFVEFTKVRVPLGIGELRSGVLG

SEQ ID NO: 39455 - protein, 47 aa, Homo sapiens
  MAP TO AC004148.1; EXPRESSED IN PLACENTA, SIGNAL = 3.3; EXPRESSED IN LUNG, SIGNAL = 2.7; EXPRESSED IN FETAL LIVER, SIGNAL = 3.5; EXPRESSED IN BONE MARROW, SIGNAL = 3.3; EXPRESSED IN ADULT LIVER, SIGNAL = 2.7; EXPRESSED IN HELA, SIGNAL = 3.3; EXPRESSED IN HEART, SIGNAL = 2.9; EXPRESSED IN BRAIN, SIGNAL = 3.2; EST_HUMAN HIT: AW505399.1, EVALUE 1.00e-11; SWISSPROT HIT: P20095, EVALUE 3.00e-11
ETGSGKTTQIPQYLYEGGISRQGIIAVTQPRRVAAISLATRVSDEKR

SEQ ID NO: 39456 - protein, 52 aa, Homo sapiens
  MAP TO AC004499.1; EXPRESSED IN FETAL LIVER, SIGNAL = 1.7; EXPRESSED IN BONE MARROW, SIGNAL = 1.8; EXPRESSED IN PLACENTA, SIGNAL = 1.6; EXPRESSED IN LUNG, SIGNAL = 1.7; EXPRESSED IN BRAIN, SIGNAL = 1.7; EXPRESSED IN ADULT LIVER, SIGNAL = 1.5; EXPRESSED IN HELA, SIGNAL = 1.6; EXPRESSED IN HEART, SIGNAL = 1.6; EST_HUMAN HIT: BE184762.1, EVALUE 6.50e+00
IANGNVSGAVVSPGEGNKTKRVGNRRLETFSYFFSESLGVDMRSFSEYRKPE

SEQ ID NO: 39457 - protein, 22 aa, Homo sapiens
  MAP TO AC005291.1; EXPRESSED IN PLACENTA, SIGNAL = 5.5; EXPRESSED IN HEART, SIGNAL =  19; EXPRESSED IN ADULT LIVER, SIGNAL =   5; EXPRESSED IN LUNG, SIGNAL = 7.3; EXPRESSED IN FETAL LIVER, SIGNAL = 5.7; EXPRESSED IN BRAIN, SIGNAL = 5.3; EXPRESSED IN BONE MARROW, SIGNAL = 6.9; EXPRESSED IN HELA, SIGNAL = 5.7
SSAKKGAKKKGSSFQTVSALFR

SEQ ID NO: 39458 - protein, 22 aa, Homo sapiens
  MAP TO AC005291.1; EXPRESSED IN PLACENTA, SIGNAL = 5.5; EXPRESSED IN HEART, SIGNAL =  19; EXPRESSED IN ADULT LIVER, SIGNAL =   5; EXPRESSED IN LUNG, SIGNAL = 7.3; EXPRESSED IN FETAL LIVER, SIGNAL = 5.7; EXPRESSED IN BRAIN, SIGNAL = 5.3; EXPRESSED IN BONE MARROW, SIGNAL = 6.9; EXPRESSED IN HELA, SIGNAL = 5.7
VFFLPQIAARRKVLRKRALLSR

SEQ ID NO: 39459 - protein, 97 aa, Homo sapiens
  MAP TO AC002308.1; EXPRESSED IN LUNG, SIGNAL = 1.4; EXPRESSED IN BRAIN, SIGNAL = 1.9; EXPRESSED IN BONE MARROW, SIGNAL = 1.2; EXPRESSED IN ADULT LIVER, SIGNAL = 1.5; EXPRESSED IN PLACENTA, SIGNAL = 1.8; EXPRESSED IN HEART, SIGNAL = 1.4; EXPRESSED IN FETAL LIVER, SIGNAL = 1.1; EST_HUMAN HIT: AW404358.1, EVALUE 2.00e-46; SWISSPROT HIT: P01705, EVALUE 3.00e-45
ASVSGSPGQSITISCTGTSSDVGSYNLVSWYQQHPGKAPKLMIYEGSKRPSGVSNRFSGSKSGNTASLTISGLQAEDEADYYCCSYAGSSTFHSGPS

SEQ ID NO: 39460 - protein, 42 aa, Homo sapiens
  MAP TO AC002308.1; EXPRESSED IN LUNG, SIGNAL = 1.4; EXPRESSED IN BRAIN, SIGNAL = 1.9; EXPRESSED IN BONE MARROW, SIGNAL = 1.2; EXPRESSED IN ADULT LIVER, SIGNAL = 1.5; EXPRESSED IN PLACENTA, SIGNAL = 1.8; EXPRESSED IN HEART, SIGNAL = 1.4; EXPRESSED IN FETAL LIVER, SIGNAL = 1.1; EST_HUMAN HIT: AW406348.1, EVALUE 5.00e-17; SWISSPROT HIT: Q02817, EVALUE 3.70e+00
LPPCLGLLDSRSPSPALEPAVMLGVITLSPGTNSTQAKPPNS

SEQ ID NO: 39461 - protein, 46 aa, Homo sapiens
  MAP TO AC004594.1; EXPRESSED IN PLACENTA, SIGNAL = 5.5; EXPRESSED IN LUNG, SIGNAL = 6.2; EXPRESSED IN BRAIN, SIGNAL = 6.3; EXPRESSED IN ADULT LIVER, SIGNAL = 7.1; EXPRESSED IN HELA, SIGNAL = 6.2; EXPRESSED IN HEART, SIGNAL = 7.6; EXPRESSED IN FETAL LIVER, SIGNAL = 6.4; EXPRESSED IN BONE MARROW, SIGNAL = 6.4; EST_HUMAN HIT: AW954625.1, EVALUE 5.00e-17
SEDLFWKLDALQMFVFDLHWPEQEFAHHLEQRLKLMASDMLEACVK

SEQ ID NO: 39462 - protein, 25 aa, Homo sapiens
  MAP TO AC004160.1; EXPRESSED IN PLACENTA, SIGNAL = 4.5; EXPRESSED IN HELA, SIGNAL = 4.8; EXPRESSED IN HEART, SIGNAL = 5.6; EXPRESSED IN FETAL LIVER, SIGNAL = 6.4; EXPRESSED IN BRAIN, SIGNAL = 5.6; EXPRESSED IN BONE MARROW, SIGNAL = 5.1; EXPRESSED IN LUNG, SIGNAL =   4; EXPRESSED IN ADULT LIVER, SIGNAL = 4.3
FLPFLLVPRLNEKPDGKGVQVIYAT

SEQ ID NO: 39463 - protein, 38 aa, Homo sapiens
  MAP TO AC004160.1; EXPRESSED IN PLACENTA, SIGNAL = 4.5; EXPRESSED IN HELA, SIGNAL = 4.8; EXPRESSED IN HEART, SIGNAL = 5.6; EXPRESSED IN FETAL LIVER, SIGNAL = 6.4; EXPRESSED IN BRAIN, SIGNAL = 5.6; EXPRESSED IN BONE MARROW, SIGNAL = 5.1; EXPRESSED IN LUNG, SIGNAL =   4; EXPRESSED IN ADULT LIVER, SIGNAL = 4.3
VTNCGNAGRTEDRGNKYSQPFYSPAFRFPTISSGTKTQ

SEQ ID NO: 39464 - protein, 72 aa, Homo sapiens
  MAP TO AC006080.1; EXPRESSED IN LUNG, SIGNAL = 9.8; EXPRESSED IN FETAL LIVER, SIGNAL =  16; EXPRESSED IN BRAIN, SIGNAL =  15; EXPRESSED IN ADULT LIVER, SIGNAL =  17; EXPRESSED IN PLACENTA, SIGNAL =  19; EXPRESSED IN BONE MARROW, SIGNAL =  17; EXPRESSED IN HEART, SIGNAL =  13; EXPRESSED IN HELA, SIGNAL =  15
IKNPKVNLPLYVAEIRSINNAVKNLTLSSFFSFAFLSLASFSKVLKHGALKDTAHQVAPSLLVFTGNDHREK

SEQ ID NO: 39465 - protein, 28 aa, Homo sapiens
  MAP TO AC005971.5; EXPRESSED IN HELA, SIGNAL = 1.6; EXPRESSED IN LUNG, SIGNAL = 1.8; EXPRESSED IN HEART, SIGNAL = 1.5; EXPRESSED IN FETAL LIVER, SIGNAL =   2; EXPRESSED IN BRAIN, SIGNAL =   2; EXPRESSED IN BONE MARROW, SIGNAL = 1.9; EXPRESSED IN ADULT LIVER, SIGNAL = 1.6; EXPRESSED IN PLACENTA, SIGNAL = 1.6; EST_HUMAN HIT: AW935039.1, EVALUE 2.00e-06
CFSLVGISQMTQACSGTQSTWPESSFST

SEQ ID NO: 39466 - protein, 41 aa, Homo sapiens
  MAP TO AC006088.1; EXPRESSED IN LUNG, SIGNAL = 4.8; EXPRESSED IN BRAIN, SIGNAL = 5.2; EXPRESSED IN HELA, SIGNAL = 4.1; EXPRESSED IN ADULT LIVER, SIGNAL = 5.3; EXPRESSED IN BONE MARROW, SIGNAL =   4; EXPRESSED IN FETAL LIVER, SIGNAL = 4.4; EXPRESSED IN HEART, SIGNAL =   5; EXPRESSED IN PLACENTA, SIGNAL =   5; EST_HUMAN HIT: BF668537.1, EVALUE 3.00e-06
RKAVLLLAAHFSINLTLCTTNQDLVLLPVSLLSQLQRLCLP

SEQ ID NO: 39467 - protein, 38 aa, Homo sapiens
  MAP TO AC005521.1; EXPRESSED IN LUNG, SIGNAL = 2.1; EXPRESSED IN FETAL LIVER, SIGNAL = 1.8; EXPRESSED IN BONE MARROW, SIGNAL = 2.1; EXPRESSED IN PLACENTA, SIGNAL =   2; EXPRESSED IN HELA, SIGNAL = 1.9; EXPRESSED IN BRAIN, SIGNAL =   2; EXPRESSED IN ADULT LIVER, SIGNAL = 2.1; EXPRESSED IN HEART, SIGNAL = 2.2
GYIYENLNCIVVEVSVGFSIRIMFPNGIFPIISQQYEL

SEQ ID NO: 39468 - protein, 32 aa, Homo sapiens
  MAP TO AC004580.2; EXPRESSED IN ADULT LIVER, SIGNAL =  10; EXPRESSED IN PLACENTA, SIGNAL =  10; EXPRESSED IN HEART, SIGNAL = 9.1; EXPRESSED IN LUNG, SIGNAL =  12; EXPRESSED IN FETAL LIVER, SIGNAL = 9.6; EXPRESSED IN BRAIN, SIGNAL =  11; EXPRESSED IN BONE MARROW, SIGNAL = 9.5; EXPRESSED IN HELA, SIGNAL =  10; SWISSPROT HIT: P11369, EVALUE 3.80e-02; EST_HUMAN HIT: AA136894.1, EVALUE 2.00e-03
MATKHRKRCSMLLVIREMQIKMKTSCYHTSTK

SEQ ID NO: 39469 - protein, 36 aa, Homo sapiens
  MAP TO AC002528.1; EXPRESSED IN PLACENTA, SIGNAL = 1.3; EXPRESSED IN LUNG, SIGNAL = 1.6; EXPRESSED IN HEART, SIGNAL = 1.6; EXPRESSED IN FETAL LIVER, SIGNAL = 1.7; EXPRESSED IN BONE MARROW, SIGNAL = 1.5; EXPRESSED IN ADULT LIVER, SIGNAL = 1.4; EXPRESSED IN BRAIN, SIGNAL = 1.9
GSAGPQGPPGPSGEEGKRGPNGEAGSAGPPGPPGLR

SEQ ID NO: 39470 - protein, 42 aa, Homo sapiens
  MAP TO AC004874.1; EXPRESSED IN LUNG, SIGNAL = 2.9; EXPRESSED IN FETAL LIVER, SIGNAL = 3.1; EXPRESSED IN BRAIN, SIGNAL = 3.3; EXPRESSED IN BONE MARROW, SIGNAL = 2.8; EXPRESSED IN PLACENTA, SIGNAL = 3.2; EXPRESSED IN HELA, SIGNAL = 2.5; EXPRESSED IN HEART, SIGNAL = 3.4; EXPRESSED IN ADULT LIVER, SIGNAL = 3.1; SWISSPROT HIT: P24347, EVALUE 3.70e+00; EST_HUMAN HIT: BF370000.1, EVALUE 5.00e-16
GPAPDIHHIHLRERGPVGDPAVRAQCRQSHAHTPAEGNHSGG

SEQ ID NO: 39471 - protein, 40 aa, Homo sapiens
  MAP TO AC004167.1; EXPRESSED IN PLACENTA, SIGNAL = 1.8; EXPRESSED IN LUNG, SIGNAL = 1.4; EXPRESSED IN HEART, SIGNAL = 1.4; EXPRESSED IN FETAL LIVER, SIGNAL = 1.3; EXPRESSED IN BONE MARROW, SIGNAL = 1.9; EXPRESSED IN ADULT LIVER, SIGNAL = 2.7; EXPRESSED IN BRAIN, SIGNAL = 1.1; SWISSPROT HIT: P47029, EVALUE 2.80e+00; EST_HUMAN HIT: BF105845.1, EVALUE 3.00e-07
KNNFKAENARTGLNKKELMTKVEGNNEGKPTTISDFVLSI

SEQ ID NO: 39472 - protein, 96 aa, Homo sapiens
  MAP TO AC005585.1; EXPRESSED IN PLACENTA, SIGNAL = 4.9; EXPRESSED IN LUNG, SIGNAL = 5.4; EXPRESSED IN HEART, SIGNAL = 4.9; EXPRESSED IN BRAIN, SIGNAL = 4.3; EXPRESSED IN ADULT LIVER, SIGNAL = 4.9; EXPRESSED IN FETAL LIVER, SIGNAL = 5.7; EXPRESSED IN BONE MARROW, SIGNAL = 4.6; EXPRESSED IN HELA, SIGNAL = 4.8; SWISSPROT HIT: Q07283, EVALUE 4.00e-03; EST_HUMAN HIT: BE269931.1, EVALUE 1.30e-02
QFQQLVQDSMGLRPLPAATVGRWAAEQRKDLTRLSKHVEALRAQLEEAEGQKDGLRKQAGKLEQALKQEQGARRRQAEEDEQCLSEWEHDKQQLLT

SEQ ID NO: 39473 - protein, 66 aa, Homo sapiens
  MAP TO AC005585.1; EXPRESSED IN PLACENTA, SIGNAL = 4.9; EXPRESSED IN LUNG, SIGNAL = 5.4; EXPRESSED IN HEART, SIGNAL = 4.9; EXPRESSED IN BRAIN, SIGNAL = 4.3; EXPRESSED IN ADULT LIVER, SIGNAL = 4.9; EXPRESSED IN FETAL LIVER, SIGNAL = 5.7; EXPRESSED IN BONE MARROW, SIGNAL = 4.6; EXPRESSED IN HELA, SIGNAL = 4.8; EST_HUMAN HIT: BE384347.1, EVALUE 5.00e-03; SWISSPROT HIT: P24152, EVALUE 2.30e-01
KSQRASLSEPPCSSQPRPSRTPGVSTPRPLRRPWCPVTHAPASREACRRWARWSSACVRARTCPRP

SEQ ID NO: 39474 - protein, 61 aa, Homo sapiens
  MAP TO AC004466.1; EXPRESSED IN PLACENTA, SIGNAL = 5.6; EXPRESSED IN LUNG, SIGNAL = 7.1; EXPRESSED IN HELA, SIGNAL = 5.2; EXPRESSED IN HEART, SIGNAL = 5.1; EXPRESSED IN BRAIN, SIGNAL = 5.6; EXPRESSED IN FETAL LIVER, SIGNAL =   5; EXPRESSED IN BONE MARROW, SIGNAL = 4.9; EXPRESSED IN ADULT LIVER, SIGNAL = 5.1; EST_HUMAN HIT: AU140214.1, EVALUE 1.00e-28; SWISSPROT HIT: Q28037, EVALUE 1.00e-29
ILTDEEVQRKREMILKRKEEEALKDSLRPKLSEEQQRIIAILLDAHHKTYDPTYSDFCQFR

SEQ ID NO: 39475 - protein, 43 aa, Homo sapiens; identical to SEQ ID NO: 39060
  MAP TO AC006330.2; EXPRESSED IN PLACENTA, SIGNAL = 1.2; EXPRESSED IN LUNG, SIGNAL = 1.7; EXPRESSED IN HEART, SIGNAL = 1.6; EXPRESSED IN BRAIN, SIGNAL = 1.4; EXPRESSED IN FETAL LIVER, SIGNAL = 1.6; EXPRESSED IN BONE MARROW, SIGNAL = 1.3; EXPRESSED IN ADULT LIVER, SIGNAL = 2.1; EST_HUMAN HIT: W73376.1, EVALUE 9.00e-17; SWISSPROT HIT: P40926, EVALUE 7.00e-18

SEQ ID NO: 39476 - protein, 24 aa, Homo sapiens
  MAP TO AC004216.1; EXPRESSED IN PLACENTA, SIGNAL = 3.6; EXPRESSED IN LUNG, SIGNAL = 1.8; EXPRESSED IN HELA, SIGNAL = 2.1; EXPRESSED IN FETAL LIVER, SIGNAL = 1.9; EXPRESSED IN ADULT LIVER, SIGNAL = 1.7; EXPRESSED IN HEART, SIGNAL =   2; EXPRESSED IN BRAIN, SIGNAL = 2.2; EXPRESSED IN BONE MARROW, SIGNAL = 1.8
IFQKVGLVMFPITEMLLNNRHQDD

SEQ ID NO: 39477 - protein, 42 aa, Homo sapiens; identical to SEQ ID NO: 38907
  MAP TO AC006007.1; EXPRESSED IN LUNG, SIGNAL =   1; EXPRESSED IN BRAIN, SIGNAL = 2.1; EXPRESSED IN HELA, SIGNAL = 2.1; EXPRESSED IN ADULT LIVER, SIGNAL =   2; EXPRESSED IN BONE MARROW, SIGNAL =   2; EXPRESSED IN FETAL LIVER, SIGNAL = 2.2; EXPRESSED IN HEART, SIGNAL = 1.8; EXPRESSED IN PLACENTA, SIGNAL = 1.9

SEQ ID NO: 39478 - protein, 92 aa, Homo sapiens
  MAP TO AC005383.1; EXPRESSED IN PLACENTA, SIGNAL = 3.2; EXPRESSED IN ADULT LIVER, SIGNAL = 3.4; EXPRESSED IN LUNG, SIGNAL = 3.9; EXPRESSED IN HELA, SIGNAL = 2.9; EXPRESSED IN HEART, SIGNAL = 2.9; EXPRESSED IN FETAL LIVER, SIGNAL = 2.8; EXPRESSED IN BRAIN, SIGNAL = 3.5; EXPRESSED IN BONE MARROW, SIGNAL = 2.9; SWISSPROT HIT: Q61704, EVALUE 8.40e-01
WSEEAITRFQMCVAGIKLQARVVEVTENGIGVELTDLSTCYPRIISDVLIDEHLVLKSASPHKDLPNDRLVNKHELQVHVQGLQGNILKPFI

SEQ ID NO: 39479 - protein, 93 aa, Homo sapiens
  MAP TO AC004977.1; EXPRESSED IN LUNG, SIGNAL =  11; EXPRESSED IN FETAL LIVER, SIGNAL = 5.4; EXPRESSED IN BONE MARROW, SIGNAL = 0.89; EXPRESSED IN PLACENTA, SIGNAL = 0.94; EXPRESSED IN HEART, SIGNAL = 1.7; EXPRESSED IN BRAIN, SIGNAL = 0.79; EXPRESSED IN ADULT LIVER, SIGNAL =  16; SWISSPROT HIT: P25311, EVALUE 5.00e-53
PPSVVVTSHQAPGEKKKLKCLAYDFYPGKIDVHWTRAGEVQEPELRGDVLHNGNGTYQSWVVVAVPPQDTAPYSCHVQHSSLAQPLVVPWEAS

SEQ ID NO: 39480 - protein, 65 aa, Homo sapiens
  MAP TO AC005535.2; EXPRESSED IN PLACENTA, SIGNAL = 1.2; EXPRESSED IN LUNG, SIGNAL = 1.5; EXPRESSED IN HEART, SIGNAL = 1.3; EXPRESSED IN FETAL LIVER, SIGNAL =   2; EXPRESSED IN BONE MARROW, SIGNAL = 1.4; EXPRESSED IN BRAIN, SIGNAL = 1.1; EXPRESSED IN ADULT LIVER, SIGNAL = 1.4; SWISSPROT HIT: P31521, EVALUE 2.80e+00
LYLIEGLLQLTLQRVCTHALVLLHHVAVGPLIWVLCDVEPAQCLHWSLLHVTKCPGPALVARMCT

SEQ ID NO: 39481 - protein, 46 aa, Homo sapiens
  MAP TO AC006203.1; EXPRESSED IN PLACENTA, SIGNAL = 8.1; EXPRESSED IN LUNG, SIGNAL = 6.6; EXPRESSED IN HEART, SIGNAL = 8.4; EXPRESSED IN BRAIN, SIGNAL = 8.4; EXPRESSED IN HELA, SIGNAL = 8.2; EXPRESSED IN FETAL LIVER, SIGNAL = 8.7; EXPRESSED IN BONE MARROW, SIGNAL = 8.9; EXPRESSED IN ADULT LIVER, SIGNAL = 8.8
WMVKNRDVASSLTPVNQLSEEVFFPKYVTQMKVELSKRESGNKERG

SEQ ID NO: 39482 - protein, 29 aa, Homo sapiens
  MAP TO AC002456.1; EXPRESSED IN HELA, SIGNAL = 1.9; EXPRESSED IN BRAIN, SIGNAL = 1.6; EXPRESSED IN BONE MARROW, SIGNAL = 1.9; EXPRESSED IN ADULT LIVER, SIGNAL = 1.6; EXPRESSED IN PLACENTA, SIGNAL = 1.9; EXPRESSED IN HEART, SIGNAL = 1.7; EXPRESSED IN FETAL LIVER, SIGNAL =   3; EXPRESSED IN LUNG, SIGNAL = 1.6
IQVTHVQVCYMAVSCDAEVCGMIDPITQI

SEQ ID NO: 39483 - protein, 59 aa, Homo sapiens
  MAP TO AC004478.1; EXPRESSED IN ADULT LIVER, SIGNAL =   4; EXPRESSED IN PLACENTA, SIGNAL = 3.3; EXPRESSED IN BONE MARROW, SIGNAL =   3; EXPRESSED IN LUNG, SIGNAL =   4; EXPRESSED IN HELA, SIGNAL = 3.2; EXPRESSED IN HEART, SIGNAL = 2.5; EXPRESSED IN FETAL LIVER, SIGNAL = 2.8; EXPRESSED IN BRAIN, SIGNAL = 3.8; SWISSPROT HIT: Q10737, EVALUE 6.90e-01
EVKISILTRTWKKVIPPLMDDFEGFKTSLKEATVDVMEVAKELDLQVELEDVTELLQYH

SEQ ID NO: 39484 - protein, 62 aa, Homo sapiens
  MAP TO AC005598.6; EXPRESSED IN ADULT LIVER, SIGNAL =   7; EXPRESSED IN PLACENTA, SIGNAL = 7.1; EXPRESSED IN LUNG, SIGNAL = 7.4; EXPRESSED IN HELA, SIGNAL =   7; EXPRESSED IN HEART, SIGNAL = 7.2; EXPRESSED IN BRAIN, SIGNAL = 7.3; EXPRESSED IN BONE MARROW, SIGNAL = 6.7; EXPRESSED IN FETAL LIVER, SIGNAL = 6.7
AWRFGGWNGNKETSWKEREREKKKKKTKKTKKKKEEEEEKKKKKKKKEEEEEKKRRRKRKKK

SEQ ID NO: 39485 - protein, 38 aa, Homo sapiens
  MAP TO AC005393.1; EXPRESSED IN PLACENTA, SIGNAL = 5.4; EXPRESSED IN BONE MARROW, SIGNAL = 5.2; EXPRESSED IN ADULT LIVER, SIGNAL = 5.4; EXPRESSED IN LUNG, SIGNAL = 4.5; EXPRESSED IN HELA, SIGNAL = 5.4; EXPRESSED IN HEART, SIGNAL = 4.8; EXPRESSED IN FETAL LIVER, SIGNAL = 5.5; EXPRESSED IN BRAIN, SIGNAL = 5.1; SWISSPROT HIT: Q01371, EVALUE 1.30e+00
PANDQDLCSPRTTGEGGGGFSFKAKCLAPRISSFLPLH

SEQ ID NO: 39486 - protein, 105 aa, Homo sapiens
  MAP TO AC004590.1; EXPRESSED IN BONE MARROW, SIGNAL = 2.2; EXPRESSED IN ADULT LIVER, SIGNAL = 2.5; EXPRESSED IN LUNG, SIGNAL = 2.3; EXPRESSED IN HELA, SIGNAL = 2.6; EXPRESSED IN HEART, SIGNAL = 2.2; EXPRESSED IN FETAL LIVER, SIGNAL = 2.2; EXPRESSED IN BRAIN, SIGNAL = 2.2; EXPRESSED IN PLACENTA, SIGNAL = 2.1; SWISSPROT HIT: O54898, EVALUE 2.00e-49
PLSVDLERYYQTENEDESPFICSQPRENGMRSCRSVPTLRGDGGGGPPCGLDYEAYNSSSNTTCVNWNQYYTNCSAGEHNPFKGAINFDNIGYAWIAIFQVGQPG

SEQ ID NO: 39487 - protein, 36 aa, Homo sapiens
  MAP TO AC006207.5; EXPRESSED IN ADULT LIVER, SIGNAL = 2.3; EXPRESSED IN PLACENTA, SIGNAL = 2.4; EXPRESSED IN HEART, SIGNAL = 2.3; EXPRESSED IN LUNG, SIGNAL = 1.6; EXPRESSED IN FETAL LIVER, SIGNAL = 2.6; EXPRESSED IN BRAIN, SIGNAL = 3.1; EXPRESSED IN BONE MARROW, SIGNAL = 2.2; EXPRESSED IN HELA, SIGNAL = 2.3
KAIGNLDEGKVGRHHIVYTANVDNFFKKLGSEEDER

SEQ ID NO: 39488 - protein, 69 aa, Homo sapiens
  MAP TO AC005544.1; EXPRESSED IN PLACENTA, SIGNAL = 1.7; EXPRESSED IN HEART, SIGNAL = 1.9; EXPRESSED IN FETAL LIVER, SIGNAL = 1.7; EXPRESSED IN BRAIN, SIGNAL =   2; EXPRESSED IN BONE MARROW, SIGNAL = 1.8; EXPRESSED IN ADULT LIVER, SIGNAL = 1.8; EXPRESSED IN HELA, SIGNAL = 1.9; EXPRESSED IN LUNG, SIGNAL = 1.8; SWISSPROT HIT: P42694, EVALUE 5.00e-35
FLSTVRTRHTCKHKQTPIKKKEQLLEDSTEDLDYGFLSNYKLLNTAITRAQSLVAVVGDPIALCSIGRC

SEQ ID NO: 39489 - protein, 32 aa, Homo sapiens
  MAP TO AC005544.1; EXPRESSED IN PLACENTA, SIGNAL = 1.7; EXPRESSED IN HEART, SIGNAL = 1.9; EXPRESSED IN FETAL LIVER, SIGNAL = 1.7; EXPRESSED IN BRAIN, SIGNAL =   2; EXPRESSED IN BONE MARROW, SIGNAL = 1.8; EXPRESSED IN ADULT LIVER, SIGNAL = 1.8; EXPRESSED IN HELA, SIGNAL = 1.9; EXPRESSED IN LUNG, SIGNAL = 1.8
CFLAQYVQDILVNINRHQLKRKSNFWKIPQRT

SEQ ID NO: 39490 - protein, 73 aa, Homo sapiens
  MAP TO AC004593.1; EXPRESSED IN ADULT LIVER, SIGNAL = 3.8; EXPRESSED IN BONE MARROW, SIGNAL = 4.3; EXPRESSED IN PLACENTA, SIGNAL = 3.7; EXPRESSED IN LUNG, SIGNAL = 4.7; EXPRESSED IN HELA, SIGNAL = 4.1; EXPRESSED IN HEART, SIGNAL = 3.5; EXPRESSED IN BRAIN, SIGNAL =   4; EXPRESSED IN FETAL LIVER, SIGNAL = 3.6; SWISSPROT HIT: P19751, EVALUE 1.30e+00
CDTGNGTTGQLVGTDLADSQDGKLGDSSSEWVFYKNKQTAMIDVSLLIFYISFFMGSCGELDWFTDIISLFAG

SEQ ID NO: 39491 - protein, 81 aa, Homo sapiens
  MAP TO AC004896.1; EXPRESSED IN ADULT LIVER, SIGNAL = 5.4; EXPRESSED IN PLACENTA, SIGNAL = 4.7; EXPRESSED IN LUNG, SIGNAL = 5.4; EXPRESSED IN FETAL LIVER, SIGNAL = 4.6; EXPRESSED IN HELA, SIGNAL =   5; EXPRESSED IN HEART, SIGNAL = 5.1; EXPRESSED IN BRAIN, SIGNAL =   5; EXPRESSED IN BONE MARROW, SIGNAL = 4.6; SWISSPROT HIT: P40877, EVALUE 4.20e+00
VIAVEMVAMIVSWMRVIAVEMVATIASWIMVIAVEMVAMIASWIRVIAVEMVAMIVSWIRVTAVEMVAMIVSWIGVIAVEM

SEQ ID NO: 39492 - protein, 86 aa, Homo sapiens
  MAP TO AC005610.1; EXPRESSED IN PLACENTA, SIGNAL = 3.5; EXPRESSED IN ADULT LIVER, SIGNAL = 4.3; EXPRESSED IN LUNG, SIGNAL = 4.3; EXPRESSED IN HELA, SIGNAL =   4; EXPRESSED IN HEART, SIGNAL = 3.5; EXPRESSED IN FETAL LIVER, SIGNAL = 3.3; EXPRESSED IN BRAIN, SIGNAL = 7.5; EXPRESSED IN BONE MARROW, SIGNAL = 3.2; SWISSPROT HIT: Q10145, EVALUE 1.60e+00
VSAQPVPQEPSRKDYETYQPFQNSTRNYDESFFEDQVHHRPPASEYTMHLGLKSTGNYVDFYSAARPYSELNYETSHYPASPDSWV

SEQ ID NO: 39493 - protein, 28 aa, Homo sapiens
  MAP TO AC005610.1; EXPRESSED IN PLACENTA, SIGNAL = 3.5; EXPRESSED IN ADULT LIVER, SIGNAL = 4.3; EXPRESSED IN LUNG, SIGNAL = 4.3; EXPRESSED IN HELA, SIGNAL =   4; EXPRESSED IN HEART, SIGNAL = 3.5; EXPRESSED IN FETAL LIVER, SIGNAL = 3.3; EXPRESSED IN BRAIN, SIGNAL = 7.5; EXPRESSED IN BONE MARROW, SIGNAL = 3.2
FSTASPTGAQQKRLRDLPAISEFHKKLR

SEQ ID NO: 39494 - protein, 26 aa, Homo sapiens
  MAP TO AC006368.2; EXPRESSED IN BONE MARROW, SIGNAL = 1.7; EXPRESSED IN ADULT LIVER, SIGNAL = 3.2; EXPRESSED IN LUNG, SIGNAL = 1.2; EXPRESSED IN HELA, SIGNAL = 1.9; EXPRESSED IN HEART, SIGNAL = 1.8; EXPRESSED IN FETAL LIVER, SIGNAL = 2.4; EXPRESSED IN BRAIN, SIGNAL = 2.2; EXPRESSED IN PLACENTA, SIGNAL = 1.6
ALVSVWTFEEMAREKVNDIRMETKVS

SEQ ID NO: 39495 - protein, 31 aa, Homo sapiens
  MAP TO AC005549.1; EXPRESSED IN PLACENTA, SIGNAL = 2.9; EXPRESSED IN LUNG, SIGNAL =   3; EXPRESSED IN FETAL LIVER, SIGNAL =   3; EXPRESSED IN BONE MARROW, SIGNAL = 3.2; EXPRESSED IN ADULT LIVER, SIGNAL = 2.9; EXPRESSED IN HELA, SIGNAL = 3.2; EXPRESSED IN HEART, SIGNAL = 3.5; EXPRESSED IN BRAIN, SIGNAL = 3.4
RATTLLSSLYVRFYSMISTAKRQLRLLSLFY

SEQ ID NO: 39496 - protein, 24 aa, Homo sapiens
  MAP TO AC004905.1; EXPRESSED IN PLACENTA, SIGNAL = 2.7; EXPRESSED IN HEART, SIGNAL = 2.6; EXPRESSED IN FETAL LIVER, SIGNAL = 3.7; EXPRESSED IN BRAIN, SIGNAL = 2.8; EXPRESSED IN BONE MARROW, SIGNAL = 2.7; EXPRESSED IN HELA, SIGNAL = 2.6; EXPRESSED IN LUNG, SIGNAL = 2.2; EXPRESSED IN ADULT LIVER, SIGNAL = 2.9
HLTMKDIENIIINEEESLNETSGN

SEQ ID NO: 39497 - protein, 35 aa, Homo sapiens
  MAP TO AC005295.1; EXPRESSED IN PLACENTA, SIGNAL = 1.5; EXPRESSED IN HEART, SIGNAL = 1.8; EXPRESSED IN FETAL LIVER, SIGNAL = 1.9; EXPRESSED IN BRAIN, SIGNAL = 1.7; EXPRESSED IN BONE MARROW, SIGNAL = 1.6; EXPRESSED IN ADULT LIVER, SIGNAL = 3.4; EXPRESSED IN HELA, SIGNAL = 1.7; EXPRESSED IN LUNG, SIGNAL = 1.6; SWISSPROT HIT: P51690, EVALUE 1.00e-14
MVSSIGYRVLQWTGASGGLPTNETTFAKILKEKGY

SEQ ID NO: 39498 - protein, 22 aa, Homo sapiens
  MAP TO AC005295.1; EXPRESSED IN PLACENTA, SIGNAL = 1.5; EXPRESSED IN HEART, SIGNAL = 1.8; EXPRESSED IN FETAL LIVER, SIGNAL = 1.9; EXPRESSED IN BRAIN, SIGNAL = 1.7; EXPRESSED IN BONE MARROW, SIGNAL = 1.6; EXPRESSED IN ADULT LIVER, SIGNAL = 3.4; EXPRESSED IN HELA, SIGNAL = 1.7; EXPRESSED IN LUNG, SIGNAL = 1.6
DGFQHWLPCSSVDRSIWRSSNK

SEQ ID NO: 39499 - protein, 64 aa, Homo sapiens
  MAP TO AC006372.2; EXPRESSED IN ADULT LIVER, SIGNAL = 1.9; EXPRESSED IN BONE MARROW, SIGNAL = 1.8; EXPRESSED IN PLACENTA, SIGNAL = 1.5; EXPRESSED IN LUNG, SIGNAL = 1.7; EXPRESSED IN HELA, SIGNAL = 1.6; EXPRESSED IN HEART, SIGNAL = 1.8; EXPRESSED IN BRAIN, SIGNAL = 1.9; EXPRESSED IN FETAL LIVER, SIGNAL = 1.5; SWISSPROT HIT: Q01895, EVALUE 7.70e+00
LDAMKVVPMSAEVYIKSSSSSLQGFRKKATIPNLKNGRKWEIIVWKVVVRCWREQEEFWIHFRL

SEQ ID NO: 39500 - protein, 111 aa, Homo sapiens
  MAP TO AC005483.1; EXPRESSED IN PLACENTA, SIGNAL = 6.5; EXPRESSED IN BRAIN, SIGNAL = 6.3; EXPRESSED IN ADULT LIVER, SIGNAL = 6.8; EXPRESSED IN LUNG, SIGNAL = 6.1; EXPRESSED IN HELA, SIGNAL = 5.8; EXPRESSED IN HEART, SIGNAL = 6.3; EXPRESSED IN FETAL LIVER, SIGNAL = 6.9; EXPRESSED IN BONE MARROW, SIGNAL = 5.2
AFSPCSYLIPELPAPAAPAPAPAAAAAAAAAASPVNQPAPATSPTGALAVPAAAAAAHPTPAATTRLSAAASSYISAATGASAPAAPTPLPLPEPEPTISNPAELQPPAET

SEQ ID NO: 39501 - protein, 37 aa, Homo sapiens
  MAP TO AC002482.1; EXPRESSED IN PLACENTA, SIGNAL = 1.3; EXPRESSED IN LUNG, SIGNAL = 1.3; EXPRESSED IN FETAL LIVER, SIGNAL = 1.3; EXPRESSED IN BONE MARROW, SIGNAL = 1.2; EXPRESSED IN BRAIN, SIGNAL = 1.3; EXPRESSED IN ADULT LIVER, SIGNAL =   1; EXPRESSED IN HEART, SIGNAL = 1.3; SWISSPROT HIT: Q99616, EVALUE 2.00e-15
ALNVPSTCCFTFSSKKISLQRLKSYVITTSRCPQKAV

SEQ ID NO: 39502 - protein, 35 aa, Homo sapiens
  MAP TO AC004962.1; EXPRESSED IN ADULT LIVER, SIGNAL =  11; EXPRESSED IN PLACENTA, SIGNAL = 9.7; EXPRESSED IN LUNG, SIGNAL =  10; EXPRESSED IN HELA, SIGNAL = 9.5; EXPRESSED IN FETAL LIVER, SIGNAL =  10; EXPRESSED IN HEART, SIGNAL =  10; EXPRESSED IN BRAIN, SIGNAL =  12; EXPRESSED IN BONE MARROW, SIGNAL =  10
PEARLGESHVGPECGEEHGQVVQAQAIAGAAQVAE

SEQ ID NO: 39503 - protein, 39 aa, Homo sapiens
  MAP TO AC005369.1; EXPRESSED IN PLACENTA, SIGNAL =  24; EXPRESSED IN BRAIN, SIGNAL =  27; EXPRESSED IN BONE MARROW, SIGNAL =  25; EXPRESSED IN ADULT LIVER, SIGNAL =  25; EXPRESSED IN LUNG, SIGNAL =  28; EXPRESSED IN HELA, SIGNAL =  25; EXPRESSED IN HEART, SIGNAL =  23; EXPRESSED IN FETAL LIVER, SIGNAL =  22; SWISSPROT HIT: P07178, EVALUE 9.00e-14
VSWEEVKNEMVGEKGLAPEVADRIGDYVQQHGEEQNQAS

SEQ ID NO: 39504 - protein, 46 aa, Homo sapiens
  MAP TO AC005291.1; EXPRESSED IN PLACENTA, SIGNAL = 1.2; EXPRESSED IN HEART, SIGNAL =  20; EXPRESSED IN BONE MARROW, SIGNAL = 1.2; EXPRESSED IN ADULT LIVER, SIGNAL = 1.1; EXPRESSED IN LUNG, SIGNAL = 1.5; EXPRESSED IN FETAL LIVER, SIGNAL = 1.2; EXPRESSED IN BRAIN, SIGNAL = 1.3; SWISSPROT HIT: P13535, EVALUE 6.00e-19
NAIDILGFSSEEKVGIYKLTGAVMHYGNMKFKQKQREEQAEPDGTE

SEQ ID NO: 39505 - protein, 18 aa, Homo sapiens
  MAP TO AC005291.1; EXPRESSED IN PLACENTA, SIGNAL = 1.2; EXPRESSED IN HEART, SIGNAL =  20; EXPRESSED IN BONE MARROW, SIGNAL = 1.2; EXPRESSED IN ADULT LIVER, SIGNAL = 1.1; EXPRESSED IN LUNG, SIGNAL = 1.5; EXPRESSED IN FETAL LIVER, SIGNAL = 1.2; EXPRESSED IN BRAIN, SIGNAL = 1.3
MPLTSWASAQRRKSGSTN

SEQ ID NO: 39506 - protein, 84 aa, Homo sapiens
  MAP TO AC005591.1; EXPRESSED IN PLACENTA, SIGNAL = 5.1; EXPRESSED IN LUNG, SIGNAL = 5.5; EXPRESSED IN FETAL LIVER, SIGNAL = 4.5; EXPRESSED IN BRAIN, SIGNAL = 5.8; EXPRESSED IN ADULT LIVER, SIGNAL = 4.8; EXPRESSED IN HELA, SIGNAL = 5.1; EXPRESSED IN HEART, SIGNAL = 4.8; EXPRESSED IN BONE MARROW, SIGNAL = 4.8
AGNHCELLPLARGRLGAGLGWLLVPPLKRGAQRPGPAPQQQVQVGPALQRRHLLPHHWADAAVSGPEILPVPLEPGRPRPGLGQ

SEQ ID NO: 39507 - protein, 113 aa, Homo sapiens
  MAP TO AC003104.1; EXPRESSED IN LUNG, SIGNAL = 1.1; EXPRESSED IN ADULT LIVER, SIGNAL = 1.2; EXPRESSED IN PLACENTA, SIGNAL = 1.3; EXPRESSED IN HEART, SIGNAL = 1.3; EXPRESSED IN FETAL LIVER, SIGNAL = 1.3; EXPRESSED IN BRAIN, SIGNAL = 1.2; EXPRESSED IN BONE MARROW, SIGNAL = 1.6
MAEPSQAPTPAPAAQPRPLQSPAPAPTPTPAPSPASAPIPTPTPAPAPAPAAAPAGSTGTGGPGVGSGGAGSGGDPARPGLSQQQRASQRKAQVRGLPRAKKLEKLGVFSACK

SEQ ID NO: 39508 - protein, 44 aa, Homo sapiens
  MAP TO AC005414.2; EXPRESSED IN LUNG, SIGNAL = 0.96; EXPRESSED IN BRAIN, SIGNAL = 0.75; EXPRESSED IN PLACENTA, SIGNAL =   1; EXPRESSED IN HEART, SIGNAL = 1.3; EXPRESSED IN FETAL LIVER, SIGNAL = 0.92; EXPRESSED IN BONE MARROW, SIGNAL = 0.91; EXPRESSED IN ADULT LIVER, SIGNAL = 0.93
EEMTEEEEEMKLTENKEEEEATKMTTKVMMTMKRRRHVNYKSIK

SEQ ID NO: 39509 - protein, 129 aa, Homo sapiens
  MAP TO AC005611.1; EXPRESSED IN LUNG, SIGNAL = 6.7; EXPRESSED IN BRAIN, SIGNAL = 6.9; EXPRESSED IN ADULT LIVER, SIGNAL = 7.3; EXPRESSED IN PLACENTA, SIGNAL = 6.8; EXPRESSED IN HELA, SIGNAL = 7.6; EXPRESSED IN HEART, SIGNAL = 7.2; EXPRESSED IN FETAL LIVER, SIGNAL = 7.4; EXPRESSED IN BONE MARROW, SIGNAL = 7.2; SWISSPROT HIT: P07986, EVALUE 2.20e-01
ATSSFSSPNVSSMESFPPLAYSTPQPPLPPVRPSAPLPFVPPPAVPSVPPLVTSMPPPVSPSTAAAFGNPPVSHFPPSTSAPNTLLPAPPSGPPISGFSVGSTYDITRGHAGRAPQTPLMPSFSAPSGT

SEQ ID NO: 39510 - protein, 60 aa, Homo sapiens
  MAP TO AC005611.1; EXPRESSED IN LUNG, SIGNAL = 6.7; EXPRESSED IN BRAIN, SIGNAL = 6.9; EXPRESSED IN ADULT LIVER, SIGNAL = 7.3; EXPRESSED IN PLACENTA, SIGNAL = 6.8; EXPRESSED IN HELA, SIGNAL = 7.6; EXPRESSED IN HEART, SIGNAL = 7.2; EXPRESSED IN FETAL LIVER, SIGNAL = 7.4; EXPRESSED IN BONE MARROW, SIGNAL = 7.2; SWISSPROT HIT: P14425, EVALUE 4.00e-01
KCILHGVLPTTRILYSSAAPSSCEAFSTITFCASSCSSFCPTTCYFYATSCFSINCCCLR

SEQ ID NO: 39511 - protein, 63 aa, Homo sapiens
  MAP TO AC004060.1; EXPRESSED IN PLACENTA, SIGNAL = 2.3; EXPRESSED IN HELA, SIGNAL = 2.2; EXPRESSED IN HEART, SIGNAL =   2; EXPRESSED IN BONE MARROW, SIGNAL = 2.1; EXPRESSED IN FETAL LIVER, SIGNAL = 2.1; EXPRESSED IN LUNG, SIGNAL = 1.8; EXPRESSED IN BRAIN, SIGNAL = 1.9; EXPRESSED IN ADULT LIVER, SIGNAL = 1.9
MKVERLEEPQLVEEPQLGEDPELGEEAQFLEELQLEVVESGSDLDPEDLGSSPDFATNLMLEL

SEQ ID NO: 39512 - protein, 58 aa, Homo sapiens
  MAP TO AC005701.1; EXPRESSED IN ADULT LIVER, SIGNAL = 2.6; EXPRESSED IN PLACENTA, SIGNAL = 3.2; EXPRESSED IN LUNG, SIGNAL = 2.9; EXPRESSED IN HELA, SIGNAL = 2.5; EXPRESSED IN HEART, SIGNAL = 2.2; EXPRESSED IN BRAIN, SIGNAL = 2.5; EXPRESSED IN BONE MARROW, SIGNAL = 2.4; EXPRESSED IN FETAL LIVER, SIGNAL = 2.4; SWISSPROT HIT: P39057, EVALUE 2.00e-24
LVDYRAEFSKWWLTEFKTVKFPSQGTIFDYYIDPETKKFEPWSKLVPQFEFDPEMPLQ

SEQ ID NO: 39513 - protein, 50 aa, Homo sapiens
  MAP TO AC002542.1; EXPRESSED IN PLACENTA, SIGNAL = 3.7; EXPRESSED IN HEART, SIGNAL = 3.1; EXPRESSED IN BONE MARROW, SIGNAL = 3.5; EXPRESSED IN ADULT LIVER, SIGNAL =   4; EXPRESSED IN HELA, SIGNAL = 3.7; EXPRESSED IN FETAL LIVER, SIGNAL = 3.8; EXPRESSED IN LUNG, SIGNAL = 4.2; EXPRESSED IN BRAIN, SIGNAL = 3.1; SWISSPROT HIT: Q92355, EVALUE 4.70e+00
GSNGGGNGDTFEGKVNNTYWQCMWSVRNKGVMDNLKVFGLNNWKDEAATT

SEQ ID NO: 39514 - protein, 46 aa, Homo sapiens
  MAP TO AC004675.1; EXPRESSED IN PLACENTA, SIGNAL = 6.3; EXPRESSED IN LUNG, SIGNAL = 5.4; EXPRESSED IN HELA, SIGNAL =   5; EXPRESSED IN HEART, SIGNAL = 4.6; EXPRESSED IN BRAIN, SIGNAL = 5.2; EXPRESSED IN BONE MARROW, SIGNAL =   5; EXPRESSED IN FETAL LIVER, SIGNAL = 4.2; EXPRESSED IN ADULT LIVER, SIGNAL = 4.6; SWISSPROT HIT: P17897, EVALUE 3.70e-02
MTKALLIYLVSSFLALNQASLISRCDLAQVLQLEDLDGFEGYSLSD

SEQ ID NO: 39515 - protein, 122 aa, Homo sapiens
  MAP TO AC004816.1; EXPRESSED IN PLACENTA, SIGNAL =   3; EXPRESSED IN ADULT LIVER, SIGNAL =   3; EXPRESSED IN LUNG, SIGNAL = 3.3; EXPRESSED IN HELA, SIGNAL = 3.2; EXPRESSED IN HEART, SIGNAL = 2.8; EXPRESSED IN FETAL LIVER, SIGNAL = 2.8; EXPRESSED IN BRAIN, SIGNAL = 3.4; EXPRESSED IN BONE MARROW, SIGNAL = 3.1; SWISSPROT HIT: Q02779, EVALUE 9.00e-17
MLLLGDPSASLTLLSLSSISECNSTRSLLRSDSDEIVVYEMPVSPVEAPPLSPCTHNPLVNVRVERFKRDPNQSLTPTHVTLTTPSQPSSHRRTPSDGALKPETLLASRSPSSNGLSPSPGA

SEQ ID NO: 39516 - protein, 46 aa, Homo sapiens
  MAP TO AC005840.1; EXPRESSED IN PLACENTA, SIGNAL = 4.5; EXPRESSED IN LUNG, SIGNAL = 5.1; EXPRESSED IN HEART, SIGNAL = 3.7; EXPRESSED IN BRAIN, SIGNAL = 5.6; EXPRESSED IN BONE MARROW, SIGNAL = 5.4; EXPRESSED IN ADULT LIVER, SIGNAL = 3.6; EXPRESSED IN HELA, SIGNAL = 4.3; EXPRESSED IN FETAL LIVER, SIGNAL = 3.8; SWISSPROT HIT: P48740, EVALUE 8.20e+00
HEQERRKLRKAHVLEEACLKSSRSHRVCSLILSPAHGRGRGWRLLL

SEQ ID NO: 39517 - protein, 28 aa, Homo sapiens
  MAP TO AC004448.1; EXPRESSED IN ADULT LIVER, SIGNAL =  11; EXPRESSED IN PLACENTA, SIGNAL =  14; EXPRESSED IN LUNG, SIGNAL =  14; EXPRESSED IN HELA, SIGNAL =  13; EXPRESSED IN HEART, SIGNAL =  12; EXPRESSED IN BRAIN, SIGNAL =  12; EXPRESSED IN FETAL LIVER, SIGNAL =  12; EXPRESSED IN BONE MARROW, SIGNAL =  12
GIAGTNGTGWGGEFGTKNTHEPLEATIE

SEQ ID NO: 39518 - protein, 65 aa, Homo sapiens
  MAP TO AC002544.1; EXPRESSED IN PLACENTA, SIGNAL = 5.7; EXPRESSED IN LUNG, SIGNAL = 6.1; EXPRESSED IN FETAL LIVER, SIGNAL =   6; EXPRESSED IN BRAIN, SIGNAL = 6.7; EXPRESSED IN BONE MARROW, SIGNAL = 6.6; EXPRESSED IN ADULT LIVER, SIGNAL = 7.5; EXPRESSED IN HELA, SIGNAL = 5.8; EXPRESSED IN HEART, SIGNAL = 5.3; SWISSPROT HIT: Q07266, EVALUE 1.20e+00
TLSDDEEERHPNTHRANLFRWQHQARVELMEQFQKEKEELDRGCWEYKCKMAECQRKLKELEVSE

SEQ ID NO: 39519 - protein, 22 aa, Homo sapiens
  MAP TO AC004527.2; EXPRESSED IN PLACENTA, SIGNAL = 2.6; EXPRESSED IN LUNG, SIGNAL = 2.7; EXPRESSED IN HEART, SIGNAL = 2.1; EXPRESSED IN BRAIN, SIGNAL =   2; EXPRESSED IN BONE MARROW, SIGNAL =   2; EXPRESSED IN ADULT LIVER, SIGNAL = 2.5; EXPRESSED IN HELA, SIGNAL = 2.3; EXPRESSED IN FETAL LIVER, SIGNAL =   2
ASTALWASWMPRGRPQAILRRT

SEQ ID NO: 39520 - protein, 27 aa, Homo sapiens
  MAP TO AC004527.2; EXPRESSED IN PLACENTA, SIGNAL = 2.6; EXPRESSED IN LUNG, SIGNAL = 2.7; EXPRESSED IN HEART, SIGNAL = 2.1; EXPRESSED IN BRAIN, SIGNAL =   2; EXPRESSED IN BONE MARROW, SIGNAL =   2; EXPRESSED IN ADULT LIVER, SIGNAL = 2.5; EXPRESSED IN HELA, SIGNAL = 2.3; EXPRESSED IN FETAL LIVER, SIGNAL =   2
SDKKCGTVPASRSWPCGSSTRLGPFCT

SEQ ID NO: 39521 - protein, 76 aa, Homo sapiens
  MAP TO AC005509.1; EXPRESSED IN PLACENTA, SIGNAL = 3.7; EXPRESSED IN BRAIN, SIGNAL = 1.5; EXPRESSED IN BONE MARROW, SIGNAL = 1.3; EXPRESSED IN ADULT LIVER, SIGNAL =   2; EXPRESSED IN LUNG, SIGNAL = 5.5; EXPRESSED IN HELA, SIGNAL = 4.5; EXPRESSED IN HEART, SIGNAL = 1.5; EXPRESSED IN FETAL LIVER, SIGNAL = 1.6; SWISSPROT HIT: P97874, EVALUE 8.20e-02
RPALPSALRSASPGRSWPGSAQPAPRAGHYVSLHTHEQSLLPLILSSEVICSQTGIVDLQDNPGILNDVTKNLVAQ

SEQ ID NO: 39522 - protein, 37 aa, Homo sapiens
  MAP TO AC005509.1; EXPRESSED IN PLACENTA, SIGNAL = 3.7; EXPRESSED IN BRAIN, SIGNAL = 1.5; EXPRESSED IN BONE MARROW, SIGNAL = 1.3; EXPRESSED IN ADULT LIVER, SIGNAL =   2; EXPRESSED IN LUNG, SIGNAL = 5.5; EXPRESSED IN HELA, SIGNAL = 4.5; EXPRESSED IN HEART, SIGNAL = 1.5; EXPRESSED IN FETAL LIVER, SIGNAL = 1.6
PPMTTATTTGPSSTCATRFLVTSLRIPGLSCRSTMPV

SEQ ID NO: 39523 - protein, 41 aa, Homo sapiens
  MAP TO AC004242.1; EXPRESSED IN PLACENTA, SIGNAL = 3.5; EXPRESSED IN ADULT LIVER, SIGNAL = 3.5; EXPRESSED IN LUNG, SIGNAL = 3.4; EXPRESSED IN HELA, SIGNAL = 3.1; EXPRESSED IN HEART, SIGNAL =   3; EXPRESSED IN FETAL LIVER, SIGNAL = 3.1; EXPRESSED IN BRAIN, SIGNAL =   3; EXPRESSED IN BONE MARROW, SIGNAL = 3.3; SWISSPROT HIT: P38537, EVALUE 8.30e+00
YSLVLHVLGRQETSVNICKKYTGSLQKVRDNSKQGGGFQVT

SEQ ID NO: 39524 - protein, 56 aa, Homo sapiens
  MAP TO AC006137.1; EXPRESSED IN PLACENTA, SIGNAL =   3; EXPRESSED IN HEART, SIGNAL = 4.1; EXPRESSED IN LUNG, SIGNAL = 3.4; EXPRESSED IN FETAL LIVER, SIGNAL = 4.5; EXPRESSED IN BRAIN, SIGNAL = 5.8; EXPRESSED IN BONE MARROW, SIGNAL = 3.3; EXPRESSED IN ADULT LIVER, SIGNAL = 3.4; EXPRESSED IN HELA, SIGNAL = 3.6; SWISSPROT HIT: P04289, EVALUE 7.00e-01
KRSVSLNCAINSSLGSSSAPGATHRHPQNPLGACPGDPLSPPTGLAVMGVECICFI

SEQ ID NO: 39525 - protein, 53 aa, Homo sapiens
  MAP TO AC006137.1; EXPRESSED IN PLACENTA, SIGNAL =   3; EXPRESSED IN HEART, SIGNAL = 4.1; EXPRESSED IN LUNG, SIGNAL = 3.4; EXPRESSED IN FETAL LIVER, SIGNAL = 4.5; EXPRESSED IN BRAIN, SIGNAL = 5.8; EXPRESSED IN BONE MARROW, SIGNAL = 3.3; EXPRESSED IN ADULT LIVER, SIGNAL = 3.4; EXPRESSED IN HELA, SIGNAL = 3.6
RVSELRHQLQSRQQLRSRRHPPTPPEPSGGLPRGPPEPPDRLSCDGSRVHLLY

SEQ ID NO: 39526 - protein, 38 aa, Homo sapiens
  MAP TO AC005905.1; EXPRESSED IN BRAIN, SIGNAL = 3.4; EXPRESSED IN ADULT LIVER, SIGNAL = 3.4; EXPRESSED IN PLACENTA, SIGNAL = 3.9; EXPRESSED IN LUNG, SIGNAL =   3; EXPRESSED IN HELA, SIGNAL = 3.9; EXPRESSED IN HEART, SIGNAL = 3.1; EXPRESSED IN BONE MARROW, SIGNAL =   4; EXPRESSED IN FETAL LIVER, SIGNAL = 4.1; SWISSPROT HIT: P51484, EVALUE 8.40e+00
KSSQRAIGERAEGPPTTATFTLNSTGKALSCILLYDCD

SEQ ID NO: 39527 - protein, 104 aa, Homo sapiens
  MAP TO AC005522.1; EXPRESSED IN PLACENTA, SIGNAL = 3.7; EXPRESSED IN LUNG, SIGNAL = 3.8; EXPRESSED IN HEART, SIGNAL = 3.5; EXPRESSED IN FETAL LIVER, SIGNAL = 3.5; EXPRESSED IN BRAIN, SIGNAL = 4.1; EXPRESSED IN BONE MARROW, SIGNAL = 3.7; EXPRESSED IN ADULT LIVER, SIGNAL = 3.8; EXPRESSED IN HELA, SIGNAL = 3.3; SWISSPROT HIT: Q06633, EVALUE 3.00e-57
MELSYRLFICLLLWGSTELCYPQPLWLLQGGASHPETSVQPVLVECQEATLMVMVSKDLFGTGKLIRAADLTLGPEACEPLVSMDTEDVVRFEVGLHECGNSMQ

SEQ ID NO: 39528 - protein, 61 aa, Homo sapiens
  MAP TO AC005908.1; EXPRESSED IN PLACENTA, SIGNAL = 2.3; EXPRESSED IN HEART, SIGNAL = 2.1; EXPRESSED IN BRAIN, SIGNAL = 2.4; EXPRESSED IN BONE MARROW, SIGNAL = 2.4; EXPRESSED IN ADULT LIVER, SIGNAL =   2; EXPRESSED IN LUNG, SIGNAL = 2.7; EXPRESSED IN HELA, SIGNAL = 2.2; EXPRESSED IN FETAL LIVER, SIGNAL = 2.2; SWISSPROT HIT: O75385, EVALUE 4.50e+00
FQGTPRNSEATSKTPLPGGRAGPTSTHSASRAICCAARSSPNSPTAFSSRNARDHPSELPT

SEQ ID NO: 39529 - protein, 24 aa, Homo sapiens
  MAP TO AC004098.1; EXPRESSED IN PLACENTA, SIGNAL = 4.1; EXPRESSED IN HEART, SIGNAL = 4.1; EXPRESSED IN BONE MARROW, SIGNAL = 3.9; EXPRESSED IN ADULT LIVER, SIGNAL = 4.2; EXPRESSED IN LUNG, SIGNAL = 5.5; EXPRESSED IN HELA, SIGNAL = 4.1; EXPRESSED IN FETAL LIVER, SIGNAL = 3.9; EXPRESSED IN BRAIN, SIGNAL = 4.8
HFSPPDYPGPHAPQMQVPRAVGQL

SEQ ID NO: 39530 - protein, 170 aa, Homo sapiens
  MAP TO AC004943.1; EXPRESSED IN PLACENTA, SIGNAL = 1.5; EXPRESSED IN LUNG, SIGNAL = 1.6; EXPRESSED IN FETAL LIVER, SIGNAL = 1.4; EXPRESSED IN BRAIN, SIGNAL = 1.4; EXPRESSED IN BONE MARROW, SIGNAL = 1.4; EXPRESSED IN ADULT LIVER, SIGNAL = 1.7; EXPRESSED IN HELA, SIGNAL = 1.7; EXPRESSED IN HEART, SIGNAL = 1.8; SWISSPROT HIT: P32323, EVALUE 4.00e-03
PLSPVSKTMELSPRTLLSPSSIKVEGIEDFESPSMSSVNLNFDQTKLDNDDCSSVNTAITDTTTGDEGNADNDSATGIATETKSSSAPNEGLTKAAMMAMSEYEDRLSSGLVSPAPSFYSKEYDNEGTVDYSETSSLADPCSPSPGASGSAGKSGDSGDRPGQKRFRTQM

SEQ ID NO: 39531 - protein, 53 aa, Homo sapiens
  MAP TO AC005529.7; EXPRESSED IN PLACENTA, SIGNAL = 2.4; EXPRESSED IN LUNG, SIGNAL = 3.6; EXPRESSED IN FETAL LIVER, SIGNAL = 4.2; EXPRESSED IN BRAIN, SIGNAL = 2.5; EXPRESSED IN ADULT LIVER, SIGNAL = 3.1; EXPRESSED IN HELA, SIGNAL = 2.5; EXPRESSED IN HEART, SIGNAL = 2.5; EXPRESSED IN BONE MARROW, SIGNAL = 3.8; SWISSPROT HIT: P20186, EVALUE 1.20e+00
GTGMTAQQQWPAAPEAMGRAARQPRNAGRRKPTRRQEPTTTGEPWPTARGAKA

SEQ ID NO: 39532 - protein, 41 aa, Homo sapiens
  MAP TO AC004387.1; EXPRESSED IN BRAIN, SIGNAL = 1.2; EXPRESSED IN ADULT LIVER, SIGNAL = 1.4; EXPRESSED IN PLACENTA, SIGNAL = 1.3; EXPRESSED IN LUNG, SIGNAL = 1.2; EXPRESSED IN HELA, SIGNAL = 2.1; EXPRESSED IN HEART, SIGNAL = 1.3; EXPRESSED IN BONE MARROW, SIGNAL = 1.5; EXPRESSED IN FETAL LIVER, SIGNAL = 1.4; SWISSPROT HIT: O77695, EVALUE 8.30e+00
DCPPCVFSEEEHTQVPCHQAGAQEAQPLQPSHFLDISEDWS

SEQ ID NO: 39533 - protein, 83 aa, Homo sapiens
  MAP TO AC004830.1; EXPRESSED IN LUNG, SIGNAL = 3.5; EXPRESSED IN FETAL LIVER, SIGNAL =   3; EXPRESSED IN BONE MARROW, SIGNAL = 3.1; EXPRESSED IN HELA, SIGNAL =   3; EXPRESSED IN BRAIN, SIGNAL = 3.2; EXPRESSED IN ADULT LIVER, SIGNAL = 2.8; EXPRESSED IN PLACENTA, SIGNAL = 3.1; EXPRESSED IN HEART, SIGNAL = 2.9; SWISSPROT HIT: P51459, EVALUE 2.20e+00
VNFIKSKIWHQFVIQLLRSLFPHPTLVNHKRGSLVLKELEALYYSQKQSGSSKRACHPNLINYNISTFLIIPKSHPVHHRRFS

SEQ ID NO: 39534 - protein, 96 aa, Homo sapiens
  MAP TO AC004551.1; EXPRESSED IN PLACENTA, SIGNAL = 0.82; EXPRESSED IN LUNG, SIGNAL = 0.67; EXPRESSED IN BONE MARROW, SIGNAL = 0.79; EXPRESSED IN ADULT LIVER, SIGNAL = 0.72; EXPRESSED IN FETAL LIVER, SIGNAL = 0.78; EXPRESSED IN HEART, SIGNAL = 4.1; SWISSPROT HIT: P29728, EVALUE 2.00e-23
YLISANMNQHIFLLVLQCTKISKGRGSLPPQHGLELLTVYAWEQGGKDSQFNMAEGFRTVLELVTQYRQLCIYWTINYNAKDKTVGDFLKQQLQKP

SEQ ID NO: 39535 - protein, 48 aa, Homo sapiens
  MAP TO AC005598.6; EXPRESSED IN PLACENTA, SIGNAL = 4.1; EXPRESSED IN LUNG, SIGNAL = 4.4; EXPRESSED IN HELA, SIGNAL =   4; EXPRESSED IN FETAL LIVER, SIGNAL = 3.8; EXPRESSED IN ADULT LIVER, SIGNAL = 4.4; EXPRESSED IN HEART, SIGNAL = 3.6; EXPRESSED IN BRAIN, SIGNAL = 4.1; EXPRESSED IN BONE MARROW, SIGNAL =   4; SWISSPROT HIT: P35658, EVALUE 3.60e+00
GKVLEKSGFVSTAATQTRPTGVSTGGSPACARLSLLTPNLTGIKPCRS

SEQ ID NO: 39536 - protein, 44 aa, Homo sapiens
  MAP TO AC004447.1; EXPRESSED IN LUNG, SIGNAL = 4.3; EXPRESSED IN HELA, SIGNAL = 4.1; EXPRESSED IN HEART, SIGNAL = 3.7; EXPRESSED IN FETAL LIVER, SIGNAL = 4.4; EXPRESSED IN BONE MARROW, SIGNAL = 4.1; EXPRESSED IN PLACENTA, SIGNAL = 4.4; EXPRESSED IN BRAIN, SIGNAL = 4.4; EXPRESSED IN ADULT LIVER, SIGNAL = 3.7; SWISSPROT HIT: O15226, EVALUE 4.00e-05
KPKDLDFAQQKLTDKNLGFQMLQKMGWKEGHGLGSLGKGIREPV

SEQ ID NO: 39537 - protein, 50 aa, Homo sapiens
  MAP TO AC004125.1; EXPRESSED IN PLACENTA, SIGNAL = 2.5; EXPRESSED IN BRAIN, SIGNAL = 2.4; EXPRESSED IN BONE MARROW, SIGNAL =   2; EXPRESSED IN ADULT LIVER, SIGNAL = 2.2; EXPRESSED IN LUNG, SIGNAL = 2.6; EXPRESSED IN HELA, SIGNAL = 2.2; EXPRESSED IN HEART, SIGNAL = 1.9; EXPRESSED IN FETAL LIVER, SIGNAL = 2.1; SWISSPROT HIT: O78755, EVALUE 8.10e+00
LTKSCKAPRIIILAGQPLPNSQILTFHWLRLVFTPVQLPLLSLEIQQEMQ

SEQ ID NO: 39538 - protein, 29 aa, Homo sapiens
  MAP TO AC004836.2; EXPRESSED IN LUNG, SIGNAL =   6; EXPRESSED IN HEART, SIGNAL = 5.6; EXPRESSED IN ADULT LIVER, SIGNAL = 5.6; EXPRESSED IN BONE MARROW, SIGNAL =   6; EXPRESSED IN BRAIN, SIGNAL = 5.9; EXPRESSED IN FETAL LIVER, SIGNAL = 5.9; EXPRESSED IN HELA, SIGNAL =   6; EXPRESSED IN PLACENTA, SIGNAL = 5.5
MNTLPSIGPELLKVDPLLLSNRTFINLPF

SEQ ID NO: 39539 - protein, 29 aa, Homo sapiens
  MAP TO AC004836.2; EXPRESSED IN LUNG, SIGNAL =   6; EXPRESSED IN HEART, SIGNAL = 5.6; EXPRESSED IN ADULT LIVER, SIGNAL = 5.6; EXPRESSED IN BONE MARROW, SIGNAL =   6; EXPRESSED IN BRAIN, SIGNAL = 5.9; EXPRESSED IN FETAL LIVER, SIGNAL = 5.9; EXPRESSED IN HELA, SIGNAL =   6; EXPRESSED IN PLACENTA, SIGNAL = 5.5
PNGRFMKVLFDKSKGSTLSSSGPMEGKVF

SEQ ID NO: 39540 - protein, 94 aa, Homo sapiens
  MAP TO AC004736.1; EXPRESSED IN LUNG, SIGNAL = 3.6; EXPRESSED IN FETAL LIVER, SIGNAL = 3.9; EXPRESSED IN BONE MARROW, SIGNAL = 6.2; EXPRESSED IN HELA, SIGNAL = 3.7; EXPRESSED IN BRAIN, SIGNAL = 3.7; EXPRESSED IN ADULT LIVER, SIGNAL =   4; EXPRESSED IN PLACENTA, SIGNAL = 3.7; EXPRESSED IN HEART, SIGNAL = 3.5; SWISSPROT HIT: O69635, EVALUE 1.20e-01
QVLCVTSPQSIWSLCSLTLSRRPGLCQKLWRGLAEVYQGGRWWLSQRWGRGFSGGSFQGPLPGLRISRPPRQLNIMPLAILSGLMTRGFTLDQK

SEQ ID NO: 39541 - protein, 69 aa, Homo sapiens
  MAP TO AC004843.1; EXPRESSED IN HELA, SIGNAL = 3.9; EXPRESSED IN HEART, SIGNAL = 3.7; EXPRESSED IN BRAIN, SIGNAL = 4.1; EXPRESSED IN ADULT LIVER, SIGNAL = 3.8; EXPRESSED IN LUNG, SIGNAL = 4.1; EXPRESSED IN FETAL LIVER, SIGNAL = 3.8; EXPRESSED IN BONE MARROW, SIGNAL =   4; EXPRESSED IN PLACENTA, SIGNAL = 3.7; SWISSPROT HIT: P28284, EVALUE 1.50e+00
IQWEALWETTAVGGHGARNLLPYGAQQEDLKASSNMPAGHGWVDGGLVEFGGLGSYDNVKRDPEMVGGQ

SEQ ID NO: 39542 - protein, 38 aa, Homo sapiens
  MAP TO AC004595.1; EXPRESSED IN PLACENTA, SIGNAL = 6.8; EXPRESSED IN LUNG, SIGNAL = 6.9; EXPRESSED IN FETAL LIVER, SIGNAL = 9.2; EXPRESSED IN HELA, SIGNAL = 7.7; EXPRESSED IN BRAIN, SIGNAL = 8.5; EXPRESSED IN BONE MARROW, SIGNAL = 6.3; EXPRESSED IN ADULT LIVER, SIGNAL = 9.3; EXPRESSED IN HEART, SIGNAL =  12; SWISSPROT HIT: Q02446, EVALUE 1.00e-06
QKKEEEEEAAAAAAMATEGGKTSEPENNNKKPKTSGSQ

SEQ ID NO: 39543 - protein, 33 aa, Homo sapiens
  MAP TO AC004595.1; EXPRESSED IN PLACENTA, SIGNAL = 6.8; EXPRESSED IN LUNG, SIGNAL = 6.9; EXPRESSED IN FETAL LIVER, SIGNAL = 9.2; EXPRESSED IN HELA, SIGNAL = 7.7; EXPRESSED IN BRAIN, SIGNAL = 8.5; EXPRESSED IN BONE MARROW, SIGNAL = 6.3; EXPRESSED IN ADULT LIVER, SIGNAL = 9.3; EXPRESSED IN HEART, SIGNAL =  12
RRRRQRQRRWLQKEGKPLSQRITIKNPKPQAPR

SEQ ID NO: 39544 - protein, 45 aa, Homo sapiens
  MAP TO AC005606.1; EXPRESSED IN LUNG, SIGNAL = 4.3; EXPRESSED IN BONE MARROW, SIGNAL = 3.9; EXPRESSED IN PLACENTA, SIGNAL = 4.1; EXPRESSED IN HELA, SIGNAL = 3.6; EXPRESSED IN HEART, SIGNAL =   3; EXPRESSED IN FETAL LIVER, SIGNAL = 3.6; EXPRESSED IN BRAIN, SIGNAL = 3.6; EXPRESSED IN ADULT LIVER, SIGNAL = 3.6; SWISSPROT HIT: Q92901, EVALUE 5.00e-23
VTSRWHTKKLPRKTHKGLRKVACIGAWHPARVGCSIARAGQKGYH

SEQ ID NO: 39545 - protein, 68 aa, Homo sapiens
  MAP TO AC004453.1; EXPRESSED IN LUNG, SIGNAL = 2.4; EXPRESSED IN BRAIN, SIGNAL =   3; EXPRESSED IN PLACENTA, SIGNAL = 2.6; EXPRESSED IN HEART, SIGNAL = 2.5; EXPRESSED IN BONE MARROW, SIGNAL = 2.2; EXPRESSED IN ADULT LIVER, SIGNAL = 2.5; EXPRESSED IN HELA, SIGNAL = 2.8; EXPRESSED IN FETAL LIVER, SIGNAL = 2.8; SWISSPROT HIT: P17624, EVALUE 7.00e-04
GEYWWNAILEGEEPIDIDKINKERSMATVDEEEQAVLDRLTFDYHQKLQGKPQSHELVRAWQSWRVHP

SEQ ID NO: 39546 - protein, 43 aa, Homo sapiens
  MAP TO AC005610.1; EXPRESSED IN BONE MARROW, SIGNAL = 4.2; EXPRESSED IN PLACENTA, SIGNAL =   4; EXPRESSED IN LUNG, SIGNAL = 4.4; EXPRESSED IN HELA, SIGNAL =   5; EXPRESSED IN FETAL LIVER, SIGNAL = 4.4; EXPRESSED IN ADULT LIVER, SIGNAL = 4.4; EXPRESSED IN HEART, SIGNAL =   4; EXPRESSED IN BRAIN, SIGNAL = 4.1; SWISSPROT HIT: P50938, EVALUE 6.30e+00
LISPPHMKTTKGLSQEFQNLFALEAENFEKVECLLIQDQQNKD

SEQ ID NO: 39547 - protein, 99 aa, Homo sapiens
  MAP TO AC006121.1; EXPRESSED IN PLACENTA, SIGNAL = 1.6; EXPRESSED IN BONE MARROW, SIGNAL = 1.7; EXPRESSED IN ADULT LIVER, SIGNAL = 1.9; EXPRESSED IN LUNG, SIGNAL = 1.6; EXPRESSED IN HEART, SIGNAL = 1.5; EXPRESSED IN FETAL LIVER, SIGNAL = 1.7; EXPRESSED IN BRAIN, SIGNAL = 1.8; SWISSPROT HIT: P70398, EVALUE 5.00e-56
LCAPQAKQIWKCLAENAVYLCDREACFKWYSKLMGDEPDLDPDINKDFFESNVLQLDPSLLTENGMKCFERFFKAVNCREGKLVAKRRAYMMDDLELIG

SEQ ID NO: 39548 - protein, 44 aa, Homo sapiens
  MAP TO AC004847.1; EXPRESSED IN PLACENTA, SIGNAL = 2.2; EXPRESSED IN LUNG, SIGNAL = 2.4; EXPRESSED IN FETAL LIVER, SIGNAL = 2.5; EXPRESSED IN HELA, SIGNAL = 2.6; EXPRESSED IN BRAIN, SIGNAL = 2.7; EXPRESSED IN BONE MARROW, SIGNAL = 2.5; EXPRESSED IN ADULT LIVER, SIGNAL = 2.7; EXPRESSED IN HEART, SIGNAL = 2.5; SWISSPROT HIT: P70727, EVALUE 6.30e+00
MLLQPKDLRQGYPHSGSGIPTYWSISREGTQTQASTILSTSPGW

SEQ ID NO: 39549 - protein, 43 aa, Homo sapiens
  MAP TO AC004847.1; EXPRESSED IN PLACENTA, SIGNAL = 2.2; EXPRESSED IN LUNG, SIGNAL = 2.4; EXPRESSED IN FETAL LIVER, SIGNAL = 2.5; EXPRESSED IN HELA, SIGNAL = 2.6; EXPRESSED IN BRAIN, SIGNAL = 2.7; EXPRESSED IN BONE MARROW, SIGNAL = 2.5; EXPRESSED IN ADULT LIVER, SIGNAL = 2.7; EXPRESSED IN HEART, SIGNAL = 2.5; SWISSPROT HIT: Q13491, EVALUE 7.30e-01
CCCNQRTCAKDTPTAVVGSPLTGASPVKAHRPKHQPSSAPAQG

SEQ ID NO: 39550 - protein, 102 aa, Homo sapiens
  MAP TO AC004752.1; EXPRESSED IN HELA, SIGNAL = 2.4; EXPRESSED IN BRAIN, SIGNAL = 2.3; EXPRESSED IN ADULT LIVER, SIGNAL = 2.2; EXPRESSED IN PLACENTA, SIGNAL = 2.1; EXPRESSED IN LUNG, SIGNAL = 2.4; EXPRESSED IN HEART, SIGNAL = 2.2; EXPRESSED IN FETAL LIVER, SIGNAL = 2.1; EXPRESSED IN BONE MARROW, SIGNAL = 2.3; SWISSPROT HIT: P18168, EVALUE 4.60e+00
GKMRLRKFMVVIFSNTYLIMSFSCLTYPRKPSKPLSIASKALCDLFLAYFSHLCSNHFSACSPHFIFSGHCLFCKRVKPIPISRPLHLLFPAPGALFLHFQN

SEQ ID NO: 39551 - protein, 32 aa, Homo sapiens
  MAP TO AC004518.1; EXPRESSED IN PLACENTA, SIGNAL = 5.7; EXPRESSED IN LUNG, SIGNAL = 6.2; EXPRESSED IN FETAL LIVER, SIGNAL = 5.3; EXPRESSED IN ADULT LIVER, SIGNAL = 4.6; EXPRESSED IN HELA, SIGNAL = 5.6; EXPRESSED IN HEART, SIGNAL = 4.5; EXPRESSED IN BRAIN, SIGNAL = 5.5; EXPRESSED IN BONE MARROW, SIGNAL = 5.5
EIQVAFFGFLSQETEADTPHDSHLVCNQQPGL

SEQ ID NO: 39552 - protein, 43 aa, Homo sapiens
  MAP TO AC005479.2; EXPRESSED IN LUNG, SIGNAL =   3; EXPRESSED IN BONE MARROW, SIGNAL = 2.8; EXPRESSED IN PLACENTA, SIGNAL = 3.2; EXPRESSED IN HELA, SIGNAL = 3.1; EXPRESSED IN HEART, SIGNAL = 2.4; EXPRESSED IN FETAL LIVER, SIGNAL = 2.4; EXPRESSED IN BRAIN, SIGNAL = 2.7; EXPRESSED IN ADULT LIVER, SIGNAL = 2.5; SWISSPROT HIT: Q61555, EVALUE 2.00e-05
IDECEDYGDPVCGTWKCENSPGSYRCVLGCQPGFHMAPNGDCI

SEQ ID NO: 39553 - protein, 60 aa, Homo sapiens
  MAP TO AC005479.2; EXPRESSED IN LUNG, SIGNAL =   3; EXPRESSED IN BONE MARROW, SIGNAL = 2.8; EXPRESSED IN PLACENTA, SIGNAL = 3.2; EXPRESSED IN HELA, SIGNAL = 3.1; EXPRESSED IN HEART, SIGNAL = 2.4; EXPRESSED IN FETAL LIVER, SIGNAL = 2.4; EXPRESSED IN BRAIN, SIGNAL = 2.7; EXPRESSED IN ADULT LIVER, SIGNAL = 2.5; SWISSPROT HIT: P24263, EVALUE 2.00e+00
TWPPLSSLMAWLWGQILTSVRTMETRCVAPGSVKTALAPTAVFWAASLASTWPRTETALV

SEQ ID NO: 39554 - protein, 44 aa, Homo sapiens
  MAP TO AC006016.2; EXPRESSED IN BRAIN, SIGNAL = 7.9; EXPRESSED IN PLACENTA, SIGNAL = 7.1; EXPRESSED IN LUNG, SIGNAL = 6.1; EXPRESSED IN HEART, SIGNAL = 5.7; EXPRESSED IN BONE MARROW, SIGNAL = 5.6; EXPRESSED IN ADULT LIVER, SIGNAL = 5.5; EXPRESSED IN HELA, SIGNAL = 4.7; EXPRESSED IN FETAL LIVER, SIGNAL = 6.4; SWISSPROT HIT: P23074, EVALUE 2.20e-02
DLMDHLMMELGQYHCVMDLAHTFFPIDITPESQEQFVFTWKGRQ

SEQ ID NO: 39555 - protein, 52 aa, Homo sapiens
  MAP TO AC003683.1; EXPRESSED IN PLACENTA, SIGNAL = 0.91; EXPRESSED IN LUNG, SIGNAL = 0.98; EXPRESSED IN FETAL LIVER, SIGNAL = 0.86; EXPRESSED IN BRAIN, SIGNAL = 0.94; EXPRESSED IN BONE MARROW, SIGNAL = 0.98; EXPRESSED IN ADULT LIVER, SIGNAL =   1; EXPRESSED IN HEART, SIGNAL = 5.4; SWISSPROT HIT: P22771, EVALUE 6.00e-17
PDDSLDLDPSMLDSIWKPDLFFANEKGANFHDVTTDNKLLRISKNGKVLYSI

SEQ ID NO: 39556 - protein, 45 aa, Homo sapiens
  MAP TO AC004526.1; EXPRESSED IN PLACENTA, SIGNAL = 2.6; EXPRESSED IN HEART, SIGNAL = 1.9; EXPRESSED IN FETAL LIVER, SIGNAL =   2; EXPRESSED IN BRAIN, SIGNAL = 1.8; EXPRESSED IN BONE MARROW, SIGNAL = 3.8; EXPRESSED IN ADULT LIVER, SIGNAL = 1.9; EXPRESSED IN HELA, SIGNAL = 2.3; EXPRESSED IN LUNG, SIGNAL = 2.2; SWISSPROT HIT: P21359, EVALUE 6.00e-20
LVDGFAESTKRKAAVWPLQIILLILCPEIIQDISKDVVDENNMNK

SEQ ID NO: 39557 - protein, 93 aa, Homo sapiens
  MAP TO AC004222.1; EXPRESSED IN PLACENTA, SIGNAL = 2.2; EXPRESSED IN BONE MARROW, SIGNAL = 2.1; EXPRESSED IN ADULT LIVER, SIGNAL = 2.4; EXPRESSED IN LUNG, SIGNAL = 2.2; EXPRESSED IN HELA, SIGNAL = 2.5; EXPRESSED IN HEART, SIGNAL = 2.3; EXPRESSED IN FETAL LIVER, SIGNAL = 2.3; EXPRESSED IN BRAIN, SIGNAL = 2.4; SWISSPROT HIT: O67087, EVALUE 5.20e-02
KHQDHPEKHDPPKELKKAPVINPGETAICDLSDRGVKIAVLRKLKEIHDNVEKEFGILSDKFNEEIETITKNQREILETKNAADILKYASRVS

SEQ ID NO: 39558 - protein, 27 aa, Homo sapiens
  MAP TO AC004615.1; EXPRESSED IN LUNG, SIGNAL =   8; EXPRESSED IN ADULT LIVER, SIGNAL = 7.2; EXPRESSED IN PLACENTA, SIGNAL = 7.1; EXPRESSED IN HELA, SIGNAL = 7.6; EXPRESSED IN HEART, SIGNAL = 6.3; EXPRESSED IN FETAL LIVER, SIGNAL = 7.3; EXPRESSED IN BRAIN, SIGNAL =   7; EXPRESSED IN BONE MARROW, SIGNAL = 7.9; SWISSPROT HIT: Q13591, EVALUE 1.00e-08
REFRAKNAVDFSQLTFDPGQKELVVGA

SEQ ID NO: 39559 - protein, 49 aa, Homo sapiens
  MAP TO AC003685.1; EXPRESSED IN ADULT LIVER, SIGNAL = 1.8; EXPRESSED IN PLACENTA, SIGNAL = 2.5; EXPRESSED IN LUNG, SIGNAL = 1.5; EXPRESSED IN HEART, SIGNAL = 1.4; EXPRESSED IN BRAIN, SIGNAL = 1.4; EXPRESSED IN FETAL LIVER, SIGNAL = 1.3; EXPRESSED IN BONE MARROW, SIGNAL = 3.9
GKPASEHYDDEEEEDDEDNEDSEEDLEDDEDMQDMDKMNDYNGSPDDGE

SEQ ID NO: 39560 - protein, 37 aa, Homo sapiens
  MAP TO AC004764.1; EXPRESSED IN PLACENTA, SIGNAL = 2.2; EXPRESSED IN LUNG, SIGNAL = 2.2; EXPRESSED IN FETAL LIVER, SIGNAL =   2; EXPRESSED IN ADULT LIVER, SIGNAL = 2.1; EXPRESSED IN HELA, SIGNAL = 2.2; EXPRESSED IN HEART, SIGNAL = 2.1; EXPRESSED IN BRAIN, SIGNAL =   2; EXPRESSED IN BONE MARROW, SIGNAL = 2.1
DLLERKQKKAKAYHIRETTVIMQRFGTDRNLGASNFD

SEQ ID NO: 39561 - protein, 50 aa, Homo sapiens
  MAP TO AC005660.2; EXPRESSED IN BONE MARROW, SIGNAL =  24; EXPRESSED IN PLACENTA, SIGNAL =  22; EXPRESSED IN LUNG, SIGNAL =  29; EXPRESSED IN HELA, SIGNAL =  24; EXPRESSED IN HEART, SIGNAL =  18; EXPRESSED IN FETAL LIVER, SIGNAL =  23; EXPRESSED IN ADULT LIVER, SIGNAL =  22; EXPRESSED IN BRAIN, SIGNAL =  24; SWISSPROT HIT: P34264, EVALUE 6.20e+00
KTPTTILLTPERKFHSFGYAARDFYHDLDPNEAKQWLYLEKFKMKLHTTG

SEQ ID NO: 39562 - protein, 30 aa, Homo sapiens
  MAP TO AC005660.2; EXPRESSED IN BONE MARROW, SIGNAL =  24; EXPRESSED IN PLACENTA, SIGNAL =  22; EXPRESSED IN LUNG, SIGNAL =  29; EXPRESSED IN HELA, SIGNAL =  24; EXPRESSED IN HEART, SIGNAL =  18; EXPRESSED IN FETAL LIVER, SIGNAL =  23; EXPRESSED IN ADULT LIVER, SIGNAL =  22; EXPRESSED IN BRAIN, SIGNAL =  24
CVQSEDSNHHLADSREEVPQLRVCRQGLLP

SEQ ID NO: 39563 - protein, 97 aa, Homo sapiens
  MAP TO AC006070.1; EXPRESSED IN PLACENTA, SIGNAL = 2.4; EXPRESSED IN HEART, SIGNAL = 2.2; EXPRESSED IN BRAIN, SIGNAL = 2.6; EXPRESSED IN BONE MARROW, SIGNAL = 2.5; EXPRESSED IN ADULT LIVER, SIGNAL = 2.3; EXPRESSED IN LUNG, SIGNAL = 2.5; EXPRESSED IN HELA, SIGNAL = 2.5; EXPRESSED IN FETAL LIVER, SIGNAL = 2.4; SWISSPROT HIT: P23606, EVALUE 3.80e-01
RWVHRSWAGSSWTHSWFGHSSWTHSRWAGSRVCCSRKAGSSWSHRWAGSRWSCSRCFDSKLGGSKAGSSWTHSRRAGSRVCCCRWSQWWASSRWSCS

SEQ ID NO: 39564 - protein, 134 aa, Homo sapiens
  MAP TO AC006070.1; EXPRESSED IN PLACENTA, SIGNAL = 2.4; EXPRESSED IN HEART, SIGNAL = 2.2; EXPRESSED IN BRAIN, SIGNAL = 2.6; EXPRESSED IN BONE MARROW, SIGNAL = 2.5; EXPRESSED IN ADULT LIVER, SIGNAL = 2.3; EXPRESSED IN LUNG, SIGNAL = 2.5; EXPRESSED IN HELA, SIGNAL = 2.5; EXPRESSED IN FETAL LIVER, SIGNAL = 2.4; SWISSPROT HIT: P02438, EVALUE 7.40e-02
CSPCCQPTCCRTTCWKPTTVTTCSSTPCCQPSCCVSSCCQPCCHPTCCQNTCCRTTCCQPTCVTSCCQPSCCSTPCCQPICCGSSCCGQTSCGSSCCQPSSCAPIYCRRTCYHPTSVYLPGCLNQSCGSSCCQP

SEQ ID NO: 39565 - protein, 48 aa, Homo sapiens
  MAP TO AC005157.1; EXPRESSED IN PLACENTA, SIGNAL = 1.6; EXPRESSED IN ADULT LIVER, SIGNAL = 1.7; EXPRESSED IN LUNG, SIGNAL =   2; EXPRESSED IN HEART, SIGNAL = 1.4; EXPRESSED IN FETAL LIVER, SIGNAL = 1.6; EXPRESSED IN BRAIN, SIGNAL =   2; EXPRESSED IN BONE MARROW, SIGNAL = 1.7
PHFTQLGMPTRIQQRGSLTPHHPLLLSVQWGGKDPTSAQELGAEELGI

SEQ ID NO: 39566 - protein, 56 aa, Homo sapiens
  MAP TO AC005157.1; EXPRESSED IN PLACENTA, SIGNAL = 1.6; EXPRESSED IN ADULT LIVER, SIGNAL = 1.7; EXPRESSED IN LUNG, SIGNAL =   2; EXPRESSED IN HEART, SIGNAL = 1.4; EXPRESSED IN FETAL LIVER, SIGNAL = 1.6; EXPRESSED IN BRAIN, SIGNAL =   2; EXPRESSED IN BONE MARROW, SIGNAL = 1.7; SWISSPROT HIT: P15465, EVALUE 1.20e+00
HPILHSWECQPEFSSVAPSPLTTLYCSVYSGEGKIPPQPKNLELKNLESDIQGQEA

SEQ ID NO: 39567 - protein, 23 aa, Homo sapiens
  MAP TO AC002428.1; EXPRESSED IN BRAIN, SIGNAL = 3.5; EXPRESSED IN PLACENTA, SIGNAL = 3.7; EXPRESSED IN LUNG, SIGNAL = 4.2; EXPRESSED IN HEART, SIGNAL = 3.4; EXPRESSED IN BONE MARROW, SIGNAL = 3.9; EXPRESSED IN ADULT LIVER, SIGNAL = 3.4; EXPRESSED IN HELA, SIGNAL = 3.4; EXPRESSED IN FETAL LIVER, SIGNAL = 3.9
LQLLHQHLLLHLALLCYGDGFFP

SEQ ID NO: 39568 - protein, 25 aa, Homo sapiens
  MAP TO AC002433.1; EXPRESSED IN LUNG, SIGNAL = 4.6; EXPRESSED IN HELA, SIGNAL = 4.5; EXPRESSED IN HEART, SIGNAL = 4.7; EXPRESSED IN FETAL LIVER, SIGNAL =   6; EXPRESSED IN PLACENTA, SIGNAL = 5.9; EXPRESSED IN BRAIN, SIGNAL = 6.6; EXPRESSED IN BONE MARROW, SIGNAL = 5.9; EXPRESSED IN ADULT LIVER, SIGNAL = 4.2
MLDPVLPRATDQEVAVRSWHESEKQ

SEQ ID NO: 39569 - protein, 57 aa, Homo sapiens
  MAP TO AC003084.1; EXPRESSED IN PLACENTA, SIGNAL = 3.4; EXPRESSED IN LUNG, SIGNAL =   2; EXPRESSED IN HEART, SIGNAL = 1.7; EXPRESSED IN BRAIN, SIGNAL = 1.8; EXPRESSED IN BONE MARROW, SIGNAL = 1.6; EXPRESSED IN ADULT LIVER, SIGNAL = 1.8; EXPRESSED IN HELA, SIGNAL = 1.8; EXPRESSED IN FETAL LIVER, SIGNAL = 1.6; SWISSPROT HIT: P42286, EVALUE 2.00e+00
LEVRSPQIKVSAGLYSFWLWVSFRSFSDLCFCHKVSYYDCYLPAFLLQGLCDYIGPF

SEQ ID NO: 39570 - protein, 48 aa, Homo sapiens
  MAP TO AC002452.1; EXPRESSED IN BRAIN, SIGNAL =  12; EXPRESSED IN ADULT LIVER, SIGNAL = 9.5; EXPRESSED IN PLACENTA, SIGNAL =  10; EXPRESSED IN LUNG, SIGNAL =  13; EXPRESSED IN HELA, SIGNAL =  10; EXPRESSED IN HEART, SIGNAL = 9.8; EXPRESSED IN BONE MARROW, SIGNAL =  11; EXPRESSED IN FETAL LIVER, SIGNAL = 9.8; SWISSPROT HIT: O14576, EVALUE 6.00e-22
SSYSKAGIGEVFEGHQGPVTGINCHMAVGPIDFSHLFVTSSFDWTVKL

SEQ ID NO: 39571 - protein, 18 aa, Homo sapiens
  MAP TO AC002452.1; EXPRESSED IN BRAIN, SIGNAL =  12; EXPRESSED IN ADULT LIVER, SIGNAL = 9.5; EXPRESSED IN PLACENTA, SIGNAL =  10; EXPRESSED IN LUNG, SIGNAL =  13; EXPRESSED IN HELA, SIGNAL =  10; EXPRESSED IN HEART, SIGNAL = 9.8; EXPRESSED IN BONE MARROW, SIGNAL =  11; EXPRESSED IN FETAL LIVER, SIGNAL = 9.8
LPTAKQVLVRSLKVTKGQ

SEQ ID NO: 39572 - protein, 101 aa, Homo sapiens
  MAP TO AC005234.1; EXPRESSED IN LUNG, SIGNAL = 1.6; EXPRESSED IN HEART, SIGNAL = 1.4; EXPRESSED IN FETAL LIVER, SIGNAL =   2; EXPRESSED IN BONE MARROW, SIGNAL =   2; EXPRESSED IN PLACENTA, SIGNAL = 1.6; EXPRESSED IN BRAIN, SIGNAL = 1.6; EXPRESSED IN ADULT LIVER, SIGNAL = 1.3; SWISSPROT HIT: P35612, EVALUE 2.00e-17
DLFLEGTKKTETSKAATTEPETTQPEGVVVNGREEEQTAEEILSKGLSQMTTSADTDVDTSKDKTESVTSGPMSPEGSPSKSPSKKKKKFRTPSFLKKSKK

SEQ ID NO: 39573 - protein, 100 aa, Homo sapiens
  MAP TO AC005598.6; EXPRESSED IN BONE MARROW, SIGNAL =  11; EXPRESSED IN PLACENTA, SIGNAL =  11; EXPRESSED IN LUNG, SIGNAL =  13; EXPRESSED IN HELA, SIGNAL =  11; EXPRESSED IN HEART, SIGNAL =  10; EXPRESSED IN FETAL LIVER, SIGNAL =  12; EXPRESSED IN ADULT LIVER, SIGNAL =  12; EXPRESSED IN BRAIN, SIGNAL =  12; SWISSPROT HIT: Q9ZCA6, EVALUE 1.50e+00
ILFNESIKLTSSSFNISYQCCDGLKNKKIKKYNTPNKAVGGFITSVLRSRHVTKGTDEYKPHLIKFIKKNVSDKTLVTLASVCIAFKNSIEDKEDKQTMT

SEQ ID NO: 39574 - protein, 23 aa, Homo sapiens
  MAP TO AC005598.6; EXPRESSED IN BONE MARROW, SIGNAL =  11; EXPRESSED IN PLACENTA, SIGNAL =  11; EXPRESSED IN LUNG, SIGNAL =  13; EXPRESSED IN HELA, SIGNAL =  11; EXPRESSED IN HEART, SIGNAL =  10; EXPRESSED IN FETAL LIVER, SIGNAL =  12; EXPRESSED IN ADULT LIVER, SIGNAL =  12; EXPRESSED IN BRAIN, SIGNAL =  12
FSSMKASNLPQAVSTSAINVVMG

SEQ ID NO: 39575 - protein, 42 aa, Homo sapiens
  MAP TO AC005600.1; EXPRESSED IN PLACENTA, SIGNAL = 0.74; EXPRESSED IN LUNG, SIGNAL = 0.83; EXPRESSED IN FETAL LIVER, SIGNAL = 1.4; EXPRESSED IN BONE MARROW, SIGNAL = 0.81; EXPRESSED IN ADULT LIVER, SIGNAL = 0.98; EXPRESSED IN HEART, SIGNAL = 2.4; EXPRESSED IN BRAIN, SIGNAL =   1; SWISSPROT HIT: P98161, EVALUE 7.00e-06
TGHVSRLSPLSVDTVAVGLVSSVVVYPVYLAILFLFRMSRSK

SEQ ID NO: 39576 - protein, 52 aa, Homo sapiens
  MAP TO AC005600.1; EXPRESSED IN PLACENTA, SIGNAL = 0.74; EXPRESSED IN LUNG, SIGNAL = 0.83; EXPRESSED IN FETAL LIVER, SIGNAL = 1.4; EXPRESSED IN BONE MARROW, SIGNAL = 0.81; EXPRESSED IN ADULT LIVER, SIGNAL = 0.98; EXPRESSED IN HEART, SIGNAL = 2.4; EXPRESSED IN BRAIN, SIGNAL =   1; SWISSPROT HIT: Q02817, EVALUE 3.60e+00
PALPAPQPHLCGLLSSTQHGACVQAEPAERRHSRCWPGVQRGCLSRLPGHPF

SEQ ID NO: 39577 - protein, 65 aa, Homo sapiens
  MAP TO AC004504.1; EXPRESSED IN ADULT LIVER, SIGNAL = 1.3; EXPRESSED IN LUNG, SIGNAL = 1.4; EXPRESSED IN HEART, SIGNAL = 1.4; EXPRESSED IN FETAL LIVER, SIGNAL = 1.5; EXPRESSED IN BRAIN, SIGNAL = 1.4; EXPRESSED IN BONE MARROW, SIGNAL = 1.3; EXPRESSED IN PLACENTA, SIGNAL = 1.4; SWISSPROT HIT: Q17298, EVALUE 3.40e+00
KRSISRSCNGQHTSKLPLCQAPCGDSLLIASFSPHHCPMRKNVLFNFILQMRKLRPIRRSYSLKP

SEQ ID NO: 39578 - protein, 28 aa, Homo sapiens
  MAP TO AC004600.2; EXPRESSED IN FETAL LIVER, SIGNAL = 1.2; EXPRESSED IN ADULT LIVER, SIGNAL = 1.1; EXPRESSED IN PLACENTA, SIGNAL = 0.94; EXPRESSED IN LUNG, SIGNAL = 0.98; EXPRESSED IN HEART, SIGNAL = 1.8; EXPRESSED IN BRAIN, SIGNAL =   1; EXPRESSED IN BONE MARROW, SIGNAL = 1.1; SWISSPROT HIT: Q05086, EVALUE 5.00e-11
EFWEIVHSFTDEQKRLFLQFTTGTDRAP

SEQ ID NO: 39579 - protein, 28 aa, Homo sapiens
  MAP TO AC004600.2; EXPRESSED IN FETAL LIVER, SIGNAL = 1.2; EXPRESSED IN ADULT LIVER, SIGNAL = 1.1; EXPRESSED IN PLACENTA, SIGNAL = 0.94; EXPRESSED IN LUNG, SIGNAL = 0.98; EXPRESSED IN HEART, SIGNAL = 1.8; EXPRESSED IN BRAIN, SIGNAL =   1; EXPRESSED IN BONE MARROW, SIGNAL = 1.1
SSGKSFIHLQMNRKDSSCSLQRAQTEHL

SEQ ID NO: 39580 - protein, 35 aa, Homo sapiens
  MAP TO AC002465.1; EXPRESSED IN LUNG, SIGNAL = 8.2; EXPRESSED IN BRAIN, SIGNAL = 8.1; EXPRESSED IN PLACENTA, SIGNAL = 7.9; EXPRESSED IN HEART, SIGNAL = 6.8; EXPRESSED IN FETAL LIVER, SIGNAL = 7.2; EXPRESSED IN BONE MARROW, SIGNAL = 7.3; EXPRESSED IN ADULT LIVER, SIGNAL = 6.6; EXPRESSED IN HELA, SIGNAL = 7.8
MAASALRGLPVAGGGESSESEDDGWEIGYLDRTSQ

SEQ ID NO: 39581 - protein, 22 aa, Homo sapiens
  MAP TO AC005610.1; EXPRESSED IN PLACENTA, SIGNAL = 1.5; EXPRESSED IN HELA, SIGNAL = 1.8; EXPRESSED IN HEART, SIGNAL = 1.7; EXPRESSED IN FETAL LIVER, SIGNAL = 1.7; EXPRESSED IN BRAIN, SIGNAL = 1.7; EXPRESSED IN ADULT LIVER, SIGNAL = 1.7; EXPRESSED IN LUNG, SIGNAL = 1.6; EXPRESSED IN BONE MARROW, SIGNAL = 1.9
MNLTSKDRRQSFQNSLWKQNYQ

SEQ ID NO: 39582 - protein, 71 aa, Homo sapiens
  MAP TO AC005479.2; EXPRESSED IN PLACENTA, SIGNAL = 1.6; EXPRESSED IN LUNG, SIGNAL = 1.5; EXPRESSED IN FETAL LIVER, SIGNAL = 1.6; EXPRESSED IN BONE MARROW, SIGNAL = 1.8; EXPRESSED IN ADULT LIVER, SIGNAL = 1.6; EXPRESSED IN HEART, SIGNAL = 1.9; EXPRESSED IN BRAIN, SIGNAL = 1.4; SWISSPROT HIT: Q00918, EVALUE 4.90e-01
AFREICPAGHGYTYASSDIRLSMRKAEEEELARPPREQGQRSSGALPGPAERQPLRVVTDTWLEAGTIPDK

SEQ ID NO: 39583 - protein, 23 aa, Homo sapiens
  MAP TO AC005479.2; EXPRESSED IN PLACENTA, SIGNAL = 1.6; EXPRESSED IN LUNG, SIGNAL = 1.5; EXPRESSED IN FETAL LIVER, SIGNAL = 1.6; EXPRESSED IN BONE MARROW, SIGNAL = 1.8; EXPRESSED IN ADULT LIVER, SIGNAL = 1.6; EXPRESSED IN HEART, SIGNAL = 1.9; EXPRESSED IN BRAIN, SIGNAL = 1.4
RPSERSALPATATPTRAPTSACP

SEQ ID NO: 39584 - protein, 36 aa, Homo sapiens
  MAP TO AC002477.1; EXPRESSED IN PLACENTA, SIGNAL = 1.5; EXPRESSED IN LUNG, SIGNAL = 1.4; EXPRESSED IN FETAL LIVER, SIGNAL = 1.3; EXPRESSED IN BRAIN, SIGNAL = 1.5; EXPRESSED IN BONE MARROW, SIGNAL = 1.4; EXPRESSED IN ADULT LIVER, SIGNAL = 1.2; EXPRESSED IN HEART, SIGNAL = 1.4; SWISSPROT HIT: P18014, EVALUE 6.40e+00
PEYRKFLESYATDNEKMTSTPETLLEEIEAKNRELI

SEQ ID NO: 39585 - protein, 80 aa, Homo sapiens
  MAP TO AC004159.1; EXPRESSED IN PLACENTA, SIGNAL = 1.6; EXPRESSED IN BRAIN, SIGNAL = 1.6; EXPRESSED IN BONE MARROW, SIGNAL = 1.5; EXPRESSED IN ADULT LIVER, SIGNAL = 1.7; EXPRESSED IN LUNG, SIGNAL = 1.8; EXPRESSED IN HELA, SIGNAL = 1.9; EXPRESSED IN HEART, SIGNAL = 1.8; EXPRESSED IN FETAL LIVER, SIGNAL = 1.6; SWISSPROT HIT: P45634, EVALUE 9.00e-38
AFGKPQGTVARVHIGQVIMFIRTKLQNKDHVIEALRRAKFKFPGWQKIHISNKWGFTKFNADKFEDKVAEKHLIPDGCGV

SEQ ID NO: 39586 - protein, 46 aa, Homo sapiens
  MAP TO AC004525.1; EXPRESSED IN FETAL LIVER, SIGNAL = 1.5; EXPRESSED IN ADULT LIVER, SIGNAL = 1.5; EXPRESSED IN PLACENTA, SIGNAL = 1.9; EXPRESSED IN LUNG, SIGNAL = 1.3; EXPRESSED IN HEART, SIGNAL = 1.4; EXPRESSED IN BRAIN, SIGNAL = 1.3; EXPRESSED IN BONE MARROW, SIGNAL = 1.5; SWISSPROT HIT: P24394, EVALUE 4.00e-22
NMKVLQEPTCVSDYMSISTCEWKMNGPTNCSTELRLLYQLVFLLSE

SEQ ID NO: 39587 - protein, 46 aa, Homo sapiens
  MAP TO AC004525.1; EXPRESSED IN FETAL LIVER, SIGNAL = 1.5; EXPRESSED IN ADULT LIVER, SIGNAL = 1.5; EXPRESSED IN PLACENTA, SIGNAL = 1.9; EXPRESSED IN LUNG, SIGNAL = 1.3; EXPRESSED IN HEART, SIGNAL = 1.4; EXPRESSED IN BRAIN, SIGNAL = 1.3; EXPRESSED IN BONE MARROW, SIGNAL = 1.5
CLPREHEGLAGAHLRLRLHEHLYLRVEDEWSHQLQHRAPPVVPAGF

SEQ ID NO: 39588 - protein, 52 aa, Homo sapiens
  MAP TO AC005629.1; EXPRESSED IN BONE MARROW, SIGNAL = 3.9; EXPRESSED IN PLACENTA, SIGNAL =   3; EXPRESSED IN LUNG, SIGNAL = 3.5; EXPRESSED IN HELA, SIGNAL = 4.1; EXPRESSED IN FETAL LIVER, SIGNAL =  53; EXPRESSED IN ADULT LIVER, SIGNAL = 3.9; EXPRESSED IN HEART, SIGNAL = 3.9; EXPRESSED IN BRAIN, SIGNAL = 4.5
  unsure 33
AWPATAVSRPSATRQDDPAHGLGHGPPGLDLVXPHLLHSGPAQLAQGPGGLL

SEQ ID NO: 39589 - protein, 24 aa, Homo sapiens
  MAP TO AC004061.1; EXPRESSED IN BONE MARROW, SIGNAL = 1.2; EXPRESSED IN PLACENTA, SIGNAL = 1.4; EXPRESSED IN LUNG, SIGNAL = 0.84; EXPRESSED IN HEART, SIGNAL = 1.4; EXPRESSED IN FETAL LIVER, SIGNAL = 1.6; EXPRESSED IN ADULT LIVER, SIGNAL = 1.1; EXPRESSED IN BRAIN, SIGNAL = 1.7
RLPRSQMEMRNLLGTGPKVMCVMP

SEQ ID NO: 39590 - protein, 54 aa, Homo sapiens
  MAP TO AC004687.1; EXPRESSED IN PLACENTA, SIGNAL = 4.5; EXPRESSED IN ADULT LIVER, SIGNAL = 5.3; EXPRESSED IN BONE MARROW, SIGNAL =   5; EXPRESSED IN BRAIN, SIGNAL = 5.5; EXPRESSED IN FETAL LIVER, SIGNAL = 5.3; EXPRESSED IN HEART, SIGNAL =   5; EXPRESSED IN LUNG, SIGNAL = 4.8; EXPRESSED IN HELA, SIGNAL = 4.3; SWISSPROT HIT: P49933, EVALUE 8.00e+00
DMELANQDIQVHGERAMYCKLWLCVCDSIRTLLCVYFECCQYHTTISLFSQTQN

SEQ ID NO: 39591 - protein, 26 aa, Homo sapiens
  MAP TO AC004687.1; EXPRESSED IN PLACENTA, SIGNAL = 4.5; EXPRESSED IN ADULT LIVER, SIGNAL = 5.3; EXPRESSED IN BONE MARROW, SIGNAL =   5; EXPRESSED IN BRAIN, SIGNAL = 5.5; EXPRESSED IN FETAL LIVER, SIGNAL = 5.3; EXPRESSED IN HEART, SIGNAL =   5; EXPRESSED IN LUNG, SIGNAL = 4.8; EXPRESSED IN HELA, SIGNAL = 4.3; SWISSPROT HIT: Q11131, EVALUE 8.70e+00
RHGTCQSGHPGPWGESHVLQALAMCL

SEQ ID NO: 39592 - protein, 61 aa, Homo sapiens
  MAP TO AC005660.2; EXPRESSED IN LUNG, SIGNAL = 4.3; EXPRESSED IN HELA, SIGNAL = 4.7; EXPRESSED IN BRAIN, SIGNAL = 4.8; EXPRESSED IN BONE MARROW, SIGNAL =   4; EXPRESSED IN ADULT LIVER, SIGNAL = 4.4; EXPRESSED IN PLACENTA, SIGNAL = 3.1; EXPRESSED IN HEART, SIGNAL = 3.9; EXPRESSED IN FETAL LIVER, SIGNAL = 4.3; SWISSPROT HIT: P32886, EVALUE 2.00e+00
MSWFAGIVLVYASFPSEISNNDIFHLLSISVWKVNYVVALLIFVFSAIWASRRMREAVGCA

SEQ ID NO: 39593 - protein, 34 aa, Homo sapiens
  MAP TO AC005317.1; EXPRESSED IN PLACENTA, SIGNAL =   2; EXPRESSED IN HEART, SIGNAL = 2.1; EXPRESSED IN BONE MARROW, SIGNAL = 1.7; EXPRESSED IN ADULT LIVER, SIGNAL =   2; EXPRESSED IN LUNG, SIGNAL = 1.8; EXPRESSED IN HELA, SIGNAL = 1.8; EXPRESSED IN FETAL LIVER, SIGNAL = 1.9; EXPRESSED IN BRAIN, SIGNAL = 2.1; SWISSPROT HIT: P33780, EVALUE 3.80e+00
GSFLTWALGCACVFAVLSSCCSDLFVQCIYVAVD

SEQ ID NO: 39594 - protein, 21 aa, Homo sapiens
  MAP TO AC005317.1; EXPRESSED IN PLACENTA, SIGNAL =   2; EXPRESSED IN HEART, SIGNAL = 2.1; EXPRESSED IN BONE MARROW, SIGNAL = 1.7; EXPRESSED IN ADULT LIVER, SIGNAL =   2; EXPRESSED IN LUNG, SIGNAL = 1.8; EXPRESSED IN HELA, SIGNAL = 1.8; EXPRESSED IN FETAL LIVER, SIGNAL = 1.9; EXPRESSED IN BRAIN, SIGNAL = 2.1
FLPDMGIGLRMCVRSSFQLLF

SEQ ID NO: 39595 - protein, 60 aa, Homo sapiens
  MAP TO AC004664.1; EXPRESSED IN PLACENTA, SIGNAL = 2.2; EXPRESSED IN LUNG, SIGNAL = 1.9; EXPRESSED IN HEART, SIGNAL = 1.4; EXPRESSED IN BRAIN, SIGNAL = 1.7; EXPRESSED IN BONE MARROW, SIGNAL = 1.8; EXPRESSED IN ADULT LIVER, SIGNAL = 1.7; EXPRESSED IN HELA, SIGNAL = 1.7; EXPRESSED IN FETAL LIVER, SIGNAL = 1.6; SWISSPROT HIT: P56952, EVALUE 9.00e-01
MLGAGSLHPISHPIPLANEKVKSTDLTVTICVPQTPTPTSTVLHRSWTPGKKTAPGLPGS

SEQ ID NO: 39596 - protein, 67 aa, Homo sapiens
  MAP TO AC000111.1; EXPRESSED IN PLACENTA, SIGNAL = 5.4; EXPRESSED IN HELA, SIGNAL = 4.5; EXPRESSED IN HEART, SIGNAL = 4.4; EXPRESSED IN FETAL LIVER, SIGNAL = 3.2; EXPRESSED IN BRAIN, SIGNAL = 8.1; EXPRESSED IN ADULT LIVER, SIGNAL = 4.3; EXPRESSED IN LUNG, SIGNAL = 6.7; EXPRESSED IN BONE MARROW, SIGNAL = 3.6; SWISSPROT HIT: P13569, EVALUE 2.00e-21
LTRKAAYVRYFNSSAFFFSGFFVVFLSVLPYALIKGIILRKIFTTISFCIVLRMAVTRQFPWAVQTW

SEQ ID NO: 39597 - protein, 63 aa, Homo sapiens
  MAP TO AC005529.7; EXPRESSED IN HELA, SIGNAL = 1.6; EXPRESSED IN FETAL LIVER, SIGNAL = 1.7; EXPRESSED IN PLACENTA, SIGNAL = 1.7; EXPRESSED IN LUNG, SIGNAL = 1.6; EXPRESSED IN HEART, SIGNAL = 1.7; EXPRESSED IN BRAIN, SIGNAL = 1.5; EXPRESSED IN BONE MARROW, SIGNAL = 1.5; EXPRESSED IN ADULT LIVER, SIGNAL = 1.7; SWISSPROT HIT: P93526, EVALUE 1.20e+00
AMEGEVNVCYKELCGPWPSHQLLTNQLQRLCVLLDVYLETESHDDSVEGPKEFPQEKMCLRLF

SEQ ID NO: 39598 - protein, 22 aa, Homo sapiens
  MAP TO AC005529.7; EXPRESSED IN HELA, SIGNAL = 1.6; EXPRESSED IN FETAL LIVER, SIGNAL = 1.7; EXPRESSED IN PLACENTA, SIGNAL = 1.7; EXPRESSED IN LUNG, SIGNAL = 1.6; EXPRESSED IN HEART, SIGNAL = 1.7; EXPRESSED IN BRAIN, SIGNAL = 1.5; EXPRESSED IN BONE MARROW, SIGNAL = 1.5; EXPRESSED IN ADULT LIVER, SIGNAL = 1.7
PWRAKSMCATRSCVALGPATSC

SEQ ID NO: 39599 - protein, 26 aa, Homo sapiens
  MAP TO AC004701.1; EXPRESSED IN BONE MARROW, SIGNAL = 1.2; EXPRESSED IN ADULT LIVER, SIGNAL = 1.3; EXPRESSED IN LUNG, SIGNAL = 1.5; EXPRESSED IN HEART, SIGNAL = 1.4; EXPRESSED IN FETAL LIVER, SIGNAL = 1.3; EXPRESSED IN BRAIN, SIGNAL = 1.5; EXPRESSED IN PLACENTA, SIGNAL = 1.3
GQIRAPAVGATAPAVDSISSVLPLET

SEQ ID NO: 39600 - protein, 23 aa, Homo sapiens
  MAP TO AC004596.1; EXPRESSED IN PLACENTA, SIGNAL = 5.1; EXPRESSED IN HEART, SIGNAL = 3.8; EXPRESSED IN LUNG, SIGNAL = 4.5; EXPRESSED IN HELA, SIGNAL = 4.2; EXPRESSED IN FETAL LIVER, SIGNAL = 3.7; EXPRESSED IN BRAIN, SIGNAL = 4.3; EXPRESSED IN BONE MARROW, SIGNAL = 4.4; EXPRESSED IN ADULT LIVER, SIGNAL = 4.1; SWISSPROT HIT: P25977, EVALUE 1.00e-07
RAPPAATNSSKKMKFQGEPKKPP

SEQ ID NO: 39601 - protein, 34 aa, Homo sapiens
  MAP TO AC004706.1; EXPRESSED IN BONE MARROW, SIGNAL = 8.3; EXPRESSED IN HELA, SIGNAL = 7.4; EXPRESSED IN HEART, SIGNAL = 7.7; EXPRESSED IN FETAL LIVER, SIGNAL = 8.4; EXPRESSED IN ADULT LIVER, SIGNAL = 9.1; EXPRESSED IN PLACENTA, SIGNAL = 7.8; EXPRESSED IN LUNG, SIGNAL = 8.8; EXPRESSED IN BRAIN, SIGNAL = 8.3
MASALSYVSKFKSFVILFVTPLLLLPLVILMPAK

SEQ ID NO: 39602 - protein, 30 aa, Homo sapiens
  MAP TO AC003034.1; EXPRESSED IN LUNG, SIGNAL = 1.6; EXPRESSED IN HELA, SIGNAL = 1.9; EXPRESSED IN BONE MARROW, SIGNAL = 1.6; EXPRESSED IN ADULT LIVER, SIGNAL = 1.7; EXPRESSED IN PLACENTA, SIGNAL = 1.5; EXPRESSED IN HEART, SIGNAL = 1.8; EXPRESSED IN FETAL LIVER, SIGNAL = 1.8; EXPRESSED IN BRAIN, SIGNAL = 1.9
LNLPKTVTGKIQRAKLRDKEWKMSGKARAQ

SEQ ID NO: 39603 - protein, 45 aa, Homo sapiens
  MAP TO AC004839.1; EXPRESSED IN BONE MARROW, SIGNAL = 1.1; EXPRESSED IN LUNG, SIGNAL =   1; EXPRESSED IN HEART, SIGNAL = 1.5; EXPRESSED IN FETAL LIVER, SIGNAL = 1.1; EXPRESSED IN BRAIN, SIGNAL = 1.2; EXPRESSED IN ADULT LIVER, SIGNAL = 1.2; EXPRESSED IN PLACENTA, SIGNAL = 1.2; SWISSPROT HIT: P51572, EVALUE 2.00e-07
VLRRLVTLITQLAKELSNKGVLKTQAENTNKAAKKFMEENEKLKR

SEQ ID NO: 39604 - protein, 156 aa, Homo sapiens
  MAP TO AC004601.1; EXPRESSED IN BRAIN, SIGNAL = 8.4; EXPRESSED IN ADULT LIVER, SIGNAL = 7.6; EXPRESSED IN PLACENTA, SIGNAL = 7.8; EXPRESSED IN BONE MARROW, SIGNAL = 7.7; EXPRESSED IN LUNG, SIGNAL = 8.7; EXPRESSED IN HELA, SIGNAL = 7.2; EXPRESSED IN HEART, SIGNAL = 7.4; EXPRESSED IN FETAL LIVER, SIGNAL = 7.3; SWISSPROT HIT: P21519, EVALUE 1.70e-01
DMEKVERQAVPQANHTESCHECGRVGPGHTRDCPHRGHDDIVNFERQEQEGEQYRSQRDPLEGKRDRSKARSPYSPAEEDALFMDLPTGPRGQQAQPQRAEKNGMLPASYGPGEQNGTGGYQRAFPPRTNPEKHSQRKSNLAQVEHWARAQKGDSR

SEQ ID NO: 39605 - protein, 92 aa, Homo sapiens
  MAP TO AC005392.1; EXPRESSED IN LUNG, SIGNAL = 1.5; EXPRESSED IN FETAL LIVER, SIGNAL = 1.6; EXPRESSED IN PLACENTA, SIGNAL =   2; EXPRESSED IN BRAIN, SIGNAL = 1.9; EXPRESSED IN BONE MARROW, SIGNAL = 3.5; EXPRESSED IN ADULT LIVER, SIGNAL = 1.5; EXPRESSED IN HEART, SIGNAL = 1.8; SWISSPROT HIT: Q00888, EVALUE 8.00e-50
ETPKPSISSSNLNPREAMEAVILTCDPATPAASYQWWMNGQSLPMTHRLQLSKTNRTLFIFGVTKYIAGPYECEIRNPVSASRSDPVTLNLL

SEQ ID NO: 39606 - protein, 46 aa, Homo sapiens
  MAP TO AC003682.1; EXPRESSED IN PLACENTA, SIGNAL = 1.1; EXPRESSED IN LUNG, SIGNAL = 1.5; EXPRESSED IN FETAL LIVER, SIGNAL = 1.3; EXPRESSED IN BONE MARROW, SIGNAL =   1; EXPRESSED IN ADULT LIVER, SIGNAL = 1.3; EXPRESSED IN HEART, SIGNAL = 1.3; EXPRESSED IN BRAIN, SIGNAL = 1.6; SWISSPROT HIT: Q95122, EVALUE 8.20e+00
MELTQAKVPATGRTPEVPLRQVGQSGNVPPLSLIGSTPRTWLTGLW

SEQ ID NO: 39607 - protein, 45 aa, Homo sapiens
  MAP TO AC003104.1; EXPRESSED IN PLACENTA, SIGNAL = 1.5; EXPRESSED IN ADULT LIVER, SIGNAL = 1.4; EXPRESSED IN LUNG, SIGNAL = 1.2; EXPRESSED IN HEART, SIGNAL = 1.4; EXPRESSED IN FETAL LIVER, SIGNAL = 1.5; EXPRESSED IN BRAIN, SIGNAL = 1.1; EXPRESSED IN BONE MARROW, SIGNAL = 1.4
EKRTLPENLTLEDAKRLRVMGDIPMELVNEVMLTITDPAAMLGPE

SEQ ID NO: 39608 - protein, 88 aa, Homo sapiens
  MAP TO AC004682.1; EXPRESSED IN PLACENTA, SIGNAL = 1.6; EXPRESSED IN HEART, SIGNAL = 1.5; EXPRESSED IN BONE MARROW, SIGNAL = 1.7; EXPRESSED IN ADULT LIVER, SIGNAL = 1.6; EXPRESSED IN LUNG, SIGNAL = 1.8; EXPRESSED IN FETAL LIVER, SIGNAL = 1.4; EXPRESSED IN BRAIN, SIGNAL = 1.6; SWISSPROT HIT: P23116, EVALUE 5.10e+00
RTGRDWNPPPFRTQQRGSKSLTAIRPLCLFRKLNHVTSETKSLQQSLTQTQEKKAQLEEEIIAYEERMKKLNTELRKLRGFHQESELE

SEQ ID NO: 39609 - protein, 76 aa, Homo sapiens
  MAP TO AC004844.1; EXPRESSED IN BONE MARROW, SIGNAL = 4.2; EXPRESSED IN HELA, SIGNAL = 4.3; EXPRESSED IN FETAL LIVER, SIGNAL = 4.5; EXPRESSED IN ADULT LIVER, SIGNAL = 4.2; EXPRESSED IN PLACENTA, SIGNAL = 4.4; EXPRESSED IN LUNG, SIGNAL = 5.5; EXPRESSED IN HEART, SIGNAL = 4.5; EXPRESSED IN BRAIN, SIGNAL = 4.9; SWISSPROT HIT: P55577, EVALUE 9.00e-03
TSRIREHLLDAFAESVLQMRTWPLNGREMTHPTSNFATIKMMRGGHDRDDVNSFRFHIWASIVWTFICTFKFNSGS

SEQ ID NO: 39610 - protein, 32 aa, Homo sapiens
  MAP TO AC003685.1; EXPRESSED IN LUNG, SIGNAL =   1; EXPRESSED IN BRAIN, SIGNAL = 1.2; EXPRESSED IN BONE MARROW, SIGNAL =   1; EXPRESSED IN PLACENTA, SIGNAL = 1.1; EXPRESSED IN HEART, SIGNAL = 1.4; EXPRESSED IN FETAL LIVER, SIGNAL = 1.3; EXPRESSED IN ADULT LIVER, SIGNAL = 1.7
QGSPNSVCDTTMVDTRHYTFVIVNPNVNYGLQ

SEQ ID NO: 39611 - protein, 41 aa, Homo sapiens
  MAP TO AC003117.1; EXPRESSED IN ADULT LIVER, SIGNAL = 6.8; EXPRESSED IN PLACENTA, SIGNAL = 6.9; EXPRESSED IN LUNG, SIGNAL =   8; EXPRESSED IN HELA, SIGNAL = 7.2; EXPRESSED IN HEART, SIGNAL = 7.2; EXPRESSED IN BRAIN, SIGNAL = 8.1; EXPRESSED IN FETAL LIVER, SIGNAL = 7.2; EXPRESSED IN BONE MARROW, SIGNAL = 7.8; SWISSPROT HIT: P72785, EVALUE 3.70e+00
VIVSPYYGTLPLDASSELGKVNFPNLKLVGLGLDSGEGNPG

SEQ ID NO: 39612 - protein, 47 aa, Homo sapiens
  MAP TO AC005527.3; EXPRESSED IN PLACENTA, SIGNAL = 1.4; EXPRESSED IN LUNG, SIGNAL = 1.7; EXPRESSED IN HELA, SIGNAL = 2.1; EXPRESSED IN FETAL LIVER, SIGNAL = 1.8; EXPRESSED IN BONE MARROW, SIGNAL = 1.6; EXPRESSED IN ADULT LIVER, SIGNAL = 3.8; EXPRESSED IN HEART, SIGNAL = 1.6; EXPRESSED IN BRAIN, SIGNAL = 2.3; SWISSPROT HIT: P34492, EVALUE 1.00e-02
EYLEFRRERSQMLLSRRNQLLLEFSFWNEPQPRMGPNIYELRTYKLK

SEQ ID NO: 39613 - protein, 44 aa, Homo sapiens
  MAP TO AC005527.3; EXPRESSED IN PLACENTA, SIGNAL = 1.4; EXPRESSED IN LUNG, SIGNAL = 1.7; EXPRESSED IN HELA, SIGNAL = 2.1; EXPRESSED IN FETAL LIVER, SIGNAL = 1.8; EXPRESSED IN BONE MARROW, SIGNAL = 1.6; EXPRESSED IN ADULT LIVER, SIGNAL = 3.8; EXPRESSED IN HEART, SIGNAL = 1.6; EXPRESSED IN BRAIN, SIGNAL = 2.3
HHAHRSTWSSEGSGARCCCPGETSCSSSSASGMSHSPEWVPTSM

SEQ ID NO: 39614 - protein, 45 aa, Homo sapiens
  MAP TO AC004668.1; EXPRESSED IN BONE MARROW, SIGNAL = 6.6; EXPRESSED IN PLACENTA, SIGNAL =  11; EXPRESSED IN LUNG, SIGNAL = 6.2; EXPRESSED IN HELA, SIGNAL = 8.4; EXPRESSED IN FETAL LIVER, SIGNAL = 5.6; EXPRESSED IN BRAIN, SIGNAL = 6.8; EXPRESSED IN ADULT LIVER, SIGNAL =  28; EXPRESSED IN HEART, SIGNAL = 7.7; SWISSPROT HIT: P18392, EVALUE 2.80e+00
WVDALDNPLKEDHLVQLNETNILPILTKTLAAHIEAIFPDQTVPV

SEQ ID NO: 39615 - protein, 50 aa, Homo sapiens
  MAP TO AC005858.1; EXPRESSED IN LUNG, SIGNAL = 7.6; EXPRESSED IN HEART, SIGNAL = 4.7; EXPRESSED IN FETAL LIVER, SIGNAL = 5.1; EXPRESSED IN BRAIN, SIGNAL = 5.7; EXPRESSED IN BONE MARROW, SIGNAL =   6; EXPRESSED IN HELA, SIGNAL = 5.3; EXPRESSED IN PLACENTA, SIGNAL = 5.9; EXPRESSED IN ADULT LIVER, SIGNAL = 5.7; SWISSPROT HIT: P26361, EVALUE 2.70e+00
LLRVVLSAQLQQEVDQQGRPGNTVLKISLLSQVGLERADHSMERAKMEDD

SEQ ID NO: 39616 - protein, 39 aa, Homo sapiens
  MAP TO AC004856.1; EXPRESSED IN HELA, SIGNAL = 2.6; EXPRESSED IN HEART, SIGNAL =   4; EXPRESSED IN BRAIN, SIGNAL = 2.3; EXPRESSED IN PLACENTA, SIGNAL = 2.5; EXPRESSED IN LUNG, SIGNAL = 2.5; EXPRESSED IN FETAL LIVER, SIGNAL = 2.5; EXPRESSED IN BONE MARROW, SIGNAL = 2.4; EXPRESSED IN ADULT LIVER, SIGNAL = 2.4; SWISSPROT HIT: P18588, EVALUE 3.70e+00
SSHPVELLDSDLVLGSICKESCDMICLQVSQPWIPALAL

SEQ ID NO: 39617 - protein, 48 aa, Homo sapiens
  MAP TO AC005056.1; EXPRESSED IN BRAIN, SIGNAL =  22; EXPRESSED IN ADULT LIVER, SIGNAL =  16; EXPRESSED IN BONE MARROW, SIGNAL =  15; EXPRESSED IN PLACENTA, SIGNAL =  16; EXPRESSED IN LUNG, SIGNAL =  14; EXPRESSED IN HELA, SIGNAL =  12; EXPRESSED IN HEART, SIGNAL =  11; EXPRESSED IN FETAL LIVER, SIGNAL =  16
AAAGLVPGGPGFGPGVVGVPGAGVPGVGVPGAGIPVVPGAGIPGAAVP

SEQ ID NO: 39618 - protein, 22 aa, Homo sapiens
  MAP TO AC004770.1; EXPRESSED IN LUNG, SIGNAL = 6.9; EXPRESSED IN PLACENTA, SIGNAL = 6.6; EXPRESSED IN HEART, SIGNAL =   7; EXPRESSED IN FETAL LIVER, SIGNAL = 6.9; EXPRESSED IN BRAIN, SIGNAL =   7; EXPRESSED IN BONE MARROW, SIGNAL = 6.7; EXPRESSED IN ADULT LIVER, SIGNAL = 6.2; EXPRESSED IN HELA, SIGNAL = 6.3
VVSMSTLYVLSLRTEEDLVDTD

SEQ ID NO: 39619 - protein, 50 aa, Homo sapiens
  MAP TO AC000380.1; EXPRESSED IN PLACENTA, SIGNAL = 2.6; EXPRESSED IN ADULT LIVER, SIGNAL = 4.5; EXPRESSED IN LUNG, SIGNAL = 3.8; EXPRESSED IN HEART, SIGNAL = 3.3; EXPRESSED IN FETAL LIVER, SIGNAL = 3.1; EXPRESSED IN BRAIN, SIGNAL = 3.4; EXPRESSED IN HELA, SIGNAL =   3; EXPRESSED IN BONE MARROW, SIGNAL = 3.3
KEQDSLGLQSHEYRVKIGQVSCDIQIVSDRIIHCSVNESLGAAVGQLPIT

SEQ ID NO: 39620 - protein, 28 aa, Homo sapiens
  MAP TO AC000380.1; EXPRESSED IN PLACENTA, SIGNAL = 2.6; EXPRESSED IN ADULT LIVER, SIGNAL = 4.5; EXPRESSED IN LUNG, SIGNAL = 3.8; EXPRESSED IN HEART, SIGNAL = 3.3; EXPRESSED IN FETAL LIVER, SIGNAL = 3.1; EXPRESSED IN BRAIN, SIGNAL = 3.4; EXPRESSED IN HELA, SIGNAL =   3; EXPRESSED IN BONE MARROW, SIGNAL = 3.3
FPMSILPLCTHRRSRTAWGSRVTSTGSR

SEQ ID NO: 39621 - protein, 78 aa, Homo sapiens
  MAP TO AC005809.1; EXPRESSED IN PLACENTA, SIGNAL = 4.1; EXPRESSED IN LUNG, SIGNAL = 4.5; EXPRESSED IN FETAL LIVER, SIGNAL =  66; EXPRESSED IN BRAIN, SIGNAL = 5.3; EXPRESSED IN ADULT LIVER, SIGNAL = 8.4; EXPRESSED IN HELA, SIGNAL = 4.1; EXPRESSED IN HEART, SIGNAL = 6.4; EXPRESSED IN BONE MARROW, SIGNAL = 5.1; SWISSPROT HIT: P01344, EVALUE 9.00e-32
DNFPRYPVGKFFQYDTWKQSTQRLRRGLPALLRARRGHVLAKELEAFREAKRHRPLIALPTQDPAHGGAPPEMASNRK

SEQ ID NO: 39622 - protein, 59 aa, Homo sapiens
  MAP TO AC005809.1; EXPRESSED IN PLACENTA, SIGNAL = 4.1; EXPRESSED IN LUNG, SIGNAL = 4.5; EXPRESSED IN FETAL LIVER, SIGNAL =  66; EXPRESSED IN BRAIN, SIGNAL = 5.3; EXPRESSED IN ADULT LIVER, SIGNAL = 8.4; EXPRESSED IN HELA, SIGNAL = 4.1; EXPRESSED IN HEART, SIGNAL = 6.4; EXPRESSED IN BONE MARROW, SIGNAL = 5.1; SWISSPROT HIT: O76942, EVALUE 1.60e+00
SPPRTTSPDTPWASSSNMTPGSSPPSACAGACLPSCVPAGVTCSPRSSRRSGRPNVTVP

SEQ ID NO: 39623 - protein, 43 aa, Homo sapiens
  MAP TO AC004812.1; EXPRESSED IN PLACENTA, SIGNAL = 3.8; EXPRESSED IN LUNG, SIGNAL = 4.4; EXPRESSED IN HELA, SIGNAL = 4.5; EXPRESSED IN FETAL LIVER, SIGNAL = 4.6; EXPRESSED IN BRAIN, SIGNAL = 5.4; EXPRESSED IN BONE MARROW, SIGNAL = 4.5; EXPRESSED IN ADULT LIVER, SIGNAL = 4.3; EXPRESSED IN HEART, SIGNAL = 4.8
DAASRRALQAAIQQLAEAQPEATAKNLLHSLQSSGIGSKAGVP

SEQ ID NO: 39624 - protein, 170 aa, Homo sapiens
  MAP TO AC003664.1; EXPRESSED IN PLACENTA, SIGNAL = 1.7; EXPRESSED IN LUNG, SIGNAL = 1.9; EXPRESSED IN HEART, SIGNAL = 1.7; EXPRESSED IN FETAL LIVER, SIGNAL = 1.6; EXPRESSED IN BRAIN, SIGNAL = 1.7; EXPRESSED IN ADULT LIVER, SIGNAL = 1.5; EXPRESSED IN BONE MARROW, SIGNAL = 1.7
KTEQDPVKKKKRKKKKEKEKEKEKGKKEKEKEKGKKEKEKGKKKGKRKRRRRRQWRGKGKGKRKGRHCPLQPGRQSKILSQKTEEEEEGEGEGGGGEGRGERGGGGEEEEEEEEEEEGGGGGGGGGGEEEEEEEEGRGERGGGGEEEEEEEEGGGGGGGGEGEEKDLTDY

SEQ ID NO: 39625 - protein, 87 aa, Homo sapiens
  MAP TO AC003664.1; EXPRESSED IN PLACENTA, SIGNAL = 1.7; EXPRESSED IN LUNG, SIGNAL = 1.9; EXPRESSED IN HEART, SIGNAL = 1.7; EXPRESSED IN FETAL LIVER, SIGNAL = 1.6; EXPRESSED IN BRAIN, SIGNAL = 1.7; EXPRESSED IN ADULT LIVER, SIGNAL = 1.5; EXPRESSED IN BONE MARROW, SIGNAL = 1.7
CLKKQKKRKKEKEKEEEEKEEEKEEEEEKKKKKKKKKKKEEEEEEEEEEKKKKKKKKEEEKEEEEEKKKKKKKKEEEEEEEEKEKKK

SEQ ID NO: 39626 - protein, 55 aa, Homo sapiens
  MAP TO AC005923.2; EXPRESSED IN FETAL LIVER, SIGNAL =  15; EXPRESSED IN BRAIN, SIGNAL =  15; EXPRESSED IN BONE MARROW, SIGNAL =  15; EXPRESSED IN PLACENTA, SIGNAL =  16; EXPRESSED IN HELA, SIGNAL =  14; EXPRESSED IN HEART, SIGNAL =  12; EXPRESSED IN ADULT LIVER, SIGNAL =  15; EXPRESSED IN LUNG, SIGNAL =  16; SWISSPROT HIT: P40879, EVALUE 3.00e-08
VGLGLIHFGFVVTYLSEPLVRGYTTAAAVQVFVSQLKYVFGLHLSSHSGPLSLIY

SEQ ID NO: 39627 - protein, 42 aa, Homo sapiens
  MAP TO AC005477.1; EXPRESSED IN BONE MARROW, SIGNAL = 1.9; EXPRESSED IN PLACENTA, SIGNAL = 1.9; EXPRESSED IN LUNG, SIGNAL = 1.9; EXPRESSED IN HELA, SIGNAL = 1.9; EXPRESSED IN FETAL LIVER, SIGNAL = 2.1; EXPRESSED IN BRAIN, SIGNAL = 2.3; EXPRESSED IN ADULT LIVER, SIGNAL = 1.9; EXPRESSED IN HEART, SIGNAL = 1.9
TLYANECSNLYLKSDHSLEVKPAVYNCALDFPQASQTHHAQV

SEQ ID NO: 39628 - protein, 60 aa, Homo sapiens
  MAP TO AC004691.1; EXPRESSED IN LUNG, SIGNAL =   8; EXPRESSED IN HELA, SIGNAL = 6.9; EXPRESSED IN ADULT LIVER, SIGNAL = 6.8; EXPRESSED IN PLACENTA, SIGNAL = 7.5; EXPRESSED IN HEART, SIGNAL = 4.8; EXPRESSED IN FETAL LIVER, SIGNAL = 7.3; EXPRESSED IN BRAIN, SIGNAL = 7.7; EXPRESSED IN BONE MARROW, SIGNAL = 7.2; SWISSPROT HIT: P56887, EVALUE 2.70e+00
TPRFPIWVVCSESHFSILFSLQPGLLRDWRTERLFDLYYYDGLANQQEQIRLTIGAGPHP

SEQ ID NO: 39629 - protein, 28 aa, Homo sapiens
  MAP TO AC004828.2; EXPRESSED IN PLACENTA, SIGNAL = 1.9; EXPRESSED IN LUNG, SIGNAL = 2.2; EXPRESSED IN HELA, SIGNAL =   2; EXPRESSED IN FETAL LIVER, SIGNAL = 1.9; EXPRESSED IN ADULT LIVER, SIGNAL = 2.1; EXPRESSED IN HEART, SIGNAL = 1.8; EXPRESSED IN BRAIN, SIGNAL = 2.1; EXPRESSED IN BONE MARROW, SIGNAL = 2.3
LALAPATPFSIYLSLEPKAGADEALKRA

SEQ ID NO: 39630 - protein, 27 aa, Homo sapiens
  MAP TO AC004828.2; EXPRESSED IN PLACENTA, SIGNAL = 1.9; EXPRESSED IN LUNG, SIGNAL = 2.2; EXPRESSED IN HELA, SIGNAL =   2; EXPRESSED IN FETAL LIVER, SIGNAL = 1.9; EXPRESSED IN ADULT LIVER, SIGNAL = 2.1; EXPRESSED IN HEART, SIGNAL = 1.8; EXPRESSED IN BRAIN, SIGNAL = 2.1; EXPRESSED IN BONE MARROW, SIGNAL = 2.3
KWGCWCQSKHWRPRRRRERRTRRSSTS

SEQ ID NO: 39631 - protein, 40 aa, Homo sapiens
  MAP TO AC006083.1; EXPRESSED IN PLACENTA, SIGNAL = 1.7; EXPRESSED IN HEART, SIGNAL = 1.4; EXPRESSED IN BONE MARROW, SIGNAL = 1.5; EXPRESSED IN ADULT LIVER, SIGNAL = 1.4; EXPRESSED IN FETAL LIVER, SIGNAL = 1.4; EXPRESSED IN LUNG, SIGNAL = 1.6; EXPRESSED IN BRAIN, SIGNAL = 1.4; SWISSPROT HIT: O75493, EVALUE 8.00e-13
PSFWGLVNSAWNLCSVGKRQSPVNIETSHMIFDPFLTPLR

SEQ ID NO: 39632 - protein, 40 aa, Homo sapiens
  MAP TO AC006083.1; EXPRESSED IN PLACENTA, SIGNAL = 1.7; EXPRESSED IN HEART, SIGNAL = 1.4; EXPRESSED IN BONE MARROW, SIGNAL = 1.5; EXPRESSED IN ADULT LIVER, SIGNAL = 1.4; EXPRESSED IN FETAL LIVER, SIGNAL = 1.4; EXPRESSED IN LUNG, SIGNAL = 1.6; EXPRESSED IN BRAIN, SIGNAL = 1.4
SFFLGIGELSLESLLCGETAVASQHRDQSHDLRPLSDTSS

SEQ ID NO: 39633 - protein, 95 aa, Homo sapiens
  MAP TO AC002465.1; EXPRESSED IN HEART, SIGNAL = 2.9; EXPRESSED IN LUNG, SIGNAL = 0.69; EXPRESSED IN ADULT LIVER, SIGNAL = 0.42
GVSICENSLCCTHGMWALFCISYFNNKKKVVEEEEKGREEKEGEEEEGKEEEEEEDKEEEEKRKRRKRRRGRRRGRRRKKKKEEEEEEKEKAMVA

SEQ ID NO: 39634 - protein, 32 aa, Homo sapiens
  MAP TO AC005284.1; EXPRESSED IN PLACENTA, SIGNAL = 1.8; EXPRESSED IN HEART, SIGNAL = 1.9; EXPRESSED IN FETAL LIVER, SIGNAL =   2; EXPRESSED IN BONE MARROW, SIGNAL = 1.9; EXPRESSED IN ADULT LIVER, SIGNAL = 2.1; EXPRESSED IN LUNG, SIGNAL = 2.4; EXPRESSED IN BRAIN, SIGNAL = 1.9
ERQGGQPTYVIPHFLSTSQFMSFVNYIIMYYQ

SEQ ID NO: 39635 - protein, 39 aa, Homo sapiens
  MAP TO AC004763.1; EXPRESSED IN PLACENTA, SIGNAL = 8.9; EXPRESSED IN HEART, SIGNAL = 7.2; EXPRESSED IN ADULT LIVER, SIGNAL =  13; EXPRESSED IN LUNG, SIGNAL = 7.9; EXPRESSED IN FETAL LIVER, SIGNAL = 8.2; EXPRESSED IN BRAIN, SIGNAL = 7.1; EXPRESSED IN BONE MARROW, SIGNAL = 7.6; EXPRESSED IN HELA, SIGNAL =  11; SWISSPROT HIT: P15248, EVALUE 3.00e-17
YFSCEQPCNQTTAGNALTFLKSLLEIFQKEKMRGMRGKI

SEQ ID NO: 39636 - protein, 43 aa, Homo sapiens
  MAP TO AC004072.1; EXPRESSED IN BONE MARROW, SIGNAL = 1.5; EXPRESSED IN HELA, SIGNAL = 1.9; EXPRESSED IN FETAL LIVER, SIGNAL = 2.2; EXPRESSED IN ADULT LIVER, SIGNAL =   2; EXPRESSED IN PLACENTA, SIGNAL = 1.7; EXPRESSED IN LUNG, SIGNAL = 1.8; EXPRESSED IN HEART, SIGNAL = 2.2; EXPRESSED IN BRAIN, SIGNAL = 3.3
LGGTKSTALTTLIDDNDDNNDGDIYRSIDTTVVTAIAIITLYL

SEQ ID NO: 39637 - protein, 45 aa, Homo sapiens
  MAP TO AC005692.1; EXPRESSED IN LUNG, SIGNAL = 2.9; EXPRESSED IN BRAIN, SIGNAL = 2.8; EXPRESSED IN PLACENTA, SIGNAL = 2.9; EXPRESSED IN HEART, SIGNAL = 3.6; EXPRESSED IN FETAL LIVER, SIGNAL = 3.1; EXPRESSED IN BONE MARROW, SIGNAL = 2.8; EXPRESSED IN ADULT LIVER, SIGNAL =   3; EXPRESSED IN HELA, SIGNAL = 3.3
PAQNDGWLHGHGGGHHPLWLDHRRAGLLLGPRPYAVRGRAALPHG

SEQ ID NO: 39638 - protein, 36 aa, Homo sapiens
  MAP TO AC005692.1; EXPRESSED IN LUNG, SIGNAL = 2.9; EXPRESSED IN BRAIN, SIGNAL = 2.8; EXPRESSED IN PLACENTA, SIGNAL = 2.9; EXPRESSED IN HEART, SIGNAL = 3.6; EXPRESSED IN FETAL LIVER, SIGNAL = 3.1; EXPRESSED IN BONE MARROW, SIGNAL = 2.8; EXPRESSED IN ADULT LIVER, SIGNAL =   3; EXPRESSED IN HELA, SIGNAL = 3.3
GMAVAIILFGWIIGVLGCCWDRGLMQYVAGLLFLMG

SEQ ID NO: 39639 - protein, 35 aa, Homo sapiens
  MAP TO AC006330.2; EXPRESSED IN PLACENTA, SIGNAL = 1.8; EXPRESSED IN LUNG, SIGNAL = 2.4; EXPRESSED IN HEART, SIGNAL =   2; EXPRESSED IN FETAL LIVER, SIGNAL = 2.1; EXPRESSED IN BONE MARROW, SIGNAL = 1.9; EXPRESSED IN HELA, SIGNAL =   2; EXPRESSED IN BRAIN, SIGNAL = 2.1; EXPRESSED IN ADULT LIVER, SIGNAL = 2.3
ENLMPDDLSLSPITPRWDHLVAGKEGQDSQSFYIM

SEQ ID NO: 39640 - protein, 29 aa, Homo sapiens
  MAP TO AC000100.2; EXPRESSED IN LUNG, SIGNAL = 1.6; EXPRESSED IN BRAIN, SIGNAL = 1.7; EXPRESSED IN BONE MARROW, SIGNAL =   2; EXPRESSED IN PLACENTA, SIGNAL = 1.6; EXPRESSED IN HELA, SIGNAL = 1.7; EXPRESSED IN HEART, SIGNAL = 1.6; EXPRESSED IN FETAL LIVER, SIGNAL = 3.7; EXPRESSED IN ADULT LIVER, SIGNAL =  11
FLFFRIGTYHRFHSVLNENLKEKSYEHAP

SEQ ID NO: 39641 - protein, 58 aa, Homo sapiens
  MAP TO AC002504.1; EXPRESSED IN PLACENTA, SIGNAL = 5.6; EXPRESSED IN LUNG, SIGNAL =   6; EXPRESSED IN HEART, SIGNAL = 6.1; EXPRESSED IN FETAL LIVER, SIGNAL = 6.5; EXPRESSED IN BONE MARROW, SIGNAL =   6; EXPRESSED IN ADULT LIVER, SIGNAL = 5.6; EXPRESSED IN HELA, SIGNAL = 6.6; EXPRESSED IN BRAIN, SIGNAL = 7.1; SWISSPROT HIT: P19561, EVALUE 3.50e+00
HLCVGRAFPPRSRQRLALWCWWRRQQLPGPVASLWTGMGWLRIFSGSCLMACWNLLTV

SEQ ID NO: 39642 - protein, 26 aa, Homo sapiens
  MAP TO AC005180.1; EXPRESSED IN PLACENTA, SIGNAL = 6.1; EXPRESSED IN HELA, SIGNAL = 9.4; EXPRESSED IN HEART, SIGNAL = 4.4; EXPRESSED IN BONE MARROW, SIGNAL = 6.2; EXPRESSED IN ADULT LIVER, SIGNAL =  11; EXPRESSED IN BRAIN, SIGNAL = 1.8; EXPRESSED IN FETAL LIVER, SIGNAL =   6; EXPRESSED IN LUNG, SIGNAL = 3.8
MMGEKAEKPDTKEKKPKAKKADAGGK

SEQ ID NO: 39643 - protein, 55 aa, Homo sapiens
  MAP TO AC004855.1; EXPRESSED IN PLACENTA, SIGNAL = 1.9; EXPRESSED IN LUNG, SIGNAL = 2.7; EXPRESSED IN HEART, SIGNAL = 1.6; EXPRESSED IN BRAIN, SIGNAL = 1.7; EXPRESSED IN ADULT LIVER, SIGNAL = 1.6; EXPRESSED IN FETAL LIVER, SIGNAL = 1.7; EXPRESSED IN BONE MARROW, SIGNAL = 1.5; SWISSPROT HIT: P14738, EVALUE 7.90e+00
PPFFKNPTQVGTALQVFYNLGTLKDTITSVVDGYCATLEENINSALDIKVLTQPS

SEQ ID NO: 39644 - protein, 50 aa, Homo sapiens
  MAP TO AC002081.1; EXPRESSED IN LUNG, SIGNAL = 1.3; EXPRESSED IN HELA, SIGNAL = 1.7; EXPRESSED IN BRAIN, SIGNAL = 1.7; EXPRESSED IN BONE MARROW, SIGNAL = 1.5; EXPRESSED IN ADULT LIVER, SIGNAL = 1.3; EXPRESSED IN PLACENTA, SIGNAL = 1.4; EXPRESSED IN HEART, SIGNAL = 1.6; EXPRESSED IN FETAL LIVER, SIGNAL = 1.4; SWISSPROT HIT: Q59295, EVALUE 2.10e+00
LEYKYSKLVMTTNSKECELPAADSCAIMEGEDNEEEVVYSNKQSLLGKLK

SEQ ID NO: 39645 - protein, 29 aa, Homo sapiens
  MAP TO AC004954.1; EXPRESSED IN LUNG, SIGNAL = 1.7; EXPRESSED IN HELA, SIGNAL = 2.1; EXPRESSED IN FETAL LIVER, SIGNAL = 1.6; EXPRESSED IN BRAIN, SIGNAL =   2; EXPRESSED IN BONE MARROW, SIGNAL = 1.6; EXPRESSED IN ADULT LIVER, SIGNAL = 1.6; EXPRESSED IN PLACENTA, SIGNAL = 1.7; EXPRESSED IN HEART, SIGNAL = 1.7
SGDSCCLPLPPHQTRSERSRRLCPFIRFQ

SEQ ID NO: 39646 - protein, 116 aa, Homo sapiens
  MAP TO AC003958.1; EXPRESSED IN LUNG, SIGNAL = 3.4; EXPRESSED IN HEART, SIGNAL = 2.6; EXPRESSED IN FETAL LIVER, SIGNAL = 2.4; EXPRESSED IN BRAIN, SIGNAL = 2.7; EXPRESSED IN HELA, SIGNAL = 2.7; EXPRESSED IN BONE MARROW, SIGNAL = 3.1; EXPRESSED IN PLACENTA, SIGNAL = 2.7; EXPRESSED IN ADULT LIVER, SIGNAL = 2.6; SWISSPROT HIT: Q14525, EVALUE 2.00e-50
MPYNFCLPSLSCRTSCSSRPCVPPSCHGYTLPGACNIPANVSNCNWFCEGSFNGSEKETMQFLNDRLASYLEKVRQLERDNAELENLIRERSQQQEPLLCPSYQSYFKTIEELQQK

SEQ ID NO: 39647 - protein, 47 aa, Homo sapiens
  MAP TO AC005369.1; EXPRESSED IN LUNG, SIGNAL = 3.9; EXPRESSED IN FETAL LIVER, SIGNAL = 4.4; EXPRESSED IN PLACENTA, SIGNAL = 4.6; EXPRESSED IN HELA, SIGNAL = 4.4; EXPRESSED IN BRAIN, SIGNAL = 4.5; EXPRESSED IN BONE MARROW, SIGNAL = 4.1; EXPRESSED IN ADULT LIVER, SIGNAL = 5.1; EXPRESSED IN HEART, SIGNAL =   4; SWISSPROT HIT: Q09776, EVALUE 3.60e+00
EEKAKAYKKEKQKEKKRRAEEDLTFEEDDEMAAVMGFSGFGSTKKSY

SEQ ID NO: 39648 - protein, 38 aa, Homo sapiens
  MAP TO AC000134.14; EXPRESSED IN PLACENTA, SIGNAL = 1.9; EXPRESSED IN BRAIN, SIGNAL = 2.2; EXPRESSED IN ADULT LIVER, SIGNAL = 1.8; EXPRESSED IN LUNG, SIGNAL = 1.8; EXPRESSED IN HELA, SIGNAL = 1.7; EXPRESSED IN HEART, SIGNAL = 1.9; EXPRESSED IN FETAL LIVER, SIGNAL = 3.2; EXPRESSED IN BONE MARROW, SIGNAL = 2.4; SWISSPROT HIT: P12640, EVALUE 2.80e+00
IRNILKQGIETPEDQNDLRKMQLRELARLNGTLREDDN

SEQ ID NO: 39649 - protein, 45 aa, Homo sapiens
  MAP TO AC005384.1; EXPRESSED IN FETAL LIVER, SIGNAL = 2.8; EXPRESSED IN BRAIN, SIGNAL = 3.1; EXPRESSED IN BONE MARROW, SIGNAL = 2.7; EXPRESSED IN PLACENTA, SIGNAL = 2.8; EXPRESSED IN HELA, SIGNAL = 2.8; EXPRESSED IN HEART, SIGNAL = 2.6; EXPRESSED IN ADULT LIVER, SIGNAL = 2.6; EXPRESSED IN LUNG, SIGNAL = 2.9; SWISSPROT HIT: O13890, EVALUE 2.10e+00
GELNDDNDSVPGLTLRIGKAGKLEVSGPGKHPAVGIPIGELAGFI

SEQ ID NO: 39650 - protein, 101 aa, Homo sapiens
  MAP TO AC000379.1; EXPRESSED IN PLACENTA, SIGNAL = 1.7; EXPRESSED IN BRAIN, SIGNAL = 1.8; EXPRESSED IN BONE MARROW, SIGNAL = 2.3; EXPRESSED IN ADULT LIVER, SIGNAL = 1.2; EXPRESSED IN LUNG, SIGNAL =   2; EXPRESSED IN HELA, SIGNAL = 2.6; EXPRESSED IN HEART, SIGNAL = 1.7; EXPRESSED IN FETAL LIVER, SIGNAL = 2.9; SWISSPROT HIT: P54132, EVALUE 2.00e-42
STAVKDQNKHTASINDLERETQPSYDIDNFDIDDFDDDDDWEDIMHNLAASKSSTAAYQPIKEGRPIKSVSERLSSAKTDCLPVSSTAQNINFSESIQNYT

SEQ ID NO: 39651 - protein, 77 aa, Homo sapiens
  MAP TO AC005591.1; EXPRESSED IN LUNG, SIGNAL = 6.7; EXPRESSED IN HELA, SIGNAL = 6.7; EXPRESSED IN FETAL LIVER, SIGNAL =   8; EXPRESSED IN BRAIN, SIGNAL = 6.9; EXPRESSED IN BONE MARROW, SIGNAL = 6.4; EXPRESSED IN ADULT LIVER, SIGNAL = 6.7; EXPRESSED IN PLACENTA, SIGNAL = 6.3; EXPRESSED IN HEART, SIGNAL = 7.2; SWISSPROT HIT: P98160, EVALUE 1.90e+00
RQEQGVELLNIVLPGRDPDRCLADMLWPRQEGSCRIPRRQKTTSRQVPCHHTRESGSGLVATEMSDSVGLEPVIGWL

SEQ ID NO: 39652 - protein, 24 aa, Homo sapiens
  MAP TO AC004770.1; EXPRESSED IN LUNG, SIGNAL = 3.1; EXPRESSED IN HEART, SIGNAL = 3.1; EXPRESSED IN FETAL LIVER, SIGNAL = 4.2; EXPRESSED IN BRAIN, SIGNAL = 3.6; EXPRESSED IN HELA, SIGNAL = 4.6; EXPRESSED IN BONE MARROW, SIGNAL = 3.4; EXPRESSED IN PLACENTA, SIGNAL =   3; EXPRESSED IN ADULT LIVER, SIGNAL =   4; SWISSPROT HIT: P72785, EVALUE 3.90e+00
ATCNVHKSAFNDWFSGHLNFQIEH

SEQ ID NO: 39653 - protein, 40 aa, Homo sapiens
  MAP TO AC004770.1; EXPRESSED IN LUNG, SIGNAL = 3.1; EXPRESSED IN HEART, SIGNAL = 3.1; EXPRESSED IN FETAL LIVER, SIGNAL = 4.2; EXPRESSED IN BRAIN, SIGNAL = 3.6; EXPRESSED IN HELA, SIGNAL = 4.6; EXPRESSED IN BONE MARROW, SIGNAL = 3.4; EXPRESSED IN PLACENTA, SIGNAL =   3; EXPRESSED IN ADULT LIVER, SIGNAL =   4; SWISSPROT HIT: P53963, EVALUE 2.80e+00
YSTCSPLTFSASSRPHAMSTSLPSMTGSVDTSTSRLSTSE

SEQ ID NO: 39654 - protein, 43 aa, Homo sapiens
  MAP TO AC004865.1; EXPRESSED IN PLACENTA, SIGNAL = 1.5; EXPRESSED IN BRAIN, SIGNAL = 1.6; EXPRESSED IN ADULT LIVER, SIGNAL = 1.1; EXPRESSED IN HEART, SIGNAL = 1.5; EXPRESSED IN LUNG, SIGNAL = 1.6; EXPRESSED IN FETAL LIVER, SIGNAL = 0.95; EXPRESSED IN BONE MARROW, SIGNAL = 1.1
QSLIRKLQKRGSPSDVVTPIVTQHSKVNDSNELGGLTTSGSAE

SEQ ID NO: 39655 - protein, 40 aa, Homo sapiens
  MAP TO AC004125.1; EXPRESSED IN PLACENTA, SIGNAL = 1.9; EXPRESSED IN LUNG, SIGNAL = 1.7; EXPRESSED IN HEART, SIGNAL = 2.4; EXPRESSED IN BRAIN, SIGNAL = 1.7; EXPRESSED IN HELA, SIGNAL = 1.9; EXPRESSED IN FETAL LIVER, SIGNAL = 2.1; EXPRESSED IN BONE MARROW, SIGNAL = 1.9; EXPRESSED IN ADULT LIVER, SIGNAL =   2
GLDDLNGPPTLMFILWFSLALPLYLTANEEHRLGSHTAYI

SEQ ID NO: 39656 - protein, 78 aa, Homo sapiens
  MAP TO AC003689.1; EXPRESSED IN LUNG, SIGNAL = 3.4; EXPRESSED IN FETAL LIVER, SIGNAL =   4; EXPRESSED IN BRAIN, SIGNAL = 2.6; EXPRESSED IN BONE MARROW, SIGNAL =   3; EXPRESSED IN ADULT LIVER, SIGNAL = 3.2; EXPRESSED IN PLACENTA, SIGNAL = 4.2; EXPRESSED IN HEART, SIGNAL = 3.5; EXPRESSED IN HELA, SIGNAL = 2.6; SWISSPROT HIT: P23477, EVALUE 1.90e+00
YLPKRSESICCYAACTQKLTSALLVNSPKLETTLMSTNGERDEWRYMYIYMCIRISLQYKRSKPLLTQCGLPDHDCEG

SEQ ID NO: 39657 - protein, 40 aa, Homo sapiens
  MAP TO AC002123.1; EXPRESSED IN LUNG, SIGNAL = 4.3; EXPRESSED IN HEART, SIGNAL = 2.9; EXPRESSED IN FETAL LIVER, SIGNAL = 3.6; EXPRESSED IN BRAIN, SIGNAL = 3.6; EXPRESSED IN BONE MARROW, SIGNAL = 2.9; EXPRESSED IN HELA, SIGNAL = 2.9; EXPRESSED IN PLACENTA, SIGNAL = 3.3; EXPRESSED IN ADULT LIVER, SIGNAL = 3.3; SWISSPROT HIT: O53553, EVALUE 7.30e-01
AEEEEEKRTEFRGIQNQGGTSRGDGANASGKVRGRGGEGS

SEQ ID NO: 39658 - protein, 112 aa, Homo sapiens
  MAP TO AC006312.8; EXPRESSED IN PLACENTA, SIGNAL = 1.7; EXPRESSED IN HEART, SIGNAL = 2.1; EXPRESSED IN ADULT LIVER, SIGNAL = 2.3; EXPRESSED IN LUNG, SIGNAL = 2.8; EXPRESSED IN FETAL LIVER, SIGNAL = 1.7; EXPRESSED IN BRAIN, SIGNAL = 2.2; EXPRESSED IN BONE MARROW, SIGNAL = 1.9; EXPRESSED IN HELA, SIGNAL = 2.3; SWISSPROT HIT: Q08379, EVALUE 1.00e-34
EPPPPEPPAGPSEVEQQLQAEAEHLRKELEGLAGQLQAQVQDNEGLSRLNREQEERLLELERAAELWGEQAEARRQILETMQNDRTTISRALSQNRELKEQLAELQSGFVKL

SEQ ID NO: 39659 - protein, 34 aa, Homo sapiens
  MAP TO AC006312.8; EXPRESSED IN PLACENTA, SIGNAL = 1.7; EXPRESSED IN HEART, SIGNAL = 2.1; EXPRESSED IN ADULT LIVER, SIGNAL = 2.3; EXPRESSED IN LUNG, SIGNAL = 2.8; EXPRESSED IN FETAL LIVER, SIGNAL = 1.7; EXPRESSED IN BRAIN, SIGNAL = 2.2; EXPRESSED IN BONE MARROW, SIGNAL = 1.9; EXPRESSED IN HELA, SIGNAL = 2.3
PRWSSSYKRRLSTCGRSWRVWQDSFKPRCKTMRA

SEQ ID NO: 39660 - protein, 44 aa, Homo sapiens
  MAP TO AC005868.1; EXPRESSED IN PLACENTA, SIGNAL = 4.7; EXPRESSED IN HEART, SIGNAL = 5.2; EXPRESSED IN BONE MARROW, SIGNAL = 4.4; EXPRESSED IN ADULT LIVER, SIGNAL = 5.5; EXPRESSED IN LUNG, SIGNAL = 5.7; EXPRESSED IN HELA, SIGNAL = 4.6; EXPRESSED IN FETAL LIVER, SIGNAL = 4.6; EXPRESSED IN BRAIN, SIGNAL = 5.2; SWISSPROT HIT: P42261, EVALUE 4.80e+00
TDIDIIDKHVLYFYIVNVCVAGKRGPYDPDLKRGFLDLPQKGIQ

SEQ ID NO: 39661 - protein, 28 aa, Homo sapiens
  MAP TO AC005868.1; EXPRESSED IN PLACENTA, SIGNAL = 4.7; EXPRESSED IN HEART, SIGNAL = 5.2; EXPRESSED IN BONE MARROW, SIGNAL = 4.4; EXPRESSED IN ADULT LIVER, SIGNAL = 5.5; EXPRESSED IN LUNG, SIGNAL = 5.7; EXPRESSED IN HELA, SIGNAL = 4.6; EXPRESSED IN FETAL LIVER, SIGNAL = 4.6; EXPRESSED IN BRAIN, SIGNAL = 5.2
LNPFLWEVQEPSLEVWIIGTPFSSNTNI

SEQ ID NO: 39662 - protein, 25 aa, Homo sapiens
  MAP TO AC005010.2; EXPRESSED IN PLACENTA, SIGNAL = 3.4; EXPRESSED IN LUNG, SIGNAL = 4.2; EXPRESSED IN HEART, SIGNAL = 3.8; EXPRESSED IN FETAL LIVER, SIGNAL = 3.6; EXPRESSED IN BONE MARROW, SIGNAL = 3.5; EXPRESSED IN ADULT LIVER, SIGNAL = 3.6; EXPRESSED IN HELA, SIGNAL = 3.8; EXPRESSED IN BRAIN, SIGNAL =   4
TSSSRQPSAARLLLCGPWCLSHSHP

SEQ ID NO: 39663 - protein, 25 aa, Homo sapiens
  MAP TO AC005010.2; EXPRESSED IN PLACENTA, SIGNAL = 3.4; EXPRESSED IN LUNG, SIGNAL = 4.2; EXPRESSED IN HEART, SIGNAL = 3.8; EXPRESSED IN FETAL LIVER, SIGNAL = 3.6; EXPRESSED IN BONE MARROW, SIGNAL = 3.5; EXPRESSED IN ADULT LIVER, SIGNAL = 3.6; EXPRESSED IN HELA, SIGNAL = 3.8; EXPRESSED IN BRAIN, SIGNAL =   4; SWISSPROT HIT: O87971, EVALUE 5.10e+00
QDANGRGTKGRREGAVLHWAAVKTR

SEQ ID NO: 39664 - protein, 25 aa, Homo sapiens
  MAP TO AC006237.1; EXPRESSED IN LUNG, SIGNAL = 1.6; EXPRESSED IN FETAL LIVER, SIGNAL = 1.9; EXPRESSED IN BRAIN, SIGNAL =   2; EXPRESSED IN BONE MARROW, SIGNAL =   2; EXPRESSED IN PLACENTA, SIGNAL = 1.7; EXPRESSED IN HELA, SIGNAL = 1.9; EXPRESSED IN HEART, SIGNAL = 2.2; EXPRESSED IN ADULT LIVER, SIGNAL = 1.8
MNGHVHDLQILDFPPISAFPVNTLQ

SEQ ID NO: 39665 - protein, 53 aa, Homo sapiens
  MAP TO AC006237.1; EXPRESSED IN LUNG, SIGNAL = 1.6; EXPRESSED IN FETAL LIVER, SIGNAL = 1.9; EXPRESSED IN BRAIN, SIGNAL =   2; EXPRESSED IN BONE MARROW, SIGNAL =   2; EXPRESSED IN PLACENTA, SIGNAL = 1.7; EXPRESSED IN HELA, SIGNAL = 1.9; EXPRESSED IN HEART, SIGNAL = 2.2; EXPRESSED IN ADULT LIVER, SIGNAL = 1.8; SWISSPROT HIT: P13007, EVALUE 8.00e+00
GVGREAWSPPTGWPCWGREVWARVPSCASSCTTSSARSASPPPPAAFTCLLSS

SEQ ID NO: 39666 - protein, 28 aa, Homo sapiens
  MAP TO AC004819.1; EXPRESSED IN LUNG, SIGNAL = 2.8; EXPRESSED IN BRAIN, SIGNAL = 3.3; EXPRESSED IN BONE MARROW, SIGNAL = 3.3; EXPRESSED IN PLACENTA, SIGNAL = 2.6; EXPRESSED IN HELA, SIGNAL = 3.1; EXPRESSED IN HEART, SIGNAL = 3.1; EXPRESSED IN FETAL LIVER, SIGNAL =   3; EXPRESSED IN ADULT LIVER, SIGNAL = 2.3
LQKWSARFSSTYTKIGTIQRRLAWSLHK

SEQ ID NO: 39667 - protein, 25 aa, Homo sapiens
  MAP TO AC005282.1; EXPRESSED IN PLACENTA, SIGNAL = 7.5; EXPRESSED IN LUNG, SIGNAL = 6.9; EXPRESSED IN FETAL LIVER, SIGNAL =   6; EXPRESSED IN BRAIN, SIGNAL = 6.9; EXPRESSED IN ADULT LIVER, SIGNAL = 5.2; EXPRESSED IN HELA, SIGNAL = 5.6; EXPRESSED IN HEART, SIGNAL = 6.1; EXPRESSED IN BONE MARROW, SIGNAL = 6.4
GTVTAAPPGRGSTGHWATRNRVPPR

SEQ ID NO: 39668 - protein, 57 aa, Homo sapiens
  MAP TO AC005294.1; EXPRESSED IN BRAIN, SIGNAL = 4.6; EXPRESSED IN BONE MARROW, SIGNAL = 4.2; EXPRESSED IN PLACENTA, SIGNAL = 4.4; EXPRESSED IN ADULT LIVER, SIGNAL = 3.8; EXPRESSED IN FETAL LIVER, SIGNAL = 4.1; EXPRESSED IN HEART, SIGNAL = 4.5; EXPRESSED IN HELA, SIGNAL = 4.3; EXPRESSED IN LUNG, SIGNAL = 4.7; SWISSPROT HIT: P39299, EVALUE 3.50e+00
VCGQVLLLSLCPGRHANKTPELEIPMIGRGEKQQLVRKNPQASESSLYPIRWIGAGS

SEQ ID NO: 39669 - protein, 36 aa, Homo sapiens
  MAP TO AC002476.1; EXPRESSED IN LUNG, SIGNAL = 6.5; EXPRESSED IN BONE MARROW, SIGNAL =   5; EXPRESSED IN PLACENTA, SIGNAL = 5.5; EXPRESSED IN HELA, SIGNAL = 5.4; EXPRESSED IN HEART, SIGNAL = 6.3; EXPRESSED IN FETAL LIVER, SIGNAL = 6.2; EXPRESSED IN BRAIN, SIGNAL =   7; EXPRESSED IN ADULT LIVER, SIGNAL = 7.8; SWISSPROT HIT: P13473, EVALUE 2.00e-15
AVRSYALELNLTDSENATCLYAKWQMNFTVRYETTN

SEQ ID NO: 39670 - protein, 82 aa, Homo sapiens
  MAP TO AC002288.1; EXPRESSED IN ADULT LIVER, SIGNAL = 4.5; EXPRESSED IN PLACENTA, SIGNAL = 4.6; EXPRESSED IN LUNG, SIGNAL = 4.4; EXPRESSED IN HEART, SIGNAL = 3.9; EXPRESSED IN BRAIN, SIGNAL = 4.3; EXPRESSED IN HELA, SIGNAL =   4; EXPRESSED IN FETAL LIVER, SIGNAL = 4.1; EXPRESSED IN BONE MARROW, SIGNAL = 5.3
VVKEQKATSLCGQLQMIGTRGIRKEKVSGFLLSLSKKNNRHQISPVFWAPYLIALAIEEDGERDREGEREGEGKGEGEGVGE

SEQ ID NO: 39671 - protein, 53 aa, Homo sapiens
  MAP TO AC000062.1; EXPRESSED IN PLACENTA, SIGNAL = 1.4; EXPRESSED IN LUNG, SIGNAL = 1.5; EXPRESSED IN FETAL LIVER, SIGNAL = 1.6; EXPRESSED IN BRAIN, SIGNAL = 1.7; EXPRESSED IN BONE MARROW, SIGNAL = 1.4; EXPRESSED IN ADULT LIVER, SIGNAL = 2.2; EXPRESSED IN HEART, SIGNAL = 1.5; SWISSPROT HIT: P40468, EVALUE 1.60e-02
VKKKFMAELKELRHKEQNPYVVQSIISLIMGMKFFRIKMYPVEDFEASLQFMQ

SEQ ID NO: 39672 - protein, 36 aa, Homo sapiens
  MAP TO AC000062.1; EXPRESSED IN PLACENTA, SIGNAL = 1.4; EXPRESSED IN LUNG, SIGNAL = 1.5; EXPRESSED IN FETAL LIVER, SIGNAL = 1.6; EXPRESSED IN BRAIN, SIGNAL = 1.7; EXPRESSED IN BONE MARROW, SIGNAL = 1.4; EXPRESSED IN ADULT LIVER, SIGNAL = 2.2; EXPRESSED IN HEART, SIGNAL = 1.5; SWISSPROT HIT: Q09908, EVALUE 8.40e+00
KEEIYGGAKRITAQRAEPICGSKHYQLNNGHEILSN

SEQ ID NO: 39673 - protein, 32 aa, Homo sapiens
  MAP TO AC005659.2; EXPRESSED IN PLACENTA, SIGNAL =   4; EXPRESSED IN LUNG, SIGNAL = 3.7; EXPRESSED IN HELA, SIGNAL = 4.2; EXPRESSED IN FETAL LIVER, SIGNAL = 4.2; EXPRESSED IN BRAIN, SIGNAL =   5; EXPRESSED IN BONE MARROW, SIGNAL = 3.9; EXPRESSED IN ADULT LIVER, SIGNAL = 4.1; EXPRESSED IN HEART, SIGNAL = 3.9
MAEFHLAWEPGAVGAETDRLVDFLAISEGMPP

SEQ ID NO: 39674 - protein, 151 aa, Homo sapiens
  MAP TO AC005358.1; EXPRESSED IN BONE MARROW, SIGNAL = 1.1; EXPRESSED IN PLACENTA, SIGNAL = 1.2; EXPRESSED IN LUNG, SIGNAL = 1.3; EXPRESSED IN HEART, SIGNAL = 1.4; EXPRESSED IN FETAL LIVER, SIGNAL = 1.3; EXPRESSED IN BRAIN, SIGNAL = 1.1; EXPRESSED IN ADULT LIVER, SIGNAL = 1.2; SWISSPROT HIT: Q03233, EVALUE 3.60e-01
VSELRQQLRIRGLPVSGTKTALMDRLRPFQDCSGNPVPNFGDITTVTFPVTPNTLPNYQSSSSTSALSNGFYHFGSTSSSPPISPASSDLSVAGSLPDTFNDASPSFGLHPSPVHVCTEESLMSSLNGGSVPSELDGLDSEKDKMLVEKQK

SEQ ID NO: 39675 - protein, 36 aa, Homo sapiens
  MAP TO AC005358.1; EXPRESSED IN BONE MARROW, SIGNAL = 1.1; EXPRESSED IN PLACENTA, SIGNAL = 1.2; EXPRESSED IN LUNG, SIGNAL = 1.3; EXPRESSED IN HEART, SIGNAL = 1.4; EXPRESSED IN FETAL LIVER, SIGNAL = 1.3; EXPRESSED IN BRAIN, SIGNAL = 1.1; EXPRESSED IN ADULT LIVER, SIGNAL = 1.2
SFEFGACLCQAPKRLSWTGFDPSRTALATQCRTLGI

SEQ ID NO: 39676 - protein, 35 aa, Homo sapiens
  MAP TO AC004841.2; EXPRESSED IN PLACENTA, SIGNAL = 4.6; EXPRESSED IN LUNG, SIGNAL = 4.9; EXPRESSED IN HELA, SIGNAL = 4.6; EXPRESSED IN FETAL LIVER, SIGNAL = 4.8; EXPRESSED IN ADULT LIVER, SIGNAL = 4.7; EXPRESSED IN HEART, SIGNAL = 3.6; EXPRESSED IN BRAIN, SIGNAL = 4.8; EXPRESSED IN BONE MARROW, SIGNAL = 4.2
GTNPSYRQRGRKDPISSRHVDGNLPEQPGESSGQT

SEQ ID NO: 39677 - protein, 34 aa, Homo sapiens
  MAP TO AC004841.2; EXPRESSED IN PLACENTA, SIGNAL = 4.6; EXPRESSED IN LUNG, SIGNAL = 4.9; EXPRESSED IN HELA, SIGNAL = 4.6; EXPRESSED IN FETAL LIVER, SIGNAL = 4.8; EXPRESSED IN ADULT LIVER, SIGNAL = 4.7; EXPRESSED IN HEART, SIGNAL = 3.6; EXPRESSED IN BRAIN, SIGNAL = 4.8; EXPRESSED IN BONE MARROW, SIGNAL = 4.2
EPTPPTGKEGEKTLSAVDMWTATSLNNLVRAQGR

SEQ ID NO: 39678 - protein, 81 aa, Homo sapiens
  MAP TO AC005899.1; EXPRESSED IN PLACENTA, SIGNAL = 1.7; EXPRESSED IN LUNG, SIGNAL = 1.5; EXPRESSED IN HEART, SIGNAL = 1.5; EXPRESSED IN FETAL LIVER, SIGNAL = 2.5; EXPRESSED IN BONE MARROW, SIGNAL = 2.3; EXPRESSED IN ADULT LIVER, SIGNAL = 1.4; EXPRESSED IN HELA, SIGNAL = 1.7; EXPRESSED IN BRAIN, SIGNAL = 1.2; SWISSPROT HIT: O43670, EVALUE 3.00e-07
AQAAVQGPVGTDFKPLNSTPATTTEPPKPTFPAYTQSTASTTSTTNSTAAKPAASITSKPATLTTTSATSKLIHPDEDISL

SEQ ID NO: 39679 - protein, 61 aa, Homo sapiens
  MAP TO AC005509.1; EXPRESSED IN LUNG, SIGNAL = 5.6; EXPRESSED IN HEART, SIGNAL =   7; EXPRESSED IN FETAL LIVER, SIGNAL = 8.5; EXPRESSED IN HELA, SIGNAL = 5.7; EXPRESSED IN BRAIN, SIGNAL = 6.8; EXPRESSED IN BONE MARROW, SIGNAL = 6.8; EXPRESSED IN ADULT LIVER, SIGNAL = 7.2; EXPRESSED IN PLACENTA, SIGNAL = 6.2; SWISSPROT HIT: P01133, EVALUE 2.00e-32
SLFGDRIFYSTWKMKTIWIANKHTGKDMVRINLHSSFVPLGELKVVHPLAQPKAEDDTWEP

SEQ ID NO: 39680 - protein, 46 aa, Homo sapiens
  MAP TO AC003077.1; EXPRESSED IN LUNG, SIGNAL = 2.4; EXPRESSED IN HEART, SIGNAL = 3.7; EXPRESSED IN FETAL LIVER, SIGNAL = 3.4; EXPRESSED IN BRAIN, SIGNAL =   6; EXPRESSED IN BONE MARROW, SIGNAL = 2.2; EXPRESSED IN HELA, SIGNAL = 3.8; EXPRESSED IN PLACENTA, SIGNAL = 3.6; EXPRESSED IN ADULT LIVER, SIGNAL = 3.4; SWISSPROT HIT: Q23157, EVALUE 4.80e+00
AAYTLLLYDELLEWSDRPLREFLTYPMQTEWQRKEHLHLTIIQNFD

SEQ ID NO: 39681 - protein, 32 aa, Homo sapiens
  MAP TO AC005207.1; EXPRESSED IN PLACENTA, SIGNAL = 1.4; EXPRESSED IN LUNG, SIGNAL = 1.5; EXPRESSED IN HELA, SIGNAL = 1.9; EXPRESSED IN HEART, SIGNAL = 3.8; EXPRESSED IN FETAL LIVER, SIGNAL =   2; EXPRESSED IN BRAIN, SIGNAL = 2.5; EXPRESSED IN BONE MARROW, SIGNAL = 1.4; EXPRESSED IN ADULT LIVER, SIGNAL = 2.1; SWISSPROT HIT: P14002, EVALUE 8.50e+00
LSVDIDIVAIVLGKGVTFKEPPKCNSNFNHNN

SEQ ID NO: 39682 - protein, 76 aa, Homo sapiens
  MAP TO AC002076.1; EXPRESSED IN PLACENTA, SIGNAL = 3.2; EXPRESSED IN LUNG, SIGNAL = 3.2; EXPRESSED IN HELA, SIGNAL = 3.5; EXPRESSED IN FETAL LIVER, SIGNAL = 3.2; EXPRESSED IN BRAIN, SIGNAL = 3.5; EXPRESSED IN ADULT LIVER, SIGNAL = 3.3; EXPRESSED IN HEART, SIGNAL = 3.3; EXPRESSED IN BONE MARROW, SIGNAL = 3.7; SWISSPROT HIT: P50647, EVALUE 3.60e+00
TTKVVTDLGNYNLSFVTEAEASFLLVINTMVVKCDSCKLNRMPEGPDVGDGDFSLMCAHLVKEKTVVLSLHDDRVK

SEQ ID NO: 39683 - protein, 112 aa, Homo sapiens
  MAP TO AC004861.1; EXPRESSED IN PLACENTA, SIGNAL = 3.7; EXPRESSED IN ADULT LIVER, SIGNAL = 4.5; EXPRESSED IN LUNG, SIGNAL = 4.3; EXPRESSED IN HEART, SIGNAL = 3.5; EXPRESSED IN FETAL LIVER, SIGNAL = 3.8; EXPRESSED IN BRAIN, SIGNAL = 4.3; EXPRESSED IN BONE MARROW, SIGNAL =   4; EXPRESSED IN HELA, SIGNAL = 4.3; SWISSPROT HIT: Q94516, EVALUE 1.90e+00
CVSWEEVKISTSIGVWKKLIPTLMDDFEMFKTSVEEATSDVVEIARKLEVEVEPEDVTELLQSHNKIRADDDLLLMDEQRKWFLEIESTSSEVTMNIFEMTTQDLEYFIKLS

SEQ ID NO: 39684 - protein, 119 aa, Homo sapiens
  MAP TO AC005216.1; EXPRESSED IN FETAL LIVER, SIGNAL = 2.1; EXPRESSED IN BRAIN, SIGNAL = 1.2; EXPRESSED IN BONE MARROW, SIGNAL = 1.6; EXPRESSED IN ADULT LIVER, SIGNAL = 1.9; EXPRESSED IN PLACENTA, SIGNAL = 1.7; EXPRESSED IN LUNG, SIGNAL = 1.5; EXPRESSED IN HEART, SIGNAL = 3.6; EXPRESSED IN HELA, SIGNAL = 1.8; SWISSPROT HIT: Q92793, EVALUE 1.60e+00
GSLQRPLQSGIPTLVVGSLRRSPTMVLRPQQFQFYQPQGIPSSPSAVVVEMGSKPALTGEPALTCISRGSEARIHSAASSLIMEDKEIPIKSEPLPKPPASAPPSILVKPENSRNGIEK

SEQ ID NO: 39685 - protein, 98 aa, Homo sapiens
  MAP TO AC006203.1; EXPRESSED IN PLACENTA, SIGNAL = 2.6; EXPRESSED IN LUNG, SIGNAL = 1.6; EXPRESSED IN HEART, SIGNAL = 2.8; EXPRESSED IN FETAL LIVER, SIGNAL = 4.2; EXPRESSED IN BONE MARROW, SIGNAL = 3.3; EXPRESSED IN ADULT LIVER, SIGNAL =   3; EXPRESSED IN HELA, SIGNAL =   3; EXPRESSED IN BRAIN, SIGNAL = 3.5; SWISSPROT HIT: P55289, EVALUE 5.00e-42
LHSDMDRGDGSIKYILSGEGAGIVFTIDDTTGDIHAIQRLDREERAQYTLRAQALDRRTGRPMEPESEFIIKIQDINDNEPKFLDGPYVATVPEMSPV

SEQ ID NO: 39686 - protein, 36 aa, Homo sapiens
  MAP TO AC006203.1; EXPRESSED IN PLACENTA, SIGNAL = 2.6; EXPRESSED IN LUNG, SIGNAL = 1.6; EXPRESSED IN HEART, SIGNAL = 2.8; EXPRESSED IN FETAL LIVER, SIGNAL = 4.2; EXPRESSED IN BONE MARROW, SIGNAL = 3.3; EXPRESSED IN ADULT LIVER, SIGNAL =   3; EXPRESSED IN HELA, SIGNAL =   3; EXPRESSED IN BRAIN, SIGNAL = 3.5
TSSREKVLASCLPSTTPLETSTPFRGSTERKEPSIL

SEQ ID NO: 39687 - protein, 60 aa, Homo sapiens
  MAP TO AC004958.1; EXPRESSED IN LUNG, SIGNAL = 1.8; EXPRESSED IN FETAL LIVER, SIGNAL = 1.7; EXPRESSED IN BONE MARROW, SIGNAL = 1.6; EXPRESSED IN PLACENTA, SIGNAL =   2; EXPRESSED IN HELA, SIGNAL = 1.9; EXPRESSED IN HEART, SIGNAL = 1.7; EXPRESSED IN BRAIN, SIGNAL = 1.9; EXPRESSED IN ADULT LIVER, SIGNAL = 2.2; SWISSPROT HIT: P36115, EVALUE 2.00e+00
RVEEFLSKDISYLISNKKEAKFAQTLGRISPVPSPESAYTAETTSPHPSHDGSSFKSPDT

SEQ ID NO: 39688 - protein, 52 aa, Homo sapiens
  MAP TO AC004958.1; EXPRESSED IN LUNG, SIGNAL = 1.8; EXPRESSED IN FETAL LIVER, SIGNAL = 1.7; EXPRESSED IN BONE MARROW, SIGNAL = 1.6; EXPRESSED IN PLACENTA, SIGNAL =   2; EXPRESSED IN HELA, SIGNAL = 1.9; EXPRESSED IN HEART, SIGNAL = 1.7; EXPRESSED IN BRAIN, SIGNAL = 1.9; EXPRESSED IN ADULT LIVER, SIGNAL = 2.2; SWISSPROT HIT: P14994, EVALUE 1.20e+00
ISVILFQIRRKLNLHKPWVEFLLYQVQNLHILQKPLHLIPAMMEVHLSHQTQ

SEQ ID NO: 39689 - protein, 36 aa, Homo sapiens
  MAP TO AC005320.1; EXPRESSED IN LUNG, SIGNAL = 1.3; EXPRESSED IN FETAL LIVER, SIGNAL = 1.1; EXPRESSED IN BONE MARROW, SIGNAL = 1.1; EXPRESSED IN HEART, SIGNAL = 1.4; EXPRESSED IN BRAIN, SIGNAL =   1; EXPRESSED IN ADULT LIVER, SIGNAL = 1.2; EXPRESSED IN PLACENTA, SIGNAL = 1.1
KKKPAVARGNNLMANLAETMTLKRYGNGHQEEVDQI

SEQ ID NO: 39690 - protein, 28 aa, Homo sapiens
  MAP TO AC004097.1; EXPRESSED IN BONE MARROW, SIGNAL = 6.9; EXPRESSED IN HELA, SIGNAL = 7.7; EXPRESSED IN HEART, SIGNAL =   7; EXPRESSED IN FETAL LIVER, SIGNAL =   6; EXPRESSED IN BRAIN, SIGNAL = 7.7; EXPRESSED IN ADULT LIVER, SIGNAL = 6.4; EXPRESSED IN PLACENTA, SIGNAL = 6.5; EXPRESSED IN LUNG, SIGNAL = 7.4
EWMPQNDFARTTQNSLSPVADYDYDLLL

SEQ ID NO: 39691 - protein, 52 aa, Homo sapiens
  MAP TO AC003964.1; EXPRESSED IN PLACENTA, SIGNAL = 1.6; EXPRESSED IN LUNG, SIGNAL = 1.9; EXPRESSED IN HEART, SIGNAL = 1.5; EXPRESSED IN BRAIN, SIGNAL = 1.6; EXPRESSED IN ADULT LIVER, SIGNAL = 1.4; EXPRESSED IN FETAL LIVER, SIGNAL = 1.4; EXPRESSED IN BONE MARROW, SIGNAL = 1.6
KLLKMTSRRLEESMGAVQMGLVNMFKGFQSKVLPPLSPKVVTEEEVNRMVMY

SEQ ID NO: 39692 - protein, 30 aa, Homo sapiens
  MAP TO AC004578.3; EXPRESSED IN PLACENTA, SIGNAL = 8.7; EXPRESSED IN LUNG, SIGNAL =  11; EXPRESSED IN HEART, SIGNAL = 9.1; EXPRESSED IN BRAIN, SIGNAL =  11; EXPRESSED IN BONE MARROW, SIGNAL = 9.4; EXPRESSED IN ADULT LIVER, SIGNAL = 9.3; EXPRESSED IN HELA, SIGNAL =  10; EXPRESSED IN FETAL LIVER, SIGNAL =  10; SWISSPROT HIT: P54259, EVALUE 6.50e+00
FRDVLHQAHPPAWCHHRHRQFLHLPDQQEE

SEQ ID NO: 39693 - protein, 19 aa, Homo sapiens
  MAP TO AC004578.3; EXPRESSED IN PLACENTA, SIGNAL = 8.7; EXPRESSED IN LUNG, SIGNAL =  11; EXPRESSED IN HEART, SIGNAL = 9.1; EXPRESSED IN BRAIN, SIGNAL =  11; EXPRESSED IN BONE MARROW, SIGNAL = 9.4; EXPRESSED IN ADULT LIVER, SIGNAL = 9.3; EXPRESSED IN HELA, SIGNAL =  10; EXPRESSED IN FETAL LIVER, SIGNAL =  10
QSGGHPQPAPTFLLLVGQM

SEQ ID NO: 39694 - protein, 40 aa, Homo sapiens
  MAP TO AC002526.1; EXPRESSED IN LUNG, SIGNAL = 1.6; EXPRESSED IN PLACENTA, SIGNAL = 1.5; EXPRESSED IN HEART, SIGNAL = 5.9; EXPRESSED IN FETAL LIVER, SIGNAL = 1.7; EXPRESSED IN BRAIN, SIGNAL = 2.6; EXPRESSED IN BONE MARROW, SIGNAL = 1.6; EXPRESSED IN ADULT LIVER, SIGNAL = 3.7; EXPRESSED IN HELA, SIGNAL = 1.9; SWISSPROT HIT: Q05152, EVALUE 6.30e+00
LCSSGSHSQGNPGPDKLAEGQEILASQTPGLSLWNPVELM

SEQ ID NO: 39695 - protein, 59 aa, Homo sapiens
  MAP TO AC005837.1; EXPRESSED IN LUNG, SIGNAL = 6.4; EXPRESSED IN HEART, SIGNAL = 6.1; EXPRESSED IN FETAL LIVER, SIGNAL =   6; EXPRESSED IN BRAIN, SIGNAL = 6.5; EXPRESSED IN HELA, SIGNAL = 6.1; EXPRESSED IN BONE MARROW, SIGNAL = 5.9; EXPRESSED IN PLACENTA, SIGNAL = 6.5; EXPRESSED IN ADULT LIVER, SIGNAL =   6; SWISSPROT HIT: Q92183, EVALUE 2.00e-20
ITEGHERFSDHYYDTSWKRLIFYINHDFKLEREVWKRLHDEGIIRLYQRPGPGTAKAKN

SEQ ID NO: 39696 - protein, 19 aa, Homo sapiens
  MAP TO AC005837.1; EXPRESSED IN LUNG, SIGNAL = 6.4; EXPRESSED IN HEART, SIGNAL = 6.1; EXPRESSED IN FETAL LIVER, SIGNAL =   6; EXPRESSED IN BRAIN, SIGNAL = 6.5; EXPRESSED IN HELA, SIGNAL = 6.1; EXPRESSED IN BONE MARROW, SIGNAL = 5.9; EXPRESSED IN PLACENTA, SIGNAL = 6.5; EXPRESSED IN ADULT LIVER, SIGNAL =   6
SLRAMSAFLITTMIHHGSG

SEQ ID NO: 39697 - protein, 58 aa, Homo sapiens
  MAP TO AC005598.6; EXPRESSED IN LUNG, SIGNAL = 3.7; EXPRESSED IN FETAL LIVER, SIGNAL =   7; EXPRESSED IN BONE MARROW, SIGNAL = 6.4; EXPRESSED IN PLACENTA, SIGNAL = 4.7; EXPRESSED IN HELA, SIGNAL = 5.2; EXPRESSED IN HEART, SIGNAL = 5.2; EXPRESSED IN BRAIN, SIGNAL = 5.6; EXPRESSED IN ADULT LIVER, SIGNAL = 4.8; SWISSPROT HIT: P07679, EVALUE 6.00e+00
WFLVLTMSLGWQQLLYLKYATDKIPKDPCKKLYYADDHRNATFDTFTGNVNETPDVPK

SEQ ID NO: 39698 - protein, 20 aa, Homo sapiens
  MAP TO AC002127.1; EXPRESSED IN PLACENTA, SIGNAL = 3.3; EXPRESSED IN HEART, SIGNAL = 3.4; EXPRESSED IN BRAIN, SIGNAL = 3.8; EXPRESSED IN BONE MARROW, SIGNAL = 3.8; EXPRESSED IN ADULT LIVER, SIGNAL = 3.4; EXPRESSED IN LUNG, SIGNAL = 3.4; EXPRESSED IN HELA, SIGNAL = 3.5; EXPRESSED IN FETAL LIVER, SIGNAL =   3
FSKSHVAITCTFKKRNNDYT

SEQ ID NO: 39699 - protein, 45 aa, Homo sapiens
  MAP TO AC005918.5; EXPRESSED IN PLACENTA, SIGNAL = 2.8; EXPRESSED IN LUNG, SIGNAL = 3.3; EXPRESSED IN HELA, SIGNAL =   3; EXPRESSED IN FETAL LIVER, SIGNAL = 3.1; EXPRESSED IN ADULT LIVER, SIGNAL = 2.9; EXPRESSED IN HEART, SIGNAL = 2.6; EXPRESSED IN BRAIN, SIGNAL = 3.1; EXPRESSED IN BONE MARROW, SIGNAL = 2.9; SWISSPROT HIT: P07372, EVALUE 9.40e-01
PQPLRRFVAVLVEEEKDALFSTEALKLDAGSSRTFPCAKVAPSGL

SEQ ID NO: 39700 - protein, 77 aa, Homo sapiens
  MAP TO AC005010.2; EXPRESSED IN PLACENTA, SIGNAL =   5; EXPRESSED IN LUNG, SIGNAL = 5.4; EXPRESSED IN HELA, SIGNAL = 5.4; EXPRESSED IN HEART, SIGNAL = 4.6; EXPRESSED IN BRAIN, SIGNAL = 4.8; EXPRESSED IN FETAL LIVER, SIGNAL = 4.3; EXPRESSED IN BONE MARROW, SIGNAL = 4.2; EXPRESSED IN ADULT LIVER, SIGNAL = 4.5; SWISSPROT HIT: Q64705, EVALUE 1.80e+00
MGSHGSTSSSVICLNGSQNSGKHFTCVYPHYVNAPTQAQPNEGAHGARQRPGPCGLSVPSLGTASLCSALCKHSKTL

SEQ ID NO: 39701 - protein, 62 aa, Homo sapiens
  MAP TO AC004918.1; EXPRESSED IN PLACENTA, SIGNAL = 2.9; EXPRESSED IN BONE MARROW, SIGNAL = 2.8; EXPRESSED IN ADULT LIVER, SIGNAL = 3.9; EXPRESSED IN LUNG, SIGNAL = 3.5; EXPRESSED IN HELA, SIGNAL = 3.3; EXPRESSED IN HEART, SIGNAL = 2.9; EXPRESSED IN FETAL LIVER, SIGNAL = 3.3; EXPRESSED IN BRAIN, SIGNAL =   3; SWISSPROT HIT: Q15391, EVALUE 5.90e+00
EEGLWRGRPSPLTSSIPTVYCCCCLANVSLPGIGGTIPESKPFFYVNVADIESLEVEVSYVA

SEQ ID NO: 39702 - protein, 25 aa, Homo sapiens
  MAP TO AC004918.1; EXPRESSED IN PLACENTA, SIGNAL = 2.9; EXPRESSED IN BONE MARROW, SIGNAL = 2.8; EXPRESSED IN ADULT LIVER, SIGNAL = 3.9; EXPRESSED IN LUNG, SIGNAL = 3.5; EXPRESSED IN HELA, SIGNAL = 3.3; EXPRESSED IN HEART, SIGNAL = 2.9; EXPRESSED IN FETAL LIVER, SIGNAL = 3.3; EXPRESSED IN BRAIN, SIGNAL =   3
LLYPHSVLLLLLGQRFTAWHRGHHS

SEQ ID NO: 39703 - protein, 57 aa, Homo sapiens
  MAP TO AC002490.1; EXPRESSED IN LUNG, SIGNAL = 2.2; EXPRESSED IN BRAIN, SIGNAL = 2.3; EXPRESSED IN ADULT LIVER, SIGNAL = 1.7; EXPRESSED IN PLACENTA, SIGNAL =   2; EXPRESSED IN HELA, SIGNAL = 1.9; EXPRESSED IN HEART, SIGNAL = 1.7; EXPRESSED IN FETAL LIVER, SIGNAL = 1.8; EXPRESSED IN BONE MARROW, SIGNAL = 1.9
RLHDLVLPLVMGVQQGEVLGSSPYTSSRCRRELYCLLLALLLAPSPRCPPPLACALQ

SEQ ID NO: 39704 - protein, 18 aa, Homo sapiens
  MAP TO AC002490.1; EXPRESSED IN LUNG, SIGNAL = 2.2; EXPRESSED IN BRAIN, SIGNAL = 2.3; EXPRESSED IN ADULT LIVER, SIGNAL = 1.7; EXPRESSED IN PLACENTA, SIGNAL =   2; EXPRESSED IN HELA, SIGNAL = 1.9; EXPRESSED IN HEART, SIGNAL = 1.7; EXPRESSED IN FETAL LIVER, SIGNAL = 1.8; EXPRESSED IN BONE MARROW, SIGNAL = 1.9
DCMTWSSPWSWVYSRVRS

SEQ ID NO: 39705 - protein, 39 aa, Homo sapiens
  MAP TO AC002074.1; EXPRESSED IN HELA, SIGNAL = 4.7; EXPRESSED IN HEART, SIGNAL = 3.8; EXPRESSED IN BRAIN, SIGNAL = 4.6; EXPRESSED IN BONE MARROW, SIGNAL = 4.8; EXPRESSED IN PLACENTA, SIGNAL = 4.4; EXPRESSED IN LUNG, SIGNAL = 4.8; EXPRESSED IN FETAL LIVER, SIGNAL =   4; EXPRESSED IN ADULT LIVER, SIGNAL = 4.5
YVVSTPMEKPTCKKWMSPAKSYHECANNHMSNSGNGSSP

SEQ ID NO: 39706 - protein, 25 aa, Homo sapiens
  MAP TO AC005294.1; EXPRESSED IN PLACENTA, SIGNAL = 1.7; EXPRESSED IN BRAIN, SIGNAL = 1.9; EXPRESSED IN ADULT LIVER, SIGNAL = 1.5; EXPRESSED IN LUNG, SIGNAL = 0.88; EXPRESSED IN HEART, SIGNAL = 2.1; EXPRESSED IN FETAL LIVER, SIGNAL = 2.2; EXPRESSED IN BONE MARROW, SIGNAL = 2.2
GDMLPESNPYVATDISHQVRGAISC

SEQ ID NO: 39707 - protein, 59 aa, Homo sapiens
  MAP TO AC005516.1; EXPRESSED IN LUNG, SIGNAL = 1.3; EXPRESSED IN BRAIN, SIGNAL = 1.8; EXPRESSED IN ADULT LIVER, SIGNAL = 1.4; EXPRESSED IN PLACENTA, SIGNAL = 1.5; EXPRESSED IN HEART, SIGNAL = 1.6; EXPRESSED IN BONE MARROW, SIGNAL = 1.4; EXPRESSED IN FETAL LIVER, SIGNAL = 1.6; SWISSPROT HIT: P42858, EVALUE 7.00e-28
PTMLKKTLQCLEGIHLSQSGAVLTLYVDRLLCTPFRVLARMVDILACRRVEMLLAANLQ

SEQ ID NO: 39708 - protein, 33 aa, Homo sapiens
  MAP TO AC004848.1; EXPRESSED IN LUNG, SIGNAL = 1.5; EXPRESSED IN HEART, SIGNAL = 1.5; EXPRESSED IN FETAL LIVER, SIGNAL = 1.5; EXPRESSED IN PLACENTA, SIGNAL = 1.7; EXPRESSED IN BRAIN, SIGNAL = 1.5; EXPRESSED IN BONE MARROW, SIGNAL = 1.6; EXPRESSED IN ADULT LIVER, SIGNAL = 1.5; SWISSPROT HIT: Q14563, EVALUE 4.00e-15
KECANFIKVLKAYNQTHLYACGTGAFHPICTYI

SEQ ID NO: 39709 - protein, 65 aa, Homo sapiens
  MAP TO AC002119.1; EXPRESSED IN PLACENTA, SIGNAL = 2.4; EXPRESSED IN LUNG, SIGNAL = 2.9; EXPRESSED IN HELA, SIGNAL = 1.6; EXPRESSED IN FETAL LIVER, SIGNAL = 1.4; EXPRESSED IN BRAIN, SIGNAL = 3.2; EXPRESSED IN ADULT LIVER, SIGNAL = 1.7; EXPRESSED IN HEART, SIGNAL = 1.5; EXPRESSED IN BONE MARROW, SIGNAL = 1.4; SWISSPROT HIT: O16005, EVALUE 5.90e+00
MQKCDRGEEGPRRRDYWTDQTINASTPKLRLLLNLTFPSFTLSLENLLSLRTAVEQEEASLTSCF

SEQ ID NO: 39710 - protein, 21 aa, Homo sapiens
  MAP TO AC002119.1; EXPRESSED IN PLACENTA, SIGNAL = 2.4; EXPRESSED IN LUNG, SIGNAL = 2.9; EXPRESSED IN HELA, SIGNAL = 1.6; EXPRESSED IN FETAL LIVER, SIGNAL = 1.4; EXPRESSED IN BRAIN, SIGNAL = 3.2; EXPRESSED IN ADULT LIVER, SIGNAL = 1.7; EXPRESSED IN HEART, SIGNAL = 1.5; EXPRESSED IN BONE MARROW, SIGNAL = 1.4
CRSVTGERKVPEEGITGQTKQ

SEQ ID NO: 39711 - protein, 38 aa, Homo sapiens
  MAP TO AC000085.4; EXPRESSED IN PLACENTA, SIGNAL = 1.6; EXPRESSED IN LUNG, SIGNAL = 1.7; EXPRESSED IN HEART, SIGNAL = 1.5; EXPRESSED IN FETAL LIVER, SIGNAL = 1.4; EXPRESSED IN BONE MARROW, SIGNAL = 1.8; EXPRESSED IN ADULT LIVER, SIGNAL = 1.7; EXPRESSED IN HELA, SIGNAL = 1.6; EXPRESSED IN BRAIN, SIGNAL = 1.7; SWISSPROT HIT: P54198, EVALUE 5.00e-09
GLRKRELLKELLPVIGQNLRFQRLFTECQEQLDILRDK

SEQ ID NO: 39712 - protein, 24 aa, Homo sapiens
  MAP TO AC000085.4; EXPRESSED IN PLACENTA, SIGNAL = 1.6; EXPRESSED IN LUNG, SIGNAL = 1.7; EXPRESSED IN HEART, SIGNAL = 1.5; EXPRESSED IN FETAL LIVER, SIGNAL = 1.4; EXPRESSED IN BONE MARROW, SIGNAL = 1.8; EXPRESSED IN ADULT LIVER, SIGNAL = 1.7; EXPRESSED IN HELA, SIGNAL = 1.6; EXPRESSED IN BRAIN, SIGNAL = 1.7
CYQSSGRTSDSSASSPSVRNSSTS

SEQ ID NO: 39713 - protein, 58 aa, Homo sapiens
  MAP TO AC005611.1; EXPRESSED IN LUNG, SIGNAL = 2.7; EXPRESSED IN FETAL LIVER, SIGNAL =   3; EXPRESSED IN BONE MARROW, SIGNAL = 3.3; EXPRESSED IN PLACENTA, SIGNAL = 2.7; EXPRESSED IN HELA, SIGNAL = 2.4; EXPRESSED IN HEART, SIGNAL = 2.6; EXPRESSED IN BRAIN, SIGNAL = 3.2; EXPRESSED IN ADULT LIVER, SIGNAL = 2.7; SWISSPROT HIT: Q57709, EVALUE 8.00e-02
SGGELDIVVTSNKEVKVAAVRDAFQEVFGLAVVVGEAGQSNIAPQPVGYAAGLKVSNR

SEQ ID NO: 39714 - protein, 24 aa, Homo sapiens
  MAP TO AC005531.1; EXPRESSED IN LUNG, SIGNAL = 1.6; EXPRESSED IN BONE MARROW, SIGNAL = 1.7; EXPRESSED IN PLACENTA, SIGNAL = 1.7; EXPRESSED IN HELA, SIGNAL = 1.8; EXPRESSED IN HEART, SIGNAL = 1.6; EXPRESSED IN FETAL LIVER, SIGNAL = 1.9; EXPRESSED IN BRAIN, SIGNAL = 2.6; EXPRESSED IN ADULT LIVER, SIGNAL = 1.6; SWISSPROT HIT: P96680, EVALUE 6.60e+00
TTTRLLLGAIAVLLFAILVVMSIL

SEQ ID NO: 39715 - protein, 25 aa, Homo sapiens
  MAP TO AC005531.1; EXPRESSED IN LUNG, SIGNAL = 1.6; EXPRESSED IN BONE MARROW, SIGNAL = 1.7; EXPRESSED IN PLACENTA, SIGNAL = 1.7; EXPRESSED IN HELA, SIGNAL = 1.8; EXPRESSED IN HEART, SIGNAL = 1.6; EXPRESSED IN FETAL LIVER, SIGNAL = 1.9; EXPRESSED IN BRAIN, SIGNAL = 2.6; EXPRESSED IN ADULT LIVER, SIGNAL = 1.6; SWISSPROT HIT: P13983, EVALUE 3.90e+00
PLSSPRHHHTPPAGCHRGPSVRHLG

SEQ ID NO: 39716 - protein, 43 aa, Homo sapiens
  MAP TO AC004584.1; EXPRESSED IN BRAIN, SIGNAL = 6.5; EXPRESSED IN ADULT LIVER, SIGNAL = 6.7; EXPRESSED IN LUNG, SIGNAL = 6.7; EXPRESSED IN BONE MARROW, SIGNAL = 5.5; EXPRESSED IN PLACENTA, SIGNAL =   6; EXPRESSED IN HELA, SIGNAL = 5.7; EXPRESSED IN HEART, SIGNAL = 5.6; EXPRESSED IN FETAL LIVER, SIGNAL =   6; SWISSPROT HIT: P33119, EVALUE 1.60e+00
AVIDWPTEEGKEVWDYVTVRKDAYMFWWLYYATNSCKNFSELP

SEQ ID NO: 39717 - protein, 17 aa, Homo sapiens
  MAP TO AC004584.1; EXPRESSED IN BRAIN, SIGNAL = 6.5; EXPRESSED IN ADULT LIVER, SIGNAL = 6.7; EXPRESSED IN LUNG, SIGNAL = 6.7; EXPRESSED IN BONE MARROW, SIGNAL = 5.5; EXPRESSED IN PLACENTA, SIGNAL =   6; EXPRESSED IN HELA, SIGNAL = 5.7; EXPRESSED IN HEART, SIGNAL = 5.6; EXPRESSED IN FETAL LIVER, SIGNAL =   6
ELSLTGPQRRARKYGIM

SEQ ID NO: 39718 - protein, 34 aa, Homo sapiens
  MAP TO AC005482.1; EXPRESSED IN LUNG, SIGNAL = 1.6; EXPRESSED IN FETAL LIVER, SIGNAL = 1.5; EXPRESSED IN BRAIN, SIGNAL = 1.6; EXPRESSED IN BONE MARROW, SIGNAL = 1.5; EXPRESSED IN ADULT LIVER, SIGNAL = 1.5; EXPRESSED IN PLACENTA, SIGNAL = 1.4; EXPRESSED IN HEART, SIGNAL = 1.5
EMRTQVSRMSSSSLSSSSSLSLSSYLPPPPHHQG

SEQ ID NO: 39719 - protein, 91 aa, Homo sapiens
  MAP TO AC003692.1; EXPRESSED IN LUNG, SIGNAL = 3.6; EXPRESSED IN HELA, SIGNAL = 3.3; EXPRESSED IN BRAIN, SIGNAL = 3.5; EXPRESSED IN BONE MARROW, SIGNAL = 3.3; EXPRESSED IN ADULT LIVER, SIGNAL = 3.1; EXPRESSED IN PLACENTA, SIGNAL = 3.3; EXPRESSED IN HEART, SIGNAL = 3.1; EXPRESSED IN FETAL LIVER, SIGNAL = 3.1; SWISSPROT HIT: P14077, EVALUE 5.00e-08
DQEEAQGKERKHKKKAETLVATLYKTQYPQGTPASCYQCGKLGHFKRDCPGSKKKPPQPCPVYNGDHWKADCPGKHRSLSPEPVSQMVQQD

SEQ ID NO: 39720 - protein, 54 aa, Homo sapiens
  MAP TO AC005658.2; EXPRESSED IN HELA, SIGNAL = 2.1; EXPRESSED IN BRAIN, SIGNAL = 2.2; EXPRESSED IN BONE MARROW, SIGNAL = 2.1; EXPRESSED IN ADULT LIVER, SIGNAL =   2; EXPRESSED IN HEART, SIGNAL = 2.3; EXPRESSED IN PLACENTA, SIGNAL = 1.7; EXPRESSED IN LUNG, SIGNAL =   2; EXPRESSED IN FETAL LIVER, SIGNAL =   2; SWISSPROT HIT: Q61554, EVALUE 2.40e-01
NSDCLPEDGCQEGDEFSNSNEPCYHGVHPSQKGPECGQDPGCWDLDRQVQGGVP

SEQ ID NO: 39721 - protein, 59 aa, Homo sapiens
  MAP TO AC003950.1; EXPRESSED IN BONE MARROW, SIGNAL =   4; EXPRESSED IN PLACENTA, SIGNAL = 3.7; EXPRESSED IN LUNG, SIGNAL =   4; EXPRESSED IN HELA, SIGNAL =   4; EXPRESSED IN HEART, SIGNAL = 4.2; EXPRESSED IN FETAL LIVER, SIGNAL = 4.1; EXPRESSED IN BRAIN, SIGNAL = 5.2; EXPRESSED IN ADULT LIVER, SIGNAL = 4.1; SWISSPROT HIT: Q92667, EVALUE 3.00e-30
LMLPDGITVEVIVVNQVNAGHLFVQQHTHPTFHALRSLDQQMYLCYSQPGIPTLPTPVE

SEQ ID NO: 39722 - protein, 53 aa, Homo sapiens
  MAP TO AC003950.1; EXPRESSED IN BONE MARROW, SIGNAL =   4; EXPRESSED IN PLACENTA, SIGNAL = 3.7; EXPRESSED IN LUNG, SIGNAL =   4; EXPRESSED IN HELA, SIGNAL =   4; EXPRESSED IN HEART, SIGNAL = 4.2; EXPRESSED IN FETAL LIVER, SIGNAL = 4.1; EXPRESSED IN BRAIN, SIGNAL = 5.2; EXPRESSED IN ADULT LIVER, SIGNAL = 4.1; SWISSPROT HIT: Q95116, EVALUE 5.40e-01
SPWRSLWSTRSMPGTCSCSSTHTLPSTRCAASTSRCTSVTLSLESPPCPPQWK

SEQ ID NO: 39723 - protein, 61 aa, Homo sapiens
  MAP TO AC004413.1; EXPRESSED IN HELA, SIGNAL = 2.8; EXPRESSED IN BONE MARROW, SIGNAL = 1.5; EXPRESSED IN FETAL LIVER, SIGNAL = 2.5; EXPRESSED IN HEART, SIGNAL = 2.6; EXPRESSED IN PLACENTA, SIGNAL = 0.67; EXPRESSED IN LUNG, SIGNAL = 0.58; EXPRESSED IN BRAIN, SIGNAL = 0.6; EXPRESSED IN ADULT LIVER, SIGNAL = 0.66; SWISSPROT HIT: Q40082, EVALUE 1.50e+00
ATTDDMESEVLNVLFMGVIALSSGNNILGFNTDNFVIDISRLTSINKTVTLTVMQNDADCP

SEQ ID NO: 39724 - protein, 27 aa, Homo sapiens
  MAP TO AC005540.2; EXPRESSED IN LUNG, SIGNAL = 3.1; EXPRESSED IN HELA, SIGNAL = 3.4; EXPRESSED IN BRAIN, SIGNAL = 3.3; EXPRESSED IN BONE MARROW, SIGNAL = 3.2; EXPRESSED IN ADULT LIVER, SIGNAL = 2.4; EXPRESSED IN PLACENTA, SIGNAL = 2.9; EXPRESSED IN HEART, SIGNAL = 2.7; EXPRESSED IN FETAL LIVER, SIGNAL = 2.9
KQRVMHLPASVMLLAALGMVWPKKMLG

SEQ ID NO: 39725 - protein, 58 aa, Homo sapiens
  MAP TO AC002302.1; EXPRESSED IN PLACENTA, SIGNAL = 1.9; EXPRESSED IN HELA, SIGNAL =   2; EXPRESSED IN BRAIN, SIGNAL =   2; EXPRESSED IN BONE MARROW, SIGNAL = 2.1; EXPRESSED IN ADULT LIVER, SIGNAL = 2.2; EXPRESSED IN HEART, SIGNAL = 2.1; EXPRESSED IN LUNG, SIGNAL = 2.1; EXPRESSED IN FETAL LIVER, SIGNAL = 2.2; SWISSPROT HIT: P05773, EVALUE 3.00e-21
MADPAAGPPPSEGEESTVRFARKGALRQKNVHEVKNHKFTARFFKQPTFCSHCTDFIW

SEQ ID NO: 39726 - protein, 56 aa, Homo sapiens
  MAP TO AC005548.1; EXPRESSED IN BONE MARROW, SIGNAL = 2.2; EXPRESSED IN PLACENTA, SIGNAL = 2.7; EXPRESSED IN LUNG, SIGNAL = 2.5; EXPRESSED IN HELA, SIGNAL = 2.5; EXPRESSED IN HEART, SIGNAL = 2.2; EXPRESSED IN FETAL LIVER, SIGNAL = 2.4; EXPRESSED IN BRAIN, SIGNAL = 2.8; EXPRESSED IN ADULT LIVER, SIGNAL = 2.2; SWISSPROT HIT: P49782, EVALUE 4.60e+00
LSDVKINGWNDSKFIIIVIDVLISTLVLSPGFLQAYYFHTAMLIMVIKPWNEWLEV

SEQ ID NO: 39727 - protein, 31 aa, Homo sapiens
  MAP TO AC002087.1; EXPRESSED IN LUNG, SIGNAL = 2.9; EXPRESSED IN FETAL LIVER, SIGNAL = 3.1; EXPRESSED IN BRAIN, SIGNAL = 3.1; EXPRESSED IN BONE MARROW, SIGNAL = 3.2; EXPRESSED IN PLACENTA, SIGNAL = 2.9; EXPRESSED IN HELA, SIGNAL =   3; EXPRESSED IN HEART, SIGNAL = 2.9; EXPRESSED IN ADULT LIVER, SIGNAL = 2.8
LWRSEETYNHGRRGRKYVLLHMVAGKRRMSK

SEQ ID NO: 39728 - protein, 68 aa, Homo sapiens
  MAP TO AC002461.1; EXPRESSED IN LUNG, SIGNAL = 1.8; EXPRESSED IN BRAIN, SIGNAL = 1.5; EXPRESSED IN PLACENTA, SIGNAL = 1.4; EXPRESSED IN HEART, SIGNAL = 1.3; EXPRESSED IN BONE MARROW, SIGNAL = 1.5; EXPRESSED IN ADULT LIVER, SIGNAL = 1.3; EXPRESSED IN FETAL LIVER, SIGNAL = 1.4; SWISSPROT HIT: P79217, EVALUE 7.30e+00
IKFGCLLLLLDLKERMLFMLRSLLIILKKKKYCVHILENGNWGSLLCWSFLLLHKIIEIISHHLDVDN

SEQ ID NO: 39729 - protein, 91 aa, Homo sapiens
  MAP TO AC005726.1; EXPRESSED IN PLACENTA, SIGNAL = 5.7; EXPRESSED IN LUNG, SIGNAL = 7.2; EXPRESSED IN FETAL LIVER, SIGNAL = 6.2; EXPRESSED IN BONE MARROW, SIGNAL =   7; EXPRESSED IN ADULT LIVER, SIGNAL = 6.6; EXPRESSED IN HELA, SIGNAL = 5.7; EXPRESSED IN HEART, SIGNAL = 6.1; EXPRESSED IN BRAIN, SIGNAL = 6.7; SWISSPROT HIT: Q10351, EVALUE 2.00e-09
VYKAVAAVQKSAEELASGHLASAFVASQEAVTSSELAFFDPSLLHLLYFPDDQKFAIYIPLFLPMAVPILLSLVKIFLETRKSWRKPEKTD

SEQ ID NO: 39730 - protein, 27 aa, Homo sapiens
  MAP TO AC005726.1; EXPRESSED IN PLACENTA, SIGNAL = 5.7; EXPRESSED IN LUNG, SIGNAL = 7.2; EXPRESSED IN FETAL LIVER, SIGNAL = 6.2; EXPRESSED IN BONE MARROW, SIGNAL =   7; EXPRESSED IN ADULT LIVER, SIGNAL = 6.6; EXPRESSED IN HELA, SIGNAL = 5.7; EXPRESSED IN HEART, SIGNAL = 6.1; EXPRESSED IN BRAIN, SIGNAL = 6.7; SWISSPROT HIT: P02847, EVALUE 8.60e+00
RPEVGRRVGVWAPGICLCRQPGSCDIL

SEQ ID NO: 39731 - protein, 28 aa, Homo sapiens
  MAP TO AC003681.1; EXPRESSED IN LUNG, SIGNAL = 2.5; EXPRESSED IN FETAL LIVER, SIGNAL = 2.6; EXPRESSED IN BONE MARROW, SIGNAL = 2.6; EXPRESSED IN PLACENTA, SIGNAL = 2.6; EXPRESSED IN HELA, SIGNAL = 2.5; EXPRESSED IN BRAIN, SIGNAL = 3.1; EXPRESSED IN ADULT LIVER, SIGNAL = 3.1; EXPRESSED IN HEART, SIGNAL = 2.8
FTIRERREPCWTLKKGRGFLLLIWASCH

SEQ ID NO: 39732 - protein, 96 aa, Homo sapiens
  MAP TO AC005663.1; EXPRESSED IN BONE MARROW, SIGNAL = 1.5; EXPRESSED IN PLACENTA, SIGNAL = 3.4; EXPRESSED IN LUNG, SIGNAL = 2.9; EXPRESSED IN HELA, SIGNAL = 2.3; EXPRESSED IN HEART, SIGNAL = 1.5; EXPRESSED IN FETAL LIVER, SIGNAL = 1.5; EXPRESSED IN BRAIN, SIGNAL = 3.3; EXPRESSED IN ADULT LIVER, SIGNAL = 9.4; SWISSPROT HIT: P21964, EVALUE 5.00e-41
MPEAPPLLLAAVLLGLVLLVVLLLLLRHWGWGLCLIGWNEFILQPIHNLLMGDTKEQRILNHVLQHAEPGNAQSVLEAIDTYCEQKEWAMNVGDKK

SEQ ID NO: 39733 - protein, 25 aa, Homo sapiens
  MAP TO AC005663.1; EXPRESSED IN BONE MARROW, SIGNAL = 1.5; EXPRESSED IN PLACENTA, SIGNAL = 3.4; EXPRESSED IN LUNG, SIGNAL = 2.9; EXPRESSED IN HELA, SIGNAL = 2.3; EXPRESSED IN HEART, SIGNAL = 1.5; EXPRESSED IN FETAL LIVER, SIGNAL = 1.5; EXPRESSED IN BRAIN, SIGNAL = 3.3; EXPRESSED IN ADULT LIVER, SIGNAL = 9.4
CRRPRLCCWQLCCWAWCCWWCCCCF

SEQ ID NO: 39734 - protein, 82 aa, Homo sapiens
  MAP TO AC005669.1; EXPRESSED IN LUNG, SIGNAL = 3.5; EXPRESSED IN FETAL LIVER, SIGNAL = 3.4; EXPRESSED IN BRAIN, SIGNAL =   4; EXPRESSED IN BONE MARROW, SIGNAL = 3.5; EXPRESSED IN PLACENTA, SIGNAL = 3.5; EXPRESSED IN HELA, SIGNAL = 3.3; EXPRESSED IN HEART, SIGNAL = 3.7; EXPRESSED IN ADULT LIVER, SIGNAL = 3.6
SDANTHTPLANGVKPPKIAKAKMKDKEKKGSSTRRFITRKATCNQHLKSGFHVLQRALFASQGQLFPVEILSIVGAWDLAGV

SEQ ID NO: 39735 - protein, 42 aa, Homo sapiens
  MAP TO AC005808.1; EXPRESSED IN HELA, SIGNAL = 4.2; EXPRESSED IN FETAL LIVER, SIGNAL = 4.3; EXPRESSED IN BRAIN, SIGNAL =   5; EXPRESSED IN BONE MARROW, SIGNAL = 4.6; EXPRESSED IN ADULT LIVER, SIGNAL = 9.9; EXPRESSED IN PLACENTA, SIGNAL = 4.4; EXPRESSED IN HEART, SIGNAL =   4; EXPRESSED IN LUNG, SIGNAL = 4.7; SWISSPROT HIT: P16245, EVALUE 3.70e+00
GDEIRVRATPLTRVQDKLKPRVYTGAPNCVGPKLLHRFQRRA

SEQ ID NO: 39736 - protein, 103 aa, Homo sapiens
  MAP TO AC003689.1; EXPRESSED IN PLACENTA, SIGNAL = 2.1; EXPRESSED IN LUNG, SIGNAL = 2.2; EXPRESSED IN FETAL LIVER, SIGNAL = 2.7; EXPRESSED IN ADULT LIVER, SIGNAL =   2; EXPRESSED IN HELA, SIGNAL = 1.8; EXPRESSED IN HEART, SIGNAL = 3.1; EXPRESSED IN BRAIN, SIGNAL = 1.9; EXPRESSED IN BONE MARROW, SIGNAL =   2; SWISSPROT HIT: P30203, EVALUE 2.00e-62
NRALRLVDGGGACAGRVEMLEHGEWGSVCDDTWDLEDAHVVCRQLGCGWAVQALPGLHFTPGRGPIHRDQVNCSGAEAYLWDCPGLPGQHYCGHKEDAGAVCS

SEQ ID NO: 39737 - protein, 27 aa, Homo sapiens
  MAP TO AC005815.1; EXPRESSED IN LUNG, SIGNAL = 6.4; EXPRESSED IN FETAL LIVER, SIGNAL = 7.4; EXPRESSED IN BONE MARROW, SIGNAL = 6.5; EXPRESSED IN PLACENTA, SIGNAL = 5.7; EXPRESSED IN HELA, SIGNAL = 6.6; EXPRESSED IN HEART, SIGNAL = 6.3; EXPRESSED IN BRAIN, SIGNAL = 7.1; EXPRESSED IN ADULT LIVER, SIGNAL = 6.7; SWISSPROT HIT: P17858, EVALUE 8.80e-02
MNTAVWAVAHMGICVGTKVFLICEVRL

SEQ ID NO: 39738 - protein, 27 aa, Homo sapiens
  MAP TO AC002288.1; EXPRESSED IN PLACENTA, SIGNAL = 4.1; EXPRESSED IN HEART, SIGNAL = 5.2; EXPRESSED IN FETAL LIVER, SIGNAL = 4.7; EXPRESSED IN BRAIN, SIGNAL = 5.4; EXPRESSED IN BONE MARROW, SIGNAL = 4.6; EXPRESSED IN ADULT LIVER, SIGNAL = 4.6; EXPRESSED IN HELA, SIGNAL = 4.8; EXPRESSED IN LUNG, SIGNAL = 4.5
YKNEKPVALVASSDDTGNCLVTTMEAN

SEQ ID NO: 39739 - protein, 64 aa, Homo sapiens
  MAP TO AC003077.1; EXPRESSED IN PLACENTA, SIGNAL = 1.2; EXPRESSED IN LUNG, SIGNAL = 1.4; EXPRESSED IN FETAL LIVER, SIGNAL = 1.4; EXPRESSED IN ADULT LIVER, SIGNAL = 1.4; EXPRESSED IN HEART, SIGNAL = 1.6; EXPRESSED IN BRAIN, SIGNAL = 1.3; EXPRESSED IN BONE MARROW, SIGNAL = 1.4; SWISSPROT HIT: P35029, EVALUE 6.80e-01
SQEVLQREGVPDNIKSFYKVNHIWKFRYDRPFHKGTKDKENEFKVPCNSYYMLTPQIDCEPLGA

SEQ ID NO: 39740 - protein, 18 aa, Homo sapiens
  MAP TO AC003077.1; EXPRESSED IN PLACENTA, SIGNAL = 1.2; EXPRESSED IN LUNG, SIGNAL = 1.4; EXPRESSED IN FETAL LIVER, SIGNAL = 1.4; EXPRESSED IN ADULT LIVER, SIGNAL = 1.4; EXPRESSED IN HEART, SIGNAL = 1.6; EXPRESSED IN BRAIN, SIGNAL = 1.3; EXPRESSED IN BONE MARROW, SIGNAL = 1.4
EPGGPAERGCSGQHQKLL

SEQ ID NO: 39741 - protein, 121 aa, Homo sapiens
  MAP TO AC003958.1; EXPRESSED IN LUNG, SIGNAL = 2.6; EXPRESSED IN HELA, SIGNAL = 2.4; EXPRESSED IN ADULT LIVER, SIGNAL = 2.3; EXPRESSED IN PLACENTA, SIGNAL = 2.6; EXPRESSED IN HEART, SIGNAL = 2.2; EXPRESSED IN FETAL LIVER, SIGNAL = 2.6; EXPRESSED IN BRAIN, SIGNAL = 2.4; EXPRESSED IN BONE MARROW, SIGNAL = 2.4; SWISSPROT HIT: Q14525, EVALUE 7.00e-48
MPYNFCLPSLSCRTSCSSRPCVPPSCHSCTLPGACNIPANVSNCNWFCEGSFNGSEKETMQFLNDRLASYLEKVRQLERDNAELENLIRERSQQQEPLLCPSYQSYFKTIEELQQKVSGIA

SEQ ID NO: 39742 - protein, 29 aa, Homo sapiens
  MAP TO AC005774.1; EXPRESSED IN PLACENTA, SIGNAL = 1.1; EXPRESSED IN LUNG, SIGNAL = 1.3; EXPRESSED IN HEART, SIGNAL = 1.4; EXPRESSED IN FETAL LIVER, SIGNAL = 1.2; EXPRESSED IN BONE MARROW, SIGNAL = 1.6; EXPRESSED IN ADULT LIVER, SIGNAL =   1; EXPRESSED IN BRAIN, SIGNAL = 1.2; EXPRESSED IN HELA, SIGNAL = 2.9; EST_HUMAN HIT: AI583442.1, EVALUE 6.00e+00
LHGVRWSNMYWIGITYLPTMRKLGRKMGG

SEQ ID NO: 39743 - protein, 29 aa, Homo sapiens
  MAP TO AC005774.1; EXPRESSED IN PLACENTA, SIGNAL = 1.1; EXPRESSED IN LUNG, SIGNAL = 1.3; EXPRESSED IN HEART, SIGNAL = 1.4; EXPRESSED IN FETAL LIVER, SIGNAL = 1.2; EXPRESSED IN BONE MARROW, SIGNAL = 1.6; EXPRESSED IN ADULT LIVER, SIGNAL =   1; EXPRESSED IN BRAIN, SIGNAL = 1.2; EXPRESSED IN HELA, SIGNAL = 2.9
TPWCEVVKHVLDWYHLSTNHEKAWKENGG

SEQ ID NO: 39744 - protein, 29 aa, Homo sapiens
  MAP TO AC005668.1; EXPRESSED IN LUNG, SIGNAL = 5.7; EXPRESSED IN HELA, SIGNAL = 5.5; EXPRESSED IN ADULT LIVER, SIGNAL = 5.1; EXPRESSED IN PLACENTA, SIGNAL = 8.7; EXPRESSED IN HEART, SIGNAL = 5.3; EXPRESSED IN FETAL LIVER, SIGNAL = 5.2; EXPRESSED IN BRAIN, SIGNAL = 6.5; EXPRESSED IN BONE MARROW, SIGNAL = 5.6
AHDDVLRLQMSILGFGAQGGRNLPPSLTL

SEQ ID NO: 39745 - protein, 93 aa, Homo sapiens
  MAP TO AC005803.1; EXPRESSED IN PLACENTA, SIGNAL = 3.3; EXPRESSED IN LUNG, SIGNAL =   4; EXPRESSED IN HELA, SIGNAL = 3.9; EXPRESSED IN FETAL LIVER, SIGNAL = 3.9; EXPRESSED IN ADULT LIVER, SIGNAL = 3.5; EXPRESSED IN HEART, SIGNAL = 3.6; EXPRESSED IN BRAIN, SIGNAL = 4.5; EXPRESSED IN BONE MARROW, SIGNAL = 4.3; SWISSPROT HIT: P35499, EVALUE 4.00e-48; EST_HUMAN HIT: BF347024.1, EVALUE 4.00e-35
VVVNALLGAIPSIMNVLLVCLIFWLIFSIMGVNLFAGKFYYCINTTTSERFDISEVNNKSECESLMHTGQVRWLNVKVNYDNVGLGYLSLLQV

SEQ ID NO: 39746 - protein, 53 aa, Homo sapiens
  MAP TO AC004067.1; EXPRESSED IN PLACENTA, SIGNAL = 1.4; EXPRESSED IN LUNG, SIGNAL = 1.5; EXPRESSED IN BRAIN, SIGNAL = 1.3; EXPRESSED IN ADULT LIVER, SIGNAL = 1.4; EXPRESSED IN HELA, SIGNAL = 1.8; EXPRESSED IN HEART, SIGNAL = 1.6; EXPRESSED IN FETAL LIVER, SIGNAL = 1.5; EXPRESSED IN BONE MARROW, SIGNAL = 1.3; SWISSPROT HIT: O66834, EVALUE 3.10e-01; EST_HUMAN HIT: AA284635.1, EVALUE 1.00e-24
KPSNEHTAEMEHMKSLVHRLFTILHLEESQKKREHHLLEKIDHLKEQLQPLEQ

SEQ ID NO: 39747 - protein, 59 aa, Homo sapiens
  MAP TO AC005189.1; EXPRESSED IN PLACENTA, SIGNAL = 3.2; EXPRESSED IN ADULT LIVER, SIGNAL = 2.4; EXPRESSED IN BONE MARROW, SIGNAL = 5.5; EXPRESSED IN BRAIN, SIGNAL = 2.2; EXPRESSED IN FETAL LIVER, SIGNAL =   2; EXPRESSED IN HEART, SIGNAL = 2.1; EXPRESSED IN LUNG, SIGNAL = 2.7; EXPRESSED IN HELA, SIGNAL =   2; EST_HUMAN HIT: BF245449.1, EVALUE 4.70e+00
VRTAGALALRRLQLPHALEESEGLGFPSCFCSWLVKAITAYYVLGIIGEIMENEFLTFQ

SEQ ID NO: 39748 - protein, 158 aa, Homo sapiens
  MAP TO AC004079.1; EXPRESSED IN FETAL LIVER, SIGNAL = 3.4; EXPRESSED IN ADULT LIVER, SIGNAL = 2.9; EXPRESSED IN PLACENTA, SIGNAL = 3.1; EXPRESSED IN LUNG, SIGNAL = 3.1; EXPRESSED IN HEART, SIGNAL = 3.3; EXPRESSED IN BRAIN, SIGNAL =   3; EXPRESSED IN BONE MARROW, SIGNAL = 2.9; EXPRESSED IN HELA, SIGNAL =   3; SWISSPROT HIT: O43365, EVALUE 2.00e-48; EST_HUMAN HIT: AW137579.1, EVALUE 3.00e-16
SVPYEPQSPPPFSKPPQGTYGLPPASYPASLPSCAPPPPPQKRYTAAGAGAGGTPDYDPHAHGLQGNGSYGTPHIQGSPVFVGGSYVEPMSNSGPALFGLTHLPHAASGAMDYGGAGPLGSGHHHGPGPGEPHPTYTDLTGHHPSQGRIQEAPKLTHL

SEQ ID NO: 39749 - protein, 77 aa, Homo sapiens
  MAP TO AC005155.1; EXPRESSED IN PLACENTA, SIGNAL = 1.4; EXPRESSED IN LUNG, SIGNAL = 1.5; EXPRESSED IN FETAL LIVER, SIGNAL = 1.2; EXPRESSED IN BRAIN, SIGNAL = 1.3; EXPRESSED IN BONE MARROW, SIGNAL = 1.2; EXPRESSED IN ADULT LIVER, SIGNAL = 1.4; EXPRESSED IN HEART, SIGNAL = 1.3; EST_HUMAN HIT: BE791675.1, EVALUE 8.40e-01; SWISSPROT HIT: Q9YNA4, EVALUE 2.40e+00
VNGLQQFTPLLFKSQLALSLEFLKQLEEESITLIPFCRGETVGKVTQWHTGGAGIKPGPTELRGGPAPLPAGDQVMQ

SEQ ID NO: 39750 - protein, 47 aa, Homo sapiens
  MAP TO AC005548.1; EXPRESSED IN PLACENTA, SIGNAL = 3.2; EXPRESSED IN BRAIN, SIGNAL = 3.1; EXPRESSED IN ADULT LIVER, SIGNAL = 2.8; EXPRESSED IN LUNG, SIGNAL = 3.2; EXPRESSED IN HELA, SIGNAL = 3.4; EXPRESSED IN HEART, SIGNAL = 3.1; EXPRESSED IN FETAL LIVER, SIGNAL = 3.1; EXPRESSED IN BONE MARROW, SIGNAL = 2.8
LLRLPWISTQNAAAAPSTLSPSSARTAAPSRQYSQVVSLIPVALISA

SEQ ID NO: 39751 - protein, 82 aa, Homo sapiens
  MAP TO AC005352.1; EXPRESSED IN LUNG, SIGNAL =  10; EXPRESSED IN HELA, SIGNAL = 9.3; EXPRESSED IN FETAL LIVER, SIGNAL = 9.1; EXPRESSED IN PLACENTA, SIGNAL =  11; EXPRESSED IN HEART, SIGNAL =  11; EXPRESSED IN BRAIN, SIGNAL =  10; EXPRESSED IN BONE MARROW, SIGNAL = 7.8; EXPRESSED IN ADULT LIVER, SIGNAL = 8.4; EST_HUMAN HIT: BF572015.1, EVALUE 5.00e+00
AIDYSNNFILPDELYINIIKFTYLCVGIFFLELSYIWSRNNAVQEYDVWHWSERTFLRNIIYIFISFKKSFRTFDDFFIYAH

SEQ ID NO: 39752 - protein, 94 aa, Homo sapiens
  MAP TO AC005664.1; EXPRESSED IN PLACENTA, SIGNAL = 5.8; EXPRESSED IN BRAIN, SIGNAL = 5.9; EXPRESSED IN ADULT LIVER, SIGNAL = 5.9; EXPRESSED IN LUNG, SIGNAL = 5.4; EXPRESSED IN HELA, SIGNAL = 5.2; EXPRESSED IN HEART, SIGNAL = 5.6; EXPRESSED IN FETAL LIVER, SIGNAL = 8.1; EXPRESSED IN BONE MARROW, SIGNAL = 5.2; EST_HUMAN HIT: BF306996.1, EVALUE 4.00e-38; SWISSPROT HIT: O54693, EVALUE 1.10e+00
KHDPPLSSIPCLHYKKMKDNEEREQSSDLTPSGDVSPVKPLSRSAELEFPLDEPDSMGADPGPPDEKDPLGAEAAPGALGQVKAKVEVCKDESV

SEQ ID NO: 39753 - protein, 50 aa, Homo sapiens
  MAP TO AC005317.1; EXPRESSED IN PLACENTA, SIGNAL = 1.6; EXPRESSED IN LUNG, SIGNAL = 1.6; EXPRESSED IN FETAL LIVER, SIGNAL = 2.2; EXPRESSED IN BRAIN, SIGNAL = 1.5; EXPRESSED IN BONE MARROW, SIGNAL = 1.8; EXPRESSED IN ADULT LIVER, SIGNAL = 1.5; EXPRESSED IN HELA, SIGNAL = 3.2; EXPRESSED IN HEART, SIGNAL = 2.4; EST_HUMAN HIT: BE871610.1, EVALUE 7.00e-08
GEEEEEEEEAFYEDLDDILESITNRMIKSELEDFELVIAKSSAVLNDGVL

SEQ ID NO: 39754 - protein, 23 aa, Homo sapiens
  MAP TO AC002038.1; EXPRESSED IN BONE MARROW, SIGNAL =   2; EXPRESSED IN PLACENTA, SIGNAL = 2.1; EXPRESSED IN LUNG, SIGNAL = 2.3; EXPRESSED IN HELA, SIGNAL = 2.1; EXPRESSED IN FETAL LIVER, SIGNAL = 1.8; EXPRESSED IN ADULT LIVER, SIGNAL = 2.1; EXPRESSED IN HEART, SIGNAL = 1.9; EXPRESSED IN BRAIN, SIGNAL = 2.2; EST_HUMAN HIT: AI654903.1, EVALUE 1.00e-05
LLFFTRWCCKKMDMVLRKTFQPY

SEQ ID NO: 39755 - protein, 84 aa, Homo sapiens
  MAP TO AC002041.1; EXPRESSED IN PLACENTA, SIGNAL = 2.1; EXPRESSED IN HEART, SIGNAL = 1.8; EXPRESSED IN FETAL LIVER, SIGNAL = 2.1; EXPRESSED IN BRAIN, SIGNAL = 2.3; EXPRESSED IN LUNG, SIGNAL = 2.6; EXPRESSED IN HELA, SIGNAL = 2.3; EXPRESSED IN BONE MARROW, SIGNAL = 2.2; EXPRESSED IN ADULT LIVER, SIGNAL = 2.2; EST_HUMAN HIT: BE612962.1, EVALUE 1.00e-46; SWISSPROT HIT: P48029, EVALUE 1.00e-47
PGLGYASMVIVFYCNTYYIMVLAWGFYYLVKSFTTTLPWATCGHTWNTPDCVEIFRHEDCASASLANLTCDQLADRRSPVIEFW

SEQ ID NO: 39756 - protein, 32 aa, Homo sapiens
  MAP TO AC002045.1; EXPRESSED IN BONE MARROW, SIGNAL = 8.8; EXPRESSED IN PLACENTA, SIGNAL = 5.2; EXPRESSED IN LUNG, SIGNAL = 6.8; EXPRESSED IN HELA, SIGNAL =  13; EXPRESSED IN HEART, SIGNAL = 6.5; EXPRESSED IN FETAL LIVER, SIGNAL =  14; EXPRESSED IN ADULT LIVER, SIGNAL =  13; EXPRESSED IN BRAIN, SIGNAL = 3.3
ACQSCCSCYCRRCCCCCFYLAPGPARVSEEGA

SEQ ID NO: 39757 - protein, 42 aa, Homo sapiens
  MAP TO AC003101.1; EXPRESSED IN PLACENTA, SIGNAL = 1.8; EXPRESSED IN HEART, SIGNAL = 1.8; EXPRESSED IN BRAIN, SIGNAL = 2.5; EXPRESSED IN BONE MARROW, SIGNAL = 1.7; EXPRESSED IN ADULT LIVER, SIGNAL = 1.6; EXPRESSED IN LUNG, SIGNAL = 1.9; EXPRESSED IN HELA, SIGNAL = 1.7; EXPRESSED IN FETAL LIVER, SIGNAL = 1.7
RLPRSAGPVPVPAPGRAALLGLRPGPHQPRPSPHGPCPARRK

SEQ ID NO: 39758 - protein, 28 aa, Homo sapiens
  MAP TO AC005332.1; EXPRESSED IN PLACENTA, SIGNAL = 1.8; EXPRESSED IN HELA, SIGNAL = 2.4; EXPRESSED IN HEART, SIGNAL =   2; EXPRESSED IN BONE MARROW, SIGNAL = 1.9; EXPRESSED IN ADULT LIVER, SIGNAL = 2.2; EXPRESSED IN BRAIN, SIGNAL = 1.8; EXPRESSED IN FETAL LIVER, SIGNAL = 2.1; EXPRESSED IN LUNG, SIGNAL =   2; EST_HUMAN HIT: AA573201.1, EVALUE 6.00e-11
MAIREAFNWQRGPWENWQGVLSQGRGEQ

SEQ ID NO: 39759 - protein, 20 aa, Homo sapiens
  MAP TO AC005332.1; EXPRESSED IN PLACENTA, SIGNAL = 1.8; EXPRESSED IN HELA, SIGNAL = 2.4; EXPRESSED IN HEART, SIGNAL =   2; EXPRESSED IN BONE MARROW, SIGNAL = 1.9; EXPRESSED IN ADULT LIVER, SIGNAL = 2.2; EXPRESSED IN BRAIN, SIGNAL = 1.8; EXPRESSED IN FETAL LIVER, SIGNAL = 2.1; EXPRESSED IN LUNG, SIGNAL =   2; EST_HUMAN HIT: AI076293.1, EVALUE 1.00e-05
WRSGKPSTGREDLGRTGKGC

SEQ ID NO: 39760 - protein, 69 aa, Homo sapiens
  MAP TO AC005539.1; EXPRESSED IN LUNG, SIGNAL = 1.1; EXPRESSED IN FETAL LIVER, SIGNAL = 1.3; EXPRESSED IN BRAIN, SIGNAL = 0.93; EXPRESSED IN BONE MARROW, SIGNAL = 0.96; EXPRESSED IN ADULT LIVER, SIGNAL = 1.2; EXPRESSED IN HEART, SIGNAL = 1.3; EXPRESSED IN PLACENTA, SIGNAL = 1.3; EST_HUMAN HIT: AA032007.1, EVALUE 6.00e-16; SWISSPROT HIT: Q16831, EVALUE 5.00e-17
IAPGTVVITDIAVDSFFKPRFEQVILDNIVTRSTELDKELSEELFNCSKEIPNFPTLVGHTMCTYDFYE

SEQ ID NO: 39761 - protein, 58 aa, Homo sapiens
  MAP TO AC002068.1; EXPRESSED IN PLACENTA, SIGNAL = 6.6; EXPRESSED IN HELA, SIGNAL = 5.9; EXPRESSED IN HEART, SIGNAL = 5.9; EXPRESSED IN FETAL LIVER, SIGNAL = 5.8; EXPRESSED IN ADULT LIVER, SIGNAL = 6.5; EXPRESSED IN LUNG, SIGNAL = 6.9; EXPRESSED IN BRAIN, SIGNAL =   7; EXPRESSED IN BONE MARROW, SIGNAL = 5.9
TPTDGLQGYKALSVRSLGGFLGYIAVYITENITDFVVVVVPFIVMKSTASRITRSRSK

SEQ ID NO: 39762 - protein, 28 aa, Homo sapiens
  MAP TO AC005746.1; EXPRESSED IN LUNG, SIGNAL = 3.4; EXPRESSED IN PLACENTA, SIGNAL = 3.1; EXPRESSED IN HELA, SIGNAL = 3.4; EXPRESSED IN HEART, SIGNAL = 2.5; EXPRESSED IN FETAL LIVER, SIGNAL = 2.9; EXPRESSED IN BRAIN, SIGNAL = 2.9; EXPRESSED IN BONE MARROW, SIGNAL =   3; EXPRESSED IN ADULT LIVER, SIGNAL = 2.9
AGLSQAGRTRQFLVFGAWTRKMQLMATW

SEQ ID NO: 39763 - protein, 47 aa, Homo sapiens
  MAP TO AC002477.1; EXPRESSED IN LUNG, SIGNAL = 0.92; EXPRESSED IN BRAIN, SIGNAL = 0.92; EXPRESSED IN ADULT LIVER, SIGNAL = 1.2; EXPRESSED IN PLACENTA, SIGNAL = 2.5; EXPRESSED IN HEART, SIGNAL = 1.6; EXPRESSED IN FETAL LIVER, SIGNAL = 1.3; EXPRESSED IN BONE MARROW, SIGNAL = 1.1
MKEEKEHRPKEKRVTLLTPAGATGSGGGTSGDSSKGEDKQDRNKEKK

SEQ ID NO: 39764 - protein, 52 aa, Homo sapiens
  MAP TO AC000062.1; EXPRESSED IN PLACENTA, SIGNAL = 2.5; EXPRESSED IN HELA, SIGNAL = 2.6; EXPRESSED IN HEART, SIGNAL =   2; EXPRESSED IN FETAL LIVER, SIGNAL = 2.4; EXPRESSED IN ADULT LIVER, SIGNAL = 2.6; EXPRESSED IN LUNG, SIGNAL = 1.9; EXPRESSED IN BRAIN, SIGNAL = 2.3; EXPRESSED IN BONE MARROW, SIGNAL = 2.6; EST_HUMAN HIT: BE767066.1, EVALUE 3.00e-22
LRAFLVIADSLQQKDGEPPMPVTGAVLPSGNTLRVKKTYLSKTLTEEEAKMI

SEQ ID NO: 39765 - protein, 24 aa, Homo sapiens
  MAP TO AC003663.1; EXPRESSED IN PLACENTA, SIGNAL =   3; EXPRESSED IN LUNG, SIGNAL = 3.3; EXPRESSED IN FETAL LIVER, SIGNAL =   4; EXPRESSED IN BRAIN, SIGNAL = 3.6; EXPRESSED IN BONE MARROW, SIGNAL = 3.5; EXPRESSED IN ADULT LIVER, SIGNAL = 3.1; EXPRESSED IN HELA, SIGNAL = 3.3; EXPRESSED IN HEART, SIGNAL = 3.3; EST_HUMAN HIT: BE774828.1, EVALUE 3.00e-07; SWISSPROT HIT: P52292, EVALUE 2.00e-08
VVPETTSEGYTFQVQDGAPGTFNF

SEQ ID NO: 39766 - protein, 63 aa, Homo sapiens
  MAP TO AC005837.1; EXPRESSED IN PLACENTA, SIGNAL = 8.2; EXPRESSED IN HEART, SIGNAL = 3.2; EXPRESSED IN ADULT LIVER, SIGNAL = 5.7; EXPRESSED IN LUNG, SIGNAL = 3.7; EXPRESSED IN FETAL LIVER, SIGNAL = 8.1; EXPRESSED IN BRAIN, SIGNAL = 2.7; EXPRESSED IN BONE MARROW, SIGNAL = 6.6; EXPRESSED IN HELA, SIGNAL =   4; EST_HUMAN HIT: AA158587.1, EVALUE 7.80e-02
MPHHVRCSHRHQLRDHHQGLKGEEGSCGGGGNGRDASANGNTNEENWEQEVDNEVDEEEEEGD

SEQ ID NO: 39767 - protein, 33 aa, Homo sapiens
  MAP TO AC005837.1; EXPRESSED IN PLACENTA, SIGNAL = 8.2; EXPRESSED IN HEART, SIGNAL = 3.2; EXPRESSED IN ADULT LIVER, SIGNAL = 5.7; EXPRESSED IN LUNG, SIGNAL = 3.7; EXPRESSED IN FETAL LIVER, SIGNAL = 8.1; EXPRESSED IN BRAIN, SIGNAL = 2.7; EXPRESSED IN BONE MARROW, SIGNAL = 6.6; EXPRESSED IN HELA, SIGNAL =   4
LPIANSASSSSSPSSSSPSPSSSSSSTSLSTSC

SEQ ID NO: 39768 - protein, 32 aa, Homo sapiens
  MAP TO AC005939.1; EXPRESSED IN PLACENTA, SIGNAL = 2.5; EXPRESSED IN LUNG, SIGNAL = 2.2; EXPRESSED IN HELA, SIGNAL = 1.8; EXPRESSED IN HEART, SIGNAL = 1.7; EXPRESSED IN FETAL LIVER, SIGNAL = 1.7; EXPRESSED IN BRAIN, SIGNAL = 2.1; EXPRESSED IN BONE MARROW, SIGNAL = 1.9; EXPRESSED IN ADULT LIVER, SIGNAL = 1.9; EST_HUMAN HIT: AA622731.1, EVALUE 5.00e-04
LTMPLKSKWALTAGRNQAMGAGTSKLVGGRGG

SEQ ID NO: 39769 - protein, 81 aa, Homo sapiens
  MAP TO AC002081.1; EXPRESSED IN PLACENTA, SIGNAL = 1.2; EXPRESSED IN LUNG, SIGNAL = 1.4; EXPRESSED IN HEART, SIGNAL = 1.3; EXPRESSED IN FETAL LIVER, SIGNAL = 1.4; EXPRESSED IN BRAIN, SIGNAL = 1.2; EXPRESSED IN ADULT LIVER, SIGNAL = 1.4; EXPRESSED IN BONE MARROW, SIGNAL = 1.2; EST_HUMAN HIT: AW954806.1, EVALUE 5.00e-45; SWISSPROT HIT: P01267, EVALUE 3.00e-03
RFINDMVKIYSITATNAVDGVASSCRACALGSEQSGSSCVPCPPGHYIEKETNQCKECPPDTYLSIHQVYGKEACIPCGPG

SEQ ID NO: 39770 - protein, 20 aa, Homo sapiens
  MAP TO AC005747.1; EXPRESSED IN PLACENTA, SIGNAL = 0.72; EXPRESSED IN HEART, SIGNAL = 1.4; EXPRESSED IN FETAL LIVER, SIGNAL = 1.1; EXPRESSED IN BRAIN, SIGNAL = 0.9; EXPRESSED IN ADULT LIVER, SIGNAL = 1.1; EXPRESSED IN LUNG, SIGNAL = 0.79; EXPRESSED IN BONE MARROW, SIGNAL = 1.1; EST_HUMAN HIT: H87835.1, EVALUE 2.00e-06
HSWGTAKVGPCPRRSWRSCS

SEQ ID NO: 39771 - protein, 36 aa, Homo sapiens
  MAP TO AC004526.1; EXPRESSED IN LUNG, SIGNAL = 9.7; EXPRESSED IN FETAL LIVER, SIGNAL = 8.1; EXPRESSED IN PLACENTA, SIGNAL = 8.3; EXPRESSED IN HELA, SIGNAL = 7.6; EXPRESSED IN BRAIN, SIGNAL = 8.6; EXPRESSED IN BONE MARROW, SIGNAL = 7.7; EXPRESSED IN ADULT LIVER, SIGNAL = 9.2; EXPRESSED IN HEART, SIGNAL = 8.1; EST_HUMAN HIT: AW391369.1, EVALUE 1.00e-12; SWISSPROT HIT: Q04690, EVALUE 9.00e-14
QQHPHLRKVSVSESNVLLDEEVLTDPKIQALLLTVL

SEQ ID NO: 39772 - protein, 91 aa, Homo sapiens
  MAP TO AC003669.1; EXPRESSED IN PLACENTA, SIGNAL =   3; EXPRESSED IN LUNG, SIGNAL = 2.8; EXPRESSED IN HEART, SIGNAL = 2.9; EXPRESSED IN FETAL LIVER, SIGNAL = 3.2; EXPRESSED IN BRAIN, SIGNAL =   3; EXPRESSED IN BONE MARROW, SIGNAL = 2.9; EXPRESSED IN ADULT LIVER, SIGNAL = 2.7; EXPRESSED IN HELA, SIGNAL = 2.9; EST_HUMAN HIT: AI075080.1, EVALUE 7.00e-04
NLISLLLLGINVVILSIFNCPFAHSILSCHIFIFILFLTITFFLLFFLPIFFLFFFYLIVSLLFPIFLISVPITRTISSLLCLLHNFFLLL

SEQ ID NO: 39773 - protein, 78 aa, Homo sapiens; identical to SEQ ID NO: 39243
  MAP TO AC005950.1; EXPRESSED IN ADULT LIVER, SIGNAL = 4.1; EXPRESSED IN HEART, SIGNAL = 5.2; EXPRESSED IN BRAIN, SIGNAL = 4.1; EXPRESSED IN LUNG, SIGNAL = 3.5; EXPRESSED IN FETAL LIVER, SIGNAL = 4.4; EXPRESSED IN BONE MARROW, SIGNAL = 4.1; EXPRESSED IN PLACENTA, SIGNAL =   4; EXPRESSED IN HELA, SIGNAL = 4.2; EST_HUMAN HIT: BE410139.1, EVALUE 1.60e+00

SEQ ID NO: 39774 - protein, 59 aa, Homo sapiens
  MAP TO AC004241.1; EXPRESSED IN PLACENTA, SIGNAL = 7.9; EXPRESSED IN HELA, SIGNAL = 6.3; EXPRESSED IN HEART, SIGNAL = 6.9; EXPRESSED IN BRAIN, SIGNAL = 7.9; EXPRESSED IN ADULT LIVER, SIGNAL = 7.6; EXPRESSED IN LUNG, SIGNAL = 8.4; EXPRESSED IN FETAL LIVER, SIGNAL = 7.4; EXPRESSED IN BONE MARROW, SIGNAL = 7.2; EST_HUMAN HIT: BE379558.1, EVALUE 5.00e-19; SWISSPROT HIT: P48308, EVALUE 6.00e+00
IPHPDQLGPTVGSAEGLDLVSAKDLAGQLTDHDWSLFNSIHQVWEAELGEESRRRGARL

SEQ ID NO: 39775 - protein, 33 aa, Homo sapiens
  MAP TO AC005875.1; EXPRESSED IN PLACENTA, SIGNAL =  21; EXPRESSED IN LUNG, SIGNAL =  29; EXPRESSED IN HELA, SIGNAL =  27; EXPRESSED IN HEART, SIGNAL =  23; EXPRESSED IN FETAL LIVER, SIGNAL =  26; EXPRESSED IN ADULT LIVER, SIGNAL =  23; EXPRESSED IN BRAIN, SIGNAL =  32; EXPRESSED IN BONE MARROW, SIGNAL =  28; EST_HUMAN HIT: AW183050.1, EVALUE 4.00e-13; SWISSPROT HIT: P38329, EVALUE 8.50e+00
VVVHWNLIHFLGHILHGCVKWCGHVCSPAETRI

SEQ ID NO: 39776 - protein, 47 aa, Homo sapiens
  MAP TO AC005722.1; EXPRESSED IN LUNG, SIGNAL = 4.7; EXPRESSED IN HELA, SIGNAL = 4.7; EXPRESSED IN BRAIN, SIGNAL = 4.6; EXPRESSED IN BONE MARROW, SIGNAL = 4.5; EXPRESSED IN ADULT LIVER, SIGNAL = 4.5; EXPRESSED IN PLACENTA, SIGNAL = 4.1; EXPRESSED IN HEART, SIGNAL = 3.8; EXPRESSED IN FETAL LIVER, SIGNAL = 4.6; EST_HUMAN HIT: AL110432.1, EVALUE 2.00e-09
ENLSSPPLGPPNYLQVSKDSASTSSKNSSCDTDDFVLVPHNISSDHS

SEQ ID NO: 39777 - protein, 23 aa, Homo sapiens
  MAP TO AC005722.1; EXPRESSED IN LUNG, SIGNAL = 4.7; EXPRESSED IN HELA, SIGNAL = 4.7; EXPRESSED IN BRAIN, SIGNAL = 4.6; EXPRESSED IN BONE MARROW, SIGNAL = 4.5; EXPRESSED IN ADULT LIVER, SIGNAL = 4.5; EXPRESSED IN PLACENTA, SIGNAL = 4.1; EXPRESSED IN HEART, SIGNAL = 3.8; EXPRESSED IN FETAL LIVER, SIGNAL = 4.6; EST_HUMAN HIT: AL110432.1, EVALUE 5.00e-06
RKLIFPTIGSSQLSTSFQRFCQY

SEQ ID NO: 39778 - protein, 44 aa, Homo sapiens
  MAP TO AC006080.1; EXPRESSED IN HEART, SIGNAL = 2.7; EXPRESSED IN BRAIN, SIGNAL = 3.2; EXPRESSED IN ADULT LIVER, SIGNAL = 5.2; EXPRESSED IN PLACENTA, SIGNAL = 3.5; EXPRESSED IN BONE MARROW, SIGNAL = 3.5; EXPRESSED IN FETAL LIVER, SIGNAL = 4.4; EXPRESSED IN LUNG, SIGNAL = 3.5; EXPRESSED IN HELA, SIGNAL = 3.4
LLPVDDHGDAGGQMGHLSKNLIRGETVRRENVICLEEVLAQLGS

SEQ ID NO: 39779 - protein, 39 aa, Homo sapiens
  MAP TO AC005971.5; EXPRESSED IN PLACENTA, SIGNAL = 2.7; EXPRESSED IN LUNG, SIGNAL = 2.9; EXPRESSED IN BONE MARROW, SIGNAL = 2.5; EXPRESSED IN HELA, SIGNAL = 2.5; EXPRESSED IN ADULT LIVER, SIGNAL = 2.5; EXPRESSED IN HEART, SIGNAL = 2.2; EXPRESSED IN FETAL LIVER, SIGNAL =   3; EXPRESSED IN BRAIN, SIGNAL = 2.9; EST_HUMAN HIT: AA628716.1, EVALUE 9.00e-17
IAPHCLDEGTVRSMVTEEFNGSDWEKAMKEHKTIKNMSK

SEQ ID NO: 39780 - protein, 22 aa, Homo sapiens
  MAP TO AC005971.5; EXPRESSED IN PLACENTA, SIGNAL = 2.7; EXPRESSED IN LUNG, SIGNAL = 2.9; EXPRESSED IN BONE MARROW, SIGNAL = 2.5; EXPRESSED IN HELA, SIGNAL = 2.5; EXPRESSED IN ADULT LIVER, SIGNAL = 2.5; EXPRESSED IN HEART, SIGNAL = 2.2; EXPRESSED IN FETAL LIVER, SIGNAL =   3; EXPRESSED IN BRAIN, SIGNAL = 2.9; EST_HUMAN HIT: W17236.1, EVALUE 2.00e-06
WMRALCGVWSLRNSMAAIGRRP

SEQ ID NO: 39781 - protein, 155 aa, Homo sapiens
  MAP TO AC006088.1; EXPRESSED IN ADULT LIVER, SIGNAL = 2.2; EXPRESSED IN HEART, SIGNAL = 5.9; EXPRESSED IN FETAL LIVER, SIGNAL =   2; EXPRESSED IN BRAIN, SIGNAL = 2.7; EXPRESSED IN BONE MARROW, SIGNAL = 1.4; EXPRESSED IN PLACENTA, SIGNAL = 1.5; EXPRESSED IN LUNG, SIGNAL = 2.2; EXPRESSED IN HELA, SIGNAL = 2.3; EST_HUMAN HIT: AU133213.1, EVALUE 5.00e-84; SWISSPROT HIT: O46674, EVALUE 6.00e-85
GTNIAAGKAMGVVVATGVNTEIGKIRDEMVATEQERTPLQQKLDEFGEQLSKVISLICIAVWIINIGHFNDPVHGGSWIRGAIYYFKIAVALAVAAIPEGLPAVITTCLALGTRRMAKKNAIVRSLPSVETLGCTSVICSDKTGTLTTNQMSVCR

SEQ ID NO: 39782 - protein, 39 aa, Homo sapiens
  MAP TO AC004455.1; EXPRESSED IN BONE MARROW, SIGNAL = 1.1; EXPRESSED IN PLACENTA, SIGNAL = 1.2; EXPRESSED IN LUNG, SIGNAL = 1.4; EXPRESSED IN FETAL LIVER, SIGNAL = 1.2; EXPRESSED IN ADULT LIVER, SIGNAL = 1.3; EXPRESSED IN HEART, SIGNAL = 1.3; EXPRESSED IN BRAIN, SIGNAL = 1.3
SDGGVLGALGTDTRNAAADLPRSQEDLPGGSVISVNQGV

SEQ ID NO: 39783 - protein, 39 aa, Homo sapiens
  MAP TO AC004455.1; EXPRESSED IN BONE MARROW, SIGNAL = 1.1; EXPRESSED IN PLACENTA, SIGNAL = 1.2; EXPRESSED IN LUNG, SIGNAL = 1.4; EXPRESSED IN FETAL LIVER, SIGNAL = 1.2; EXPRESSED IN ADULT LIVER, SIGNAL = 1.3; EXPRESSED IN HEART, SIGNAL = 1.3; EXPRESSED IN BRAIN, SIGNAL = 1.3
NPLIYRNDRASRKILLTPWQISCRVPGVCSQGSQNSTIR

SEQ ID NO: 39784 - protein, 33 aa, Homo sapiens
  MAP TO AC004534.1; EXPRESSED IN PLACENTA, SIGNAL =  11; EXPRESSED IN HELA, SIGNAL = 9.6; EXPRESSED IN BRAIN, SIGNAL =  11; EXPRESSED IN ADULT LIVER, SIGNAL =  13; EXPRESSED IN HEART, SIGNAL = 9.1; EXPRESSED IN LUNG, SIGNAL =  12; EXPRESSED IN FETAL LIVER, SIGNAL = 9.7; EXPRESSED IN BONE MARROW, SIGNAL =  11; EST_HUMAN HIT: AA126200.1, EVALUE 8.80e-01
MSASASGKASGSFYPWQKARQKQALTTGKSGAR

SEQ ID NO: 39785 - protein, 32 aa, Homo sapiens
  MAP TO AC004534.1; EXPRESSED IN PLACENTA, SIGNAL =  11; EXPRESSED IN HELA, SIGNAL = 9.6; EXPRESSED IN BRAIN, SIGNAL =  11; EXPRESSED IN ADULT LIVER, SIGNAL =  13; EXPRESSED IN HEART, SIGNAL = 9.1; EXPRESSED IN LUNG, SIGNAL =  12; EXPRESSED IN FETAL LIVER, SIGNAL = 9.7; EXPRESSED IN BONE MARROW, SIGNAL =  11; EST_HUMAN HIT: AI248533.1, EVALUE 9.00e-05
CQHLLLGRPREAFTHGRRQGRSRHSPQGNQEQ

SEQ ID NO: 39786 - protein, 24 aa, Homo sapiens
  MAP TO AC005725.1; EXPRESSED IN PLACENTA, SIGNAL = 3.3; EXPRESSED IN LUNG, SIGNAL = 3.8; EXPRESSED IN HELA, SIGNAL = 3.2; EXPRESSED IN HEART, SIGNAL = 2.9; EXPRESSED IN FETAL LIVER, SIGNAL = 3.1; EXPRESSED IN BRAIN, SIGNAL =   3; EXPRESSED IN ADULT LIVER, SIGNAL = 3.4; EXPRESSED IN BONE MARROW, SIGNAL = 2.9
PNRQMVLLDKEKSTSEETMETYVQ

SEQ ID NO: 39787 - protein, 26 aa, Homo sapiens
  MAP TO AC003964.1; EXPRESSED IN PLACENTA, SIGNAL = 2.8; EXPRESSED IN LUNG, SIGNAL = 3.2; EXPRESSED IN HELA, SIGNAL = 2.8; EXPRESSED IN HEART, SIGNAL = 2.4; EXPRESSED IN FETAL LIVER, SIGNAL = 2.5; EXPRESSED IN ADULT LIVER, SIGNAL = 2.5; EXPRESSED IN BRAIN, SIGNAL = 2.5; EXPRESSED IN BONE MARROW, SIGNAL = 2.4
NIHNETGAYYARMCESYQTVELHFKK

SEQ ID NO: 39788 - protein, 124 aa, Homo sapiens
  MAP TO AC004079.1; EXPRESSED IN FETAL LIVER, SIGNAL = 2.2; EXPRESSED IN BONE MARROW, SIGNAL = 2.2; EXPRESSED IN ADULT LIVER, SIGNAL = 2.3; EXPRESSED IN HELA, SIGNAL = 2.3; EXPRESSED IN PLACENTA, SIGNAL =   2; EXPRESSED IN LUNG, SIGNAL = 2.1; EXPRESSED IN HEART, SIGNAL = 2.2; EXPRESSED IN BRAIN, SIGNAL = 1.9; SWISSPROT HIT: P75613, EVALUE 5.90e-01
QGYECGKKRNGDFSLLLQSQGVNGGSFSKEGVKNISSMFKLSRSQSVTLEQKQSQGKREKSKSTPGQGGLMHTNGFCHLWLGKIYDSAPQSCKQSTKQQTLAPYGILQSNLKGGAGRVGGESQP

SEQ ID NO: 39789 - protein, 32 aa, Homo sapiens
  MAP TO AC004079.1; EXPRESSED IN FETAL LIVER, SIGNAL = 2.2; EXPRESSED IN BONE MARROW, SIGNAL = 2.2; EXPRESSED IN ADULT LIVER, SIGNAL = 2.3; EXPRESSED IN HELA, SIGNAL = 2.3; EXPRESSED IN PLACENTA, SIGNAL =   2; EXPRESSED IN LUNG, SIGNAL = 2.1; EXPRESSED IN HEART, SIGNAL = 2.2; EXPRESSED IN BRAIN, SIGNAL = 1.9
ARVRVWQKEKWRFLSFAAIPRRQRRVLLKGRC

SEQ ID NO: 39790 - protein, 47 aa, Homo sapiens
  MAP TO AC005683.2; EXPRESSED IN HELA, SIGNAL = 2.2; EXPRESSED IN FETAL LIVER, SIGNAL = 2.2; EXPRESSED IN PLACENTA, SIGNAL = 2.2; EXPRESSED IN LUNG, SIGNAL = 2.4; EXPRESSED IN HEART, SIGNAL = 2.2; EXPRESSED IN BRAIN, SIGNAL = 2.2; EXPRESSED IN BONE MARROW, SIGNAL = 2.2; EXPRESSED IN ADULT LIVER, SIGNAL = 2.5; EST_HUMAN HIT: AW953120.1, EVALUE 6.00e-20
DLASTHVATQQKLQMGQLQKARGRAQLYLCRVIVQKAVQRPRWLIIF

SEQ ID NO: 39791 - protein, 37 aa, Homo sapiens
  MAP TO AC005821.1; EXPRESSED IN ADULT LIVER, SIGNAL = 2.7; EXPRESSED IN PLACENTA, SIGNAL = 2.8; EXPRESSED IN LUNG, SIGNAL = 2.8; EXPRESSED IN HELA, SIGNAL = 3.2; EXPRESSED IN HEART, SIGNAL = 2.8; EXPRESSED IN BRAIN, SIGNAL = 2.8; EXPRESSED IN BONE MARROW, SIGNAL = 2.7; EXPRESSED IN FETAL LIVER, SIGNAL = 2.9; EST_HUMAN HIT: AI681749.1, EVALUE 4.00e-07; SWISSPROT HIT: P22897, EVALUE 3.00e-08
LLTGYSSTLWIGLNDLDTSGGWQWSDNSPLKYLNWES

SEQ ID NO: 39792 - protein, 19 aa, Homo sapiens
  MAP TO AC005821.1; EXPRESSED IN ADULT LIVER, SIGNAL = 2.7; EXPRESSED IN PLACENTA, SIGNAL = 2.8; EXPRESSED IN LUNG, SIGNAL = 2.8; EXPRESSED IN HELA, SIGNAL = 3.2; EXPRESSED IN HEART, SIGNAL = 2.8; EXPRESSED IN BRAIN, SIGNAL = 2.8; EXPRESSED IN BONE MARROW, SIGNAL = 2.7; EXPRESSED IN FETAL LIVER, SIGNAL = 2.9
VPPCCQASSLGTAPPCGSA

SEQ ID NO: 39793 - protein, 65 aa, Homo sapiens
  MAP TO AC004131.1; EXPRESSED IN PLACENTA, SIGNAL = 4.5; EXPRESSED IN LUNG, SIGNAL = 5.6; EXPRESSED IN HELA, SIGNAL = 5.4; EXPRESSED IN FETAL LIVER, SIGNAL =   5; EXPRESSED IN BONE MARROW, SIGNAL = 5.4; EXPRESSED IN ADULT LIVER, SIGNAL =   5; EXPRESSED IN HEART, SIGNAL = 5.4; EXPRESSED IN BRAIN, SIGNAL = 5.8; SWISSPROT HIT: P16230, EVALUE 2.60e+00; EST_HUMAN HIT: BF063419.1, EVALUE 3.00e-25
QPHQEDEHQEQCDQGARPGHRLHHNAPDGVQVAQGHVLREEVQPTASGCAGVFRGHRGDHEEQEE

SEQ ID NO: 39794 - protein, 37 aa, Homo sapiens
  MAP TO AC004582.1; EXPRESSED IN PLACENTA, SIGNAL = 2.7; EXPRESSED IN LUNG, SIGNAL = 2.3; EXPRESSED IN HELA, SIGNAL = 3.1; EXPRESSED IN FETAL LIVER, SIGNAL = 2.5; EXPRESSED IN BONE MARROW, SIGNAL = 2.3; EXPRESSED IN ADULT LIVER, SIGNAL = 2.2; EXPRESSED IN HEART, SIGNAL = 2.4; EXPRESSED IN BRAIN, SIGNAL = 2.3; SWISSPROT HIT: P36205, EVALUE 8.40e+00
MCEPGRGEPKYQLREVLEGSEQKKFDFSLWAQREKRK

SEQ ID NO: 39795 - protein, 43 aa, Homo sapiens
  MAP TO AC004084.1; EXPRESSED IN PLACENTA, SIGNAL = 1.5; EXPRESSED IN ADULT LIVER, SIGNAL = 1.8; EXPRESSED IN LUNG, SIGNAL = 1.9; EXPRESSED IN HEART, SIGNAL = 1.7; EXPRESSED IN FETAL LIVER, SIGNAL = 1.6; EXPRESSED IN BRAIN, SIGNAL = 2.1; EXPRESSED IN BONE MARROW, SIGNAL = 1.7
DLGWGQCSCGWNVNLSWLLAPWPPPAGERAPARLMRTRSQDGA

SEQ ID NO: 39796 - protein, 96 aa, Homo sapiens
  MAP TO AC005691.1; EXPRESSED IN PLACENTA, SIGNAL =  16; EXPRESSED IN BONE MARROW, SIGNAL =  17; EXPRESSED IN ADULT LIVER, SIGNAL =  21; EXPRESSED IN LUNG, SIGNAL =  18; EXPRESSED IN HELA, SIGNAL =  19; EXPRESSED IN HEART, SIGNAL =  29; EXPRESSED IN FETAL LIVER, SIGNAL =  21; EXPRESSED IN BRAIN, SIGNAL =  24; EST_HUMAN HIT: AW028249.1, EVALUE 1.00e-04
SVRESEDEDEEEEERRQSASRGCTLQYQHATLQVFTQFHTTSSEGTDQVVTMLGPDWLVEVTDLVSDFMRVGDPRVAHMVDSSTLAGLEPGTTPFK

SEQ ID NO: 39797 - protein, 58 aa, Homo sapiens
  MAP TO AC005691.1; EXPRESSED IN PLACENTA, SIGNAL =  16; EXPRESSED IN BONE MARROW, SIGNAL =  17; EXPRESSED IN ADULT LIVER, SIGNAL =  21; EXPRESSED IN LUNG, SIGNAL =  18; EXPRESSED IN HELA, SIGNAL =  19; EXPRESSED IN HEART, SIGNAL =  29; EXPRESSED IN FETAL LIVER, SIGNAL =  21; EXPRESSED IN BRAIN, SIGNAL =  24
HVPTPGQSGKARMRMRRRRSGGRVQAVAAPCSTSMPPCRSSPSSTRHHPRALTRWSPC

SEQ ID NO: 39798 - protein, 49 aa, Homo sapiens
  MAP TO AC004467.1; EXPRESSED IN PLACENTA, SIGNAL = 2.1; EXPRESSED IN LUNG, SIGNAL = 2.5; EXPRESSED IN HELA, SIGNAL = 2.4; EXPRESSED IN HEART, SIGNAL = 1.8; EXPRESSED IN FETAL LIVER, SIGNAL = 1.8; EXPRESSED IN ADULT LIVER, SIGNAL = 1.7; EXPRESSED IN BRAIN, SIGNAL = 1.7; EXPRESSED IN BONE MARROW, SIGNAL = 1.7; EST_HUMAN HIT: AW900432.1, EVALUE 2.30e+00; SWISSPROT HIT: O43182, EVALUE 3.00e-16
LEPEEQLGTLQLLIYLLPPCNCDTLHRLLQFLSIVARHADDNISKDGQE

SEQ ID NO: 39799 - protein, 28 aa, Homo sapiens
  MAP TO AC004467.1; EXPRESSED IN PLACENTA, SIGNAL = 2.1; EXPRESSED IN LUNG, SIGNAL = 2.5; EXPRESSED IN HELA, SIGNAL = 2.4; EXPRESSED IN HEART, SIGNAL = 1.8; EXPRESSED IN FETAL LIVER, SIGNAL = 1.8; EXPRESSED IN ADULT LIVER, SIGNAL = 1.7; EXPRESSED IN BRAIN, SIGNAL = 1.7; EXPRESSED IN BONE MARROW, SIGNAL = 1.7; SWISSPROT HIT: P22004, EVALUE 2.90e+00; EST_HUMAN HIT: BF106959.1, EVALUE 6.00e+00
PHIPSTSLQLRHPPPPATVPLHRGQACR

SEQ ID NO: 39800 - protein, 103 aa, Homo sapiens
  MAP TO AC005736.1; EXPRESSED IN LUNG, SIGNAL = 1.3; EXPRESSED IN BRAIN, SIGNAL = 1.6; EXPRESSED IN BONE MARROW, SIGNAL = 1.8; EXPRESSED IN PLACENTA, SIGNAL = 1.3; EXPRESSED IN HEART, SIGNAL = 9.3; EXPRESSED IN FETAL LIVER, SIGNAL = 1.3; EXPRESSED IN ADULT LIVER, SIGNAL = 1.3
KKEEEEEEEEEEEEEEEEEEEEEEEEEEEEEESNFLQHYLHLEFFNYFLKNRTRDPFLMLLLMAALPKAGHSKNKQKSNSQTYMEVRWSLKALRIGKVSFQET

SEQ ID NO: 39801 - protein, 40 aa, Homo sapiens
  MAP TO AC005859.1; EXPRESSED IN LUNG, SIGNAL = 1.9; EXPRESSED IN HELA, SIGNAL = 1.8; EXPRESSED IN BRAIN, SIGNAL = 1.8; EXPRESSED IN BONE MARROW, SIGNAL = 2.1; EXPRESSED IN ADULT LIVER, SIGNAL = 1.8; EXPRESSED IN PLACENTA, SIGNAL = 1.8; EXPRESSED IN HEART, SIGNAL = 1.7; EXPRESSED IN FETAL LIVER, SIGNAL = 1.9; SWISSPROT HIT: P11908, EVALUE 1.00e-17; EST_HUMAN HIT: H11974.1, EVALUE 2.00e-16
THGIFSGPAISRINNAAFEAVVVTNTIPQEDKMKHCTKIQ

SEQ ID NO: 39802 - protein, 84 aa, Homo sapiens
  MAP TO AC004472.1; EXPRESSED IN PLACENTA, SIGNAL = 3.4; EXPRESSED IN LUNG, SIGNAL = 4.1; EXPRESSED IN HELA, SIGNAL = 3.6; EXPRESSED IN FETAL LIVER, SIGNAL = 3.5; EXPRESSED IN BRAIN, SIGNAL = 3.5; EXPRESSED IN BONE MARROW, SIGNAL = 3.6; EXPRESSED IN ADULT LIVER, SIGNAL = 3.3; EXPRESSED IN HEART, SIGNAL = 3.4; EST_HUMAN HIT: BE166574.1, EVALUE 7.00e-07
ELKLDLVLLGAVAAVSSFLPFLWKAWAGWGSKRPLATLFPIPGPVLLLLLFRLAVFFSDSFVVAEARATPFLLGSFILLLVVQL

SEQ ID NO: 39803 - protein, 76 aa, Homo sapiens
  MAP TO AC005831.1; EXPRESSED IN PLACENTA, SIGNAL = 1.3; EXPRESSED IN ADULT LIVER, SIGNAL = 1.3; EXPRESSED IN LUNG, SIGNAL = 1.3; EXPRESSED IN HEART, SIGNAL = 1.5; EXPRESSED IN FETAL LIVER, SIGNAL = 1.4; EXPRESSED IN BRAIN, SIGNAL = 1.6; EXPRESSED IN BONE MARROW, SIGNAL = 1.3; SWISSPROT HIT: P13833, EVALUE 9.80e+00; EST_HUMAN HIT: BE294432.1, EVALUE 2.00e-16
MAAPDGRVVSRPQRLGQGSGQGPKGSGACLHPLDSLEQKETQEQTSGQLVMLRKAQEFFQTCDAEGKGFIARKDMQ

SEQ ID NO: 39804 - protein, 53 aa, Homo sapiens
  MAP TO AC004549.1; EXPRESSED IN HELA, SIGNAL =  15; EXPRESSED IN HEART, SIGNAL =  13; EXPRESSED IN BRAIN, SIGNAL =  15; EXPRESSED IN BONE MARROW, SIGNAL =  14; EXPRESSED IN PLACENTA, SIGNAL =  15; EXPRESSED IN LUNG, SIGNAL =  17; EXPRESSED IN FETAL LIVER, SIGNAL =  14; EXPRESSED IN ADULT LIVER, SIGNAL =  15; EST_HUMAN HIT: AI833003.1, EVALUE 1.00e-05
FSCPAGSEYDEEEVDYEESDSDESWTTESAISSEAILSSMCMNGGEEKPFACP

SEQ ID NO: 39805 - protein, 37 aa, Homo sapiens
  MAP TO AC004106.1; EXPRESSED IN LUNG, SIGNAL = 4.1; EXPRESSED IN FETAL LIVER, SIGNAL =   3; EXPRESSED IN BRAIN, SIGNAL = 3.7; EXPRESSED IN BONE MARROW, SIGNAL = 3.2; EXPRESSED IN HELA, SIGNAL = 3.2; EXPRESSED IN PLACENTA, SIGNAL = 3.8; EXPRESSED IN HEART, SIGNAL = 3.3; EXPRESSED IN ADULT LIVER, SIGNAL = 3.2; SWISSPROT HIT: Q24742, EVALUE 6.40e+00; EST_HUMAN HIT: AL039363.2, EVALUE 6.00e-06
DYTIEDAIVVIEKAMKIIKPKTKSCWRKKCVQILCMA

SEQ ID NO: 39806 - protein, 47 aa, Homo sapiens
  MAP TO AC005697.1; EXPRESSED IN LUNG, SIGNAL =  15; EXPRESSED IN HELA, SIGNAL =  14; EXPRESSED IN FETAL LIVER, SIGNAL =  22; EXPRESSED IN BRAIN, SIGNAL =  26; EXPRESSED IN PLACENTA, SIGNAL =  18; EXPRESSED IN HEART, SIGNAL =  19; EXPRESSED IN BONE MARROW, SIGNAL =  18; EXPRESSED IN ADULT LIVER, SIGNAL =  19; SWISSPROT HIT: Q59967, EVALUE 6.20e+00; EST_HUMAN HIT: H98667.1, EVALUE 4.00e-02
RETEVYYHELAHAIMEIGKSKICRANVPVQAQRLEAAVEPGRADVPV

SEQ ID NO: 39807 - protein, 84 aa, Homo sapiens
  MAP TO AC004596.1; EXPRESSED IN PLACENTA, SIGNAL = 1.2; EXPRESSED IN LUNG, SIGNAL = 1.4; EXPRESSED IN FETAL LIVER, SIGNAL = 1.8; EXPRESSED IN BONE MARROW, SIGNAL = 1.3; EXPRESSED IN ADULT LIVER, SIGNAL = 1.2; EXPRESSED IN HEART, SIGNAL = 1.3; EXPRESSED IN BRAIN, SIGNAL = 1.3; EST_HUMAN HIT: BE891286.1, EVALUE 3.00e-40; SWISSPROT HIT: Q18262, EVALUE 5.70e+00
MIPALWMAGTGPFWQDPLRSTTRAFLANTEPSRCWAGRIGMASLLTPHSSSMPGSSNSMLARTLSNSSCSGPSKPPTCCCWLSK

SEQ ID NO: 39808 - protein, 64 aa, Homo sapiens
  MAP TO AC004596.1; EXPRESSED IN PLACENTA, SIGNAL = 1.2; EXPRESSED IN LUNG, SIGNAL = 1.4; EXPRESSED IN FETAL LIVER, SIGNAL = 1.8; EXPRESSED IN BONE MARROW, SIGNAL = 1.3; EXPRESSED IN ADULT LIVER, SIGNAL = 1.2; EXPRESSED IN HEART, SIGNAL = 1.3; EXPRESSED IN BRAIN, SIGNAL = 1.3; EST_HUMAN HIT: BE891286.1, EVALUE 3.00e-33; SWISSPROT HIT: P14528, EVALUE 4.50e+00
SPLRANSSKLVALRGLNKTNLIKSWQAWSWRSLAWSWNVESAVRPYQSCLPSSGRVQYWLKKPG

SEQ ID NO: 39809 - protein, 40 aa, Homo sapiens
  MAP TO AC004148.1; EXPRESSED IN PLACENTA, SIGNAL = 3.8; EXPRESSED IN LUNG, SIGNAL = 3.6; EXPRESSED IN HELA, SIGNAL = 3.7; EXPRESSED IN FETAL LIVER, SIGNAL = 3.7; EXPRESSED IN ADULT LIVER, SIGNAL =   4; EXPRESSED IN HEART, SIGNAL = 4.4; EXPRESSED IN BRAIN, SIGNAL = 3.9; EXPRESSED IN BONE MARROW, SIGNAL = 3.4; EST_HUMAN HIT: AA488609.1, EVALUE 1.00e-15
SEKDIAPPPEECLQLLSRATQVFREQYILKQDLAKEEIQR

SEQ ID NO: 39810 - protein, 53 aa, Homo sapiens
  MAP TO AC005670.1; EXPRESSED IN PLACENTA, SIGNAL = 3.7; EXPRESSED IN LUNG, SIGNAL = 3.8; EXPRESSED IN HELA, SIGNAL =   4; EXPRESSED IN HEART, SIGNAL = 4.1; EXPRESSED IN FETAL LIVER, SIGNAL =   4; EXPRESSED IN ADULT LIVER, SIGNAL = 3.9; EXPRESSED IN BRAIN, SIGNAL = 4.4; EXPRESSED IN BONE MARROW, SIGNAL = 3.9; SWISSPROT HIT: O35166, EVALUE 1.00e-23; EST_HUMAN HIT: AW015395.1, EVALUE 4.00e-23
GTQKKILDIANMLGLSNTVMRLIEKRAFQDKYFMIGGMLLTCVVMFLVVQYLT

SEQ ID NO: 39811 - protein, 53 aa, Homo sapiens
  MAP TO AC005865.1; EXPRESSED IN LUNG, SIGNAL =  14; EXPRESSED IN FETAL LIVER, SIGNAL =  14; EXPRESSED IN BONE MARROW, SIGNAL =  13; EXPRESSED IN PLACENTA, SIGNAL =  13; EXPRESSED IN HELA, SIGNAL =  10; EXPRESSED IN HEART, SIGNAL =  13; EXPRESSED IN BRAIN, SIGNAL =  16; EXPRESSED IN ADULT LIVER, SIGNAL =  15; SWISSPROT HIT: P48786, EVALUE 3.60e+00; EST_HUMAN HIT: BE394894.1, EVALUE 2.20e+00
TAKRGRGAPKAVGSPMPFSISRSGAAEKPATRSLTCFSSNGKPRKGAEATFSG

SEQ ID NO: 39812 - protein, 85 aa, Homo sapiens
  MAP TO AC004491.1; EXPRESSED IN LUNG, SIGNAL = 2.4; EXPRESSED IN BRAIN, SIGNAL = 2.3; EXPRESSED IN BONE MARROW, SIGNAL = 2.1; EXPRESSED IN PLACENTA, SIGNAL = 2.4; EXPRESSED IN HELA, SIGNAL = 2.2; EXPRESSED IN HEART, SIGNAL =   2; EXPRESSED IN FETAL LIVER, SIGNAL = 2.2; EXPRESSED IN ADULT LIVER, SIGNAL = 2.2; SWISSPROT HIT: P50311, EVALUE 2.40e+00; EST_HUMAN HIT: AV730224.1, EVALUE 6.80e-01
LCLSLPGLSQTLLLQLWGGSQELSGTVIIVPQFPKQHFIIVAVPMRQSPLYGLGPIAESVARLLGGSFWVLRQPVGPPGGQGMSD

SEQ ID NO: 39813 - protein, 37 aa, Homo sapiens
  MAP TO AC005809.1; EXPRESSED IN LUNG, SIGNAL = 1.2; EXPRESSED IN BONE MARROW, SIGNAL = 1.5; EXPRESSED IN PLACENTA, SIGNAL =   1; EXPRESSED IN HEART, SIGNAL = 1.4; EXPRESSED IN FETAL LIVER, SIGNAL = 1.3; EXPRESSED IN BRAIN, SIGNAL = 1.4; EXPRESSED IN ADULT LIVER, SIGNAL = 1.2; SWISSPROT HIT: P10238, EVALUE 9.70e-01; EST_HUMAN HIT: AW518560.1, EVALUE 2.20e-01
RARRSPRAAAGTSSPQWLWRARRTLRSPGCPPPTAMP

SEQ ID NO: 39814 - protein, 82 aa, Homo sapiens
  MAP TO AC004552.1; EXPRESSED IN LUNG, SIGNAL =   8; EXPRESSED IN PLACENTA, SIGNAL =   4; EXPRESSED IN HEART, SIGNAL = 7.6; EXPRESSED IN FETAL LIVER, SIGNAL =  14; EXPRESSED IN BRAIN, SIGNAL = 3.9; EXPRESSED IN BONE MARROW, SIGNAL = 6.8; EXPRESSED IN ADULT LIVER, SIGNAL =  17; EXPRESSED IN HELA, SIGNAL = 9.5; SWISSPROT HIT: P02383, EVALUE 8.00e-25; EST_HUMAN HIT: BF032798.1, EVALUE 4.00e-28
KRGLLSPVCASKMTKKRRNNGRAKKGRGHVQPIRCTKCARCVPKDKAIKKFVIRNIVEAAAIRDISEASVFDAYVLPKLYVK

SEQ ID NO: 39815 - protein, 39 aa, Homo sapiens
  MAP TO AC005746.1; EXPRESSED IN LUNG, SIGNAL = 1.4; EXPRESSED IN FETAL LIVER, SIGNAL = 1.5; EXPRESSED IN BRAIN, SIGNAL = 1.4; EXPRESSED IN BONE MARROW, SIGNAL = 1.6; EXPRESSED IN ADULT LIVER, SIGNAL = 1.4; EXPRESSED IN PLACENTA, SIGNAL = 1.4; EXPRESSED IN HEART, SIGNAL = 1.4; EST_HUMAN HIT: BE891604.1, EVALUE 2.00e-16
TFDRSVTLLEVCGSWPEGFGLRHMSSMEHTEEGLRERLA

SEQ ID NO: 39816 - protein, 40 aa, Homo sapiens
  MAP TO AC005746.1; EXPRESSED IN LUNG, SIGNAL = 1.4; EXPRESSED IN FETAL LIVER, SIGNAL = 1.5; EXPRESSED IN BRAIN, SIGNAL = 1.4; EXPRESSED IN BONE MARROW, SIGNAL = 1.6; EXPRESSED IN ADULT LIVER, SIGNAL = 1.4; EXPRESSED IN PLACENTA, SIGNAL = 1.4; EXPRESSED IN HEART, SIGNAL = 1.4; SWISSPROT HIT: Q62523, EVALUE 5.60e-01; EST_HUMAN HIT: AA855099.1, EVALUE 1.00e-18
RQVAPGGPPPCAPWRTCAAARSPQASSRTPPAGSRSCQRY

SEQ ID NO: 39817 - protein, 24 aa, Homo sapiens
  MAP TO AC004159.1; EXPRESSED IN LUNG, SIGNAL = 5.2; EXPRESSED IN HELA, SIGNAL = 4.6; EXPRESSED IN BRAIN, SIGNAL = 6.6; EXPRESSED IN BONE MARROW, SIGNAL = 4.8; EXPRESSED IN ADULT LIVER, SIGNAL = 4.7; EXPRESSED IN PLACENTA, SIGNAL = 4.7; EXPRESSED IN HEART, SIGNAL = 4.4; EXPRESSED IN FETAL LIVER, SIGNAL = 4.6; EST_HUMAN HIT: D55358.1, EVALUE 4.70e+00; SWISSPROT HIT: Q29195, EVALUE 1.50e-01
FPLCGHMVSDEYELLSSEALEAVR

SEQ ID NO: 39818 - protein, 58 aa, Homo sapiens
  MAP TO AC004592.1; EXPRESSED IN LUNG, SIGNAL = 1.8; EXPRESSED IN BRAIN, SIGNAL = 1.6; EXPRESSED IN BONE MARROW, SIGNAL = 1.5; EXPRESSED IN ADULT LIVER, SIGNAL = 1.5; EXPRESSED IN PLACENTA, SIGNAL = 1.6; EXPRESSED IN HEART, SIGNAL = 1.6; EXPRESSED IN FETAL LIVER, SIGNAL = 1.8; EST_HUMAN HIT: AW969994.1, EVALUE 1.60e+00; SWISSPROT HIT: P47259, EVALUE 8.00e-02
KAWDSNLTTVFFDARKPRKGLLKFSVPLNRAKKKLRGLVNPEKSNREERGFTVTLVDK

SEQ ID NO: 39819 - protein, 80 aa, Homo sapiens
  MAP TO AC005751.1; EXPRESSED IN LUNG, SIGNAL = 4.1; EXPRESSED IN FETAL LIVER, SIGNAL = 5.5; EXPRESSED IN BONE MARROW, SIGNAL = 4.1; EXPRESSED IN PLACENTA, SIGNAL = 3.7; EXPRESSED IN HELA, SIGNAL = 4.1; EXPRESSED IN HEART, SIGNAL = 4.1; EXPRESSED IN BRAIN, SIGNAL = 3.5; EXPRESSED IN ADULT LIVER, SIGNAL = 4.6; EST_HUMAN HIT: BF336819.1, EVALUE 4.00e-03; SWISSPROT HIT: P47750, EVALUE 7.60e+00
PPSLLVLSIVQTHQEAPPSLLVLSIVQTHQEAPPSLLVLSIVQTHQEAPPSLLVLSIVQTHQEAPPSLLVLSIVQTYQEA

SEQ ID NO: 39820 - protein, 36 aa, Homo sapiens
  MAP TO AC004125.1; EXPRESSED IN PLACENTA, SIGNAL = 4.4; EXPRESSED IN LUNG, SIGNAL = 4.5; EXPRESSED IN HEART, SIGNAL = 4.6; EXPRESSED IN BRAIN, SIGNAL = 4.7; EXPRESSED IN BONE MARROW, SIGNAL = 4.1; EXPRESSED IN ADULT LIVER, SIGNAL = 4.6; EXPRESSED IN HELA, SIGNAL = 4.7; EXPRESSED IN FETAL LIVER, SIGNAL = 4.9
LKYLQDEHTSQQAQTFLSREWFRSVFRDNGSIATVP

SEQ ID NO: 39821 - protein, 37 aa, Homo sapiens
  MAP TO AC004125.1; EXPRESSED IN PLACENTA, SIGNAL = 4.4; EXPRESSED IN LUNG, SIGNAL = 4.5; EXPRESSED IN HEART, SIGNAL = 4.6; EXPRESSED IN BRAIN, SIGNAL = 4.7; EXPRESSED IN BONE MARROW, SIGNAL = 4.1; EXPRESSED IN ADULT LIVER, SIGNAL = 4.6; EXPRESSED IN HELA, SIGNAL = 4.7; EXPRESSED IN FETAL LIVER, SIGNAL = 4.9
SRDCGDTTVISEDTPEPFSGEEGLGLLGCVLILQVFQ

SEQ ID NO: 39822 - protein, 28 aa, Homo sapiens
  MAP TO AC004056.1; EXPRESSED IN LUNG, SIGNAL = 1.5; EXPRESSED IN HELA, SIGNAL = 1.7; EXPRESSED IN BRAIN, SIGNAL = 1.6; EXPRESSED IN BONE MARROW, SIGNAL = 1.6; EXPRESSED IN ADULT LIVER, SIGNAL = 2.3; EXPRESSED IN PLACENTA, SIGNAL = 1.6; EXPRESSED IN HEART, SIGNAL = 1.6; EXPRESSED IN FETAL LIVER, SIGNAL = 1.6; EST_HUMAN HIT: AW502248.1, EVALUE 4.00e-10; SWISSPROT HIT: P15791, EVALUE 3.00e-11
VILYILLVGYPPFWDEDQHRLYQQIKAG

SEQ ID NO: 39823 - protein, 92 aa, Homo sapiens
  MAP TO AC004506.1; EXPRESSED IN LUNG, SIGNAL =  11; EXPRESSED IN HELA, SIGNAL = 8.6; EXPRESSED IN BRAIN, SIGNAL = 5.7; EXPRESSED IN BONE MARROW, SIGNAL = 7.2; EXPRESSED IN ADULT LIVER, SIGNAL =  19; EXPRESSED IN PLACENTA, SIGNAL =  13; EXPRESSED IN HEART, SIGNAL =   8; EXPRESSED IN FETAL LIVER, SIGNAL = 7.2; EST_HUMAN HIT: BE561783.1, EVALUE 2.00e-42; SWISSPROT HIT: P39026, EVALUE 2.00e-42
VHCTVQGSKAEEILEKDLKVQKYELRKNNFSDTRNFGFGIQEHIDLGIIYDPSIGIYGLDFSVVLGRPGFSITDKKHRTGCTGAKHRLSKEE

SEQ ID NO: 39824 - protein, 39 aa, Homo sapiens
  MAP TO AC005827.3; EXPRESSED IN LUNG, SIGNAL = 1.9; EXPRESSED IN HELA, SIGNAL = 2.2; EXPRESSED IN BONE MARROW, SIGNAL = 1.9; EXPRESSED IN ADULT LIVER, SIGNAL = 1.9; EXPRESSED IN PLACENTA, SIGNAL = 1.9; EXPRESSED IN HEART, SIGNAL = 2.3; EXPRESSED IN FETAL LIVER, SIGNAL =   2; EXPRESSED IN BRAIN, SIGNAL = 2.4; SWISSPROT HIT: Q9QYC0, EVALUE 5.60e-01
MVVLAEALPAKKADPSPYYASIPGRKKIAAPSMMEGVQC

SEQ ID NO: 39825 - protein, 30 aa, Homo sapiens
  MAP TO AC005771.1; EXPRESSED IN BRAIN, SIGNAL = 1.4; EXPRESSED IN BONE MARROW, SIGNAL = 1.4; EXPRESSED IN ADULT LIVER, SIGNAL = 1.3; EXPRESSED IN HEART, SIGNAL = 1.5; EXPRESSED IN PLACENTA, SIGNAL = 1.4; EXPRESSED IN LUNG, SIGNAL = 1.3; EXPRESSED IN FETAL LIVER, SIGNAL = 1.5
SRVFWEQNVKQPLVGLGDNPVEVWLVLEKY

SEQ ID NO: 39826 - protein, 42 aa, Homo sapiens
  MAP TO AC004169.3; EXPRESSED IN PLACENTA, SIGNAL = 1.1; EXPRESSED IN LUNG, SIGNAL = 1.5; EXPRESSED IN FETAL LIVER, SIGNAL = 1.1; EXPRESSED IN BRAIN, SIGNAL = 1.1; EXPRESSED IN BONE MARROW, SIGNAL = 1.1; EXPRESSED IN ADULT LIVER, SIGNAL = 1.3; EXPRESSED IN HEART, SIGNAL = 1.9
PALCFRSSLSAPHSVTGTRAYSSAQTKAPPFRSSPFPSSWKL

SEQ ID NO: 39827 - protein, 66 aa, Homo sapiens
  MAP TO AC005877.2; EXPRESSED IN PLACENTA, SIGNAL = 1.4; EXPRESSED IN LUNG, SIGNAL = 1.4; EXPRESSED IN FETAL LIVER, SIGNAL = 1.8; EXPRESSED IN BONE MARROW, SIGNAL = 1.9; EXPRESSED IN BRAIN, SIGNAL = 1.8; EXPRESSED IN ADULT LIVER, SIGNAL = 1.7; EXPRESSED IN HEART, SIGNAL = 2.2; EST_HUMAN HIT: AA883203.1, EVALUE 5.70e+00; SWISSPROT HIT: P29149, EVALUE 1.50e+00
APADLESEEKGSETETKPPWPGLLADCRESPHTLEAEGNGNGHENTAHTQTVFPEAIRYTQGASGQ

SEQ ID NO: 39828 - protein, 65 aa, Homo sapiens
  MAP TO AC005939.1; EXPRESSED IN LUNG, SIGNAL = 4.9; EXPRESSED IN PLACENTA, SIGNAL = 4.7; EXPRESSED IN HEART, SIGNAL = 4.5; EXPRESSED IN FETAL LIVER, SIGNAL = 4.4; EXPRESSED IN BRAIN, SIGNAL = 5.2; EXPRESSED IN BONE MARROW, SIGNAL = 5.1; EXPRESSED IN HELA, SIGNAL = 4.5; EXPRESSED IN ADULT LIVER, SIGNAL = 4.8; EST_HUMAN HIT: BF238034.1, EVALUE 1.00e-01; SWISSPROT HIT: O14514, EVALUE 3.20e+00
MHMLVVQWNAQASNFLCPWVVCMCTGGVATGPEKLVLEPLGSVCGHAMFLPLEVAGLQATVVENS

SEQ ID NO: 39829 - protein, 63 aa, Homo sapiens
  MAP TO AC005939.1; EXPRESSED IN LUNG, SIGNAL = 4.9; EXPRESSED IN PLACENTA, SIGNAL = 4.7; EXPRESSED IN HEART, SIGNAL = 4.5; EXPRESSED IN FETAL LIVER, SIGNAL = 4.4; EXPRESSED IN BRAIN, SIGNAL = 5.2; EXPRESSED IN BONE MARROW, SIGNAL = 5.1; EXPRESSED IN HELA, SIGNAL = 4.5; EXPRESSED IN ADULT LIVER, SIGNAL = 4.8; EST_HUMAN HIT: BF572301.1, EVALUE 3.10e-02; SWISSPROT HIT: P75320, EVALUE 1.00e+01
LFGSCTCWWCNGMPRHPTSCAPGWCACALAVWQQALRSWSLSLWVVCVGMQCSCHWRWQVCRQ

SEQ ID NO: 39830 - protein, 55 aa, Homo sapiens
  MAP TO AC004064.1; EXPRESSED IN PLACENTA, SIGNAL =   2; EXPRESSED IN HELA, SIGNAL = 2.2; EXPRESSED IN BRAIN, SIGNAL =   2; EXPRESSED IN BONE MARROW, SIGNAL = 2.1; EXPRESSED IN ADULT LIVER, SIGNAL =   2; EXPRESSED IN HEART, SIGNAL = 2.3; EXPRESSED IN LUNG, SIGNAL = 1.5; EXPRESSED IN FETAL LIVER, SIGNAL = 2.6; EST_HUMAN HIT: W84856.1, EVALUE 4.00e-15; SWISSPROT HIT: P02671, EVALUE 2.00e-10
GFGDPAGEHWLGNEVVHQLTRRAAYSLRVELQDWEGHEAYAQYEHFHLGSENQLY

SEQ ID NO: 39831 - protein, 55 aa, Homo sapiens
  MAP TO AC004064.1; EXPRESSED IN PLACENTA, SIGNAL =   2; EXPRESSED IN HELA, SIGNAL = 2.2; EXPRESSED IN BRAIN, SIGNAL =   2; EXPRESSED IN BONE MARROW, SIGNAL = 2.1; EXPRESSED IN ADULT LIVER, SIGNAL =   2; EXPRESSED IN HEART, SIGNAL = 2.3; EXPRESSED IN LUNG, SIGNAL = 1.5; EXPRESSED IN FETAL LIVER, SIGNAL = 2.6; EST_HUMAN HIT: AL046930.2, EVALUE 1.00e-02; SWISSPROT HIT: P12057, EVALUE 2.10e+00
STGWAMKWCTSSPEGQPTLCVWSCKTGKATRPMPSTNISTWAVRTSYTGGFGAQA

SEQ ID NO: 39832 - protein, 42 aa, Homo sapiens
  MAP TO AC005702.1; EXPRESSED IN BONE MARROW, SIGNAL = 2.5; EXPRESSED IN PLACENTA, SIGNAL = 2.3; EXPRESSED IN LUNG, SIGNAL =   2; EXPRESSED IN HELA, SIGNAL = 2.4; EXPRESSED IN HEART, SIGNAL = 2.3; EXPRESSED IN FETAL LIVER, SIGNAL = 2.4; EXPRESSED IN BRAIN, SIGNAL = 2.5; EXPRESSED IN ADULT LIVER, SIGNAL =   2; EST_HUMAN HIT: BE298535.1, EVALUE 6.00e-16; SWISSPROT HIT: Q06142, EVALUE 9.50e-01
DVIFVADAANAILMSLEDKSLNVRAKAAWSLGNLTDTLIVNM

SEQ ID NO: 39833 - protein, 85 aa, Homo sapiens
  MAP TO AC004466.1; EXPRESSED IN LUNG, SIGNAL = 4.3; EXPRESSED IN FETAL LIVER, SIGNAL = 4.7; EXPRESSED IN BRAIN, SIGNAL =   5; EXPRESSED IN BONE MARROW, SIGNAL = 4.4; EXPRESSED IN PLACENTA, SIGNAL = 4.1; EXPRESSED IN HELA, SIGNAL = 4.4; EXPRESSED IN HEART, SIGNAL = 3.6; EXPRESSED IN ADULT LIVER, SIGNAL = 4.3; EST_HUMAN HIT: AW505439.1, EVALUE 2.00e-17; SWISSPROT HIT: Q28037, EVALUE 6.00e-45
RPGVQDAALIEAIQDRLSNTLQTYIRCRHPPPGSHLLYAKMIQKLADLRSLNEEHSKQYRCLSFQPECSMKLTPLVLEVFGNEIS

SEQ ID NO: 39834 - protein, 23 aa, Homo sapiens
  MAP TO AC004466.1; EXPRESSED IN LUNG, SIGNAL = 4.3; EXPRESSED IN FETAL LIVER, SIGNAL = 4.7; EXPRESSED IN BRAIN, SIGNAL =   5; EXPRESSED IN BONE MARROW, SIGNAL = 4.4; EXPRESSED IN PLACENTA, SIGNAL = 4.1; EXPRESSED IN HELA, SIGNAL = 4.4; EXPRESSED IN HEART, SIGNAL = 3.6; EXPRESSED IN ADULT LIVER, SIGNAL = 4.3
PTHCRRTSAAATRPRAATCSMPR

SEQ ID NO: 39835 - protein, 32 aa, Homo sapiens
  MAP TO AC005839.1; EXPRESSED IN LUNG, SIGNAL = 2.9; EXPRESSED IN BRAIN, SIGNAL = 3.5; EXPRESSED IN BONE MARROW, SIGNAL = 3.3; EXPRESSED IN PLACENTA, SIGNAL = 2.8; EXPRESSED IN HELA, SIGNAL = 3.2; EXPRESSED IN HEART, SIGNAL = 2.9; EXPRESSED IN FETAL LIVER, SIGNAL = 3.3; EXPRESSED IN ADULT LIVER, SIGNAL = 2.8; EST_HUMAN HIT: BF220280.1, EVALUE 4.00e-13; SWISSPROT HIT: P15531, EVALUE 3.00e-14
DSVESAEKEIGLWFHPEELVDYTSCAQNWIYE

SEQ ID NO: 39836 - protein, 19 aa, Homo sapiens
  MAP TO AC005839.1; EXPRESSED IN LUNG, SIGNAL = 2.9; EXPRESSED IN BRAIN, SIGNAL = 3.5; EXPRESSED IN BONE MARROW, SIGNAL = 3.3; EXPRESSED IN PLACENTA, SIGNAL = 2.8; EXPRESSED IN HELA, SIGNAL = 3.2; EXPRESSED IN HEART, SIGNAL = 2.9; EXPRESSED IN FETAL LIVER, SIGNAL = 3.3; EXPRESSED IN ADULT LIVER, SIGNAL = 2.8; EST_HUMAN HIT: BE390095.1, EVALUE 1.00e-04
ILWRVQRRRSACGFTLRNW

SEQ ID NO: 39837 - protein, 63 aa, Homo sapiens
  MAP TO AC004134.1; EXPRESSED IN HELA, SIGNAL = 1.8; EXPRESSED IN FETAL LIVER, SIGNAL = 2.2; EXPRESSED IN BRAIN, SIGNAL =   2; EXPRESSED IN BONE MARROW, SIGNAL = 2.1; EXPRESSED IN ADULT LIVER, SIGNAL = 2.1; EXPRESSED IN PLACENTA, SIGNAL =   2; EXPRESSED IN HEART, SIGNAL = 2.4; EXPRESSED IN LUNG, SIGNAL = 2.2; EST_HUMAN HIT: AA332494.1, EVALUE 6.00e-28; SWISSPROT HIT: P21851, EVALUE 1.00e-31
VVANAVAALSEISESHPNSNLLDLNPQNINKLLTALNECTEWGQIFILDCLSNYNPKDDREAQ

SEQ ID NO: 39838 - protein, 52 aa, Homo sapiens
  MAP TO AC005877.2; EXPRESSED IN PLACENTA, SIGNAL = 1.9; EXPRESSED IN LUNG, SIGNAL = 1.4; EXPRESSED IN FETAL LIVER, SIGNAL = 1.3; EXPRESSED IN BRAIN, SIGNAL = 1.6; EXPRESSED IN BONE MARROW, SIGNAL = 2.6; EXPRESSED IN ADULT LIVER, SIGNAL = 1.4; EXPRESSED IN HEART, SIGNAL = 1.6; EST_HUMAN HIT: AW965776.1, EVALUE 2.00e-24
MKTNCILWKKKVLQMQLTVKVYQRMTCQQTRQCYQGGAVKEKGMLRTAGRMT

SEQ ID NO: 39839 - protein, 65 aa, Homo sapiens
  MAP TO AC005881.2; EXPRESSED IN LUNG, SIGNAL = 1.2; EXPRESSED IN BRAIN, SIGNAL = 1.4; EXPRESSED IN BONE MARROW, SIGNAL = 1.3; EXPRESSED IN PLACENTA, SIGNAL = 1.2; EXPRESSED IN HEART, SIGNAL = 1.5; EXPRESSED IN FETAL LIVER, SIGNAL = 1.3; EXPRESSED IN ADULT LIVER, SIGNAL = 1.2; EST_HUMAN HIT: R31169.1, EVALUE 2.00e-05; SWISSPROT HIT: O95544, EVALUE 2.60e+00
WNPSQALSVSNLHDVGILQENPVLFVTEINTHLVEDTQSDEESVKLREDPAKDGTAAACFLPHTK

SEQ ID NO: 39840 - protein, 41 aa, Homo sapiens
  MAP TO AC004149.1; EXPRESSED IN PLACENTA, SIGNAL = 2.5; EXPRESSED IN LUNG, SIGNAL =   3; EXPRESSED IN FETAL LIVER, SIGNAL = 2.5; EXPRESSED IN HELA, SIGNAL = 2.4; EXPRESSED IN BRAIN, SIGNAL = 2.3; EXPRESSED IN BONE MARROW, SIGNAL = 2.9; EXPRESSED IN ADULT LIVER, SIGNAL = 2.5; EXPRESSED IN HEART, SIGNAL = 2.6; EST_HUMAN HIT: BE898972.1, EVALUE 1.00e-16; SWISSPROT HIT: P50221, EVALUE 1.00e-17
AGGSKEMGTSSLGLVDTTGGPGDDYGVLGSTANETEKKSSR

SEQ ID NO: 39841 - protein, 41 aa, Homo sapiens
  MAP TO AC004149.1; EXPRESSED IN PLACENTA, SIGNAL = 2.5; EXPRESSED IN LUNG, SIGNAL =   3; EXPRESSED IN FETAL LIVER, SIGNAL = 2.5; EXPRESSED IN HELA, SIGNAL = 2.4; EXPRESSED IN BRAIN, SIGNAL = 2.3; EXPRESSED IN BONE MARROW, SIGNAL = 2.9; EXPRESSED IN ADULT LIVER, SIGNAL = 2.5; EXPRESSED IN HEART, SIGNAL = 2.6; SWISSPROT HIT: Q52999, EVALUE 3.70e+00; EST_HUMAN HIT: BF036801.1, EVALUE 1.00e-20
QGVPRKWGPAAWAWWTPQEAQAMTTGCLGALPMRQRRNHPG

SEQ ID NO: 39842 - protein, 58 aa, Homo sapiens
  MAP TO AC005899.1; EXPRESSED IN HELA, SIGNAL = 1.7; EXPRESSED IN FETAL LIVER, SIGNAL = 1.4; EXPRESSED IN BRAIN, SIGNAL = 1.8; EXPRESSED IN BONE MARROW, SIGNAL = 1.6; EXPRESSED IN ADULT LIVER, SIGNAL = 1.6; EXPRESSED IN PLACENTA, SIGNAL = 1.4; EXPRESSED IN HEART, SIGNAL = 1.8; EXPRESSED IN LUNG, SIGNAL = 1.6; EST_HUMAN HIT: BE891183.1, EVALUE 7.00e-18; SWISSPROT HIT: P34481, EVALUE 4.00e-06
LKKMDDKALLVEVQLLESKTYHALSNLPKARAALTSARTTANAIYCPPKLQATLDMQS

SEQ ID NO: 39843 - protein, 48 aa, Homo sapiens
  MAP TO AC005899.1; EXPRESSED IN HELA, SIGNAL = 1.7; EXPRESSED IN FETAL LIVER, SIGNAL = 1.4; EXPRESSED IN BRAIN, SIGNAL = 1.8; EXPRESSED IN BONE MARROW, SIGNAL = 1.6; EXPRESSED IN ADULT LIVER, SIGNAL = 1.6; EXPRESSED IN PLACENTA, SIGNAL = 1.4; EXPRESSED IN HEART, SIGNAL = 1.8; EXPRESSED IN LUNG, SIGNAL = 1.6; EST_HUMAN HIT: AI205031.1, EVALUE 8.00e-24; SWISSPROT HIT: P97347, EVALUE 4.70e+00
VEKDGRQSSFGGSTAFRKQNIPCPEQPAESPSCLNFCSNHSKCHLLPP

SEQ ID NO: 39844 - protein, 68 aa, Homo sapiens
  MAP TO AC004503.1; EXPRESSED IN PLACENTA, SIGNAL = 1.7; EXPRESSED IN LUNG, SIGNAL = 1.3; EXPRESSED IN FETAL LIVER, SIGNAL = 2.3; EXPRESSED IN ADULT LIVER, SIGNAL = 2.5; EXPRESSED IN HELA, SIGNAL = 1.7; EXPRESSED IN HEART, SIGNAL = 1.9; EXPRESSED IN BRAIN, SIGNAL = 1.4; EXPRESSED IN BONE MARROW, SIGNAL = 1.3; EST_HUMAN HIT: AU119221.1, EVALUE 5.00e-26; SWISSPROT HIT: Q15582, EVALUE 5.00e-27
EVLDSLVSNVNIELLNALRYHMVGRRVLTDELKHGMTLTSMYQNSNIQIHHYPNGVGDPQPYCMALGA

SEQ ID NO: 39845 - protein, 39 aa, Homo sapiens
  MAP TO AC005906.1; EXPRESSED IN LUNG, SIGNAL = 2.6; EXPRESSED IN FETAL LIVER, SIGNAL = 2.3; EXPRESSED IN BONE MARROW, SIGNAL = 2.5; EXPRESSED IN PLACENTA, SIGNAL = 2.4; EXPRESSED IN HELA, SIGNAL = 2.6; EXPRESSED IN HEART, SIGNAL = 2.6; EXPRESSED IN BRAIN, SIGNAL = 2.7; EXPRESSED IN ADULT LIVER, SIGNAL = 2.2; SWISSPROT HIT: P22306, EVALUE 6.40e+00; EST_HUMAN HIT: AW239256.1, EVALUE 3.20e+00
ISSLRTSPSILGSVVGIEMRQILPSGNSLTDVGMLHLPV

SEQ ID NO: 39846 - protein, 36 aa, Homo sapiens
  MAP TO AC004514.1; EXPRESSED IN PLACENTA, SIGNAL = 3.4; EXPRESSED IN HEART, SIGNAL = 3.8; EXPRESSED IN FETAL LIVER, SIGNAL = 3.5; EXPRESSED IN BRAIN, SIGNAL = 3.6; EXPRESSED IN BONE MARROW, SIGNAL = 3.4; EXPRESSED IN ADULT LIVER, SIGNAL = 3.2; EXPRESSED IN HELA, SIGNAL = 3.6; EXPRESSED IN LUNG, SIGNAL = 3.2
KLVTQLFLMKTTILKEKKERIDLGDLGIHSCKGAVS

SEQ ID NO: 39847 - protein, 44 aa, Homo sapiens
  MAP TO AC005912.1; EXPRESSED IN PLACENTA, SIGNAL =  10; EXPRESSED IN LUNG, SIGNAL =  11; EXPRESSED IN FETAL LIVER, SIGNAL =  10; EXPRESSED IN HELA, SIGNAL =  11; EXPRESSED IN BRAIN, SIGNAL =  12; EXPRESSED IN BONE MARROW, SIGNAL =  11; EXPRESSED IN ADULT LIVER, SIGNAL =  10; EXPRESSED IN HEART, SIGNAL =  10; EST_HUMAN HIT: AL048868.1, EVALUE 3.10e+00
ESQALHTSGAPSQDQERVLVSWTLHPEPANLRWVISVAAEKLAS

SEQ ID NO: 39848 - protein, 58 aa, Homo sapiens
  MAP TO AC004222.1; EXPRESSED IN PLACENTA, SIGNAL = 3.2; EXPRESSED IN LUNG, SIGNAL = 6.3; EXPRESSED IN HEART, SIGNAL = 4.1; EXPRESSED IN FETAL LIVER, SIGNAL = 5.6; EXPRESSED IN BONE MARROW, SIGNAL = 3.1; EXPRESSED IN ADULT LIVER, SIGNAL = 3.5; EXPRESSED IN HELA, SIGNAL = 3.7; EXPRESSED IN BRAIN, SIGNAL = 3.5; SWISSPROT HIT: Q04690, EVALUE 3.00e-27; EST_HUMAN HIT: BE779692.1, EVALUE 2.00e-11
KLFLDSLRKALAGHGGSRQLTESAAIACVKLCKASTYINWEDNSVIFLLVQSMVVDLK

SEQ ID NO: 39849 - protein, 62 aa, Homo sapiens
  MAP TO AC005922.1; EXPRESSED IN PLACENTA, SIGNAL = 3.7; EXPRESSED IN LUNG, SIGNAL = 3.1; EXPRESSED IN FETAL LIVER, SIGNAL = 3.2; EXPRESSED IN BONE MARROW, SIGNAL =   3; EXPRESSED IN ADULT LIVER, SIGNAL = 2.9; EXPRESSED IN HELA, SIGNAL = 2.9; EXPRESSED IN HEART, SIGNAL = 3.1; EXPRESSED IN BRAIN, SIGNAL = 3.6; EST_HUMAN HIT: AI822115.1, EVALUE 2.00e-23; SWISSPROT HIT: P24890, EVALUE 8.30e-01
ITLAFLMSVLIKKPFLTGLVVFLLIVFWGILGFPALYTRLPAFLEWTLCLLSPFAFTVGMAQ

SEQ ID NO: 39850 - protein, 77 aa, Homo sapiens
  MAP TO AC005895.1; EXPRESSED IN PLACENTA, SIGNAL = 1.9; EXPRESSED IN LUNG, SIGNAL =   2; EXPRESSED IN HELA, SIGNAL = 2.1; EXPRESSED IN FETAL LIVER, SIGNAL = 2.1; EXPRESSED IN ADULT LIVER, SIGNAL = 1.8; EXPRESSED IN HEART, SIGNAL =   2; EXPRESSED IN BRAIN, SIGNAL = 2.6; EXPRESSED IN BONE MARROW, SIGNAL = 2.1; EST_HUMAN HIT: AA984230.1, EVALUE 5.00e-23; SWISSPROT HIT: Q99884, EVALUE 1.00e-42
AGAAMLLIVGLVAIYYNMIIAYVLFYLFASLTSDLPWEHCGNWWNTELCLEHRVSKDGNGALPLNLTCTVSPSEEYW

SEQ ID NO: 39851 - protein, 52 aa, Homo sapiens
  MAP TO AC005295.1; EXPRESSED IN BRAIN, SIGNAL =  38; EXPRESSED IN ADULT LIVER, SIGNAL =  36; EXPRESSED IN HELA, SIGNAL =  34; EXPRESSED IN HEART, SIGNAL =  26; EXPRESSED IN BONE MARROW, SIGNAL =  36; EXPRESSED IN PLACENTA, SIGNAL =  36; EXPRESSED IN LUNG, SIGNAL =  45; EXPRESSED IN FETAL LIVER, SIGNAL =  29; EST_HUMAN HIT: AA081038.1, EVALUE 3.00e-23; SWISSPROT HIT: P51689, EVALUE 1.00e-25
MAGVGCLFFISWYSSFGFVRRWNCILMRNHDVTEQPMVLEKTASLMLKEAVS

SEQ ID NO: 39852 - protein, 23 aa, Homo sapiens
  MAP TO AC005295.1; EXPRESSED IN BRAIN, SIGNAL =  38; EXPRESSED IN ADULT LIVER, SIGNAL =  36; EXPRESSED IN HELA, SIGNAL =  34; EXPRESSED IN HEART, SIGNAL =  26; EXPRESSED IN BONE MARROW, SIGNAL =  36; EXPRESSED IN PLACENTA, SIGNAL =  36; EXPRESSED IN LUNG, SIGNAL =  45; EXPRESSED IN FETAL LIVER, SIGNAL =  29; EST_HUMAN HIT: AI000504.1, EVALUE 6.30e-02
KMAPGCELCIPRGSLPPPPEPRI

SEQ ID NO: 39853 - protein, 32 aa, Homo sapiens
  MAP TO AC005516.1; EXPRESSED IN BRAIN, SIGNAL = 2.5; EXPRESSED IN HEART, SIGNAL = 2.2; EXPRESSED IN BONE MARROW, SIGNAL = 3.1; EXPRESSED IN ADULT LIVER, SIGNAL =   3; EXPRESSED IN PLACENTA, SIGNAL = 2.2; EXPRESSED IN LUNG, SIGNAL = 2.7; EXPRESSED IN HELA, SIGNAL = 2.4; EXPRESSED IN FETAL LIVER, SIGNAL = 2.6; SWISSPROT HIT: P42858, EVALUE 2.00e-12
NTFSLADCIPLLRKTLKDESSVTCKLACTAVR

SEQ ID NO: 39854 - protein, 100 aa, Homo sapiens
  MAP TO AC005323.1; EXPRESSED IN LUNG, SIGNAL = 5.3; EXPRESSED IN BRAIN, SIGNAL = 4.6; EXPRESSED IN HEART, SIGNAL =  19; EXPRESSED IN BONE MARROW, SIGNAL = 5.4; EXPRESSED IN ADULT LIVER, SIGNAL = 3.5; EXPRESSED IN PLACENTA, SIGNAL = 5.4; EXPRESSED IN HELA, SIGNAL = 4.1; EXPRESSED IN FETAL LIVER, SIGNAL = 4.1; SWISSPROT HIT: P13535, EVALUE 2.00e-54; EST_HUMAN HIT: F00185.1, EVALUE 7.00e-25
PLGIFSILEEECMFPKATDTSFKNKLYDQHLGKSANFQKPKVVKGKAEAHFSLIHYAGTVDYNITGWLDKNKDPLNDTVVGLYQKSAMKTLASLFSTYAS

SEQ ID NO: 39855 - protein, 52 aa, Homo sapiens
  MAP TO AC005323.1; EXPRESSED IN LUNG, SIGNAL = 5.3; EXPRESSED IN BRAIN, SIGNAL = 4.6; EXPRESSED IN HEART, SIGNAL =  19; EXPRESSED IN BONE MARROW, SIGNAL = 5.4; EXPRESSED IN ADULT LIVER, SIGNAL = 3.5; EXPRESSED IN PLACENTA, SIGNAL = 5.4; EXPRESSED IN HELA, SIGNAL = 4.1; EXPRESSED IN FETAL LIVER, SIGNAL = 4.1; SWISSPROT HIT: P03291, EVALUE 5.40e-01; EST_HUMAN HIT: AI382389.1, EVALUE 6.00e-15
HWASSPSWKRSACSLRQRTPPSRTSCMTSTWASLPTSRSPRWSKARLRPTSL

SEQ ID NO: 39856 - protein, 43 aa, Homo sapiens
  MAP TO AC005988.1; EXPRESSED IN HEART, SIGNAL = 6.1; EXPRESSED IN BRAIN, SIGNAL = 7.7; EXPRESSED IN ADULT LIVER, SIGNAL = 7.9; EXPRESSED IN PLACENTA, SIGNAL = 8.1; EXPRESSED IN BONE MARROW, SIGNAL = 7.9; EXPRESSED IN FETAL LIVER, SIGNAL = 8.6; EXPRESSED IN LUNG, SIGNAL = 7.8; EXPRESSED IN HELA, SIGNAL =   7; EST_HUMAN HIT: AW027962.1, EVALUE 3.00e-03
GSPEREKWEVIYTYMRGDLLPELAHMIMETKNSHNRPPASCGL

SEQ ID NO: 39857 - protein, 112 aa, Homo sapiens
  MAP TO AC006097.1; EXPRESSED IN LUNG, SIGNAL =   3; EXPRESSED IN FETAL LIVER, SIGNAL = 3.4; EXPRESSED IN BONE MARROW, SIGNAL = 2.7; EXPRESSED IN HELA, SIGNAL = 2.4; EXPRESSED IN HEART, SIGNAL = 5.1; EXPRESSED IN BRAIN, SIGNAL = 2.9; EXPRESSED IN PLACENTA, SIGNAL = 3.5; EXPRESSED IN ADULT LIVER, SIGNAL = 2.9; SWISSPROT HIT: gi127998, EVALUE 2.00e-18; EST_HUMAN HIT: AA180799.1, EVALUE 6.00e-35
FRYKEAFLRDRGLQIGYCSVDDDPRMKHFLNVGRLQSDNEYKKDFAKSRSQFHSSTDQPGLLQAKRSQQLASDVHYRQPLPQPTCDPEQLGLRHAQKAHQLQSDVSHLHPLP

SEQ ID NO: 39858 - protein, 32 aa, Homo sapiens
  MAP TO AC006137.1; EXPRESSED IN ADULT LIVER, SIGNAL = 4.2; EXPRESSED IN HELA, SIGNAL = 4.4; EXPRESSED IN HEART, SIGNAL = 3.6; EXPRESSED IN FETAL LIVER, SIGNAL = 4.2; EXPRESSED IN BRAIN, SIGNAL = 4.7; EXPRESSED IN BONE MARROW, SIGNAL = 4.4; EXPRESSED IN PLACENTA, SIGNAL = 4.5; EXPRESSED IN LUNG, SIGNAL = 4.8; SWISSPROT HIT: Q9ZWX1, EVALUE 2.20e+00
MIGEVKVAQFQNGHHRTFLASERLRSDRRTIS

SEQ ID NO: 39859 - protein, 34 aa, Homo sapiens
  MAP TO AC005297.1; EXPRESSED IN PLACENTA, SIGNAL = 2.7; EXPRESSED IN LUNG, SIGNAL = 2.8; EXPRESSED IN HEART, SIGNAL = 2.2; EXPRESSED IN BRAIN, SIGNAL = 2.6; EXPRESSED IN FETAL LIVER, SIGNAL = 2.5; EXPRESSED IN BONE MARROW, SIGNAL = 2.6; EXPRESSED IN ADULT LIVER, SIGNAL = 2.2; EXPRESSED IN HELA, SIGNAL = 2.2
MAKEKASTIMPTIGTPNLTTTYKQKSTLIRTKNQ

SEQ ID NO: 39860 - protein, 43 aa, Homo sapiens
  MAP TO AC004605.1; EXPRESSED IN HEART, SIGNAL = 1.4; EXPRESSED IN ADULT LIVER, SIGNAL = 1.1; EXPRESSED IN PLACENTA, SIGNAL = 1.3; EXPRESSED IN FETAL LIVER, SIGNAL = 1.1; EXPRESSED IN BRAIN, SIGNAL = 1.3; EXPRESSED IN BONE MARROW, SIGNAL = 1.1; EXPRESSED IN LUNG, SIGNAL = 1.3; SWISSPROT HIT: P76586, EVALUE 6.30e+00; EST_HUMAN HIT: AW207390.1, EVALUE 2.00e-11
AYCSVSPEPQRKTWQEHLVLIYIHVYGNADHLAGLNQDKSEDF

SEQ ID NO: 39861 - protein, 69 aa, Homo sapiens
  MAP TO AC001237.1; EXPRESSED IN LUNG, SIGNAL = 1.4; EXPRESSED IN FETAL LIVER, SIGNAL = 1.2; EXPRESSED IN BRAIN, SIGNAL = 1.5; EXPRESSED IN BONE MARROW, SIGNAL = 1.2; EXPRESSED IN ADULT LIVER, SIGNAL = 1.3; EXPRESSED IN PLACENTA, SIGNAL = 1.2; EXPRESSED IN HEART, SIGNAL = 1.6; SWISSPROT HIT: O53258, EVALUE 1.10e+00; EST_HUMAN HIT: AI076598.1, EVALUE 1.00e-35
PEELSHQETTSWKCPGLAGPVAADPAGTQAQSWRTPEDETLGALAGVHGRAVLGDSRMASFWPGSLLEL

SEQ ID NO: 39862 - protein, 36 aa, Homo sapiens
  MAP TO AC001237.1; EXPRESSED IN LUNG, SIGNAL = 1.4; EXPRESSED IN FETAL LIVER, SIGNAL = 1.2; EXPRESSED IN BRAIN, SIGNAL = 1.5; EXPRESSED IN BONE MARROW, SIGNAL = 1.2; EXPRESSED IN ADULT LIVER, SIGNAL = 1.3; EXPRESSED IN PLACENTA, SIGNAL = 1.2; EXPRESSED IN HEART, SIGNAL = 1.6; EST_HUMAN HIT: AI955237.1, EVALUE 8.00e-06
PGGAVSPGDHVLEVSGTRGTCGCRPRRHAGPELAHS

SEQ ID NO: 39863 - protein, 26 aa, Homo sapiens
  MAP TO AC006070.1; EXPRESSED IN BONE MARROW, SIGNAL = 3.7; EXPRESSED IN ADULT LIVER, SIGNAL = 3.1; EXPRESSED IN HELA, SIGNAL = 3.5; EXPRESSED IN HEART, SIGNAL = 2.9; EXPRESSED IN FETAL LIVER, SIGNAL = 3.5; EXPRESSED IN BRAIN, SIGNAL = 2.9; EXPRESSED IN PLACENTA, SIGNAL = 3.1; EXPRESSED IN LUNG, SIGNAL =   4
GHSGGLPAGCPAAGGPAACRLTARGT

SEQ ID NO: 39864 - protein, 85 aa, Homo sapiens
  MAP TO AC006070.1; EXPRESSED IN BONE MARROW, SIGNAL = 3.7; EXPRESSED IN ADULT LIVER, SIGNAL = 3.1; EXPRESSED IN HELA, SIGNAL = 3.5; EXPRESSED IN HEART, SIGNAL = 2.9; EXPRESSED IN FETAL LIVER, SIGNAL = 3.5; EXPRESSED IN BRAIN, SIGNAL = 2.9; EXPRESSED IN PLACENTA, SIGNAL = 3.1; EXPRESSED IN LUNG, SIGNAL =   4
CSPCCQPTCCRTTCCRTTCWKPTTVTTCSSTPCCQPSCCVPSCCQPCCHPTCCQNTCCRTTCCQPTCVASCCQPSCCSTPCCQPT

SEQ ID NO: 39865 - protein, 39 aa, Homo sapiens
  MAP TO AC005878.2; EXPRESSED IN BRAIN, SIGNAL = 8.7; EXPRESSED IN PLACENTA, SIGNAL = 8.2; EXPRESSED IN LUNG, SIGNAL = 8.7; EXPRESSED IN HEART, SIGNAL = 7.7; EXPRESSED IN BONE MARROW, SIGNAL = 7.2; EXPRESSED IN ADULT LIVER, SIGNAL = 8.4; EXPRESSED IN HELA, SIGNAL = 7.4; EXPRESSED IN FETAL LIVER, SIGNAL = 8.1
VSEAVEVDEWEVCFEEANCQDSFAIQVLLLLAWAVYNLS

SEQ ID NO: 39866 - protein, 54 aa, Homo sapiens
  MAP TO AC005529.7; EXPRESSED IN PLACENTA, SIGNAL = 8.2; EXPRESSED IN ADULT LIVER, SIGNAL = 7.3; EXPRESSED IN LUNG, SIGNAL =   9; EXPRESSED IN HEART, SIGNAL = 7.1; EXPRESSED IN FETAL LIVER, SIGNAL = 7.1; EXPRESSED IN BRAIN, SIGNAL = 8.3; EXPRESSED IN HELA, SIGNAL =   9; EXPRESSED IN BONE MARROW, SIGNAL = 5.6; EST_HUMAN HIT: AW503508.1, EVALUE 4.00e-24; SWISSPROT HIT: P35240, EVALUE 4.00e-25
VEYMEKSKHLQEQLNELKTEIEALKLKERETALDILHNENSDRGGSSKHNTIKK

SEQ ID NO: 39867 - protein, 23 aa, Homo sapiens
  MAP TO AC005529.7; EXPRESSED IN PLACENTA, SIGNAL = 8.2; EXPRESSED IN ADULT LIVER, SIGNAL = 7.3; EXPRESSED IN LUNG, SIGNAL =   9; EXPRESSED IN HEART, SIGNAL = 7.1; EXPRESSED IN FETAL LIVER, SIGNAL = 7.1; EXPRESSED IN BRAIN, SIGNAL = 8.3; EXPRESSED IN HELA, SIGNAL =   9; EXPRESSED IN BONE MARROW, SIGNAL = 5.6; EST_HUMAN HIT: H55070.1, EVALUE 6.00e-07
WNTWKRASICRSSSMNSRQKSRP

SEQ ID NO: 39868 - protein, 37 aa, Homo sapiens
  MAP TO AC006078.1; EXPRESSED IN BRAIN, SIGNAL = 1.9; EXPRESSED IN ADULT LIVER, SIGNAL = 1.5; EXPRESSED IN LUNG, SIGNAL = 1.9; EXPRESSED IN FETAL LIVER, SIGNAL = 1.7; EXPRESSED IN BONE MARROW, SIGNAL = 1.9; EXPRESSED IN HEART, SIGNAL = 1.7; EXPRESSED IN HELA, SIGNAL = 1.8; EXPRESSED IN PLACENTA, SIGNAL = 1.5; SWISSPROT HIT: P02074, EVALUE 6.40e+00; EST_HUMAN HIT: BF240853.1, EVALUE 9.60e+00
MVTSQQLLKCTSVPWTQSCFNHFGHMDQQGRGYFCAR

SEQ ID NO: 39869 - protein, 51 aa, Homo sapiens
  MAP TO AC004253.1; EXPRESSED IN BONE MARROW, SIGNAL =   2; EXPRESSED IN PLACENTA, SIGNAL =   2; EXPRESSED IN LUNG, SIGNAL = 2.3; EXPRESSED IN HELA, SIGNAL = 2.2; EXPRESSED IN FETAL LIVER, SIGNAL = 2.3; EXPRESSED IN ADULT LIVER, SIGNAL = 2.4; EXPRESSED IN HEART, SIGNAL = 1.9; EXPRESSED IN BRAIN, SIGNAL = 2.1
DDDDDDDDDDDDKSQYSLSVPVSQCFTCFNSFDPPNCLERQELLSPSFYQD

SEQ ID NO: 39870 - protein, 34 aa, Homo sapiens
  MAP TO AC005900.1; EXPRESSED IN PLACENTA, SIGNAL = 2.4; EXPRESSED IN LUNG, SIGNAL = 2.1; EXPRESSED IN HEART, SIGNAL =   2; EXPRESSED IN FETAL LIVER, SIGNAL =   2; EXPRESSED IN BRAIN, SIGNAL = 1.9; EXPRESSED IN BONE MARROW, SIGNAL = 2.1; EXPRESSED IN ADULT LIVER, SIGNAL = 1.9; EXPRESSED IN HELA, SIGNAL = 1.8
SFHVIGLLSLLYVVFWDSTGLLVSTASELKRAAT

SEQ ID NO: 39871 - protein, 33 aa, Homo sapiens
  MAP TO AC005900.1; EXPRESSED IN PLACENTA, SIGNAL = 2.4; EXPRESSED IN LUNG, SIGNAL = 2.1; EXPRESSED IN HEART, SIGNAL =   2; EXPRESSED IN FETAL LIVER, SIGNAL =   2; EXPRESSED IN BRAIN, SIGNAL = 1.9; EXPRESSED IN BONE MARROW, SIGNAL = 2.1; EXPRESSED IN ADULT LIVER, SIGNAL = 1.9; EXPRESSED IN HELA, SIGNAL = 1.8
LLLSLAQMLLKPATLCCPRTQHTTVKEDLLHGK

SEQ ID NO: 39872 - protein, 63 aa, Homo sapiens
  MAP TO AC004382.1; EXPRESSED IN BONE MARROW, SIGNAL = 8.6; EXPRESSED IN PLACENTA, SIGNAL = 8.5; EXPRESSED IN LUNG, SIGNAL =  11; EXPRESSED IN HELA, SIGNAL = 8.8; EXPRESSED IN HEART, SIGNAL =   8; EXPRESSED IN FETAL LIVER, SIGNAL = 8.9; EXPRESSED IN ADULT LIVER, SIGNAL =  11; EXPRESSED IN BRAIN, SIGNAL = 8.8; SWISSPROT HIT: Q92213, EVALUE 1.50e+00; EST_HUMAN HIT: H50580.1, EVALUE 3.40e+00
DENNSSLLNNYVLGAQLSHGHVNNLRDPVNISFWHNQSLVLLGAPPFPLHPCPSVTLLLNTGL

SEQ ID NO: 39873 - protein, 55 aa, Homo sapiens
  MAP TO AC005906.1; EXPRESSED IN HELA, SIGNAL = 2.9; EXPRESSED IN HEART, SIGNAL = 4.3; EXPRESSED IN BONE MARROW, SIGNAL = 3.4; EXPRESSED IN PLACENTA, SIGNAL =   3; EXPRESSED IN LUNG, SIGNAL = 4.8; EXPRESSED IN FETAL LIVER, SIGNAL = 3.3; EXPRESSED IN BRAIN, SIGNAL = 3.2; EXPRESSED IN ADULT LIVER, SIGNAL = 3.3; SWISSPROT HIT: P18625, EVALUE 4.60e+00; EST_HUMAN HIT: BE621832.1, EVALUE 2.80e+00
SDHKAIRPQAFKSGYPGVEGPVVVSTLSHISPGSSVENQPTTLLPGTCIAENCLL

SEQ ID NO: 39874 - protein, 33 aa, Homo sapiens
  MAP TO AC006101.2; EXPRESSED IN LUNG, SIGNAL = 2.6; EXPRESSED IN BRAIN, SIGNAL = 2.2; EXPRESSED IN HELA, SIGNAL = 2.5; EXPRESSED IN FETAL LIVER, SIGNAL = 2.3; EXPRESSED IN ADULT LIVER, SIGNAL = 2.2; EXPRESSED IN BONE MARROW, SIGNAL = 2.2; EXPRESSED IN HEART, SIGNAL = 2.2; EXPRESSED IN PLACENTA, SIGNAL = 2.1; SWISSPROT HIT: P33176, EVALUE 9.00e-14; EST_HUMAN HIT: BE902707.1, EVALUE 1.00e-12
MADLAECNIKVMCRFRPLNESEVNRGDKYIAKF

SEQ ID NO: 39875 - protein, 20 aa, Homo sapiens
  MAP TO AC006101.2; EXPRESSED IN LUNG, SIGNAL = 2.6; EXPRESSED IN BRAIN, SIGNAL = 2.2; EXPRESSED IN HELA, SIGNAL = 2.5; EXPRESSED IN FETAL LIVER, SIGNAL = 2.3; EXPRESSED IN ADULT LIVER, SIGNAL = 2.2; EXPRESSED IN BONE MARROW, SIGNAL = 2.2; EXPRESSED IN HEART, SIGNAL = 2.2; EXPRESSED IN PLACENTA, SIGNAL = 2.1; EST_HUMAN HIT: BE386513.1, EVALUE 5.00e-04
GGPGRVQHQSDVSLQTSQRV

SEQ ID NO: 39876 - protein, 49 aa, Homo sapiens
  MAP TO AC006010.2; EXPRESSED IN LUNG, SIGNAL = 5.3; EXPRESSED IN FETAL LIVER, SIGNAL = 4.5; EXPRESSED IN BRAIN, SIGNAL = 4.7; EXPRESSED IN ADULT LIVER, SIGNAL =   5; EXPRESSED IN PLACENTA, SIGNAL = 4.6; EXPRESSED IN BONE MARROW, SIGNAL = 4.1; EXPRESSED IN HEART, SIGNAL = 3.7; EXPRESSED IN HELA, SIGNAL = 4.9
VLETLVCKIMPLRLFVFQSSFIASSPQTTNILLLLKLVQNRTERTRLAG

SEQ ID NO: 39877 - protein, 36 aa, Homo sapiens
  MAP TO AC005912.1; EXPRESSED IN LUNG, SIGNAL = 2.7; EXPRESSED IN BRAIN, SIGNAL = 2.8; EXPRESSED IN PLACENTA, SIGNAL = 2.9; EXPRESSED IN HEART, SIGNAL = 2.6; EXPRESSED IN FETAL LIVER, SIGNAL = 3.5; EXPRESSED IN BONE MARROW, SIGNAL = 2.8; EXPRESSED IN ADULT LIVER, SIGNAL = 2.9; EXPRESSED IN HELA, SIGNAL = 2.7
IRNWGEGVASSLQRGENRESCLINWRGKSSLYINDS

SEQ ID NO: 39878 - protein, 32 aa, Homo sapiens
  MAP TO AC004414.1; EXPRESSED IN PLACENTA, SIGNAL =   5; EXPRESSED IN HELA, SIGNAL = 4.9; EXPRESSED IN HEART, SIGNAL = 4.8; EXPRESSED IN FETAL LIVER, SIGNAL = 4.9; EXPRESSED IN ADULT LIVER, SIGNAL = 5.6; EXPRESSED IN LUNG, SIGNAL = 5.7; EXPRESSED IN BRAIN, SIGNAL = 5.7; EXPRESSED IN BONE MARROW, SIGNAL = 4.9
KSSLSSKDEEEEEEEEEGEGQEEVSVASLMTK

SEQ ID NO: 39879 - protein, 45 aa, Homo sapiens
  MAP TO AC006015.2; EXPRESSED IN LUNG, SIGNAL =  90; EXPRESSED IN BRAIN, SIGNAL =  13; EXPRESSED IN HELA, SIGNAL =  14; EXPRESSED IN ADULT LIVER, SIGNAL =  11; EXPRESSED IN BONE MARROW, SIGNAL =  13; EXPRESSED IN FETAL LIVER, SIGNAL =  12; EXPRESSED IN HEART, SIGNAL =  11; EXPRESSED IN PLACENTA, SIGNAL =  13; EST_HUMAN HIT: AA077325.1, EVALUE 4.00e-08
RAATLEEGNPTDEVPSTPLALEPSSTPGSKKSPPEPVDKRAKAPK

SEQ ID NO: 39880 - protein, 69 aa, Homo sapiens
  MAP TO AC006142.1; EXPRESSED IN LUNG, SIGNAL = 7.3; EXPRESSED IN BRAIN, SIGNAL =  11; EXPRESSED IN ADULT LIVER, SIGNAL =  12; EXPRESSED IN BONE MARROW, SIGNAL = 8.5; EXPRESSED IN FETAL LIVER, SIGNAL =  19; EXPRESSED IN HEART, SIGNAL = 6.4; EXPRESSED IN HELA, SIGNAL = 8.6; EXPRESSED IN PLACENTA, SIGNAL = 8.5; SWISSPROT HIT: P13716, EVALUE 5.10e-01; EST_HUMAN HIT: AW449116.1, EVALUE 5.50e+00
ELKTREGEETQRLPQGKMRQQAGADSVEQALLGGAETIVEVLPSLQMLPLVRKVREKHPDILLFPAAPV

SEQ ID NO: 39881 - protein, 104 aa, Homo sapiens
  MAP TO AC006097.1; EXPRESSED IN BONE MARROW, SIGNAL =   2; EXPRESSED IN PLACENTA, SIGNAL = 1.7; EXPRESSED IN LUNG, SIGNAL = 2.2; EXPRESSED IN HELA, SIGNAL =   2; EXPRESSED IN FETAL LIVER, SIGNAL = 1.8; EXPRESSED IN ADULT LIVER, SIGNAL = 2.1; EXPRESSED IN HEART, SIGNAL = 6.7; EXPRESSED IN BRAIN, SIGNAL =   2; SWISSPROT HIT: gi127998, EVALUE 7.00e-20; EST_HUMAN HIT: AA195854.1, EVALUE 1.00e-23
VKYKEDYERSRGKLIGAKDVQGDSQMSHSLQMSKLQSELEYKKGFEDTKSQCHVSLDMVHLVHARKAQHLATDVGYKTAEHHFTALPTDMKVEWAKKAYGLQSD

SEQ ID NO: 39882 - protein, 23 aa, Homo sapiens
  MAP TO AC006097.1; EXPRESSED IN BONE MARROW, SIGNAL =   2; EXPRESSED IN PLACENTA, SIGNAL = 1.7; EXPRESSED IN LUNG, SIGNAL = 2.2; EXPRESSED IN HELA, SIGNAL =   2; EXPRESSED IN FETAL LIVER, SIGNAL = 1.8; EXPRESSED IN ADULT LIVER, SIGNAL = 2.1; EXPRESSED IN HEART, SIGNAL = 6.7; EXPRESSED IN BRAIN, SIGNAL =   2
HWGKRCTGRFANEPLTANVQAAE

SEQ ID NO: 39883 - protein, 39 aa, Homo sapiens
  MAP TO AC005922.1; EXPRESSED IN FETAL LIVER, SIGNAL = 1.4; EXPRESSED IN BONE MARROW, SIGNAL = 1.4; EXPRESSED IN ADULT LIVER, SIGNAL = 1.4; EXPRESSED IN PLACENTA, SIGNAL = 1.7; EXPRESSED IN LUNG, SIGNAL = 1.5; EXPRESSED IN HEART, SIGNAL = 1.7; EXPRESSED IN BRAIN, SIGNAL = 1.7
ALSLNFWNIYSTSHIRKVTRGNCLQIHTSSHQDNNHRIL

SEQ ID NO: 39884 - protein, 55 aa, Homo sapiens
  MAP TO AC006115.1; EXPRESSED IN LUNG, SIGNAL = 5.3; EXPRESSED IN HELA, SIGNAL = 4.9; EXPRESSED IN BONE MARROW, SIGNAL = 4.8; EXPRESSED IN ADULT LIVER, SIGNAL = 4.4; EXPRESSED IN PLACENTA, SIGNAL = 4.2; EXPRESSED IN HEART, SIGNAL = 4.2; EXPRESSED IN FETAL LIVER, SIGNAL = 4.9; EXPRESSED IN BRAIN, SIGNAL = 5.6; SWISSPROT HIT: O43309, EVALUE 5.00e-12; EST_HUMAN HIT: BE513403.1, EVALUE 2.00e-10
PETRTKEEIIELLVLEQYLTIIPEKLKPWVRAKKPENCEKLVTLLENYKEMYQPE

SEQ ID NO: 39885 - protein, 25 aa, Homo sapiens
  MAP TO AC006115.1; EXPRESSED IN LUNG, SIGNAL = 5.3; EXPRESSED IN HELA, SIGNAL = 4.9; EXPRESSED IN BONE MARROW, SIGNAL = 4.8; EXPRESSED IN ADULT LIVER, SIGNAL = 4.4; EXPRESSED IN PLACENTA, SIGNAL = 4.2; EXPRESSED IN HEART, SIGNAL = 4.2; EXPRESSED IN FETAL LIVER, SIGNAL = 4.9; EXPRESSED IN BRAIN, SIGNAL = 5.6
SASIGCSRRPAPRRRSSSSWSLSST

SEQ ID NO: 39886 - protein, 44 aa, Homo sapiens
  MAP TO AC004129.1; EXPRESSED IN PLACENTA, SIGNAL = 4.3; EXPRESSED IN LUNG, SIGNAL = 2.3; EXPRESSED IN FETAL LIVER, SIGNAL =   6; EXPRESSED IN BRAIN, SIGNAL = 2.8; EXPRESSED IN ADULT LIVER, SIGNAL = 5.7; EXPRESSED IN HELA, SIGNAL = 3.3; EXPRESSED IN HEART, SIGNAL = 2.6; EXPRESSED IN BONE MARROW, SIGNAL = 4.7
YYDNDLEKYTKEKKCIDSGTNFSVRKMKGQCSPNCDRQNEMDKE

SEQ ID NO: 39887 - protein, 30 aa, Homo sapiens
  MAP TO AC006144.1; EXPRESSED IN PLACENTA, SIGNAL = 3.6; EXPRESSED IN LUNG, SIGNAL = 2.1; EXPRESSED IN HELA, SIGNAL =   2; EXPRESSED IN FETAL LIVER, SIGNAL = 1.8; EXPRESSED IN BONE MARROW, SIGNAL = 2.5; EXPRESSED IN ADULT LIVER, SIGNAL =   2; EXPRESSED IN HEART, SIGNAL = 1.6; EXPRESSED IN BRAIN, SIGNAL = 1.9; EST_HUMAN HIT: AA435668.1, EVALUE 3.00e-07
TIKLQMIMQKRFHPVLGEDTTPGHQEATLP

SEQ ID NO: 39888 - protein, 92 aa, Homo sapiens
  MAP TO AC004522.1; EXPRESSED IN BONE MARROW, SIGNAL = 7.2; EXPRESSED IN PLACENTA, SIGNAL = 6.5; EXPRESSED IN LUNG, SIGNAL =  11; EXPRESSED IN HELA, SIGNAL = 7.2; EXPRESSED IN FETAL LIVER, SIGNAL = 8.9; EXPRESSED IN ADULT LIVER, SIGNAL =  14; EXPRESSED IN HEART, SIGNAL = 7.6; EXPRESSED IN BRAIN, SIGNAL =   8; SWISSPROT HIT: P25311, EVALUE 9.00e-48; EST_HUMAN HIT: W95318.1, EVALUE 8.00e-47
PPSVVVTSHQAPGEKKKLKCLAYDFYPGKIDVHWTRAGEVQEPELRGDVLHGGNGTYLTWLLVHVPPQDTAPYSCHVQHSSLAQPLVVPGEA

SEQ ID NO: 39889 - protein, 64 aa, Homo sapiens
  MAP TO AC004775.1; EXPRESSED IN PLACENTA, SIGNAL = 3.6; EXPRESSED IN HELA, SIGNAL = 3.4; EXPRESSED IN BRAIN, SIGNAL = 6.9; EXPRESSED IN ADULT LIVER, SIGNAL = 3.7; EXPRESSED IN HEART, SIGNAL = 3.2; EXPRESSED IN LUNG, SIGNAL =   4; EXPRESSED IN FETAL LIVER, SIGNAL = 3.4; EXPRESSED IN BONE MARROW, SIGNAL = 3.5; SWISSPROT HIT: Q92599, EVALUE 2.00e-19; EST_HUMAN HIT: BE748158.1, EVALUE 2.00e-18
LHEKFEHLKRVHQEEKRKVEEKRRELEEETNAFNRRKAAVEALQSQALHATSQQPLRKDKDKKK

SEQ ID NO: 39890 - protein, 45 aa, Homo sapiens
  MAP TO AC005940.3; EXPRESSED IN PLACENTA, SIGNAL = 5.8; EXPRESSED IN LUNG, SIGNAL = 7.8; EXPRESSED IN HELA, SIGNAL = 9.6; EXPRESSED IN HEART, SIGNAL =  11; EXPRESSED IN FETAL LIVER, SIGNAL = 8.2; EXPRESSED IN ADULT LIVER, SIGNAL = 9.5; EXPRESSED IN BRAIN, SIGNAL = 8.5; EXPRESSED IN BONE MARROW, SIGNAL = 6.8; SWISSPROT HIT: P51575, EVALUE 8.00e-19; EST_HUMAN HIT: AU118048.1, EVALUE 4.00e-08
MARRFQEELAAFLFEYDTPRMVLVRNKKVGVIFRLIQLVVLVYVI

SEQ ID NO: 39891 - protein, 28 aa, Homo sapiens
  MAP TO AC005940.3; EXPRESSED IN PLACENTA, SIGNAL = 5.8; EXPRESSED IN LUNG, SIGNAL = 7.8; EXPRESSED IN HELA, SIGNAL = 9.6; EXPRESSED IN HEART, SIGNAL =  11; EXPRESSED IN FETAL LIVER, SIGNAL = 8.2; EXPRESSED IN ADULT LIVER, SIGNAL = 9.5; EXPRESSED IN BRAIN, SIGNAL = 8.5; EXPRESSED IN BONE MARROW, SIGNAL = 6.8
RSWPPSSSSMTPPAWCWCVIRRWALSSD

SEQ ID NO: 39892 - protein, 68 aa, Homo sapiens
  MAP TO AC005895.1; EXPRESSED IN FETAL LIVER, SIGNAL = 1.6; EXPRESSED IN BONE MARROW, SIGNAL = 1.6; EXPRESSED IN PLACENTA, SIGNAL = 1.5; EXPRESSED IN LUNG, SIGNAL = 1.7; EXPRESSED IN HEART, SIGNAL = 1.8; EXPRESSED IN BRAIN, SIGNAL = 1.9; EXPRESSED IN ADULT LIVER, SIGNAL = 1.7; SWISSPROT HIT: Q99884, EVALUE 5.00e-26; EST_HUMAN HIT: AW190954.1, EVALUE 5.60e+00
RLQQASRPAMDWGPSLEENRTGMYVATLAGSQSPKPLMVHMRKYGGITSFENTAIEVDREIAEEEESM

SEQ ID NO: 39893 - protein, 29 aa, Homo sapiens
  MAP TO AC005895.1; EXPRESSED IN FETAL LIVER, SIGNAL = 1.6; EXPRESSED IN BONE MARROW, SIGNAL = 1.6; EXPRESSED IN PLACENTA, SIGNAL = 1.5; EXPRESSED IN LUNG, SIGNAL = 1.7; EXPRESSED IN HEART, SIGNAL = 1.8; EXPRESSED IN BRAIN, SIGNAL = 1.9; EXPRESSED IN ADULT LIVER, SIGNAL = 1.7; EST_HUMAN HIT: BE819571.1, EVALUE 2.00e+00
RPWTGDHRWRRTGRACMWPRWLGASHQSH

SEQ ID NO: 39894 - protein, 28 aa, Homo sapiens
  MAP TO AC004686.1; EXPRESSED IN LUNG, SIGNAL = 9.3; EXPRESSED IN HELA, SIGNAL =   8; EXPRESSED IN BONE MARROW, SIGNAL = 6.7; EXPRESSED IN ADULT LIVER, SIGNAL =  13; EXPRESSED IN PLACENTA, SIGNAL =   8; EXPRESSED IN HEART, SIGNAL =   9; EXPRESSED IN FETAL LIVER, SIGNAL = 7.1; EXPRESSED IN BRAIN, SIGNAL =  12; EST_HUMAN HIT: BF307002.1, EVALUE 2.00e-08
SSSEPPTQVLWRDHRLVPGTDYCKDTAL

SEQ ID NO: 39895 - protein, 27 aa, Homo sapiens
  MAP TO AC004787.1; EXPRESSED IN LUNG, SIGNAL = 1.2; EXPRESSED IN FETAL LIVER, SIGNAL = 0.9; EXPRESSED IN BRAIN, SIGNAL = 0.92; EXPRESSED IN BONE MARROW, SIGNAL = 0.98; EXPRESSED IN ADULT LIVER, SIGNAL = 0.98; EXPRESSED IN PLACENTA, SIGNAL = 0.94; EXPRESSED IN HEART, SIGNAL = 1.5
AAAERSPAMSKNTVIVTITITICTGQT

SEQ ID NO: 39896 - protein, 77 aa, Homo sapiens
  MAP TO AC004824.1; EXPRESSED IN PLACENTA, SIGNAL = 1.3; EXPRESSED IN LUNG, SIGNAL = 1.3; EXPRESSED IN FETAL LIVER, SIGNAL = 1.4; EXPRESSED IN BONE MARROW, SIGNAL = 1.5; EXPRESSED IN ADULT LIVER, SIGNAL = 1.4; EXPRESSED IN HEART, SIGNAL = 1.5; EXPRESSED IN BRAIN, SIGNAL = 1.5; EST_HUMAN HIT: AW467326.1, EVALUE 4.00e-14; SWISSPROT HIT: O88807, EVALUE 8.00e-16
LRMIVMGKNLGIPKPFGPQIKGTCCLEEKICCLLEPLGFKCTFINDFDCYLTEVGDICACANIRRVPFAFKWWKMVP

SEQ ID NO: 39897 - protein, 46 aa, Homo sapiens
  MAP TO AC004824.1; EXPRESSED IN PLACENTA, SIGNAL = 1.3; EXPRESSED IN LUNG, SIGNAL = 1.3; EXPRESSED IN FETAL LIVER, SIGNAL = 1.4; EXPRESSED IN BONE MARROW, SIGNAL = 1.5; EXPRESSED IN ADULT LIVER, SIGNAL = 1.4; EXPRESSED IN HEART, SIGNAL = 1.5; EXPRESSED IN BRAIN, SIGNAL = 1.5; EST_HUMAN HIT: BE563328.1, EVALUE 7.00e-04; SWISSPROT HIT: Q59676, EVALUE 6.20e+00
TVADDCDGQEPGDPQAFWAPNQGDLLPGRKDLLLAGAPGLQVHLHQ

SEQ ID NO: 39898 - protein, 24 aa, Homo sapiens
  MAP TO AC002039.1; EXPRESSED IN PLACENTA, SIGNAL = 1.5; EXPRESSED IN HELA, SIGNAL = 1.8; EXPRESSED IN HEART, SIGNAL = 1.9; EXPRESSED IN ADULT LIVER, SIGNAL = 1.6; EXPRESSED IN BONE MARROW, SIGNAL = 1.5; EXPRESSED IN BRAIN, SIGNAL = 1.8; EXPRESSED IN FETAL LIVER, SIGNAL = 1.7; EXPRESSED IN LUNG, SIGNAL = 1.6; SWISSPROT HIT: P98161, EVALUE 2.00e-06; EST_HUMAN HIT: BF058389.1, EVALUE 3.00e-05
DVSHNLLRALDVGLLANLSALAEL

SEQ ID NO: 39899 - protein, 37 aa, Homo sapiens
  MAP TO AC005905.1; EXPRESSED IN PLACENTA, SIGNAL = 7.8; EXPRESSED IN BONE MARROW, SIGNAL = 7.9; EXPRESSED IN ADULT LIVER, SIGNAL =  10; EXPRESSED IN LUNG, SIGNAL = 9.7; EXPRESSED IN HELA, SIGNAL = 8.5; EXPRESSED IN HEART, SIGNAL = 8.9; EXPRESSED IN FETAL LIVER, SIGNAL = 8.8; EXPRESSED IN BRAIN, SIGNAL = 9.5; SWISSPROT HIT: Q95885, EVALUE 4.90e+00
GSLPLKMLTSASQQEAFLLQHHSPSAPTRLPHSAMLW

SEQ ID NO: 39900 - protein, 144 aa, Homo sapiens
  MAP TO AC006077.1; EXPRESSED IN PLACENTA, SIGNAL = 0.89; EXPRESSED IN LUNG, SIGNAL = 1.1; EXPRESSED IN FETAL LIVER, SIGNAL = 0.98; EXPRESSED IN BRAIN, SIGNAL = 0.86; EXPRESSED IN ADULT LIVER, SIGNAL = 0.88; EXPRESSED IN HEART, SIGNAL = 1.4; EXPRESSED IN BONE MARROW, SIGNAL = 0.81; EST_HUMAN HIT: AW956503.1, EVALUE 6.00e-64; SWISSPROT HIT: Q49619, EVALUE 6.30e+00
VGAVYLGEEELLHDPMGQDRAAEEANAVLGLDTQGDHMVMLSVIPGEAEDKVSSEPSGVTCGAGGAEDSRCNVRESLFSLDGAGAHFPDREEEYYTEPEVAESDAAPTEDSNNTESLKSPKVNCEERNITGLENFTLKILNMSQ

SEQ ID NO: 39901 - protein, 48 aa, Homo sapiens
  MAP TO AC004690.1; EXPRESSED IN PLACENTA, SIGNAL =  17; EXPRESSED IN LUNG, SIGNAL =  18; EXPRESSED IN HELA, SIGNAL =  19; EXPRESSED IN HEART, SIGNAL =  16; EXPRESSED IN FETAL LIVER, SIGNAL =  16; EXPRESSED IN ADULT LIVER, SIGNAL =  16; EXPRESSED IN BRAIN, SIGNAL =  17; EXPRESSED IN BONE MARROW, SIGNAL =  16; EST_HUMAN HIT: BE560219.1, EVALUE 6.00e-03; SWISSPROT HIT: P47050, EVALUE 8.10e+00
CVNEFFGYRYSLFFAYDQSEFNFFKLHFATSKEMANQFTVHHFIQVKK

SEQ ID NO: 39902 - protein, 95 aa, Homo sapiens
  MAP TO AC004801.1; EXPRESSED IN LUNG, SIGNAL = 2.6; EXPRESSED IN FETAL LIVER, SIGNAL = 3.3; EXPRESSED IN BONE MARROW, SIGNAL = 2.9; EXPRESSED IN PLACENTA, SIGNAL = 2.3; EXPRESSED IN HELA, SIGNAL = 2.5; EXPRESSED IN HEART, SIGNAL = 2.5; EXPRESSED IN BRAIN, SIGNAL = 2.5; EXPRESSED IN ADULT LIVER, SIGNAL = 2.3; EST_HUMAN HIT: AW371958.1, EVALUE 4.00e-41; SWISSPROT HIT: P02458, EVALUE 4.00e-42
FSYGDDNLAPNTANVQMTFLRLLSTEGSQNITYHCKNSIAYLDEAAGNLKKALLIQGSNDVEIRAEGNSRFTYTALKDGCTVSGAAREKSCLCPN

SEQ ID NO: 39903 - protein, 62 aa, Homo sapiens
  MAP TO AC005909.1; EXPRESSED IN ADULT LIVER, SIGNAL = 6.6; EXPRESSED IN PLACENTA, SIGNAL = 6.5; EXPRESSED IN LUNG, SIGNAL = 8.5; EXPRESSED IN HELA, SIGNAL = 6.3; EXPRESSED IN HEART, SIGNAL = 6.2; EXPRESSED IN BRAIN, SIGNAL =   7; EXPRESSED IN BONE MARROW, SIGNAL = 5.5; EXPRESSED IN FETAL LIVER, SIGNAL = 5.3; SWISSPROT HIT: P33983, EVALUE 7.80e+00; EST_HUMAN HIT: AV700489.1, EVALUE 7.80e+00
TQGIMNRKDVSLLVEHLTAFPFFTLLKQHSREYLDLGGQRAADLLSELATNVLHEQEINLCF

SEQ ID NO: 39904 - protein, 62 aa, Homo sapiens
  MAP TO AC004666.7; EXPRESSED IN LUNG, SIGNAL = 9.2; EXPRESSED IN HELA, SIGNAL = 8.1; EXPRESSED IN FETAL LIVER, SIGNAL = 7.4; EXPRESSED IN BRAIN, SIGNAL = 8.2; EXPRESSED IN BONE MARROW, SIGNAL = 8.8; EXPRESSED IN ADULT LIVER, SIGNAL = 8.4; EXPRESSED IN PLACENTA, SIGNAL =   8; EXPRESSED IN HEART, SIGNAL = 6.6; EST_HUMAN HIT: R67241.1, EVALUE 4.00e-30; SWISSPROT HIT: Q64398, EVALUE 2.00e-02
QGYEAYEDLPKGIRGNRWKAGLTIVTPERRFVLTCPSEKEQQEWLESLRGVLSSPLTPLNRL

SEQ ID NO: 39905 - protein, 38 aa, Homo sapiens
  MAP TO AC005971.5; EXPRESSED IN PLACENTA, SIGNAL = 1.9; EXPRESSED IN LUNG, SIGNAL = 2.2; EXPRESSED IN HELA, SIGNAL = 1.8; EXPRESSED IN FETAL LIVER, SIGNAL = 1.9; EXPRESSED IN BRAIN, SIGNAL = 1.9; EXPRESSED IN ADULT LIVER, SIGNAL =   2; EXPRESSED IN HEART, SIGNAL = 1.8; EXPRESSED IN BONE MARROW, SIGNAL = 2.1
YRSSHLEVSQASQLLQQQQQQQLRRRPSLLSEFHPGSD

SEQ ID NO: 39906 - protein, 103 aa, Homo sapiens [sequence omitted]

SEQ ID NO: 39907 - protein, 32 aa, Homo sapiens
  MAP TO AC000003.1; EXPRESSED IN ADULT LIVER, SIGNAL = 4.3; EXPRESSED IN PLACENTA, SIGNAL = 4.3; EXPRESSED IN LUNG, SIGNAL = 3.6; EXPRESSED IN HEART, SIGNAL = 4.7; EXPRESSED IN BRAIN, SIGNAL = 4.3; EXPRESSED IN HELA, SIGNAL = 3.8; EXPRESSED IN FETAL LIVER, SIGNAL = 6.1; EXPRESSED IN BONE MARROW, SIGNAL = 4.1
LILQAQDHFAVLKHLGRAGDNLHLATESLAVI

SEQ ID NO: 39908 - protein, 65 aa, Homo sapiens
  MAP TO AC004812.1; EXPRESSED IN LUNG, SIGNAL = 1.5; EXPRESSED IN PLACENTA, SIGNAL = 1.3; EXPRESSED IN HEART, SIGNAL = 1.5; EXPRESSED IN FETAL LIVER, SIGNAL = 1.4; EXPRESSED IN BRAIN, SIGNAL = 1.4; EXPRESSED IN BONE MARROW, SIGNAL = 1.2; EXPRESSED IN HELA, SIGNAL = 1.8; EXPRESSED IN ADULT LIVER, SIGNAL = 1.5; EST_HUMAN HIT: AW503913.1, EVALUE 1.00e-29; SWISSPROT HIT: P33892, EVALUE 4.00e-08
ENVNSLLPVFEEFLKNAPNDASYDAVRQSVVVLMGSLAKHLDKSDPKVKPIVAKLIAALSTPSQQ

SEQ ID NO: 39909 - protein, 18 aa, Homo sapiens
  MAP TO AC004812.1; EXPRESSED IN LUNG, SIGNAL = 1.5; EXPRESSED IN PLACENTA, SIGNAL = 1.3; EXPRESSED IN HEART, SIGNAL = 1.5; EXPRESSED IN FETAL LIVER, SIGNAL = 1.4; EXPRESSED IN BRAIN, SIGNAL = 1.4; EXPRESSED IN BONE MARROW, SIGNAL = 1.2; EXPRESSED IN HELA, SIGNAL = 1.8; EXPRESSED IN ADULT LIVER, SIGNAL = 1.5; EST_HUMAN HIT: AW503913.1, EVALUE 4.90e-02
ERQLAVASIRGVPEERAQ

SEQ ID NO: 39910 - protein, 27 aa, Homo sapiens
  MAP TO AC005996.2; EXPRESSED IN LUNG, SIGNAL = 2.2; EXPRESSED IN HELA, SIGNAL = 2.1; EXPRESSED IN BRAIN, SIGNAL = 1.8; EXPRESSED IN BONE MARROW, SIGNAL = 2.1; EXPRESSED IN ADULT LIVER, SIGNAL = 2.1; EXPRESSED IN PLACENTA, SIGNAL = 2.2; EXPRESSED IN HEART, SIGNAL = 1.7; EXPRESSED IN FETAL LIVER, SIGNAL = 2.3; EST_HUMAN HIT: W70301.1, EVALUE 3.00e-08; SWISSPROT HIT: Q15382, EVALUE 2.00e-09
DEYSIFPQTYSIDINGYILVYSVTSIK

SEQ ID NO: 39911 - protein, 69 aa, Homo sapiens
  MAP TO AC002094.1; EXPRESSED IN LUNG, SIGNAL = 1.9; EXPRESSED IN HELA, SIGNAL = 1.7; EXPRESSED IN BONE MARROW, SIGNAL = 1.9; EXPRESSED IN ADULT LIVER, SIGNAL =   2; EXPRESSED IN PLACENTA, SIGNAL = 1.9; EXPRESSED IN HEART, SIGNAL = 1.8; EXPRESSED IN FETAL LIVER, SIGNAL =   2; EXPRESSED IN BRAIN, SIGNAL = 1.8; EST_HUMAN HIT: AA442569.1, EVALUE 3.00e-14; SWISSPROT HIT: O43525, EVALUE 3.70e+00
GEAGLHFDELNKLRVLDPEVTQQTIELKEECKDFVDSEYWGDTVPLSFELPFQLYPRLILALPQWSCWL

SEQ ID NO: 39912 - protein, 31 aa, Homo sapiens
  MAP TO AC004877.1; EXPRESSED IN PLACENTA, SIGNAL = 2.1; EXPRESSED IN LUNG, SIGNAL = 2.4; EXPRESSED IN HELA, SIGNAL = 2.2; EXPRESSED IN HEART, SIGNAL = 2.2; EXPRESSED IN FETAL LIVER, SIGNAL = 1.9; EXPRESSED IN BRAIN, SIGNAL = 2.4; EXPRESSED IN BONE MARROW, SIGNAL = 2.3; EXPRESSED IN ADULT LIVER, SIGNAL = 2.1; EST_HUMAN HIT: AA080867.1, EVALUE 2.00e-08
WPCALFWGSCILPLTVKYKTCLWLKDISRIS

SEQ ID NO: 39913 - protein, 64 aa, Homo sapiens
  MAP TO AC006101.2; EXPRESSED IN PLACENTA, SIGNAL = 5.7; EXPRESSED IN HELA, SIGNAL = 4.9; EXPRESSED IN BRAIN, SIGNAL = 5.2; EXPRESSED IN BONE MARROW, SIGNAL = 5.3; EXPRESSED IN ADULT LIVER, SIGNAL = 5.6; EXPRESSED IN HEART, SIGNAL = 5.6; EXPRESSED IN LUNG, SIGNAL = 6.1; EXPRESSED IN FETAL LIVER, SIGNAL = 5.8; EST_HUMAN HIT: AA113037.1, EVALUE 1.00e-30; SWISSPROT HIT: P33176, EVALUE 1.00e-31
ETVPIDEQFDKEKANLEAFTVDKDITLTNDKPATAIGVIGNFTDAERRKCEEEIAKLYKQLDDK

SEQ ID NO: 39914 - protein, 45 aa, Homo sapiens
  MAP TO AC004817.1; EXPRESSED IN PLACENTA, SIGNAL = 7.9; EXPRESSED IN LUNG, SIGNAL = 8.7; EXPRESSED IN FETAL LIVER, SIGNAL = 7.4; EXPRESSED IN BONE MARROW, SIGNAL = 8.2; EXPRESSED IN ADULT LIVER, SIGNAL = 8.1; EXPRESSED IN HELA, SIGNAL = 8.5; EXPRESSED IN HEART, SIGNAL = 7.9; EXPRESSED IN BRAIN, SIGNAL = 8.9; EST_HUMAN HIT: AA442230.1, EVALUE 8.00e-20; SWISSPROT HIT: P73141, EVALUE 2.80e+00
MADSVSPWITLSKIVFSLLLSKLQFCSGICPPADPAPAQEVGGGQ

SEQ ID NO: 39915 - protein, 62 aa, Homo sapiens
  MAP TO AC002115.1; EXPRESSED IN BONE MARROW, SIGNAL =  11; EXPRESSED IN PLACENTA, SIGNAL =   9; EXPRESSED IN LUNG, SIGNAL =  11; EXPRESSED IN HELA, SIGNAL =  13; EXPRESSED IN HEART, SIGNAL =  14; EXPRESSED IN FETAL LIVER, SIGNAL =  17; EXPRESSED IN ADULT LIVER, SIGNAL =  14; EXPRESSED IN BRAIN, SIGNAL = 3.7
MALKPPSATQPAPNAPATPDAPPTTGDPGASAAPGSPTTTGGPGAPAEVPQEPQEPTQTPEE

SEQ ID NO: 39916 - protein, 33 aa, Homo sapiens
  MAP TO AC004844.1; EXPRESSED IN BONE MARROW, SIGNAL = 1.9; EXPRESSED IN PLACENTA, SIGNAL = 1.6; EXPRESSED IN LUNG, SIGNAL = 1.9; EXPRESSED IN HEART, SIGNAL = 1.6; EXPRESSED IN FETAL LIVER, SIGNAL = 1.8; EXPRESSED IN BRAIN, SIGNAL =   2; EXPRESSED IN ADULT LIVER, SIGNAL = 1.6
VMKETIEKATLGLMGKATLRKQYLTQDLEAENL

SEQ ID NO: 39917 - protein, 58 aa, Homo sapiens
  MAP TO AC002069.1; EXPRESSED IN PLACENTA, SIGNAL = 6.4; EXPRESSED IN LUNG, SIGNAL = 6.3; EXPRESSED IN HEART, SIGNAL = 5.8; EXPRESSED IN BRAIN, SIGNAL = 6.5; EXPRESSED IN ADULT LIVER, SIGNAL = 8.3; EXPRESSED IN FETAL LIVER, SIGNAL = 7.8; EXPRESSED IN BONE MARROW, SIGNAL = 6.2; EXPRESSED IN HELA, SIGNAL = 5.7; EST_HUMAN HIT: BE791082.1, EVALUE 2.00e-10; SWISSPROT HIT: Q02771, EVALUE 1.00e-01
WEKEALEAGTEMSRSLKALLGLSVVMLMAATVASMHLEQWQDQQRLHDGVIRDTERQN

SEQ ID NO: 39918 - protein, 54 aa, Homo sapiens
  MAP TO AC004685.1; EXPRESSED IN LUNG, SIGNAL = 2.1; EXPRESSED IN PLACENTA, SIGNAL = 2.3; EXPRESSED IN HEART, SIGNAL =   2; EXPRESSED IN FETAL LIVER, SIGNAL = 1.9; EXPRESSED IN BRAIN, SIGNAL = 2.1; EXPRESSED IN BONE MARROW, SIGNAL = 2.3; EXPRESSED IN ADULT LIVER, SIGNAL = 2.3; EXPRESSED IN HELA, SIGNAL = 2.3; EST_HUMAN HIT: AW009277.1, EVALUE 2.00e-09; SWISSPROT HIT: Q45757, EVALUE 6.10e+00
MQEIPQEQIKEIKKEQLSGSPWILLRENEVSTLYKGEYHRAPVAIKVFKKLQAG

SEQ ID NO: 39919 - protein, 27 aa, Homo sapiens
  MAP TO AC004685.1; EXPRESSED IN LUNG, SIGNAL = 2.1; EXPRESSED IN PLACENTA, SIGNAL = 2.3; EXPRESSED IN HEART, SIGNAL =   2; EXPRESSED IN FETAL LIVER, SIGNAL = 1.9; EXPRESSED IN BRAIN, SIGNAL = 2.1; EXPRESSED IN BONE MARROW, SIGNAL = 2.3; EXPRESSED IN ADULT LIVER, SIGNAL = 2.3; EXPRESSED IN HELA, SIGNAL = 2.3
AGDPARANQGDQEGAAFRIPVDSAKGK

SEQ ID NO: 39920 - protein, 32 aa, Homo sapiens
  MAP TO AC000057.1; EXPRESSED IN PLACENTA, SIGNAL = 1.9; EXPRESSED IN ADULT LIVER, SIGNAL = 2.6; EXPRESSED IN LUNG, SIGNAL = 1.6; EXPRESSED IN HEART, SIGNAL = 1.9; EXPRESSED IN FETAL LIVER, SIGNAL = 1.6; EXPRESSED IN BRAIN, SIGNAL = 4.9; EXPRESSED IN BONE MARROW, SIGNAL = 1.6
VDLLPNLLKKEIRKGITGAAATAATATAAFAR

SEQ ID NO: 39921 - protein, 36 aa, Homo sapiens
  MAP TO AC004765.2; EXPRESSED IN BONE MARROW, SIGNAL =  13; EXPRESSED IN PLACENTA, SIGNAL =  12; EXPRESSED IN LUNG, SIGNAL =  14; EXPRESSED IN HELA, SIGNAL =  13; EXPRESSED IN HEART, SIGNAL =  12; EXPRESSED IN FETAL LIVER, SIGNAL =  12; EXPRESSED IN BRAIN, SIGNAL =  15; EXPRESSED IN ADULT LIVER, SIGNAL =  12; SWISSPROT HIT: P16950, EVALUE 8.40e+00
PLRKGANWNKIYGETETQKGDEFGRRVTYTVTNFTS

SEQ ID NO: 39922 - protein, 36 aa, Homo sapiens
  MAP TO AC005915.1; EXPRESSED IN LUNG, SIGNAL = 1.5; EXPRESSED IN BONE MARROW, SIGNAL = 1.5; EXPRESSED IN ADULT LIVER, SIGNAL = 1.4; EXPRESSED IN PLACENTA, SIGNAL = 1.3; EXPRESSED IN HEART, SIGNAL = 1.7; EXPRESSED IN FETAL LIVER, SIGNAL = 1.5; EXPRESSED IN BRAIN, SIGNAL = 2.1; EST_HUMAN HIT: AA844061.1, EVALUE 5.00e-05
QPYKDQKLPGTRRRRSPSSPSHPHMASQSGKRYNLT

SEQ ID NO: 39923 - protein, 34 aa, Homo sapiens
  MAP TO AC005915.1; EXPRESSED IN LUNG, SIGNAL = 1.5; EXPRESSED IN BONE MARROW, SIGNAL = 1.5; EXPRESSED IN ADULT LIVER, SIGNAL = 1.4; EXPRESSED IN PLACENTA, SIGNAL = 1.3; EXPRESSED IN HEART, SIGNAL = 1.7; EXPRESSED IN FETAL LIVER, SIGNAL = 1.5; EXPRESSED IN BRAIN, SIGNAL = 2.1; EST_HUMAN HIT: AA844061.1, EVALUE 5.00e-04
NPTRIRSCQEQGEDAPLPHLPTPTWLLSRGKDTT

SEQ ID NO: 39924 - protein, 55 aa, Homo sapiens
  MAP TO AC003109.1; EXPRESSED IN PLACENTA, SIGNAL = 1.6; EXPRESSED IN LUNG, SIGNAL = 1.8; EXPRESSED IN HELA, SIGNAL = 1.7; EXPRESSED IN FETAL LIVER, SIGNAL = 1.5; EXPRESSED IN HEART, SIGNAL = 1.9; EXPRESSED IN BRAIN, SIGNAL =   3; EXPRESSED IN BONE MARROW, SIGNAL = 1.7; EXPRESSED IN ADULT LIVER, SIGNAL = 1.7; SWISSPROT HIT: Q9UJT0, EVALUE 1.60e+00; EST_HUMAN HIT: AI626011.1, EVALUE 1.60e+00
GPLLPCRTLLWGWSSHLEAVRMKPTLRMVAWKTEGTQDSGHTEPPPATHSLPLCH

SEQ ID NO: 39925 - protein, 46 aa, Homo sapiens [sequence omitted]

SEQ ID NO: 39926 - protein, 57 aa, Homo sapiens
  MAP TO AC002299.1; EXPRESSED IN BONE MARROW, SIGNAL = 1.2; EXPRESSED IN PLACENTA, SIGNAL = 1.1; EXPRESSED IN LUNG, SIGNAL = 1.1; EXPRESSED IN FETAL LIVER, SIGNAL = 1.2; EXPRESSED IN BRAIN, SIGNAL = 1.2; EXPRESSED IN ADULT LIVER, SIGNAL = 1.3; EXPRESSED IN HEART, SIGNAL = 1.6; EST_HUMAN HIT: BE796426.1, EVALUE 4.00e-25; SWISSPROT HIT: P04411, EVALUE 3.00e-26
ERKGTDELYAVKILKKDVVIQDDDVECTMVEKRVLALPGKPPFLTQLHSCFQTMVTC

SEQ ID NO: 39927 - protein, 36 aa, Homo sapiens
  MAP TO AC004903.2; EXPRESSED IN BRAIN, SIGNAL = 1.2; EXPRESSED IN BONE MARROW, SIGNAL = 1.4; EXPRESSED IN ADULT LIVER, SIGNAL = 1.4; EXPRESSED IN LUNG, SIGNAL = 1.7; EXPRESSED IN PLACENTA, SIGNAL = 1.6; EXPRESSED IN HEART, SIGNAL = 1.4; EXPRESSED IN FETAL LIVER, SIGNAL = 1.4; SWISSPROT HIT: Q02447, EVALUE 6.40e+00
VTVNLEGHYVYSEFSKESQQQPLDTDTVQSAILLFE

SEQ ID NO: 39928 - protein, 63 aa, Homo sapiens
  MAP TO AC004687.1; EXPRESSED IN LUNG, SIGNAL = 2.9; EXPRESSED IN FETAL LIVER, SIGNAL =   3; EXPRESSED IN BRAIN, SIGNAL = 3.2; EXPRESSED IN BONE MARROW, SIGNAL =   3; EXPRESSED IN PLACENTA, SIGNAL = 2.5; EXPRESSED IN HELA, SIGNAL = 2.8; EXPRESSED IN HEART, SIGNAL = 2.8; EXPRESSED IN ADULT LIVER, SIGNAL = 2.6; EST_HUMAN HIT: AI653251.1, EVALUE 1.00e-23
GGHSRAWGSSGELPRGPRPQLRPVRHPGGRGRGGGGGGRGAGFQDLLLPEAGCWQQHQGEWGQ

SEQ ID NO: 39929 - protein, 60 aa, Homo sapiens
  MAP TO AC004825.2; EXPRESSED IN HELA, SIGNAL = 7.4; EXPRESSED IN FETAL LIVER, SIGNAL = 6.8; EXPRESSED IN BRAIN, SIGNAL = 8.2; EXPRESSED IN BONE MARROW, SIGNAL = 7.1; EXPRESSED IN ADULT LIVER, SIGNAL = 7.1; EXPRESSED IN PLACENTA, SIGNAL = 8.5; EXPRESSED IN HEART, SIGNAL = 7.4; EXPRESSED IN LUNG, SIGNAL = 8.1
AVYCPVIAAVFIVLKMVNYRLHRALDAGEVVDRTANEFTDQRTKAEQGNCSTRRKDSNGP

SEQ ID NO: 39930 - protein, 55 aa, Homo sapiens
  MAP TO AC002041.1; EXPRESSED IN LUNG, SIGNAL = 1.9; EXPRESSED IN HEART, SIGNAL = 1.4; EXPRESSED IN FETAL LIVER, SIGNAL =   3; EXPRESSED IN BRAIN, SIGNAL =   2; EXPRESSED IN BONE MARROW, SIGNAL = 1.3; EXPRESSED IN PLACENTA, SIGNAL = 3.3; EXPRESSED IN ADULT LIVER, SIGNAL = 6.5; SWISSPROT HIT: Q9ZZ44, EVALUE 7.90e+00; EST_HUMAN HIT: AI224931.1, EVALUE 1.00e-17
QALLTATHSSTLVEVVVALLCTLHSLTQWNGLINKYINSQLRSITHSFAGRPSEG

SEQ ID NO: 39931 - protein, 71 aa, Homo sapiens
  MAP TO AC003665.1; EXPRESSED IN BONE MARROW, SIGNAL = 1.3; EXPRESSED IN ADULT LIVER, SIGNAL = 1.1; EXPRESSED IN PLACENTA, SIGNAL = 1.1; EXPRESSED IN LUNG, SIGNAL = 1.3; EXPRESSED IN HEART, SIGNAL = 1.4; EXPRESSED IN FETAL LIVER, SIGNAL = 1.3; EXPRESSED IN BRAIN, SIGNAL = 1.5; EST_HUMAN HIT: BE796614.1, EVALUE 2.00e-35; SWISSPROT HIT: Q12765, EVALUE 7.00e-11
GARNISNQLSIGTDISAQHPELRTHAQAKGWWDGQGAFDFAQIFSLTQQPVRMEAAKARFQAGRELLRQRQ

SEQ ID NO: 39932 - protein, 31 aa, Homo sapiens
  MAP TO AC004692.1; EXPRESSED IN LUNG, SIGNAL = 1.3; EXPRESSED IN FETAL LIVER, SIGNAL = 1.4; EXPRESSED IN BONE MARROW, SIGNAL = 1.5; EXPRESSED IN PLACENTA, SIGNAL = 1.2; EXPRESSED IN BRAIN, SIGNAL = 1.8; EXPRESSED IN ADULT LIVER, SIGNAL = 1.3; EXPRESSED IN HEART, SIGNAL = 1.6
MGEEGQEKEEEKEEEEEEEEEEKEEEEEEEG

SEQ ID NO: 39933 - protein, 31 aa, Homo sapiens
  MAP TO AC004692.1; EXPRESSED IN LUNG, SIGNAL = 1.3; EXPRESSED IN FETAL LIVER, SIGNAL = 1.4; EXPRESSED IN BONE MARROW, SIGNAL = 1.5; EXPRESSED IN PLACENTA, SIGNAL = 1.2; EXPRESSED IN BRAIN, SIGNAL = 1.8; EXPRESSED IN ADULT LIVER, SIGNAL = 1.3; EXPRESSED IN HEART, SIGNAL = 1.6
GGERGDGGRGTGEGGGKGGGGGGGGGGKGGG

SEQ ID NO: 39934 - protein, 30 aa, Homo sapiens
  MAP TO AC004829.2; EXPRESSED IN LUNG, SIGNAL = 3.7; EXPRESSED IN FETAL LIVER, SIGNAL =   4; EXPRESSED IN BONE MARROW, SIGNAL = 3.8; EXPRESSED IN PLACENTA, SIGNAL = 3.8; EXPRESSED IN HELA, SIGNAL = 4.1; EXPRESSED IN HEART, SIGNAL = 3.9; EXPRESSED IN BRAIN, SIGNAL = 4.6; EXPRESSED IN ADULT LIVER, SIGNAL = 3.5
RTNHEPEPGCRLTAAAATAVSSSSCQELSV

SEQ ID NO: 39935 - protein, 30 aa, Homo sapiens
  MAP TO AC004829.2; EXPRESSED IN LUNG, SIGNAL = 3.7; EXPRESSED IN FETAL LIVER, SIGNAL =   4; EXPRESSED IN BONE MARROW, SIGNAL = 3.8; EXPRESSED IN PLACENTA, SIGNAL = 3.8; EXPRESSED IN HELA, SIGNAL = 4.1; EXPRESSED IN HEART, SIGNAL = 3.9; EXPRESSED IN BRAIN, SIGNAL = 4.6; EXPRESSED IN ADULT LIVER, SIGNAL = 3.5
HRQLLAGTGADRGGSGGGEPAPGLWLMVGP

SEQ ID NO: 39936 - protein, 35 aa, Homo sapiens
  MAP TO AC003668.1; EXPRESSED IN PLACENTA, SIGNAL = 2.5; EXPRESSED IN LUNG, SIGNAL = 2.7; EXPRESSED IN HELA, SIGNAL = 2.8; EXPRESSED IN FETAL LIVER, SIGNAL = 2.4; EXPRESSED IN HEART, SIGNAL = 2.6; EXPRESSED IN BRAIN, SIGNAL = 3.1; EXPRESSED IN BONE MARROW, SIGNAL = 2.6; EXPRESSED IN ADULT LIVER, SIGNAL = 2.8; SWISSPROT HIT: P12482, EVALUE 6.40e+00
IQVIEEHHKIWKGRESGRDYTIGPEGKIIALSCLN

SEQ ID NO: 39937 - protein, 23 aa, Homo sapiens
  MAP TO AC004836.2; EXPRESSED IN PLACENTA, SIGNAL = 9.8; EXPRESSED IN LUNG, SIGNAL =  12; EXPRESSED IN FETAL LIVER, SIGNAL = 9.9; EXPRESSED IN HELA, SIGNAL =  10; EXPRESSED IN BRAIN, SIGNAL =  12; EXPRESSED IN BONE MARROW, SIGNAL =  11; EXPRESSED IN ADULT LIVER, SIGNAL = 9.1; EXPRESSED IN HEART, SIGNAL = 9.6; EST_HUMAN HIT: BF203311.1, EVALUE 4.80e+00
PSLMPLSGLQCTSWCILPSAKLP

SEQ ID NO: 39938 - protein, 44 aa, Homo sapiens
  MAP TO AC003089.1; EXPRESSED IN BRAIN, SIGNAL = 1.8; EXPRESSED IN BONE MARROW, SIGNAL = 1.5; EXPRESSED IN LUNG, SIGNAL = 1.4; EXPRESSED IN ADULT LIVER, SIGNAL = 1.4; EXPRESSED IN PLACENTA, SIGNAL = 1.7; EXPRESSED IN HEART, SIGNAL = 1.4; EXPRESSED IN FETAL LIVER, SIGNAL = 1.4; SWISSPROT HIT: P30999, EVALUE 1.00e-09; EST_HUMAN HIT: BE177290.1, EVALUE 8.00e-18
EFGWRDPELPEVIQMLQHQFPSVQSNAAAYLQHLCFGDNKIKAE

SEQ ID NO: 39939 - protein, 167 aa, Homo sapiens
  MAP TO AC005841.3; EXPRESSED IN PLACENTA, SIGNAL = 1.8; EXPRESSED IN LUNG, SIGNAL = 1.9; EXPRESSED IN HEART, SIGNAL = 1.7; EXPRESSED IN BRAIN, SIGNAL = 1.9; EXPRESSED IN FETAL LIVER, SIGNAL = 2.4; EXPRESSED IN BONE MARROW, SIGNAL = 2.4; EXPRESSED IN HELA, SIGNAL = 2.7; EXPRESSED IN ADULT LIVER, SIGNAL = 1.7; SWISSPROT HIT: Q08050, EVALUE 6.00e-83; EST_HUMAN HIT: AW239326.1, EVALUE 1.00e-76
MKTSPRRPLILKRRRLPLPVQNAPSETSEEEPKRSPAQQESNQAEASKEVAESNSCKFPAGIKIINHPTMPNTQVVAIPNNANIHSIITALTAKGKESGSSGPNKFILISCGGAPTQPPGLRPQTQTSYDAKRTEVTLETLGPKPAARDVNLPRPPGALCEQKRETC

SEQ ID NO: 39940 - protein, 64 aa, Homo sapiens
  MAP TO AC002099.1; EXPRESSED IN FETAL LIVER, SIGNAL = 4.9; EXPRESSED IN BRAIN, SIGNAL = 5.3; EXPRESSED IN BONE MARROW, SIGNAL =   5; EXPRESSED IN PLACENTA, SIGNAL = 4.2; EXPRESSED IN HELA, SIGNAL = 4.6; EXPRESSED IN HEART, SIGNAL = 4.8; EXPRESSED IN ADULT LIVER, SIGNAL = 4.6; EXPRESSED IN LUNG, SIGNAL = 5.2; SWISSPROT HIT: P53331, EVALUE 5.00e-05; EST_HUMAN HIT: BE795233.1, EVALUE 4.00e-31
LTRALALDCEMVGVGPKGEESMAARVSIVNQYGKCVYDKYVKPTEPVTDYRTAVSGIRPENLKQ

SEQ ID NO: 39941 - protein, 36 aa, Homo sapiens
  MAP TO AC004841.2; EXPRESSED IN PLACENTA, SIGNAL =  16; EXPRESSED IN HEART, SIGNAL =  10; EXPRESSED IN FETAL LIVER, SIGNAL =  11; EXPRESSED IN BRAIN, SIGNAL = 6.9; EXPRESSED IN BONE MARROW, SIGNAL =  11; EXPRESSED IN HELA, SIGNAL =   9; EXPRESSED IN ADULT LIVER, SIGNAL =  18; EXPRESSED IN LUNG, SIGNAL =  10
MVLVREPKAGINISTMFFPRTFFCLSSTSLLYSTFQ

SEQ ID NO: 39942 - protein, 29 aa, Homo sapiens
  MAP TO AC004841.2; EXPRESSED IN PLACENTA, SIGNAL =  16; EXPRESSED IN HEART, SIGNAL =  10; EXPRESSED IN FETAL LIVER, SIGNAL =  11; EXPRESSED IN BRAIN, SIGNAL = 6.9; EXPRESSED IN BONE MARROW, SIGNAL =  11; EXPRESSED IN HELA, SIGNAL =   9; EXPRESSED IN ADULT LIVER, SIGNAL =  18; EXPRESSED IN LUNG, SIGNAL =  10; EST_HUMAN HIT: AV740924.1, EVALUE 9.00e-12
FWLSDQHHGGWQEQAPYERRQKGSQEESG

SEQ ID NO: 39943 - protein, 37 aa, Homo sapiens
  MAP TO AC005722.1; EXPRESSED IN ADULT LIVER, SIGNAL = 0.51; EXPRESSED IN LUNG, SIGNAL =   4; EXPRESSED IN HEART, SIGNAL = 4.5; EXPRESSED IN BONE MARROW, SIGNAL = 0.65
RGTGKQAFGAAVNAITYYIIGLPLGILLTFVVRMRIM

SEQ ID NO: 39944 - protein, 37 aa, Homo sapiens
  MAP TO AC005722.1; EXPRESSED IN ADULT LIVER, SIGNAL = 0.51; EXPRESSED IN LUNG, SIGNAL =   4; EXPRESSED IN HEART, SIGNAL = 4.5; EXPRESSED IN BONE MARROW, SIGNAL = 0.65; EST_HUMAN HIT: AW886945.1, EVALUE 2.50e+00; SWISSPROT HIT: P79331, EVALUE 8.40e+00
ERNWEAGLWCRCECHHILHHRPTTGHPSDLCGQNENH

SEQ ID NO: 39945 - protein, 34 aa, Homo sapiens
  MAP TO AC005726.1; EXPRESSED IN PLACENTA, SIGNAL = 2.1; EXPRESSED IN LUNG, SIGNAL = 2.5; EXPRESSED IN HEART, SIGNAL = 3.2; EXPRESSED IN BRAIN, SIGNAL = 5.3; EXPRESSED IN FETAL LIVER, SIGNAL = 2.2; EXPRESSED IN BONE MARROW, SIGNAL = 2.4; EXPRESSED IN HELA, SIGNAL = 2.6; EXPRESSED IN ADULT LIVER, SIGNAL = 2.6; EST_HUMAN HIT: BF347901.1, EVALUE 5.00e-11; SWISSPROT HIT: P09117, EVALUE 4.00e-12
SYPALSAEQKKELSDIALRIVAPGKGILAADESV

SEQ ID NO: 39946 - protein, 59 aa, Homo sapiens
  MAP TO AC004849.1; EXPRESSED IN LUNG, SIGNAL = 2.6; EXPRESSED IN ADULT LIVER, SIGNAL =   3; EXPRESSED IN PLACENTA, SIGNAL = 2.5; EXPRESSED IN HELA, SIGNAL = 2.7; EXPRESSED IN HEART, SIGNAL = 2.9; EXPRESSED IN FETAL LIVER, SIGNAL = 2.7; EXPRESSED IN BRAIN, SIGNAL = 2.8; EXPRESSED IN BONE MARROW, SIGNAL =   3; EST_HUMAN HIT: AU118751.1, EVALUE 2.00e-11; SWISSPROT HIT: O95677, EVALUE 3.10e-01
ADEIIIKMHGSQLTQRYLEKHGFDVPIMVPKLDDLGLRLPSPTFSVMDVERYVGTNFIS

SEQ ID NO: 39947 - protein, 52 aa, Homo sapiens
  MAP TO AC004763.1; EXPRESSED IN PLACENTA, SIGNAL = 5.2; EXPRESSED IN LUNG, SIGNAL = 5.4; EXPRESSED IN FETAL LIVER, SIGNAL = 6.1; EXPRESSED IN BONE MARROW, SIGNAL = 5.5; EXPRESSED IN ADULT LIVER, SIGNAL = 5.7; EXPRESSED IN HELA, SIGNAL = 5.4; EXPRESSED IN HEART, SIGNAL = 5.9; EXPRESSED IN BRAIN, SIGNAL = 6.4; SWISSPROT HIT: Q9X9E0, EVALUE 3.60e+00; EST_HUMAN HIT: BE762770.1, EVALUE 2.00e-15
ACASSVCRRWNEVFHISDLWRKFEFELNQSATSSFKSTHPDLIQQIIKKHFA

SEQ ID NO: 39948 - protein, 40 aa, Homo sapiens
  MAP TO AC005737.1; EXPRESSED IN BONE MARROW, SIGNAL = 3.5; EXPRESSED IN ADULT LIVER, SIGNAL = 2.5; EXPRESSED IN PLACENTA, SIGNAL = 2.5; EXPRESSED IN LUNG, SIGNAL = 1.6; EXPRESSED IN HELA, SIGNAL = 2.5; EXPRESSED IN HEART, SIGNAL =   2; EXPRESSED IN BRAIN, SIGNAL =   2; EXPRESSED IN FETAL LIVER, SIGNAL = 2.4
AIIIVIITIIITNITTAVVTTVTIIITTTPPPSLLPLLLS

SEQ ID NO: 39949 - protein, 66 aa, Homo sapiens
  MAP TO AC004770.1; EXPRESSED IN LUNG, SIGNAL = 3.5; EXPRESSED IN HELA, SIGNAL = 2.1; EXPRESSED IN ADULT LIVER, SIGNAL = 4.1; EXPRESSED IN PLACENTA, SIGNAL = 2.1; EXPRESSED IN HEART, SIGNAL = 3.3; EXPRESSED IN FETAL LIVER, SIGNAL = 3.4; EXPRESSED IN BRAIN, SIGNAL = 3.5; EXPRESSED IN BONE MARROW, SIGNAL =   2; EST_HUMAN HIT: Z44979.1, EVALUE 1.00e-23
SKITEDFRALRKTAEDMNLFKTNHVFFLLLLAHIIALESIAWFTVFYFGNGWIPTLITAFVLATSQ

SEQ ID NO: 39950 - protein, 44 aa, Homo sapiens
  MAP TO AC005747.1; EXPRESSED IN BONE MARROW, SIGNAL = 3.9; EXPRESSED IN ADULT LIVER, SIGNAL = 4.4; EXPRESSED IN LUNG, SIGNAL =   4; EXPRESSED IN HELA, SIGNAL = 4.1; EXPRESSED IN HEART, SIGNAL = 3.6; EXPRESSED IN FETAL LIVER, SIGNAL = 3.6; EXPRESSED IN BRAIN, SIGNAL = 3.7; EXPRESSED IN PLACENTA, SIGNAL = 3.8; EST_HUMAN HIT: T07778.1, EVALUE 9.10e+00
MRGLGELGAQPQQDHARWPRGSSLSECSEGDVTMANTMEEILEE

SEQ ID NO: 39951 - protein, 68 aa, Homo sapiens
  MAP TO AC004865.1; EXPRESSED IN LUNG, SIGNAL = 2.9; EXPRESSED IN BRAIN, SIGNAL =   3; EXPRESSED IN ADULT LIVER, SIGNAL = 2.7; EXPRESSED IN PLACENTA, SIGNAL =   3; EXPRESSED IN HELA, SIGNAL = 2.9; EXPRESSED IN HEART, SIGNAL =   3; EXPRESSED IN FETAL LIVER, SIGNAL = 2.7; EXPRESSED IN BONE MARROW, SIGNAL = 2.6; EST_HUMAN HIT: AA375255.1, EVALUE 5.00e-32; SWISSPROT HIT: P03203, EVALUE 1.00e-01
LTAELSGGPKNVSVQPEISEGLATTPSTQQVKSSEKTQIAVPQPVAPSYSYATPTPQASFQSTSAPYP

SEQ ID NO: 39952 - protein, 98 aa, Homo sapiens
  MAP TO AC004958.1; EXPRESSED IN PLACENTA, SIGNAL = 1.8; EXPRESSED IN LUNG, SIGNAL = 1.9; EXPRESSED IN FETAL LIVER, SIGNAL = 1.8; EXPRESSED IN BRAIN, SIGNAL = 1.7; EXPRESSED IN ADULT LIVER, SIGNAL =   2; EXPRESSED IN HELA, SIGNAL = 2.1; EXPRESSED IN HEART, SIGNAL =   2; EXPRESSED IN BONE MARROW, SIGNAL = 1.7; EST_HUMAN HIT: BE875422.1, EVALUE 4.00e-23; SWISSPROT HIT: O13440, EVALUE 4.80e+00
GFREGGGGGDFRRGDVGLQDGGVRVRVIIFAFSLHSLLSRFLPGGDASLMELEKRKENRFVERQSIVPLRLIYRSGGEDESRHDALDTRVRGDLGGPQ

SEQ ID NO: 39953 - protein, 41 aa, Homo sapiens
  MAP TO AC004958.1; EXPRESSED IN PLACENTA, SIGNAL = 1.8; EXPRESSED IN LUNG, SIGNAL = 1.9; EXPRESSED IN FETAL LIVER, SIGNAL = 1.8; EXPRESSED IN BRAIN, SIGNAL = 1.7; EXPRESSED IN ADULT LIVER, SIGNAL =   2; EXPRESSED IN HELA, SIGNAL = 2.1; EXPRESSED IN HEART, SIGNAL =   2; EXPRESSED IN BONE MARROW, SIGNAL = 1.7; EST_HUMAN HIT: BE875422.1, EVALUE 5.00e-16
TASWSARASCHCASSTARAAKTKVGTTRSTRGCGATSVARR

SEQ ID NO: 39954 - protein, 70 aa, Homo sapiens
  MAP TO AC004873.1; EXPRESSED IN PLACENTA, SIGNAL = 5.1; EXPRESSED IN LUNG, SIGNAL = 6.1; EXPRESSED IN HEART, SIGNAL =   5; EXPRESSED IN FETAL LIVER, SIGNAL = 5.2; EXPRESSED IN BRAIN, SIGNAL =   5; EXPRESSED IN BONE MARROW, SIGNAL = 4.5; EXPRESSED IN ADULT LIVER, SIGNAL = 7.2; EXPRESSED IN HELA, SIGNAL = 5.2; EST_HUMAN HIT: W67611.1, EVALUE 5.00e-31; SWISSPROT HIT: Q15466, EVALUE 3.00e-36
VPGLQAASHIGHLQQEAHWVLCEVLEPWCPAAQGRLTRVLLTASTLKSIPTSLLGDLFFRPIIGDVDIAG

SEQ ID NO: 39955 - protein, 36 aa, Homo sapiens
  MAP TO AC004873.1; EXPRESSED IN PLACENTA, SIGNAL = 5.1; EXPRESSED IN LUNG, SIGNAL = 6.1; EXPRESSED IN HEART, SIGNAL =   5; EXPRESSED IN FETAL LIVER, SIGNAL = 5.2; EXPRESSED IN BRAIN, SIGNAL =   5; EXPRESSED IN BONE MARROW, SIGNAL = 4.5; EXPRESSED IN ADULT LIVER, SIGNAL = 7.2; EXPRESSED IN HELA, SIGNAL = 5.2; EST_HUMAN HIT: W67611.1, EVALUE 8.00e-16; SWISSPROT HIT: P01432, EVALUE 4.90e+00
MCQASKPPPTLGTCSRRLTGCCVKSWNPGAQQPKAA

SEQ ID NO: 39956 - protein, 18 aa, Homo sapiens
  MAP TO AC004968.1; EXPRESSED IN LUNG, SIGNAL = 8.9; EXPRESSED IN BRAIN, SIGNAL = 8.4; EXPRESSED IN PLACENTA, SIGNAL = 8.8; EXPRESSED IN HEART, SIGNAL = 8.9; EXPRESSED IN FETAL LIVER, SIGNAL = 8.5; EXPRESSED IN BONE MARROW, SIGNAL = 7.6; EXPRESSED IN ADULT LIVER, SIGNAL = 8.7; EXPRESSED IN HELA, SIGNAL = 7.4; EST_HUMAN HIT: AI609667.1, EVALUE 1.60e+00
RIMPVIPALWAKAGRRIA

SEQ ID NO: 39957 - protein, 68 aa, Homo sapiens
  MAP TO AC004976.1; EXPRESSED IN LUNG, SIGNAL = 1.6; EXPRESSED IN FETAL LIVER, SIGNAL = 1.9; EXPRESSED IN BRAIN, SIGNAL = 1.6; EXPRESSED IN BONE MARROW, SIGNAL = 1.7; EXPRESSED IN ADULT LIVER, SIGNAL = 1.6; EXPRESSED IN PLACENTA, SIGNAL = 1.6; EXPRESSED IN HEART, SIGNAL = 1.8; EXPRESSED IN HELA, SIGNAL = 1.7; EST_HUMAN HIT: AA909887.1, EVALUE 3.30e+00
DIRTDSKTNQKRCDFYANWTLDVLIIKEIALGQVACYGTSCWPVPAPMLGQVTSPSPPLPPPTPVSVQ

SEQ ID NO: 39958 - protein, 54 aa, Homo sapiens
  MAP TO AC004883.2; EXPRESSED IN PLACENTA, SIGNAL =  37; EXPRESSED IN LUNG, SIGNAL =  43; EXPRESSED IN HEART, SIGNAL =  32; EXPRESSED IN BRAIN, SIGNAL =  40; EXPRESSED IN FETAL LIVER, SIGNAL =  32; EXPRESSED IN BONE MARROW, SIGNAL =  37; EXPRESSED IN ADULT LIVER, SIGNAL =  31; EXPRESSED IN HELA, SIGNAL =  31; EST_HUMAN HIT: N48128.1, EVALUE 2.00e-18
MSDVLLRTKLTLLILWQRVGKLGLFAKFRLPPIFRVFLKHSYTRIIHGCFPVTV

SEQ ID NO: 39959 - protein, 28 aa, Homo sapiens
  MAP TO AC004983.2; EXPRESSED IN ADULT LIVER, SIGNAL = 2.4; EXPRESSED IN PLACENTA, SIGNAL = 2.7; EXPRESSED IN LUNG, SIGNAL =  11; EXPRESSED IN HEART, SIGNAL = 2.2; EXPRESSED IN BRAIN, SIGNAL = 2.5; EXPRESSED IN HELA, SIGNAL = 2.3; EXPRESSED IN FETAL LIVER, SIGNAL = 2.5; EXPRESSED IN BONE MARROW, SIGNAL = 2.4
DAQNKSPSAVMSHESDAAHSDSARSSSS

SEQ ID NO: 39960 - protein, 66 aa, Homo sapiens
  MAP TO AC004891.1; EXPRESSED IN LUNG, SIGNAL =   3; EXPRESSED IN HEART, SIGNAL = 2.7; EXPRESSED IN FETAL LIVER, SIGNAL = 2.8; EXPRESSED IN BRAIN, SIGNAL = 3.2; EXPRESSED IN BONE MARROW, SIGNAL = 2.6; EXPRESSED IN PLACENTA, SIGNAL = 2.9; EXPRESSED IN HELA, SIGNAL = 2.8; EXPRESSED IN ADULT LIVER, SIGNAL = 2.9; SWISSPROT HIT: Q05793, EVALUE 5.00e-05; EST_HUMAN HIT: BF365449.1, EVALUE 5.00e-12
ATEVSFSFDVGNGPVEIVVRSPTPLNDDQWHRVTAERNVKQASLQVDRLPQQIRKAPTEGHTRLEL

SEQ ID NO: 39961 - protein, 55 aa, Homo sapiens
  MAP TO AC004991.1; EXPRESSED IN ADULT LIVER, SIGNAL = 5.2; EXPRESSED IN PLACENTA, SIGNAL = 6.2; EXPRESSED IN HEART, SIGNAL = 5.2; EXPRESSED IN LUNG, SIGNAL = 5.8; EXPRESSED IN FETAL LIVER, SIGNAL =   6; EXPRESSED IN BRAIN, SIGNAL = 6.8; EXPRESSED IN BONE MARROW, SIGNAL = 5.3; EXPRESSED IN HELA, SIGNAL = 5.3; SWISSPROT HIT: O47491, EVALUE 7.00e-01
TQMVTEDSVVYYNYSIIGTFTVKLKVVAEWEEVEPDATRAVKQKTGDFSASLKLQ

SEQ ID NO: 39962 - protein, 109 aa, Homo sapiens
  MAP TO AC005323.1; EXPRESSED IN PLACENTA, SIGNAL = 0.62; EXPRESSED IN ADULT LIVER, SIGNAL = 0.54; EXPRESSED IN LUNG, SIGNAL = 1.8; EXPRESSED IN HEART, SIGNAL =  55; EXPRESSED IN FETAL LIVER, SIGNAL = 0.68; EXPRESSED IN BONE MARROW, SIGNAL = 1.8; EST_HUMAN HIT: F00884.1, EVALUE 3.00e-30; SWISSPROT HIT: gi127772, EVALUE 3.00e-31
ARIEELEEEIEAERASRAKAEKQRSDLSRELEEISERLEEAGGATSAQIEMNKKREAEFQKMRRDLEESTLQHEATAAALRKKHADSVAELGEQIDSLQRVKQKLEKEK

SEQ ID NO: 39963 - protein, 50 aa, Homo sapiens
  MAP TO AC005924.2; EXPRESSED IN BRAIN, SIGNAL = 1.5; EXPRESSED IN PLACENTA, SIGNAL = 1.1; EXPRESSED IN LUNG, SIGNAL = 1.1; EXPRESSED IN HEART, SIGNAL = 1.5; EXPRESSED IN BONE MARROW, SIGNAL = 1.2; EXPRESSED IN ADULT LIVER, SIGNAL = 1.2; EXPRESSED IN FETAL LIVER, SIGNAL = 1.4; EST_HUMAN HIT: AW402306.1, EVALUE 2.00e-07
MAGAEGAAGRQSELEPVVSLVDVLEEDEELENEACAVLGGSDSEKCSYSQ

SEQ ID NO: 39964 - protein, 49 aa, Homo sapiens
  MAP TO AC005924.2; EXPRESSED IN BRAIN, SIGNAL = 1.5; EXPRESSED IN PLACENTA, SIGNAL = 1.1; EXPRESSED IN LUNG, SIGNAL = 1.1; EXPRESSED IN HEART, SIGNAL = 1.5; EXPRESSED IN BONE MARROW, SIGNAL = 1.2; EXPRESSED IN ADULT LIVER, SIGNAL = 1.2; EXPRESSED IN FETAL LIVER, SIGNAL = 1.4; EST_HUMAN HIT: AW384781.1, EVALUE 1.30e+00; SWISSPROT HIT: P43574, EVALUE 3.60e+00
YRWSTSLRRTRSWRMRRALSWAAATPRSAPTLRWARGPGLLSPGSRRTS

SEQ ID NO: 39965 - protein, 34 aa, Homo sapiens
  MAP TO AC006152.2; EXPRESSED IN LUNG, SIGNAL =   2; EXPRESSED IN HELA, SIGNAL = 2.2; EXPRESSED IN HEART, SIGNAL = 2.4; EXPRESSED IN FETAL LIVER, SIGNAL = 4.4; EXPRESSED IN PLACENTA, SIGNAL = 2.4; EXPRESSED IN BRAIN, SIGNAL = 2.6; EXPRESSED IN BONE MARROW, SIGNAL = 2.5; EXPRESSED IN ADULT LIVER, SIGNAL = 3.2
CASAVLQVYVGECLWGSEDVEMLVLLGLKANYNQ

SEQ ID NO: 39966 - protein, 17 aa, Homo sapiens
  MAP TO AC006152.2; EXPRESSED IN LUNG, SIGNAL =   2; EXPRESSED IN HELA, SIGNAL = 2.2; EXPRESSED IN HEART, SIGNAL = 2.4; EXPRESSED IN FETAL LIVER, SIGNAL = 4.4; EXPRESSED IN PLACENTA, SIGNAL = 2.4; EXPRESSED IN BRAIN, SIGNAL = 2.6; EXPRESSED IN BONE MARROW, SIGNAL = 2.5; EXPRESSED IN ADULT LIVER, SIGNAL = 3.2
LCLCSPPGVCGGMSVGF

SEQ ID NO: 39967 - protein, 52 aa, Homo sapiens
  MAP TO AC004655.1; EXPRESSED IN BONE MARROW, SIGNAL = 4.7; EXPRESSED IN PLACENTA, SIGNAL =  10; EXPRESSED IN LUNG, SIGNAL = 2.8; EXPRESSED IN HEART, SIGNAL = 3.1; EXPRESSED IN FETAL LIVER, SIGNAL = 3.3; EXPRESSED IN ADULT LIVER, SIGNAL = 4.3; EXPRESSED IN BRAIN, SIGNAL = 1.3; SWISSPROT HIT: P09884, EVALUE 4.00e-25
GAMEFEDGDFDEPMEVEEVDLEPMAAKAWDKESEPAEEVKQEADSGKGTVSY

SEQ ID NO: 39968 - protein, 22 aa, Homo sapiens
  MAP TO AC004671.1; EXPRESSED IN PLACENTA, SIGNAL = 3.1; EXPRESSED IN HELA, SIGNAL = 3.1; EXPRESSED IN HEART, SIGNAL = 3.2; EXPRESSED IN FETAL LIVER, SIGNAL = 3.2; EXPRESSED IN BRAIN, SIGNAL = 2.9; EXPRESSED IN ADULT LIVER, SIGNAL = 3.5; EXPRESSED IN LUNG, SIGNAL = 3.5; EXPRESSED IN BONE MARROW, SIGNAL = 3.3; EST_HUMAN HIT: AW836047.1, EVALUE 5.00e-06
SYNLDDDQAAWENELQKMTRGQ

SEQ ID NO: 39969 - protein, 64 aa, Homo sapiens
  MAP TO AC002064.1; EXPRESSED IN PLACENTA, SIGNAL = 7.7; EXPRESSED IN BRAIN, SIGNAL = 7.5; EXPRESSED IN BONE MARROW, SIGNAL = 7.4; EXPRESSED IN ADULT LIVER, SIGNAL =  18; EXPRESSED IN LUNG, SIGNAL = 5.8; EXPRESSED IN HELA, SIGNAL = 4.9; EXPRESSED IN HEART, SIGNAL = 5.6; EXPRESSED IN FETAL LIVER, SIGNAL =  12; EST_HUMAN HIT: AW008475.1, EVALUE 7.00e-30; SWISSPROT HIT: P30343, EVALUE 3.40e+00
LALFTYVKKPEKQKIIDWSAAQHEELQLHAIATLSSVAPLLIEEYMSCQGNARVLAFLEWCESE

SEQ ID NO: 39970 - protein, 74 aa, Homo sapiens
  MAP TO AC004682.1; EXPRESSED IN LUNG, SIGNAL = 8.5; EXPRESSED IN HELA, SIGNAL = 7.3; EXPRESSED IN BRAIN, SIGNAL = 7.7; EXPRESSED IN BONE MARROW, SIGNAL = 7.7; EXPRESSED IN ADULT LIVER, SIGNAL = 7.3; EXPRESSED IN PLACENTA, SIGNAL = 7.1; EXPRESSED IN HEART, SIGNAL = 6.8; EXPRESSED IN FETAL LIVER, SIGNAL = 6.9; EST_HUMAN HIT: AU134867.1, EVALUE 1.00e+00; SWISSPROT HIT: O86511, EVALUE 1.10e+00
VILYEEEMGNHNENTGEKLHLAQEQLALAGDKIASLERSLNLYRDKYQSSLSNIELLECQVKMLQGELGGIMGQ

SEQ ID NO: 39971 - protein, 48 aa, Homo sapiens
  MAP TO AC006254.10; EXPRESSED IN PLACENTA, SIGNAL = 1.2; EXPRESSED IN BONE MARROW, SIGNAL = 1.4; EXPRESSED IN ADULT LIVER, SIGNAL = 1.4; EXPRESSED IN LUNG, SIGNAL = 1.7; EXPRESSED IN HEART, SIGNAL = 1.3; EXPRESSED IN FETAL LIVER, SIGNAL = 1.8; EXPRESSED IN BRAIN, SIGNAL = 1.3; SWISSPROT HIT: P51957, EVALUE 4.00e-23; EST_HUMAN HIT: AU125616.1, EVALUE 5.00e-22
LTRTNIIKVGDLGIARVLENHCDMASTLIGTPYYMSPELFSNKPYNYK

SEQ ID NO: 39972 - protein, 39 aa, Homo sapiens
  MAP TO AC005010.2; EXPRESSED IN PLACENTA, SIGNAL = 2.2; EXPRESSED IN BONE MARROW, SIGNAL = 1.8; EXPRESSED IN ADULT LIVER, SIGNAL = 2.1; EXPRESSED IN LUNG, SIGNAL = 1.9; EXPRESSED IN HELA, SIGNAL = 2.2; EXPRESSED IN HEART, SIGNAL = 1.9; EXPRESSED IN FETAL LIVER, SIGNAL = 2.1; EXPRESSED IN BRAIN, SIGNAL = 2.2
SLLSSNFHEKADLGLGQIWVCVGSLQGRLALGLRPGLYL

SEQ ID NO: 39973 - protein, 39 aa, Homo sapiens
  MAP TO AC005010.2; EXPRESSED IN PLACENTA, SIGNAL = 2.2; EXPRESSED IN BONE MARROW, SIGNAL = 1.8; EXPRESSED IN ADULT LIVER, SIGNAL = 2.1; EXPRESSED IN LUNG, SIGNAL = 1.9; EXPRESSED IN HELA, SIGNAL = 2.2; EXPRESSED IN HEART, SIGNAL = 1.9; EXPRESSED IN FETAL LIVER, SIGNAL = 2.1; EXPRESSED IN BRAIN, SIGNAL = 2.2; EST_HUMAN HIT: H91398.1, EVALUE 5.50e+00
LQVQPRAETQSEPSLQGSNADPDLPQTQICLFMKIGRQQ

SEQ ID NO: 39974 - protein, 30 aa, Homo sapiens
  MAP TO AC000062.1; EXPRESSED IN PLACENTA, SIGNAL = 1.4; EXPRESSED IN HEART, SIGNAL = 1.4; EXPRESSED IN BONE MARROW, SIGNAL = 1.3; EXPRESSED IN FETAL LIVER, SIGNAL = 1.3; EXPRESSED IN LUNG, SIGNAL = 1.3; EXPRESSED IN BRAIN, SIGNAL = 1.4; EXPRESSED IN ADULT LIVER, SIGNAL = 1.1; EST_HUMAN HIT: BE253590.1, EVALUE 4.00e-01
RDTTTAPFSRPGLSPPGAHALGDDRGKQST

SEQ ID NO: 39975 - protein, 35 aa, Homo sapiens
  MAP TO AC006379.2; EXPRESSED IN FETAL LIVER, SIGNAL = 8.6; EXPRESSED IN BONE MARROW, SIGNAL = 9.4; EXPRESSED IN ADULT LIVER, SIGNAL = 8.9; EXPRESSED IN HELA, SIGNAL = 8.2; EXPRESSED IN PLACENTA, SIGNAL = 7.6; EXPRESSED IN LUNG, SIGNAL = 7.7; EXPRESSED IN HEART, SIGNAL =   9; EXPRESSED IN BRAIN, SIGNAL = 9.1; EST_HUMAN HIT: W80890.1, EVALUE 2.00e-03; SWISSPROT HIT: P93471, EVALUE 3.80e+00
NGSTYKFSALQWCKSSRHSIQSSAYDGVISGLRHF

SEQ ID NO: 39976 - protein, 28 aa, Homo sapiens
  MAP TO AC004918.1; EXPRESSED IN FETAL LIVER, SIGNAL = 1.6; EXPRESSED IN PLACENTA, SIGNAL = 1.2; EXPRESSED IN LUNG, SIGNAL = 1.4; EXPRESSED IN HEART, SIGNAL = 1.4; EXPRESSED IN BRAIN, SIGNAL = 1.3; EXPRESSED IN BONE MARROW, SIGNAL = 1.3; EXPRESSED IN ADULT LIVER, SIGNAL = 1.4; EST_HUMAN HIT: AU124538.1, EVALUE 8.00e-08
PQAARGGHGVSPSQPVHFAYPGGEWGRG

SEQ ID NO: 39977 - protein, 48 aa, Homo sapiens
  MAP TO AC006157.2; EXPRESSED IN PLACENTA, SIGNAL = 4.2; EXPRESSED IN ADULT LIVER, SIGNAL =   4; EXPRESSED IN LUNG, SIGNAL = 4.6; EXPRESSED IN HEART, SIGNAL = 4.3; EXPRESSED IN FETAL LIVER, SIGNAL = 3.8; EXPRESSED IN BRAIN, SIGNAL = 4.5; EXPRESSED IN HELA, SIGNAL = 3.8; EXPRESSED IN BONE MARROW, SIGNAL = 4.3; EST_HUMAN HIT: BF357678.1, EVALUE 2.00e-05; SWISSPROT HIT: Q9QXP3, EVALUE 2.10e+00
SRPALGPKQGSPTTATAEVPRGTPASFEKRREKGIQYGKHFRGASESR

SEQ ID NO: 39978 - protein, 41 aa, Homo sapiens
  MAP TO AC004922.2; EXPRESSED IN PLACENTA, SIGNAL = 1.8; EXPRESSED IN BONE MARROW, SIGNAL = 1.4; EXPRESSED IN ADULT LIVER, SIGNAL = 1.9; EXPRESSED IN LUNG, SIGNAL = 1.8; EXPRESSED IN HEART, SIGNAL = 1.8; EXPRESSED IN FETAL LIVER, SIGNAL = 1.9; EXPRESSED IN BRAIN, SIGNAL = 2.1; EST_HUMAN HIT: H63913.1, EVALUE 7.00e-19; SWISSPROT HIT: O70352, EVALUE 4.80e+00
IFQNRASNATCLPWNASATWTREPQLRTATRPWRRCTRIAS

SEQ ID NO: 39979 - protein, 44 aa, Homo sapiens
  MAP TO AC004957.1; EXPRESSED IN PLACENTA, SIGNAL = 1.5; EXPRESSED IN LUNG, SIGNAL = 1.6; EXPRESSED IN HELA, SIGNAL = 1.7; EXPRESSED IN FETAL LIVER, SIGNAL = 1.9; EXPRESSED IN BRAIN, SIGNAL = 1.4; EXPRESSED IN ADULT LIVER, SIGNAL = 2.4; EXPRESSED IN HEART, SIGNAL = 1.3; EXPRESSED IN BONE MARROW, SIGNAL = 1.3; SWISSPROT HIT: P28048, EVALUE 3.70e+00
NHKEILEASERKQAESLDFPFKKLRWHLCEGWIEEERDESRKSE

SEQ ID NO: 39980 - protein, 52 aa, Homo sapiens
  MAP TO AC002080.1; EXPRESSED IN PLACENTA, SIGNAL =   2; EXPRESSED IN HEART, SIGNAL = 1.8; EXPRESSED IN FETAL LIVER, SIGNAL =   2; EXPRESSED IN BONE MARROW, SIGNAL = 2.1; EXPRESSED IN ADULT LIVER, SIGNAL = 1.6; EXPRESSED IN HELA, SIGNAL =   2; EXPRESSED IN LUNG, SIGNAL = 1.8; EXPRESSED IN BRAIN, SIGNAL = 2.3; SWISSPROT HIT: P08581, EVALUE 2.00e-23; EST_HUMAN HIT: BF208095.1, EVALUE 6.00e-15
RDEYRTEFTTALQRVDLFMGQFSEVLLTSISTFIKGDLTIANLGTSEGRFMQ

SEQ ID NO: 39981 - protein, 65 aa, Homo sapiens
  MAP TO AC006191.1; EXPRESSED IN FETAL LIVER, SIGNAL = 1.2; EXPRESSED IN BONE MARROW, SIGNAL = 1.2; EXPRESSED IN PLACENTA, SIGNAL = 1.6; EXPRESSED IN LUNG, SIGNAL = 1.2; EXPRESSED IN HEART, SIGNAL = 1.3; EXPRESSED IN BRAIN, SIGNAL = 1.2; EXPRESSED IN ADULT LIVER, SIGNAL = 1.4; SWISSPROT HIT: O95340, EVALUE 4.00e-33; EST_HUMAN HIT: BE292722.1, EVALUE 4.00e-32
EEYLVSHAIPCYSLDGDNVRHGLNRNLGFSPGDREENIRRIAEVAKLFADAGLVCITSFISPFAK

SEQ ID NO: 39982 - protein, 90 aa, Homo sapiens
  MAP TO AC004926.2; EXPRESSED IN ADULT LIVER, SIGNAL =  21; EXPRESSED IN PLACENTA, SIGNAL =  24; EXPRESSED IN LUNG, SIGNAL =  26; EXPRESSED IN HELA, SIGNAL =  21; EXPRESSED IN HEART, SIGNAL =  20; EXPRESSED IN BRAIN, SIGNAL =  22; EXPRESSED IN BONE MARROW, SIGNAL =  22; EXPRESSED IN FETAL LIVER, SIGNAL =  20; EST_HUMAN HIT: BE158761.1, EVALUE 1.00e-07; SWISSPROT HIT: P39188, EVALUE 4.00e-05
RDREREEEEEEEEEEEEEEEEEEEEEEEEQEEEEEEEEEEEERNRERERERERGRLAMLPRLKCSHVIIAHCSLKFLGSSDPVAPASEVT

SEQ ID NO: 39983 - protein, 66 aa, Homo sapiens
  MAP TO AC004926.2; EXPRESSED IN ADULT LIVER, SIGNAL =  21; EXPRESSED IN PLACENTA, SIGNAL =  24; EXPRESSED IN LUNG, SIGNAL =  26; EXPRESSED IN HELA, SIGNAL =  21; EXPRESSED IN HEART, SIGNAL =  20; EXPRESSED IN BRAIN, SIGNAL =  22; EXPRESSED IN BONE MARROW, SIGNAL =  22; EXPRESSED IN FETAL LIVER, SIGNAL =  20
ETEREKKKKRKKKKKKKKKKKKKKKKKKNKKKKRKRKRKRKRGTEKERERGREGDLLCYPDLSAVM

SEQ ID NO: 39984 - protein, 28 aa, Homo sapiens
  MAP TO AC004960.1; EXPRESSED IN LUNG, SIGNAL = 4.1; EXPRESSED IN HELA, SIGNAL = 3.2; EXPRESSED IN BRAIN, SIGNAL = 3.5; EXPRESSED IN BONE MARROW, SIGNAL = 3.3; EXPRESSED IN ADULT LIVER, SIGNAL =   4; EXPRESSED IN PLACENTA, SIGNAL = 3.5; EXPRESSED IN HEART, SIGNAL =   3; EXPRESSED IN FETAL LIVER, SIGNAL = 3.2
LEAEKSKNKVLAHSVSSEGQTSGSEGAF

SEQ ID NO: 39985 - protein, 45 aa, Homo sapiens
  MAP TO AC004526.1; EXPRESSED IN PLACENTA, SIGNAL = 1.8; EXPRESSED IN LUNG, SIGNAL = 1.7; EXPRESSED IN FETAL LIVER, SIGNAL = 2.6; EXPRESSED IN BRAIN, SIGNAL = 1.5; EXPRESSED IN BONE MARROW, SIGNAL = 1.6; EXPRESSED IN ADULT LIVER, SIGNAL = 1.7; EXPRESSED IN HEART, SIGNAL = 1.6; EST_HUMAN HIT: BF364290.1, EVALUE 2.70e-01; SWISSPROT HIT: Q04690, EVALUE 7.00e-20
NSIGAVGSAMFLRFINPAIVSPYEAGILDKKPPPRIERGLKLMSK

SEQ ID NO: 39986 - protein, 42 aa, Homo sapiens
  MAP TO AC006203.1; EXPRESSED IN PLACENTA, SIGNAL = 8.3; EXPRESSED IN ADULT LIVER, SIGNAL = 8.7; EXPRESSED IN LUNG, SIGNAL = 6.7; EXPRESSED IN HEART, SIGNAL = 7.5; EXPRESSED IN FETAL LIVER, SIGNAL = 9.7; EXPRESSED IN BRAIN, SIGNAL = 8.8; EXPRESSED IN BONE MARROW, SIGNAL = 8.1; EXPRESSED IN HELA, SIGNAL = 7.2; SWISSPROT HIT: Q99089, EVALUE 2.10e+00; EST_HUMAN HIT: BE963268.2, EVALUE 7.10e+00
SMRSFRDMSPTQLGALRIYTVKTDSSPLPFPHQKSEKSKSEP

SEQ ID NO: 39987 - protein, 26 aa, Homo sapiens
  MAP TO AC004931.1; EXPRESSED IN LUNG, SIGNAL = 1.9; EXPRESSED IN HELA, SIGNAL = 1.8; EXPRESSED IN FETAL LIVER, SIGNAL = 1.8; EXPRESSED IN BRAIN, SIGNAL = 2.1; EXPRESSED IN PLACENTA, SIGNAL = 1.8; EXPRESSED IN HEART, SIGNAL = 1.8; EXPRESSED IN BONE MARROW, SIGNAL =   2; EXPRESSED IN ADULT LIVER, SIGNAL =   2
DHKEEEQSTYLAVPFQANHVLAASVP

SEQ ID NO: 39988 - protein, 70 aa, Homo sapiens
  MAP TO AC004874.1; EXPRESSED IN PLACENTA, SIGNAL = 4.1; EXPRESSED IN HELA, SIGNAL = 3.3; EXPRESSED IN BRAIN, SIGNAL = 4.3; EXPRESSED IN ADULT LIVER, SIGNAL = 4.8; EXPRESSED IN HEART, SIGNAL = 4.9; EXPRESSED IN LUNG, SIGNAL = 4.4; EXPRESSED IN FETAL LIVER, SIGNAL = 4.2; EXPRESSED IN BONE MARROW, SIGNAL = 4.2; EST_HUMAN HIT: BF370000.1, EVALUE 9.00e-28; SWISSPROT HIT: Q10473, EVALUE 5.00e-08
MFIDLLAFLSFAEELKVPLEEYVHKRYPGLVKVVRNQKREGLIRARIEGWKVATGQVTGFFDAHVEFTAG

SEQ ID NO: 39989 - protein, 29 aa, Homo sapiens
  MAP TO AC004874.1; EXPRESSED IN PLACENTA, SIGNAL = 4.1; EXPRESSED IN HELA, SIGNAL = 3.3; EXPRESSED IN BRAIN, SIGNAL = 4.3; EXPRESSED IN ADULT LIVER, SIGNAL = 4.8; EXPRESSED IN HEART, SIGNAL = 4.9; EXPRESSED IN LUNG, SIGNAL = 4.4; EXPRESSED IN FETAL LIVER, SIGNAL = 4.2; EXPRESSED IN BONE MARROW, SIGNAL = 4.2; EST_HUMAN HIT: BF370000.1, EVALUE 3.00e-11; SWISSPROT HIT: P13093, EVALUE 3.80e+00
PRGVCPQTLPRAGEGGKKSEEGRPDPRSH

SEQ ID NO: 39990 - protein, 27 aa, Homo sapiens
  MAP TO AC004969.1; EXPRESSED IN LUNG, SIGNAL = 1.4; EXPRESSED IN FETAL LIVER, SIGNAL = 1.4; EXPRESSED IN BONE MARROW, SIGNAL = 1.3; EXPRESSED IN PLACENTA, SIGNAL = 1.5; EXPRESSED IN HEART, SIGNAL = 1.3; EXPRESSED IN BRAIN, SIGNAL = 1.3; EXPRESSED IN ADULT LIVER, SIGNAL = 1.4
FPNQTGAQAAFAAPVKAPYPEQCLPAP

SEQ ID NO: 39991 - protein, 27 aa, Homo sapiens
  MAP TO AC004969.1; EXPRESSED IN LUNG, SIGNAL = 1.4; EXPRESSED IN FETAL LIVER, SIGNAL = 1.4; EXPRESSED IN BONE MARROW, SIGNAL = 1.3; EXPRESSED IN PLACENTA, SIGNAL = 1.5; EXPRESSED IN HEART, SIGNAL = 1.3; EXPRESSED IN BRAIN, SIGNAL = 1.3; EXPRESSED IN ADULT LIVER, SIGNAL = 1.4; EST_HUMAN HIT: AI221371.1, EVALUE 8.00e-04
PQPNRGTGCVCSSCKSSIPRAVSPSSQ

SEQ ID NO: 39992 - protein, 40 aa, Homo sapiens
  MAP TO AC004529.1; EXPRESSED IN LUNG, SIGNAL = 4.4; EXPRESSED IN BRAIN, SIGNAL = 4.8; EXPRESSED IN ADULT LIVER, SIGNAL = 3.8; EXPRESSED IN PLACENTA, SIGNAL =   4; EXPRESSED IN HELA, SIGNAL = 4.2; EXPRESSED IN HEART, SIGNAL = 4.3; EXPRESSED IN FETAL LIVER, SIGNAL = 4.2; EXPRESSED IN BONE MARROW, SIGNAL = 3.9; EST_HUMAN HIT: BF370339.1, EVALUE 4.00e-16
DSAAAPKTPWGINIIKKNKKAVPRAFGVRLEDCQPATENQ

SEQ ID NO: 39993 - protein, 40 aa, Homo sapiens
  MAP TO AC004529.1; EXPRESSED IN LUNG, SIGNAL = 4.4; EXPRESSED IN BRAIN, SIGNAL = 4.8; EXPRESSED IN ADULT LIVER, SIGNAL = 3.8; EXPRESSED IN PLACENTA, SIGNAL =   4; EXPRESSED IN HELA, SIGNAL = 4.2; EXPRESSED IN HEART, SIGNAL = 4.3; EXPRESSED IN FETAL LIVER, SIGNAL = 4.2; EXPRESSED IN BONE MARROW, SIGNAL = 3.9; EST_HUMAN HIT: BF370339.1, EVALUE 3.00e-12; SWISSPROT HIT: P52947, EVALUE 3.70e+00
MTVLQPPKPPGASTSSRKIRRLSQGHLGSGWRTASQPRRT

SEQ ID NO: 39994 - protein, 41 aa, Homo sapiens
  MAP TO AC006206.3; EXPRESSED IN ADULT LIVER, SIGNAL = 5.7; EXPRESSED IN PLACENTA, SIGNAL = 4.8; EXPRESSED IN LUNG, SIGNAL = 4.2; EXPRESSED IN HELA, SIGNAL = 5.2; EXPRESSED IN HEART, SIGNAL =   5; EXPRESSED IN BRAIN, SIGNAL = 5.5; EXPRESSED IN FETAL LIVER, SIGNAL = 5.8; EXPRESSED IN BONE MARROW, SIGNAL = 5.3; SWISSPROT HIT: Q09806, EVALUE 8.30e+00
LYSNSHRISTLEKNLETRLSSVHCLSDQKDSTNNTQPTTLP

SEQ ID NO: 39995 - protein, 36 aa, Homo sapiens
  MAP TO AC006206.3; EXPRESSED IN ADULT LIVER, SIGNAL = 5.7; EXPRESSED IN PLACENTA, SIGNAL = 4.8; EXPRESSED IN LUNG, SIGNAL = 4.2; EXPRESSED IN HELA, SIGNAL = 5.2; EXPRESSED IN HEART, SIGNAL =   5; EXPRESSED IN BRAIN, SIGNAL = 5.5; EXPRESSED IN FETAL LIVER, SIGNAL = 5.8; EXPRESSED IN BONE MARROW, SIGNAL = 5.3
ITSRLIIFNFLLYFSFLGYTPIVIEYQHWRRTWRPG

SEQ ID NO: 39996 - protein, 85 aa, Homo sapiens
  MAP TO AC004254.1; EXPRESSED IN PLACENTA, SIGNAL = 3.7; EXPRESSED IN HELA, SIGNAL = 3.2; EXPRESSED IN HEART, SIGNAL = 3.7; EXPRESSED IN ADULT LIVER, SIGNAL = 3.7; EXPRESSED IN BONE MARROW, SIGNAL = 3.2; EXPRESSED IN BRAIN, SIGNAL = 3.6; EXPRESSED IN FETAL LIVER, SIGNAL = 3.4; EXPRESSED IN LUNG, SIGNAL =   4; EST_HUMAN HIT: BF131624.1, EVALUE 5.90e+00
RVLPIFLKVKPESCLSLVCQCHLSSFFQGLYFYLFIYHNAEDIMQYRFKQLVSPTSFPDLGTKTFQTQAELGLHIVYQGLGLIKD

SEQ ID NO: 39997 - protein, 75 aa, Homo sapiens
  MAP TO AC004533.1; EXPRESSED IN LUNG, SIGNAL = 2.7; EXPRESSED IN FETAL LIVER, SIGNAL = 2.4; EXPRESSED IN BRAIN, SIGNAL = 2.5; EXPRESSED IN BONE MARROW, SIGNAL = 2.5; EXPRESSED IN ADULT LIVER, SIGNAL = 2.5; EXPRESSED IN HELA, SIGNAL = 2.4; EXPRESSED IN PLACENTA, SIGNAL = 2.4; EXPRESSED IN HEART, SIGNAL = 2.7
TIKHALPGKRRKKKERERVTEREKDKEKEEEVKEEDEVEEEEGEKEEEKEVKRKKKKKEEEEEEMKFKCTFEKRF

SEQ ID NO: 39998 - protein, 27 aa, Homo sapiens
  MAP TO AC006210.1; EXPRESSED IN LUNG, SIGNAL = 3.9; EXPRESSED IN HELA, SIGNAL = 4.4; EXPRESSED IN FETAL LIVER, SIGNAL = 5.3; EXPRESSED IN BRAIN, SIGNAL = 4.7; EXPRESSED IN PLACENTA, SIGNAL = 4.3; EXPRESSED IN HEART, SIGNAL = 4.5; EXPRESSED IN BONE MARROW, SIGNAL = 4.5; EXPRESSED IN ADULT LIVER, SIGNAL = 4.6; SWISSPROT HIT: Q49406, EVALUE 6.60e+00
LKSLVLLCFSLVKVDEYMNGLVSANIS

SEQ ID NO: 39999 - protein, 64 aa, Homo sapiens
  MAP TO AC003669.1; EXPRESSED IN LUNG, SIGNAL = 1.4; EXPRESSED IN FETAL LIVER, SIGNAL = 1.3; EXPRESSED IN BRAIN, SIGNAL = 1.5; EXPRESSED IN BONE MARROW, SIGNAL = 1.5; EXPRESSED IN ADULT LIVER, SIGNAL = 1.1; EXPRESSED IN PLACENTA, SIGNAL = 1.4; EXPRESSED IN HEART, SIGNAL = 1.6; EST_HUMAN HIT: AI765078.1, EVALUE 5.00e-14
MNKNRINNAFFLNDQTLEFLKIPSTLAPPMDPSVPIWIIIFGVIFCIIIVAIALLILSGIWQRR

SEQ ID NO: 40000 - protein, 65 aa, Homo sapiens
  MAP TO AC005754.1; EXPRESSED IN BRAIN, SIGNAL =  14; EXPRESSED IN BONE MARROW, SIGNAL =  12; EXPRESSED IN ADULT LIVER, SIGNAL =  11; EXPRESSED IN PLACENTA, SIGNAL =  12; EXPRESSED IN LUNG, SIGNAL =  16; EXPRESSED IN HEART, SIGNAL =  15; EXPRESSED IN HELA, SIGNAL =  14; EXPRESSED IN FETAL LIVER, SIGNAL =  12; EST_HUMAN HIT: BE263191.1, EVALUE 9.00e-07; SWISSPROT HIT: P30842, EVALUE 5.90e+00
VFSSRREGQRLFCGQLSKRSGAGCRGTGRERRPDSFQREQTVFAARTEEWEFAPKRKIGPGRVVR

SEQ ID NO: 40001 - protein, 48 aa, Homo sapiens
  MAP TO AC004986.2; EXPRESSED IN LUNG, SIGNAL = 3.7; EXPRESSED IN FETAL LIVER, SIGNAL = 3.5; EXPRESSED IN BRAIN, SIGNAL = 3.3; EXPRESSED IN BONE MARROW, SIGNAL = 3.5; EXPRESSED IN PLACENTA, SIGNAL = 3.5; EXPRESSED IN HELA, SIGNAL = 3.8; EXPRESSED IN HEART, SIGNAL = 2.9; EXPRESSED IN ADULT LIVER, SIGNAL = 4.9; SWISSPROT HIT: Q04206, EVALUE 3.00e-13; EST_HUMAN HIT: AA206944.1, EVALUE 3.00e-12
PPSLPRLGKEQKALLHLQFDDEDLGALLGNSTDPAVFTDLASINNSEF

SEQ ID NO: 40002 - protein, 42 aa, Homo sapiens
  MAP TO AC002542.1; EXPRESSED IN PLACENTA, SIGNAL = 7.5; EXPRESSED IN HEART, SIGNAL =   7; EXPRESSED IN FETAL LIVER, SIGNAL = 7.2; EXPRESSED IN BRAIN, SIGNAL = 7.2; EXPRESSED IN BONE MARROW, SIGNAL = 7.7; EXPRESSED IN LUNG, SIGNAL = 9.1; EXPRESSED IN HELA, SIGNAL = 7.6; EXPRESSED IN ADULT LIVER, SIGNAL =   8; EST_HUMAN HIT: T91630.1, EVALUE 5.40e+00
PTATSFLPTQRLQLGRAGPGLSQLPLWCLPAKHSSGVSPGCE

SEQ ID NO: 40003 - protein, 42 aa, Homo sapiens
  MAP TO AC002542.1; EXPRESSED IN PLACENTA, SIGNAL = 7.5; EXPRESSED IN HEART, SIGNAL =   7; EXPRESSED IN FETAL LIVER, SIGNAL = 7.2; EXPRESSED IN BRAIN, SIGNAL = 7.2; EXPRESSED IN BONE MARROW, SIGNAL = 7.7; EXPRESSED IN LUNG, SIGNAL = 9.1; EXPRESSED IN HELA, SIGNAL = 7.6; EXPRESSED IN ADULT LIVER, SIGNAL =   8; EST_HUMAN HIT: BE896708.1, EVALUE 6.20e-01
YLLQHLFSLHSDSSLGGQGQGCHSFPCGVCLPSTALELALGV

SEQ ID NO: 40004 - protein, 30 aa, Homo sapiens
  MAP TO AC004384.1; EXPRESSED IN LUNG, SIGNAL = 3.2; EXPRESSED IN FETAL LIVER, SIGNAL = 2.9; EXPRESSED IN BRAIN, SIGNAL = 3.1; EXPRESSED IN BONE MARROW, SIGNAL = 2.5; EXPRESSED IN HELA, SIGNAL = 2.7; EXPRESSED IN PLACENTA, SIGNAL = 2.6; EXPRESSED IN HEART, SIGNAL = 3.1; EXPRESSED IN ADULT LIVER, SIGNAL = 2.7
NVFERCSLSLSFQVKDVGERGCNSNRITYL

SEQ ID NO: 40005 - protein, 83 aa, Homo sapiens
  MAP TO AC006372.2; EXPRESSED IN LUNG, SIGNAL =  12; EXPRESSED IN HELA, SIGNAL =  11; EXPRESSED IN HEART, SIGNAL =  11; EXPRESSED IN FETAL LIVER, SIGNAL =  11; EXPRESSED IN BRAIN, SIGNAL =  12; EXPRESSED IN PLACENTA, SIGNAL =  10; EXPRESSED IN BONE MARROW, SIGNAL =  12; EXPRESSED IN ADULT LIVER, SIGNAL =  10
VLGPTSMRRRSLFSNKRKERSRERSRRTGAFTGRRGTFTGRRGTFTGRRRVWDVHRKERDVHRKEERGVHRQEAPRLPSPRAS

SEQ ID NO: 40006 - protein, 62 aa, Homo sapiens
  MAP TO AC004926.2; EXPRESSED IN PLACENTA, SIGNAL = 1.4; EXPRESSED IN LUNG, SIGNAL = 1.6; EXPRESSED IN FETAL LIVER, SIGNAL = 1.4; EXPRESSED IN ADULT LIVER, SIGNAL = 1.5; EXPRESSED IN HEART, SIGNAL = 1.4; EXPRESSED IN BRAIN, SIGNAL = 1.7; EXPRESSED IN BONE MARROW, SIGNAL = 1.4; EST_HUMAN HIT: W29045.1, EVALUE 2.00e-08; SWISSPROT HIT: O65361, EVALUE 2.00e+00
DNTFFTRRQERKKAKWEEPLIKPSDLARNHYCEKSMGNAVPHDPITSSLPQQVGITVRDEIW

SEQ ID NO: 40007 - protein, 55 aa, Homo sapiens
  MAP TO AC005844.7; EXPRESSED IN BONE MARROW, SIGNAL = 6.4; EXPRESSED IN BRAIN, SIGNAL = 6.1; EXPRESSED IN ADULT LIVER, SIGNAL = 5.2; EXPRESSED IN PLACENTA, SIGNAL = 5.5; EXPRESSED IN HEART, SIGNAL = 6.7; EXPRESSED IN LUNG, SIGNAL = 6.2; EXPRESSED IN HELA, SIGNAL =   7; EXPRESSED IN FETAL LIVER, SIGNAL = 5.8; EST_HUMAN HIT: BE886088.1, EVALUE 1.00e-16; SWISSPROT HIT: P29375, EVALUE 9.00e-18
MAGVGPGGYAAEFVPPPECPVFEPSWEEFTDPLSFIGRIRPLAEKTGICKIRPPK

SEQ ID NO: 40008 - protein, 29 aa, Homo sapiens
  MAP TO AC004898.1; EXPRESSED IN LUNG, SIGNAL =   8; EXPRESSED IN PLACENTA, SIGNAL = 7.2; EXPRESSED IN HEART, SIGNAL = 7.4; EXPRESSED IN FETAL LIVER, SIGNAL = 7.8; EXPRESSED IN BRAIN, SIGNAL = 7.8; EXPRESSED IN BONE MARROW, SIGNAL = 7.5; EXPRESSED IN HELA, SIGNAL = 8.2; EXPRESSED IN ADULT LIVER, SIGNAL = 8.6; EST_HUMAN HIT: BE144340.1, EVALUE 7.80e+00
AVHLLQPKTPFRWHSKSSHSLMPCGSEHG

SEQ ID NO: 40009 - protein, 29 aa, Homo sapiens
  MAP TO AC004898.1; EXPRESSED IN LUNG, SIGNAL =   8; EXPRESSED IN PLACENTA, SIGNAL = 7.2; EXPRESSED IN HEART, SIGNAL = 7.4; EXPRESSED IN FETAL LIVER, SIGNAL = 7.8; EXPRESSED IN BRAIN, SIGNAL = 7.8; EXPRESSED IN BONE MARROW, SIGNAL = 7.5; EXPRESSED IN HELA, SIGNAL = 8.2; EXPRESSED IN ADULT LIVER, SIGNAL = 8.6
CRSPSTTENALQVAFEKQPLPDAMRERAW

SEQ ID NO: 40010 - protein, 44 aa, Homo sapiens
  MAP TO AC006425.9; EXPRESSED IN LUNG, SIGNAL = 3.5; EXPRESSED IN BRAIN, SIGNAL = 1.7; EXPRESSED IN BONE MARROW, SIGNAL = 3.7; EXPRESSED IN PLACENTA, SIGNAL = 2.8; EXPRESSED IN HELA, SIGNAL = 4.7; EXPRESSED IN HEART, SIGNAL = 3.8; EXPRESSED IN FETAL LIVER, SIGNAL = 4.5; EXPRESSED IN ADULT LIVER, SIGNAL = 3.6; EST_HUMAN HIT: BF570453.1, EVALUE 1.00e-11; SWISSPROT HIT: P52859, EVALUE 4.00e-08
EAVREVLHRNQRKHPKFLEMVELQISFKNYDSPEGQALLGHRQA

SEQ ID NO: 40011 - protein, 42 aa, Homo sapiens
  MAP TO AC006425.9; EXPRESSED IN LUNG, SIGNAL = 3.5; EXPRESSED IN BRAIN, SIGNAL = 1.7; EXPRESSED IN BONE MARROW, SIGNAL = 3.7; EXPRESSED IN PLACENTA, SIGNAL = 2.8; EXPRESSED IN HELA, SIGNAL = 4.7; EXPRESSED IN HEART, SIGNAL = 3.8; EXPRESSED IN FETAL LIVER, SIGNAL = 4.5; EXPRESSED IN ADULT LIVER, SIGNAL = 3.6; EST_HUMAN HIT: AW580069.1, EVALUE 4.00e-03
ASRAPSGLSPLPAPSSPCVSWVTSSTVTRPSLWISTTWKTRY

SEQ ID NO: 40012 - protein, 22 aa, Homo sapiens
  MAP TO AC004389.1; EXPRESSED IN PLACENTA, SIGNAL = 4.8; EXPRESSED IN ADULT LIVER, SIGNAL = 5.1; EXPRESSED IN LUNG, SIGNAL = 5.1; EXPRESSED IN HEART, SIGNAL = 4.1; EXPRESSED IN FETAL LIVER, SIGNAL = 4.1; EXPRESSED IN BRAIN, SIGNAL = 4.3; EXPRESSED IN HELA, SIGNAL = 3.9; EXPRESSED IN BONE MARROW, SIGNAL =   4; EST_HUMAN HIT: AL036943.3, EVALUE 1.00e-03
LRWIWAKYIENLLERIHQSSCH

SEQ ID NO: 40013 - protein, 43 aa, Homo sapiens
  MAP TO AC004549.1; EXPRESSED IN LUNG, SIGNAL = 9.3; EXPRESSED IN HEART, SIGNAL = 8.4; EXPRESSED IN FETAL LIVER, SIGNAL = 7.8; EXPRESSED IN BRAIN, SIGNAL = 8.3; EXPRESSED IN BONE MARROW, SIGNAL = 8.4; EXPRESSED IN HELA, SIGNAL = 8.1; EXPRESSED IN PLACENTA, SIGNAL = 8.4; EXPRESSED IN ADULT LIVER, SIGNAL = 8.3; SWISSPROT HIT: P39650, EVALUE 9.50e-01; EST_HUMAN HIT: AU135404.1, EVALUE 4.00e-17
QSLKMENEEFKKRFSDATSKAHQLEEDIVSVTHKAIEKETELD

SEQ ID NO: 40014 - protein, 164 aa, Homo sapiens
  MAP TO AC005849.1; EXPRESSED IN BRAIN, SIGNAL = 4.2; EXPRESSED IN BONE MARROW, SIGNAL = 4.1; EXPRESSED IN LUNG, SIGNAL = 4.1; EXPRESSED IN ADULT LIVER, SIGNAL = 4.1; EXPRESSED IN PLACENTA, SIGNAL = 4.4; EXPRESSED IN HEART, SIGNAL = 4.2; EXPRESSED IN HELA, SIGNAL = 4.4; EXPRESSED IN FETAL LIVER, SIGNAL = 4.5; EST_HUMAN HIT: AI752561.1, EVALUE 3.00e-66; SWISSPROT HIT: Q63086, EVALUE 8.00e-03
LNYLGPPFNEPDFNPPRLGAKTLPRATVDLEVWRSLNDKLRLTQNYEAYSHLLCYLRGLNRQAATAELRRSLAHFCTSLQGLLGSIAGVMAALGYPLPQPLPGTEPTWTPGPAHSDFLQKMDDFWLLKELQTWLWRSAKDFNRLKKKMQPPAAAVTLHLGAHGF

SEQ ID NO: 40015 - protein, 27 aa, Homo sapiens [sequence omitted]

SEQ ID NO: 40016 - protein, 176 aa, Homo sapiens
  MAP TO AC004552.1; EXPRESSED IN ADULT LIVER, SIGNAL = 1.9; EXPRESSED IN PLACENTA, SIGNAL = 1.1; EXPRESSED IN LUNG, SIGNAL = 1.2; EXPRESSED IN HEART, SIGNAL = 1.3; EXPRESSED IN BRAIN, SIGNAL = 1.1; EXPRESSED IN HELA, SIGNAL = 9.3; EXPRESSED IN FETAL LIVER, SIGNAL =   2; EXPRESSED IN BONE MARROW, SIGNAL = 1.2; SWISSPROT HIT: O14174, EVALUE 1.00e-06; EST_HUMAN HIT: AA729756.1, EVALUE 8.00e-48
EKLYDIYVEECGKEPEDPQELRSNVNLLEKLVRRESLPCLLVNLYPGNQGYSVMLQREDGSFAETIRLPYEERALLDYLDAEELPPALGDVLDKASVNIFHSGCVIVEVRDYRQSSNMQPPGYQSRHILLRPTMQTLAHDVKMMTRDGQKWSQEDKLQLESQLILATAEPLCLDPS

SEQ ID NO: 40017 - protein, 56 aa, Homo sapiens
  MAP TO AC005736.1; EXPRESSED IN PLACENTA, SIGNAL =   8; EXPRESSED IN LUNG, SIGNAL = 5.5; EXPRESSED IN HELA, SIGNAL = 7.7; EXPRESSED IN HEART, SIGNAL = 7.9; EXPRESSED IN FETAL LIVER, SIGNAL =  14; EXPRESSED IN BRAIN, SIGNAL =   9; EXPRESSED IN BONE MARROW, SIGNAL = 8.8; EXPRESSED IN ADULT LIVER, SIGNAL = 9.5; SWISSPROT HIT: O60503, EVALUE 3.00e-26; EST_HUMAN HIT: AU140135.1, EVALUE 4.00e-25
GQRAKESRCSCAEALLSGFEVIDGSQVSSGPRGQGTASSGNVSDLAQTVKTFDNLK

SEQ ID NO: 40018 - protein, 53 aa, Homo sapiens
  MAP TO AC006460.3; EXPRESSED IN FETAL LIVER, SIGNAL = 1.2; EXPRESSED IN BONE MARROW, SIGNAL = 0.63; EXPRESSED IN ADULT LIVER, SIGNAL = 0.82; EXPRESSED IN HELA, SIGNAL = 2.4; EXPRESSED IN LUNG, SIGNAL = 0.65; EXPRESSED IN PLACENTA, SIGNAL = 1.1; EXPRESSED IN BRAIN, SIGNAL = 2.4; EXPRESSED IN HEART, SIGNAL = 1.8; SWISSPROT HIT: O35589, EVALUE 1.00e-15; EST_HUMAN HIT: AV756314.1, EVALUE 1.00e-24
QPEKVMAKQMEFLCNQAGYERLQHAERRLSAGLYRQSSEEHSPNGLTSDNSDG

SEQ ID NO: 40019 - protein, 67 aa, Homo sapiens
  MAP TO AC004943.1; EXPRESSED IN PLACENTA, SIGNAL = 3.7; EXPRESSED IN LUNG, SIGNAL = 3.6; EXPRESSED IN HELA, SIGNAL = 3.5; EXPRESSED IN FETAL LIVER, SIGNAL = 4.1; EXPRESSED IN BRAIN, SIGNAL =   4; EXPRESSED IN BONE MARROW, SIGNAL = 3.3; EXPRESSED IN ADULT LIVER, SIGNAL = 3.9; EXPRESSED IN HEART, SIGNAL = 3.7; EST_HUMAN HIT: AI866657.1, EVALUE 2.00e-12; SWISSPROT HIT: O62836, EVALUE 3.00e-06
MYQCPYCKYSNADVNRLRVHAMTQHSVQPMLRCPLCQDMLNNKIHLQLHLTHLHSVAPDCVEKLIMT

SEQ ID NO: 40020 - protein, 66 aa, Homo sapiens
  MAP TO AC005038.1; EXPRESSED IN BONE MARROW, SIGNAL = 5.5; EXPRESSED IN PLACENTA, SIGNAL = 4.9; EXPRESSED IN LUNG, SIGNAL = 5.2; EXPRESSED IN HELA, SIGNAL = 5.4; EXPRESSED IN FETAL LIVER, SIGNAL = 5.9; EXPRESSED IN BRAIN, SIGNAL = 5.3; EXPRESSED IN ADULT LIVER, SIGNAL = 4.9; EXPRESSED IN HEART, SIGNAL =   5; EST_HUMAN HIT: BF182707.1, EVALUE 2.00e-32; SWISSPROT HIT: Q10206, EVALUE 1.00e-05
CCVDVLGAEQAGAQALIHFGPACLSPPARPLPVAFVLRQRSVALELCVKAFEAQNPDPKAPVVLLS

SEQ ID NO: 40021 - protein, 23 aa, Homo sapiens
  MAP TO AC005038.1; EXPRESSED IN BONE MARROW, SIGNAL = 5.5; EXPRESSED IN PLACENTA, SIGNAL = 4.9; EXPRESSED IN LUNG, SIGNAL = 5.2; EXPRESSED IN HELA, SIGNAL = 5.4; EXPRESSED IN FETAL LIVER, SIGNAL = 5.9; EXPRESSED IN BRAIN, SIGNAL = 5.3; EXPRESSED IN ADULT LIVER, SIGNAL = 4.9; EXPRESSED IN HEART, SIGNAL =   5; EST_HUMAN HIT: BF527020.1, EVALUE 3.00e-06
AAWMCWVLSKLELRLSYILALPA

SEQ ID NO: 40022 - protein, 54 aa, Homo sapiens
  MAP TO AC005738.1; EXPRESSED IN FETAL LIVER, SIGNAL = 6.9; EXPRESSED IN BRAIN, SIGNAL = 7.7; EXPRESSED IN BONE MARROW, SIGNAL = 7.2; EXPRESSED IN LUNG, SIGNAL = 8.5; EXPRESSED IN ADULT LIVER, SIGNAL =   8; EXPRESSED IN PLACENTA, SIGNAL = 7.8; EXPRESSED IN HEART, SIGNAL = 7.5; EXPRESSED IN HELA, SIGNAL = 8.2; EST_HUMAN HIT: AW952224.1, EVALUE 4.90e+00
FSECSCYNSNSGAVDSARAWAAFSLTEQTLAMGDEHLCCAGGTAERQVELLVAW

SEQ ID NO: 40023 - protein, 49 aa, Homo sapiens
  MAP TO AC004914.1; EXPRESSED IN LUNG, SIGNAL = 1.6; EXPRESSED IN FETAL LIVER, SIGNAL = 1.8; EXPRESSED IN BONE MARROW, SIGNAL = 1.8; EXPRESSED IN PLACENTA, SIGNAL = 1.8; EXPRESSED IN BRAIN, SIGNAL = 1.8; EXPRESSED IN ADULT LIVER, SIGNAL = 1.7; EXPRESSED IN HEART, SIGNAL = 1.5; EST_HUMAN HIT: AW297480.1, EVALUE 9.00e-25; SWISSPROT HIT: P24557, EVALUE 8.00e-26
CYCNYTTDVVASVAFGTPVDSWQAPEDPFVKHCKRFFEFCIPRPILVLL

SEQ ID NO: 40024 - protein, 109 aa, Homo sapiens
  MAP TO AC005871.2; EXPRESSED IN FETAL LIVER, SIGNAL = 2.6; EXPRESSED IN BONE MARROW, SIGNAL = 2.6; EXPRESSED IN BRAIN, SIGNAL = 2.5; EXPRESSED IN ADULT LIVER, SIGNAL = 2.8; EXPRESSED IN PLACENTA, SIGNAL =   8; EXPRESSED IN LUNG, SIGNAL = 2.9; EXPRESSED IN HEART, SIGNAL = 2.7; EXPRESSED IN HELA, SIGNAL = 2.9; EST_HUMAN HIT: AI948731.1, EVALUE 3.00e-25; SWISSPROT HIT: P55937, EVALUE 8.70e-01
DEPVARKCQVETSQQTVHERWWNSVLHHPHASQLSPSPELSFTWRKVPSSRLPPSLGQLASKDWSKQEYKDPVPSLIQVISERPSQLQGPMGSATESQPNISLHPILLP

SEQ ID NO: 40025 - protein, 33 aa, Homo sapiens
  MAP TO AC005871.2; EXPRESSED IN FETAL LIVER, SIGNAL = 2.6; EXPRESSED IN BONE MARROW, SIGNAL = 2.6; EXPRESSED IN BRAIN, SIGNAL = 2.5; EXPRESSED IN ADULT LIVER, SIGNAL = 2.8; EXPRESSED IN PLACENTA, SIGNAL =   8; EXPRESSED IN LUNG, SIGNAL = 2.9; EXPRESSED IN HEART, SIGNAL = 2.7; EXPRESSED IN HELA, SIGNAL = 2.9; EST_HUMAN HIT: AI948731.1, EVALUE 4.00e-15
MNQWQENARWKHPNRQSMSDGGTLCCTTHMPRS

SEQ ID NO: 40026 - protein, 34 aa, Homo sapiens
  MAP TO AC005751.1; EXPRESSED IN LUNG, SIGNAL =  19; EXPRESSED IN PLACENTA, SIGNAL =  17; EXPRESSED IN HELA, SIGNAL =  18; EXPRESSED IN HEART, SIGNAL =  16; EXPRESSED IN FETAL LIVER, SIGNAL =  16; EXPRESSED IN BRAIN, SIGNAL =  18; EXPRESSED IN BONE MARROW, SIGNAL =  16; EXPRESSED IN ADULT LIVER, SIGNAL =  17; EST_HUMAN HIT: AI214803.1, EVALUE 2.00e+00
SYKPDIKLSTLLNFHLEVLEKNLPQYSFPLLEKC

SEQ ID NO: 40027 - protein, 69 aa, Homo sapiens
  MAP TO AC005017.1; EXPRESSED IN LUNG, SIGNAL =   5; EXPRESSED IN FETAL LIVER, SIGNAL = 4.8; EXPRESSED IN PLACENTA, SIGNAL = 4.9; EXPRESSED IN HELA, SIGNAL = 4.6; EXPRESSED IN BRAIN, SIGNAL = 4.9; EXPRESSED IN BONE MARROW, SIGNAL = 4.9; EXPRESSED IN ADULT LIVER, SIGNAL = 4.8; EXPRESSED IN HEART, SIGNAL = 4.8; SWISSPROT HIT: P29899, EVALUE 3.40e+00
CYHCHPSLQGSLRWGKRTCDQLLHTSSWKRHTSILLTIYWLKSQVTTHNFKGARKNSLPTAHSSRTENA

SEQ ID NO: 40028 - protein, 41 aa, Homo sapiens
  MAP TO AC004924.2; EXPRESSED IN LUNG, SIGNAL = 1.8; EXPRESSED IN FETAL LIVER, SIGNAL = 1.2; EXPRESSED IN BONE MARROW, SIGNAL = 1.2; EXPRESSED IN PLACENTA, SIGNAL = 2.3; EXPRESSED IN HEART, SIGNAL = 1.7; EXPRESSED IN BRAIN, SIGNAL =   3; EXPRESSED IN ADULT LIVER, SIGNAL = 1.9; SWISSPROT HIT: P10267, EVALUE 2.00e-09; EST_HUMAN HIT: H75727.1, EVALUE 1.00e-13
CIQQLQRDSDQGEGAMMMVVVLSKRKGGYVGERKRDQTVTV

SEQ ID NO: 40029 - protein, 40 aa, Homo sapiens
  MAP TO AC005031.1; EXPRESSED IN LUNG, SIGNAL = 1.6; EXPRESSED IN ADULT LIVER, SIGNAL = 2.5; EXPRESSED IN PLACENTA, SIGNAL =   2; EXPRESSED IN HELA, SIGNAL = 1.8; EXPRESSED IN HEART, SIGNAL = 2.3; EXPRESSED IN FETAL LIVER, SIGNAL = 1.9; EXPRESSED IN BRAIN, SIGNAL = 2.1; EXPRESSED IN BONE MARROW, SIGNAL = 1.9; EST_HUMAN HIT: W02108.1, EVALUE 1.40e+00; SWISSPROT HIT: Q16637, EVALUE 1.10e-01
HALKNGDICETSGKPKTTPKRKPAKKNKSQKKNTAASLQQ

SEQ ID NO: 40030 - protein, 54 aa, Homo sapiens
  MAP TO AC004941.2; EXPRESSED IN PLACENTA, SIGNAL = 1.8; EXPRESSED IN LUNG, SIGNAL =   2; EXPRESSED IN FETAL LIVER, SIGNAL = 1.8; EXPRESSED IN BONE MARROW, SIGNAL = 1.8; EXPRESSED IN ADULT LIVER, SIGNAL =   3; EXPRESSED IN HELA, SIGNAL = 1.7; EXPRESSED IN HEART, SIGNAL = 2.1; EXPRESSED IN BRAIN, SIGNAL = 2.1; EST_HUMAN HIT: AI820531.1, EVALUE 8.00e-09; SWISSPROT HIT: Q00555, EVALUE 4.60e+00
MNVIFMPVKKTSILQPMDQEIILTLKLYYLRNTFYKAVAVIDNVVPLTDPDKVN

SEQ ID NO: 40031 - protein, 72 aa, Homo sapiens
  MAP TO AC005035.1; EXPRESSED IN PLACENTA, SIGNAL =   1; EXPRESSED IN LUNG, SIGNAL = 0.55; EXPRESSED IN HEART, SIGNAL = 1.3; EXPRESSED IN FETAL LIVER, SIGNAL = 0.91; EXPRESSED IN BONE MARROW, SIGNAL = 0.84; EXPRESSED IN ADULT LIVER, SIGNAL = 1.3; EXPRESSED IN BRAIN, SIGNAL = 1.9; EST_HUMAN HIT: BE560763.1, EVALUE 1.00e-07
RWREMEEHRQAERLQRQLQQEQAYLLSLQHDHRRPHPQHSQQPPPPQQERSKPSFHAPEPKAHYEPADRARE

SEQ ID NO: 40032 - protein, 124 aa, Homo sapiens
  MAP TO AC004945.1; EXPRESSED IN LUNG, SIGNAL = 7.5; EXPRESSED IN ADULT LIVER, SIGNAL = 6.7; EXPRESSED IN PLACENTA, SIGNAL = 6.5; EXPRESSED IN HELA, SIGNAL =   7; EXPRESSED IN HEART, SIGNAL = 7.6; EXPRESSED IN FETAL LIVER, SIGNAL = 6.8; EXPRESSED IN BRAIN, SIGNAL = 8.3; EXPRESSED IN BONE MARROW, SIGNAL = 6.3; EST_HUMAN HIT: BE263998.1, EVALUE 4.00e-20; SWISSPROT HIT: O86576, EVALUE 2.50e+00
MEEALLSLAVASSPRSLNQQLPELPDPRYILEPQDNPELAPALVCALCCCCFGIISCSYGHHCFKAVMFLSGLLSGALVIFLLFHKEQVLEIQLRLGVSTGITLGIGLFCSLVTMLICSVGLFL

SEQ ID NO: 40033 - protein, 54 aa, Homo sapiens
  MAP TO AC005774.1; EXPRESSED IN FETAL LIVER, SIGNAL = 2.3; EXPRESSED IN PLACENTA, SIGNAL = 0.68; EXPRESSED IN ADULT LIVER, SIGNAL = 0.62; EXPRESSED IN LUNG, SIGNAL = 0.61; EXPRESSED IN BONE MARROW, SIGNAL = 0.54; EXPRESSED IN BRAIN, SIGNAL = 2.4; EXPRESSED IN HELA, SIGNAL = 2.6; EXPRESSED IN HEART, SIGNAL = 2.7
VTSSVSGTENRMLVKPQGVAFKVQRVTCTQTFNVRQKLTSGSDKSLKNDAGVHN

SEQ ID NO: 40034 - protein, 62 aa, Homo sapiens
  MAP TO AC005029.1; EXPRESSED IN BRAIN, SIGNAL = 2.5; EXPRESSED IN PLACENTA, SIGNAL = 2.2; EXPRESSED IN LUNG, SIGNAL = 1.8; EXPRESSED IN HEART, SIGNAL = 2.3; EXPRESSED IN BONE MARROW, SIGNAL = 2.5; EXPRESSED IN ADULT LIVER, SIGNAL = 2.6; EXPRESSED IN HELA, SIGNAL = 2.1; EXPRESSED IN FETAL LIVER, SIGNAL = 2.5; SWISSPROT HIT: Q28620, EVALUE 7.80e+00; EST_HUMAN HIT: AW471138.1, EVALUE 2.30e-01
EHFFIHCFVHPPTKAHVINDALVHQIPEVSAFPSLEELPLAIHKSLEPYIYYRSWALVGHRS

SEQ ID NO: 40035 - protein, 54 aa, Homo sapiens
  MAP TO AC006327.3; EXPRESSED IN HELA, SIGNAL = 1.9; EXPRESSED IN HEART, SIGNAL = 1.7; EXPRESSED IN PLACENTA, SIGNAL = 1.7; EXPRESSED IN LUNG, SIGNAL = 1.6; EXPRESSED IN FETAL LIVER, SIGNAL = 1.7; EXPRESSED IN BRAIN, SIGNAL =   2; EXPRESSED IN BONE MARROW, SIGNAL = 1.8; EXPRESSED IN ADULT LIVER, SIGNAL = 1.5
EEMGSIKQQLAIVACIIYAKDTNISASNPNEMSSRENPGIHKFVYGAEFIIKPN

SEQ ID NO: 40036 - protein, 23 aa, Homo sapiens
  MAP TO AC006327.3; EXPRESSED IN HELA, SIGNAL = 1.9; EXPRESSED IN HEART, SIGNAL = 1.7; EXPRESSED IN PLACENTA, SIGNAL = 1.7; EXPRESSED IN LUNG, SIGNAL = 1.6; EXPRESSED IN FETAL LIVER, SIGNAL = 1.7; EXPRESSED IN BRAIN, SIGNAL =   2; EXPRESSED IN BONE MARROW, SIGNAL = 1.8; EXPRESSED IN ADULT LIVER, SIGNAL = 1.5
LHQAAASHCGMHYLCERYEHFCL

SEQ ID NO: 40037 - protein, 75 aa, Homo sapiens
  MAP TO AC005034.1; EXPRESSED IN LUNG, SIGNAL = 5.4; EXPRESSED IN HELA, SIGNAL = 4.9; EXPRESSED IN HEART, SIGNAL = 4.1; EXPRESSED IN FETAL LIVER, SIGNAL = 4.9; EXPRESSED IN PLACENTA, SIGNAL = 4.7; EXPRESSED IN BRAIN, SIGNAL = 5.6; EXPRESSED IN BONE MARROW, SIGNAL = 5.1; EXPRESSED IN ADULT LIVER, SIGNAL = 5.2; SWISSPROT HIT: P16383, EVALUE 4.00e-05; EST_HUMAN HIT: AI816424.1, EVALUE 1.00e-21
LFPSVKIPDAAFIQAARRKRELARAQDDYISLDVQHTSSISGMKRESEDDPESEPDDHEKRIPFTLRPQTLRQRM

SEQ ID NO: 40038 - protein, 20 aa, Homo sapiens
  MAP TO AC004943.1; EXPRESSED IN BRAIN, SIGNAL = 2.9; EXPRESSED IN PLACENTA, SIGNAL = 3.4; EXPRESSED IN LUNG, SIGNAL = 3.4; EXPRESSED IN HEART, SIGNAL = 2.8; EXPRESSED IN BONE MARROW, SIGNAL =   3; EXPRESSED IN ADULT LIVER, SIGNAL = 3.3; EXPRESSED IN HELA, SIGNAL = 3.1; EXPRESSED IN FETAL LIVER, SIGNAL = 3.1
KKPLKMLKDPVKQLLIQRSL

SEQ ID NO: 40039 - protein, 27 aa, Homo sapiens
  MAP TO AC004943.1; EXPRESSED IN BRAIN, SIGNAL = 2.9; EXPRESSED IN PLACENTA, SIGNAL = 3.4; EXPRESSED IN LUNG, SIGNAL = 3.4; EXPRESSED IN HEART, SIGNAL = 2.8; EXPRESSED IN BONE MARROW, SIGNAL =   3; EXPRESSED IN ADULT LIVER, SIGNAL = 3.3; EXPRESSED IN HELA, SIGNAL = 3.1; EXPRESSED IN FETAL LIVER, SIGNAL = 3.1
SGSAAVSLGPSTSSMASSETEEKHVKG

SEQ ID NO: 40040 - protein, 49 aa, Homo sapiens
  MAP TO AC005038.1; EXPRESSED IN BRAIN, SIGNAL = 3.1; EXPRESSED IN ADULT LIVER, SIGNAL = 2.7; EXPRESSED IN PLACENTA, SIGNAL = 2.8; EXPRESSED IN LUNG, SIGNAL =   3; EXPRESSED IN HELA, SIGNAL =   3; EXPRESSED IN HEART, SIGNAL = 2.8; EXPRESSED IN BONE MARROW, SIGNAL =   3; EXPRESSED IN FETAL LIVER, SIGNAL = 2.9; SWISSPROT HIT: P75361, EVALUE 4.70e+00; EST_HUMAN HIT: AA350764.1, EVALUE 6.00e-18
HTEALLYGFQSIAETIDVNYSDVVPGLIGLIPRISISNVQLADTVMFTI

SEQ ID NO: 40041 - protein, 57 aa, Homo sapiens
  MAP TO AC005038.1; EXPRESSED IN BRAIN, SIGNAL = 3.1; EXPRESSED IN ADULT LIVER, SIGNAL = 2.7; EXPRESSED IN PLACENTA, SIGNAL = 2.8; EXPRESSED IN LUNG, SIGNAL =   3; EXPRESSED IN HELA, SIGNAL =   3; EXPRESSED IN HEART, SIGNAL = 2.8; EXPRESSED IN BONE MARROW, SIGNAL =   3; EXPRESSED IN FETAL LIVER, SIGNAL = 2.9; SWISSPROT HIT: Q10136, EVALUE 1.10e-01; EST_HUMAN HIT: AW854061.1, EVALUE 1.00e-16
VTPSSSSKPVAPSFPSTQRPSSTASNPSQRPLTSTILMWCLGSLASSHGSASATCSW

SEQ ID NO: 40042 - protein, 53 aa, Homo sapiens
  MAP TO AC002545.1; EXPRESSED IN BONE MARROW, SIGNAL =  18; EXPRESSED IN PLACENTA, SIGNAL =  12; EXPRESSED IN LUNG, SIGNAL =  15; EXPRESSED IN HELA, SIGNAL =  17; EXPRESSED IN HEART, SIGNAL =  52; EXPRESSED IN FETAL LIVER, SIGNAL =  25; EXPRESSED IN ADULT LIVER, SIGNAL =  20; EXPRESSED IN BRAIN, SIGNAL =  19; SWISSPROT HIT: P26626, EVALUE 4.70e+00
KLLILESFPEGVLFRQLLPKLALDSYPQDKILQLNHLPVNGKGHPPADGKCGH

SEQ ID NO: 40043 - protein, 44 aa, Homo sapiens
  MAP TO AC003025.1; EXPRESSED IN PLACENTA, SIGNAL = 2.4; EXPRESSED IN HEART, SIGNAL = 2.5; EXPRESSED IN FETAL LIVER, SIGNAL = 2.5; EXPRESSED IN BRAIN, SIGNAL = 2.5; EXPRESSED IN LUNG, SIGNAL = 2.7; EXPRESSED IN HELA, SIGNAL = 2.5; EXPRESSED IN BONE MARROW, SIGNAL = 2.6; EXPRESSED IN ADULT LIVER, SIGNAL = 2.5; EST_HUMAN HIT: BE968390.1, EVALUE 9.10e+00; SWISSPROT HIT: P97368, EVALUE 3.70e+00
SLPLSPSACSIPSLAALTTDPWLKAAEEQETVSLDNPGPDSGLT

SEQ ID NO: 40044 - protein, 112 aa, Homo sapiens
  MAP TO AC003677.1; EXPRESSED IN PLACENTA, SIGNAL = 1.1; EXPRESSED IN LUNG, SIGNAL = 1.2; EXPRESSED IN FETAL LIVER, SIGNAL = 1.3; EXPRESSED IN BONE MARROW, SIGNAL = 1.2; EXPRESSED IN ADULT LIVER, SIGNAL = 1.3; EXPRESSED IN HEART, SIGNAL = 1.8; EXPRESSED IN BRAIN, SIGNAL = 1.2; EST_HUMAN HIT: AW901167.1, EVALUE 1.00e-28; SWISSPROT HIT: P12522, EVALUE 4.00e+00
NGSHTDSLYRAPGKAADTQCQLLRAAMDTEPCRTTGTELPKALGKYSLHQCSLDVRHGVKGDYFGALRFNDCPGVFQTCMFQTVAPFFWLISPFWNGSTYPMLVPPLYLGSN

SEQ ID NO: 40045 - protein, 64 aa, Homo sapiens
  MAP TO AC006468.9; EXPRESSED IN BRAIN, SIGNAL = 9.3; EXPRESSED IN ADULT LIVER, SIGNAL = 9.4; EXPRESSED IN PLACENTA, SIGNAL = 8.1; EXPRESSED IN LUNG, SIGNAL =  10; EXPRESSED IN HELA, SIGNAL = 8.4; EXPRESSED IN HEART, SIGNAL = 7.6; EXPRESSED IN BONE MARROW, SIGNAL = 8.5; EXPRESSED IN FETAL LIVER, SIGNAL = 8.8; SWISSPROT HIT: Q9Y5W9, EVALUE 1.00e-18; EST_HUMAN HIT: BE742402.1, EVALUE 7.00e-13
VLQSVVLLSDSQLHLFLQSQLSVPEIEACVQGRSTMTVSDAILRYAMSNCGWAQEERQSSSHLA

SEQ ID NO: 40046 - protein, 25 aa, Homo sapiens
  MAP TO AC006468.9; EXPRESSED IN BRAIN, SIGNAL = 9.3; EXPRESSED IN ADULT LIVER, SIGNAL = 9.4; EXPRESSED IN PLACENTA, SIGNAL = 8.1; EXPRESSED IN LUNG, SIGNAL =  10; EXPRESSED IN HELA, SIGNAL = 8.4; EXPRESSED IN HEART, SIGNAL = 7.6; EXPRESSED IN BONE MARROW, SIGNAL = 8.5; EXPRESSED IN FETAL LIVER, SIGNAL = 8.8; SWISSPROT HIT: P37889, EVALUE 2.30e+00; EST_HUMAN HIT: AU136644.1, EVALUE 6.00e-09
SCRVWFSCQTASCTYSCKASSRCLR

SEQ ID NO: 40047 - protein, 85 aa, Homo sapiens
  MAP TO AC004928.2; EXPRESSED IN LUNG, SIGNAL = 1.6; EXPRESSED IN BRAIN, SIGNAL = 1.4; EXPRESSED IN PLACENTA, SIGNAL = 1.6; EXPRESSED IN HEART, SIGNAL = 1.6; EXPRESSED IN FETAL LIVER, SIGNAL = 1.6; EXPRESSED IN BONE MARROW, SIGNAL = 1.4; EXPRESSED IN ADULT LIVER, SIGNAL = 1.6
DLPQNSRASVQVQTSVIFQVGSQVGSSGHGRPHKREEHFSSYHPKPILRAASPKQLLYLVVLKQQNYLCKQSSDKSYQIEKGPCL

SEQ ID NO: 40048 - protein, 99 aa, Homo sapiens
  MAP TO AC003692.1; EXPRESSED IN PLACENTA, SIGNAL = 1.4; EXPRESSED IN LUNG, SIGNAL = 1.2; EXPRESSED IN FETAL LIVER, SIGNAL = 1.5; EXPRESSED IN BRAIN, SIGNAL = 1.2; EXPRESSED IN ADULT LIVER, SIGNAL = 1.5; EXPRESSED IN HELA, SIGNAL = 2.3; EXPRESSED IN HEART, SIGNAL = 1.8; EXPRESSED IN BONE MARROW, SIGNAL = 1.6; SWISSPROT HIT: P07354, EVALUE 2.00e-03; EST_HUMAN HIT: AU117728.1, EVALUE 2.10e-02
DLKVEMMAGGTQITPLNDNVTIFCNIFYSQPLNITSMGITWFWKSLTFDKEVKVFEFFGDHQEAFRPGAIVSPWRLKSGDASLRLPGIQLEEAGEYRCE

SEQ ID NO: 40049 - protein, 39 aa, Homo sapiens
  MAP TO AC004883.2; EXPRESSED IN PLACENTA, SIGNAL = 1.9; EXPRESSED IN HELA, SIGNAL = 1.9; EXPRESSED IN HEART, SIGNAL =   2; EXPRESSED IN FETAL LIVER, SIGNAL = 1.9; EXPRESSED IN BRAIN, SIGNAL = 1.7; EXPRESSED IN ADULT LIVER, SIGNAL = 1.8; EXPRESSED IN LUNG, SIGNAL = 2.2; EXPRESSED IN BONE MARROW, SIGNAL = 1.9; EST_HUMAN HIT: BF111457.1, EVALUE 1.00e-15
KAEVACIAVYETDVFVVGTERGRAFVNTRKDFQKDFVKY

SEQ ID NO: 40050 - protein, 32 aa, Homo sapiens
  MAP TO AC004889.1; EXPRESSED IN BONE MARROW, SIGNAL = 2.8; EXPRESSED IN PLACENTA, SIGNAL = 2.7; EXPRESSED IN LUNG, SIGNAL = 3.2; EXPRESSED IN HELA, SIGNAL = 2.8; EXPRESSED IN FETAL LIVER, SIGNAL = 3.3; EXPRESSED IN ADULT LIVER, SIGNAL = 3.1; EXPRESSED IN HEART, SIGNAL = 2.9; EXPRESSED IN BRAIN, SIGNAL = 2.5; EST_HUMAN HIT: AA059348.1, EVALUE 2.00e-12; SWISSPROT HIT: Q12774, EVALUE 1.00e-13
CDVVLNHAPDFRRVYLPYVTNQTYQERTFQSL

SEQ ID NO: 40051 - protein, 17 aa, Homo sapiens
  MAP TO AC004889.1; EXPRESSED IN BONE MARROW, SIGNAL = 2.8; EXPRESSED IN PLACENTA, SIGNAL = 2.7; EXPRESSED IN LUNG, SIGNAL = 3.2; EXPRESSED IN HELA, SIGNAL = 2.8; EXPRESSED IN FETAL LIVER, SIGNAL = 3.3; EXPRESSED IN ADULT LIVER, SIGNAL = 3.1; EXPRESSED IN HEART, SIGNAL = 2.9; EXPRESSED IN BRAIN, SIGNAL = 2.5; EST_HUMAN HIT: BE183479.1, EVALUE 1.70e-02
TWKRTLRTISSPSKYVT

SEQ ID NO: 40052 - protein, 59 aa, Homo sapiens
  MAP TO AC003079.1; EXPRESSED IN PLACENTA, SIGNAL = 2.6; EXPRESSED IN LUNG, SIGNAL = 2.9; EXPRESSED IN HELA, SIGNAL = 2.9; EXPRESSED IN HEART, SIGNAL = 2.5; EXPRESSED IN FETAL LIVER, SIGNAL = 2.7; EXPRESSED IN BRAIN, SIGNAL = 2.5; EXPRESSED IN ADULT LIVER, SIGNAL = 2.7; EXPRESSED IN BONE MARROW, SIGNAL = 2.6; SWISSPROT HIT: O30808, EVALUE 3.50e+00; EST_HUMAN HIT: AI940727.1, EVALUE 7.00e-26
MDGTTAPVTKSGAAKLVKRNFLEALKSNDFGKLKAILIQRQIDVDTVFEVEDENMVLAS

SEQ ID NO: 40053 - protein, 36 aa, Homo sapiens
  MAP TO AC004990.1; EXPRESSED IN PLACENTA, SIGNAL = 3.5; EXPRESSED IN LUNG, SIGNAL = 3.9; EXPRESSED IN HELA, SIGNAL = 3.6; EXPRESSED IN HEART, SIGNAL = 3.3; EXPRESSED IN FETAL LIVER, SIGNAL = 3.4; EXPRESSED IN ADULT LIVER, SIGNAL = 3.7; EXPRESSED IN BRAIN, SIGNAL =   3; EXPRESSED IN BONE MARROW, SIGNAL = 3.3; EST_HUMAN HIT: AI762801.1, EVALUE 3.00e-06
AKAKPESPWTSLTRKGIVRVVFFPFFFRWWLQVTSK

SEQ ID NO: 40054 - protein, 44 aa, Homo sapiens
  MAP TO AC004990.1; EXPRESSED IN PLACENTA, SIGNAL = 3.5; EXPRESSED IN LUNG, SIGNAL = 3.9; EXPRESSED IN HELA, SIGNAL = 3.6; EXPRESSED IN HEART, SIGNAL = 3.3; EXPRESSED IN FETAL LIVER, SIGNAL = 3.4; EXPRESSED IN ADULT LIVER, SIGNAL = 3.7; EXPRESSED IN BRAIN, SIGNAL =   3; EXPRESSED IN BONE MARROW, SIGNAL = 3.3; SWISSPROT HIT: P71389, EVALUE 2.10e+00; EST_HUMAN HIT: AI762801.1, EVALUE 2.00e-18
TRSQKKMTFDVTCNHHRKKKGKNTTRTIPFLVREVQGLSGFAFA

SEQ ID NO: 40055 - protein, 53 aa, Homo sapiens
  MAP TO AC004952.1; EXPRESSED IN PLACENTA, SIGNAL = 1.5; EXPRESSED IN ADULT LIVER, SIGNAL = 1.1; EXPRESSED IN LUNG, SIGNAL = 1.2; EXPRESSED IN HEART, SIGNAL = 1.6; EXPRESSED IN FETAL LIVER, SIGNAL = 1.3; EXPRESSED IN BRAIN, SIGNAL = 1.4; EXPRESSED IN BONE MARROW, SIGNAL = 1.2; SWISSPROT HIT: P54296, EVALUE 2.00e-04; EST_HUMAN HIT: AW262679.1, EVALUE 2.90e-02
EGLWDMFVKDIPRSATSYTLSLDKLRQGVTYEFRVVAVNEAGYGEPSNPSTAV

SEQ ID NO: 40056 - protein, 39 aa, Homo sapiens
  MAP TO AC006530.4; EXPRESSED IN PLACENTA, SIGNAL = 2.2; EXPRESSED IN LUNG, SIGNAL = 2.3; EXPRESSED IN HEART, SIGNAL = 2.2; EXPRESSED IN FETAL LIVER, SIGNAL = 2.5; EXPRESSED IN BRAIN, SIGNAL = 2.5; EXPRESSED IN BONE MARROW, SIGNAL = 2.6; EXPRESSED IN ADULT LIVER, SIGNAL = 2.4; EXPRESSED IN HELA, SIGNAL = 2.1; EST_HUMAN HIT: BE389812.1, EVALUE 2.00e-14; SWISSPROT HIT: P49770, EVALUE 1.00e-15
ELMELIRREGRRMTAAQPSETTVGNMVRRVLKIIREEYG

SEQ ID NO: 40057 - protein, 40 aa, Homo sapiens
  MAP TO AC006530.4; EXPRESSED IN PLACENTA, SIGNAL = 2.2; EXPRESSED IN LUNG, SIGNAL = 2.3; EXPRESSED IN HEART, SIGNAL = 2.2; EXPRESSED IN FETAL LIVER, SIGNAL = 2.5; EXPRESSED IN BRAIN, SIGNAL = 2.5; EXPRESSED IN BONE MARROW, SIGNAL = 2.6; EXPRESSED IN ADULT LIVER, SIGNAL = 2.4; EXPRESSED IN HELA, SIGNAL = 2.1; SWISSPROT HIT: P98084, EVALUE 2.80e+00; EST_HUMAN HIT: BE389812.1, EVALUE 8.00e-14
QRGQEDDGRSALRDHRGQHGAESAQDYPGGVWQVRLTSWA

SEQ ID NO: 40058 - protein, 68 aa, Homo sapiens
  MAP TO AC005041.2; EXPRESSED IN PLACENTA, SIGNAL = 1.8; EXPRESSED IN ADULT LIVER, SIGNAL = 1.1; EXPRESSED IN LUNG, SIGNAL = 1.3; EXPRESSED IN HEART, SIGNAL = 1.6; EXPRESSED IN FETAL LIVER, SIGNAL = 1.5; EXPRESSED IN BRAIN, SIGNAL = 1.8; EXPRESSED IN BONE MARROW, SIGNAL = 1.2; EST_HUMAN HIT: BE619157.1, EVALUE 4.00e-30; SWISSPROT HIT: Q14203, EVALUE 4.00e-31
EAKEALEAKERYMEEMADTADAIEMATLDKEMAEERAESLQQEVEALKERVDELTTDLEILKAEIEEK

SEQ ID NO: 40059 - protein, 45 aa, Homo sapiens
  MAP TO AC005041.2; EXPRESSED IN PLACENTA, SIGNAL = 1.8; EXPRESSED IN ADULT LIVER, SIGNAL = 1.1; EXPRESSED IN LUNG, SIGNAL = 1.3; EXPRESSED IN HEART, SIGNAL = 1.6; EXPRESSED IN FETAL LIVER, SIGNAL = 1.5; EXPRESSED IN BRAIN, SIGNAL = 1.8; EXPRESSED IN BONE MARROW, SIGNAL = 1.2; EST_HUMAN HIT: BE904863.1, EVALUE 7.00e-13
PRRRWRQRNAIWRRWLILLMPLRWPLWTRRWLKSGLSPCSRRWRH

SEQ ID NO: 40060 - protein, 29 aa, Homo sapiens [sequence omitted]

SEQ ID NO: 40061 - protein, 143 aa, Homo sapiens
  MAP TO AC004903.2; EXPRESSED IN PLACENTA, SIGNAL = 3.5; EXPRESSED IN LUNG, SIGNAL = 4.3; EXPRESSED IN HELA, SIGNAL = 3.9; EXPRESSED IN HEART, SIGNAL = 3.8; EXPRESSED IN FETAL LIVER, SIGNAL = 3.8; EXPRESSED IN ADULT LIVER, SIGNAL = 3.7; EXPRESSED IN BRAIN, SIGNAL = 3.7; EXPRESSED IN BONE MARROW, SIGNAL = 3.7; EST_HUMAN HIT: BE175434.1, EVALUE 3.00e-08; SWISSPROT HIT: Q01961, EVALUE 3.40e-01
QPGPHSQSGPGAPMKQAPAPSQPPTSQGPPKSTGQAPPAPAKSIPVKKETKAPAAEKLEPKAEQAPTVKRTETEKKPPPIKDSKSLTAEPQKAVLPTKLEKSPKPESTCPLCKTELNIGSKDPPNFNTCTECKNQVCNLCGFN

SEQ ID NO: 40062 - protein, 28 aa, Homo sapiens
  MAP TO AC004903.2; EXPRESSED IN PLACENTA, SIGNAL = 3.5; EXPRESSED IN LUNG, SIGNAL = 4.3; EXPRESSED IN HELA, SIGNAL = 3.9; EXPRESSED IN HEART, SIGNAL = 3.8; EXPRESSED IN FETAL LIVER, SIGNAL = 3.8; EXPRESSED IN ADULT LIVER, SIGNAL = 3.7; EXPRESSED IN BRAIN, SIGNAL = 3.7; EXPRESSED IN BONE MARROW, SIGNAL = 3.7
RATQIHRSSTTSTCKKYTCEKGNKSPSS

SEQ ID NO: 40063 - protein, 50 aa, Homo sapiens
  MAP TO AC004408.1; EXPRESSED IN PLACENTA, SIGNAL = 4.5; EXPRESSED IN LUNG, SIGNAL = 4.7; EXPRESSED IN HELA, SIGNAL = 4.5; EXPRESSED IN HEART, SIGNAL = 4.4; EXPRESSED IN BONE MARROW, SIGNAL = 4.1; EXPRESSED IN FETAL LIVER, SIGNAL =   4; EXPRESSED IN BRAIN, SIGNAL =   5; EXPRESSED IN ADULT LIVER, SIGNAL = 3.8; EST_HUMAN HIT: AW952275.1, EVALUE 3.00e-20; SWISSPROT HIT: Q02639, EVALUE 2.00e-21
EVQSEIERIFELARTLQLVALDADTINHPAQLSKTSLAPIIVYIKITSPK

SEQ ID NO: 40064 - protein, 52 aa, Homo sapiens
  MAP TO AC004408.1; EXPRESSED IN PLACENTA, SIGNAL = 4.5; EXPRESSED IN LUNG, SIGNAL = 4.7; EXPRESSED IN HELA, SIGNAL = 4.5; EXPRESSED IN HEART, SIGNAL = 4.4; EXPRESSED IN BONE MARROW, SIGNAL = 4.1; EXPRESSED IN FETAL LIVER, SIGNAL =   4; EXPRESSED IN BRAIN, SIGNAL =   5; EXPRESSED IN ADULT LIVER, SIGNAL = 3.8; EST_HUMAN HIT: AW952275.1, EVALUE 2.00e-12; SWISSPROT HIT: P03204, EVALUE 2.70e+00
MTPCPQLRCRVKSSESSSWPGPFSWSLWMLTPSITQPSCPRPRWPPSLFTSR

SEQ ID NO: 40065 - protein, 50 aa, Homo sapiens
  MAP TO AC005084.1; EXPRESSED IN FETAL LIVER, SIGNAL = 1.7; EXPRESSED IN BONE MARROW, SIGNAL = 1.7; EXPRESSED IN HELA, SIGNAL = 1.7; EXPRESSED IN PLACENTA, SIGNAL =   2; EXPRESSED IN LUNG, SIGNAL = 1.8; EXPRESSED IN HEART, SIGNAL = 1.6; EXPRESSED IN BRAIN, SIGNAL = 1.8; EXPRESSED IN ADULT LIVER, SIGNAL = 1.8; EST_HUMAN HIT: BE905354.1, EVALUE 5.10e+00
FLDFLLHLSTQESARLCLNLSAGVVTWKFSQCSELALFASISQGSLSFTD

SEQ ID NO: 40066 - protein, 55 aa, Homo sapiens
  MAP TO AC003029.1; EXPRESSED IN LUNG, SIGNAL = 2.2; EXPRESSED IN FETAL LIVER, SIGNAL = 2.1; EXPRESSED IN BRAIN, SIGNAL = 1.7; EXPRESSED IN BONE MARROW, SIGNAL = 2.1; EXPRESSED IN PLACENTA, SIGNAL = 1.9; EXPRESSED IN HELA, SIGNAL = 2.1; EXPRESSED IN HEART, SIGNAL = 1.8; EXPRESSED IN ADULT LIVER, SIGNAL = 2.3; EST_HUMAN HIT: AW361213.1, EVALUE 2.00e-14; SWISSPROT HIT: Q02409, EVALUE 7.90e+00
NPSLSQAPAFLPNTVFSANKVNIIQNLVHHQLSRRQHIIQGLGGIEPGVVQHSLD

SEQ ID NO: 40067 - protein, 29 aa, Homo sapiens
  MAP TO AC003029.1; EXPRESSED IN LUNG, SIGNAL = 2.2; EXPRESSED IN FETAL LIVER, SIGNAL = 2.1; EXPRESSED IN BRAIN, SIGNAL = 1.7; EXPRESSED IN BONE MARROW, SIGNAL = 2.1; EXPRESSED IN PLACENTA, SIGNAL = 1.9; EXPRESSED IN HELA, SIGNAL = 2.1; EXPRESSED IN HEART, SIGNAL = 1.8; EXPRESSED IN ADULT LIVER, SIGNAL = 2.3; EST_HUMAN HIT: AA236814.1, EVALUE 8.00e-04; SWISSPROT HIT: P47776, EVALUE 6.60e+00
LNSTEALDNVLPSAQLMMDKVLNDVYFVG

SEQ ID NO: 40068 - protein, 33 aa, Homo sapiens
  MAP TO AC003681.1; EXPRESSED IN LUNG, SIGNAL = 5.4; EXPRESSED IN HELA, SIGNAL = 4.6; EXPRESSED IN FETAL LIVER, SIGNAL = 4.4; EXPRESSED IN BRAIN, SIGNAL = 4.9; EXPRESSED IN BONE MARROW, SIGNAL = 4.3; EXPRESSED IN ADULT LIVER, SIGNAL = 4.3; EXPRESSED IN PLACENTA, SIGNAL =   5; EXPRESSED IN HEART, SIGNAL =   4; EST_HUMAN HIT: AL042219.1, EVALUE 3.00e-07
HGESTEFVGRAEDAIIALSNYRLHIKFKESLVN

SEQ ID NO: 40069 - protein, 32 aa, Homo sapiens
  MAP TO AC003681.1; EXPRESSED IN LUNG, SIGNAL = 5.4; EXPRESSED IN HELA, SIGNAL = 4.6; EXPRESSED IN FETAL LIVER, SIGNAL = 4.4; EXPRESSED IN BRAIN, SIGNAL = 4.9; EXPRESSED IN BONE MARROW, SIGNAL = 4.3; EXPRESSED IN ADULT LIVER, SIGNAL = 4.3; EXPRESSED IN PLACENTA, SIGNAL =   5; EXPRESSED IN HEART, SIGNAL =   4; EST_HUMAN HIT: BF446535.1, EVALUE 6.00e-12; SWISSPROT HIT: Q02597, EVALUE 1.70e+00
SWREHRVCGPCRGCHHCPFQLQTSHQVQGVSC

SEQ ID NO: 40070 - protein, 57 aa, Homo sapiens
  MAP TO AC003036.1; EXPRESSED IN PLACENTA, SIGNAL = 0.8; EXPRESSED IN BRAIN, SIGNAL = 0.69; EXPRESSED IN ADULT LIVER, SIGNAL = 0.7; EXPRESSED IN HEART, SIGNAL =   2; EXPRESSED IN LUNG, SIGNAL = 0.76; EXPRESSED IN FETAL LIVER, SIGNAL = 0.76; EXPRESSED IN BONE MARROW, SIGNAL = 0.63; EST_HUMAN HIT: BE875386.1, EVALUE 9.40e-01; SWISSPROT HIT: P35721, EVALUE 6.00e+00
MDTELGNIPVPDTTLVKFHFYLCFFFFSTVATTIITWFLLTCLPVPGGVWTSVTKLQ

SEQ ID NO: 40071 - protein, 52 aa, Homo sapiens
  MAP TO AC005007.1; EXPRESSED IN PLACENTA, SIGNAL =  14; EXPRESSED IN LUNG, SIGNAL =  15; EXPRESSED IN HELA, SIGNAL =  14; EXPRESSED IN FETAL LIVER, SIGNAL =  14; EXPRESSED IN BRAIN, SIGNAL =  14; EXPRESSED IN ADULT LIVER, SIGNAL =  14; EXPRESSED IN HEART, SIGNAL =  12; EXPRESSED IN BONE MARROW, SIGNAL =  13; EST_HUMAN HIT: BE815811.1, EVALUE 3.00e-20; SWISSPROT HIT: P55198, EVALUE 6.00e-04
CYGVDGESDSIMSSASENSTEPWFCDACKCGVSPSCELCPNQDGIFKETDAG

SEQ ID NO: 40072 - protein, 20 aa, Homo sapiens
  MAP TO AC005045.2; EXPRESSED IN LUNG, SIGNAL = 2.8; EXPRESSED IN BRAIN, SIGNAL = 2.5; EXPRESSED IN BONE MARROW, SIGNAL = 2.6; EXPRESSED IN PLACENTA, SIGNAL = 2.9; EXPRESSED IN HELA, SIGNAL = 2.8; EXPRESSED IN HEART, SIGNAL = 2.4; EXPRESSED IN FETAL LIVER, SIGNAL = 2.8; EXPRESSED IN ADULT LIVER, SIGNAL = 2.6
ATKFRCSKALPWCLSGSWCQ

SEQ ID NO: 40073 - protein, 111 aa, Homo sapiens
  MAP TO AC004453.1; EXPRESSED IN PLACENTA, SIGNAL = 2.2; EXPRESSED IN LUNG, SIGNAL =   2; EXPRESSED IN FETAL LIVER, SIGNAL = 1.8; EXPRESSED IN BRAIN, SIGNAL = 2.2; EXPRESSED IN ADULT LIVER, SIGNAL = 1.9; EXPRESSED IN HELA, SIGNAL = 1.9; EXPRESSED IN HEART, SIGNAL = 1.9; EXPRESSED IN BONE MARROW, SIGNAL = 1.9; EST_HUMAN HIT: BE263001.1, EVALUE 2.00e-15
VFKTFDHMARQDDEKRRQELEEKIRRKEEEEAKTVSAAAAEKEPVPVPVQEIEIDSTTELDGHQEVEKVQPPGPVKEMAHGSQEAEAPGAVAGAAEVPREPPILPRWEFLL

SEQ ID NO: 40074 - protein, 33 aa, Homo sapiens
  MAP TO AC005137.1; EXPRESSED IN ADULT LIVER, SIGNAL = 1.8; EXPRESSED IN PLACENTA, SIGNAL = 2.1; EXPRESSED IN LUNG, SIGNAL = 1.7; EXPRESSED IN HELA, SIGNAL =   2; EXPRESSED IN HEART, SIGNAL = 2.3; EXPRESSED IN BRAIN, SIGNAL = 2.2; EXPRESSED IN BONE MARROW, SIGNAL =   2; EXPRESSED IN FETAL LIVER, SIGNAL = 2.1; EST_HUMAN HIT: AW934844.1, EVALUE 3.00e-11; SWISSPROT HIT: P77894, EVALUE 7.50e-01
EGSLDLALEGGVDSPIGKVVVSAVYERGAAERH

SEQ ID NO: 40075 - protein, 20 aa, Homo sapiens
  MAP TO AC003043.1; EXPRESSED IN LUNG, SIGNAL = 2.1; EXPRESSED IN HELA, SIGNAL = 1.7; EXPRESSED IN FETAL LIVER, SIGNAL = 1.8; EXPRESSED IN BRAIN, SIGNAL = 1.6; EXPRESSED IN BONE MARROW, SIGNAL = 1.7; EXPRESSED IN ADULT LIVER, SIGNAL = 1.9; EXPRESSED IN PLACENTA, SIGNAL = 1.8; EXPRESSED IN HEART, SIGNAL = 1.7; EST_HUMAN HIT: BE409167.1, EVALUE 4.00e-03; SWISSPROT HIT: P08514, EVALUE 6.00e-05
LQMASYFGHSVAVTDVNGDG

SEQ ID NO: 40076 - protein, 42 aa, Homo sapiens
  MAP TO AC004558.1; EXPRESSED IN PLACENTA, SIGNAL = 6.3; EXPRESSED IN LUNG, SIGNAL = 5.6; EXPRESSED IN FETAL LIVER, SIGNAL = 6.7; EXPRESSED IN BRAIN, SIGNAL = 5.9; EXPRESSED IN BONE MARROW, SIGNAL = 6.2; EXPRESSED IN ADULT LIVER, SIGNAL =   6; EXPRESSED IN HELA, SIGNAL =   6; EXPRESSED IN HEART, SIGNAL =   6; EST_HUMAN HIT: BF577050.1, EVALUE 3.00e-08
QGGAEEITMVSAACLSSFVEMSMGSRNFLNTAVSCAVFLLLH

SEQ ID NO: 40077 - protein, 42 aa, Homo sapiens
  MAP TO AC004558.1; EXPRESSED IN PLACENTA, SIGNAL = 6.3; EXPRESSED IN LUNG, SIGNAL = 5.6; EXPRESSED IN FETAL LIVER, SIGNAL = 6.7; EXPRESSED IN BRAIN, SIGNAL = 5.9; EXPRESSED IN BONE MARROW, SIGNAL = 6.2; EXPRESSED IN ADULT LIVER, SIGNAL =   6; EXPRESSED IN HELA, SIGNAL =   6; EXPRESSED IN HEART, SIGNAL =   6; SWISSPROT HIT: P73002, EVALUE 8.30e+00; EST_HUMAN HIT: BF369569.1, EVALUE 9.00e-07
VQKKENSTADSCVQKVSGSHAHLHKGGQAGSRDHGDFLSSSL

SEQ ID NO: 40078 - protein, 63 aa, Homo sapiens
  MAP TO AC005243.1; EXPRESSED IN PLACENTA, SIGNAL = 2.2; EXPRESSED IN ADULT LIVER, SIGNAL = 1.9; EXPRESSED IN LUNG, SIGNAL = 2.3; EXPRESSED IN HELA, SIGNAL = 1.8; EXPRESSED IN HEART, SIGNAL = 1.7; EXPRESSED IN FETAL LIVER, SIGNAL = 1.8; EXPRESSED IN BRAIN, SIGNAL = 1.9; EXPRESSED IN BONE MARROW, SIGNAL = 1.8; SWISSPROT HIT: P39151, EVALUE 8.90e-01; EST_HUMAN HIT: AI370158.1, EVALUE 3.40e+00
LLMTPRHFVPKQNGASKGERVGKELETQPVKVAIEEWKAQGDSAKKESGEAQKLPLGICLPLP

SEQ ID NO: 40079 - protein, 91 aa, Homo sapiens
  MAP TO AC004615.1; EXPRESSED IN PLACENTA, SIGNAL =   1; EXPRESSED IN HEART, SIGNAL = 1.3; EXPRESSED IN FETAL LIVER, SIGNAL = 1.1; EXPRESSED IN BONE MARROW, SIGNAL =   1; EXPRESSED IN ADULT LIVER, SIGNAL = 1.2; EXPRESSED IN LUNG, SIGNAL = 1.1; EXPRESSED IN BRAIN, SIGNAL = 1.1; EST_HUMAN HIT: AU118557.1, EVALUE 2.00e-19; SWISSPROT HIT: Q13591, EVALUE 2.00e-50
SYDIGNFTYFFFRENAVEHDCGKTVFSRAARVCKNDIGGRFLLEDTWTTFMKARLNCSRPGEVPFYYNELQSTFFLPELDLIYGIFTTNVY

SEQ ID NO: 40080 - protein, 63 aa, Homo sapiens
  MAP TO AC005187.1; EXPRESSED IN BONE MARROW, SIGNAL = 2.1; EXPRESSED IN PLACENTA, SIGNAL = 2.2; EXPRESSED IN LUNG, SIGNAL = 2.4; EXPRESSED IN HELA, SIGNAL = 2.1; EXPRESSED IN HEART, SIGNAL = 2.1; EXPRESSED IN FETAL LIVER, SIGNAL = 2.4; EXPRESSED IN BRAIN, SIGNAL = 2.2; EXPRESSED IN ADULT LIVER, SIGNAL = 2.4; EST_HUMAN HIT: AA196146.1, EVALUE 6.00e-02; SWISSPROT HIT: P34233, EVALUE 2.00e+00
ARRRLKWACFQMSPSSWTHATRGCPSCLSSRGSRWRTLWSGAKASWTTSKTAATGWPMQDLPF

SEQ ID NO: 40081 - protein, 38 aa, Homo sapiens
  MAP TO AC004770.1; EXPRESSED IN LUNG, SIGNAL = 8.1; EXPRESSED IN BRAIN, SIGNAL = 8.7; EXPRESSED IN ADULT LIVER, SIGNAL =   8; EXPRESSED IN PLACENTA, SIGNAL = 7.7; EXPRESSED IN HELA, SIGNAL = 7.7; EXPRESSED IN HEART, SIGNAL = 7.6; EXPRESSED IN FETAL LIVER, SIGNAL = 8.1; EXPRESSED IN BONE MARROW, SIGNAL = 7.9; EST_HUMAN HIT: BF514322.1, EVALUE 3.20e+00; SWISSPROT HIT: O23810, EVALUE 3.70e+00
RHSQAEGESAREIPALAPTAGDGSADTYGTGCPAPPAE

SEQ ID NO: 40082 - protein, 79 aa, Homo sapiens
  MAP TO AC005255.1; EXPRESSED IN PLACENTA, SIGNAL = 1.8; EXPRESSED IN LUNG, SIGNAL = 2.1; EXPRESSED IN HEART, SIGNAL = 1.8; EXPRESSED IN BRAIN, SIGNAL = 1.9; EXPRESSED IN BONE MARROW, SIGNAL = 1.7; EXPRESSED IN ADULT LIVER, SIGNAL = 1.8; EXPRESSED IN FETAL LIVER, SIGNAL = 1.8; EST_HUMAN HIT: AA042813.1, EVALUE 8.00e-09; SWISSPROT HIT: O35177, EVALUE 9.20e+00
IFRETRIAALPLWAVPVHVPGHCAREPAHHPGRNLRLLPPHPHVLLSLQPVLRRYLFCLHHGPKDVGEHPDTEQSHYLC

SEQ ID NO: 40083 - protein, 38 aa, Homo sapiens
  MAP TO AC005274.1; EXPRESSED IN LUNG, SIGNAL = 1.8; EXPRESSED IN HEART, SIGNAL = 1.6; EXPRESSED IN FETAL LIVER, SIGNAL = 1.5; EXPRESSED IN BRAIN, SIGNAL = 1.7; EXPRESSED IN PLACENTA, SIGNAL = 1.7; EXPRESSED IN BONE MARROW, SIGNAL = 1.5; EXPRESSED IN ADULT LIVER, SIGNAL = 1.7
KIKSKSKVKIRRQQEIRRKREKQEEYLSGGVCQIDMKS

SEQ ID NO: 40084 - protein, 39 aa, Homo sapiens
  MAP TO AC005274.1; EXPRESSED IN LUNG, SIGNAL = 1.8; EXPRESSED IN HEART, SIGNAL = 1.6; EXPRESSED IN FETAL LIVER, SIGNAL = 1.5; EXPRESSED IN BRAIN, SIGNAL = 1.7; EXPRESSED IN PLACENTA, SIGNAL = 1.7; EXPRESSED IN BONE MARROW, SIGNAL = 1.5; EXPRESSED IN ADULT LIVER, SIGNAL = 1.7; EST_HUMAN HIT: BE878913.1, EVALUE 1.90e+00; SWISSPROT HIT: Q00194, EVALUE 8.30e+00
KDKEQIKSKNKETAGDKKEERKTRGVPQWRSVPDRHEKL

SEQ ID NO: 40085 - protein, 55 aa, Homo sapiens
  MAP TO AC004648.1; EXPRESSED IN LUNG, SIGNAL = 5.7; EXPRESSED IN BRAIN, SIGNAL = 5.3; EXPRESSED IN ADULT LIVER, SIGNAL = 5.5; EXPRESSED IN PLACENTA, SIGNAL = 5.3; EXPRESSED IN HELA, SIGNAL = 4.8; EXPRESSED IN HEART, SIGNAL = 4.9; EXPRESSED IN FETAL LIVER, SIGNAL = 4.5; EXPRESSED IN BONE MARROW, SIGNAL = 4.1; SWISSPROT HIT: P30999, EVALUE 3.00e-13; EST_HUMAN HIT: AI936774.1, EVALUE 1.00e-22
RMTEVHRSACGALRNLVYGKANDDNKIALKNCGGIPALVRLLRKTTDLEIRELVT

SEQ ID NO: 40086 - protein, 56 aa, Homo sapiens
  MAP TO AC004659.1; EXPRESSED IN LUNG, SIGNAL =   3; EXPRESSED IN FETAL LIVER, SIGNAL = 2.5; EXPRESSED IN BRAIN, SIGNAL = 2.8; EXPRESSED IN BONE MARROW, SIGNAL = 2.6; EXPRESSED IN ADULT LIVER, SIGNAL = 2.4; EXPRESSED IN HELA, SIGNAL = 2.6; EXPRESSED IN PLACENTA, SIGNAL = 2.3; EXPRESSED IN HEART, SIGNAL = 2.9; EST_HUMAN HIT: BE551895.1, EVALUE 3.00e-24; SWISSPROT HIT: O35544, EVALUE 2.00e-25
DRLRTMTNVLGDSIGAAVIEHLSQRELELQEAELTLPSLGKPYKSLMAQEKGASRG

SEQ ID NO: 40087 - protein, 28 aa, Homo sapiens
  MAP TO AC005104.1; EXPRESSED IN PLACENTA, SIGNAL = 9.3; EXPRESSED IN LUNG, SIGNAL = 7.5; EXPRESSED IN HELA, SIGNAL = 6.7; EXPRESSED IN FETAL LIVER, SIGNAL = 6.7; EXPRESSED IN ADULT LIVER, SIGNAL = 7.1; EXPRESSED IN HEART, SIGNAL = 6.6; EXPRESSED IN BRAIN, SIGNAL = 8.1; EXPRESSED IN BONE MARROW, SIGNAL = 6.4
LRRMQEMIARMQAQMQMQMQGGDGDGGA

SEQ ID NO: 40088 - protein, 90 aa, Homo sapiens
  MAP TO AC005146.1; EXPRESSED IN LUNG, SIGNAL = 2.8; EXPRESSED IN HELA, SIGNAL = 2.5; EXPRESSED IN BONE MARROW, SIGNAL = 2.5; EXPRESSED IN ADULT LIVER, SIGNAL = 2.7; EXPRESSED IN PLACENTA, SIGNAL = 2.8; EXPRESSED IN HEART, SIGNAL = 2.8; EXPRESSED IN FETAL LIVER, SIGNAL = 2.7; EXPRESSED IN BRAIN, SIGNAL =   3; EST_HUMAN HIT: AI971997.1, EVALUE 1.00e-07; SWISSPROT HIT: O77420, EVALUE 7.10e+00
PTRESDDEDDEEKKGRGCSLQYQHATVRVLTQFVAESPDLGQLTYMLGPDWQFDITDLVTEFMKVEEPKIAQLQDGRTLAGREPGITTVQ

SEQ ID NO: 40089 - protein, 20 aa, Homo sapiens
  MAP TO AC005146.1; EXPRESSED IN LUNG, SIGNAL = 2.8; EXPRESSED IN HELA, SIGNAL = 2.5; EXPRESSED IN BONE MARROW, SIGNAL = 2.5; EXPRESSED IN ADULT LIVER, SIGNAL = 2.7; EXPRESSED IN PLACENTA, SIGNAL = 2.8; EXPRESSED IN HEART, SIGNAL = 2.8; EXPRESSED IN FETAL LIVER, SIGNAL = 2.7; EXPRESSED IN BRAIN, SIGNAL =   3
LPAVPARHSACPHPVCGRVT

SEQ ID NO: 40090 - protein, 26 aa, Homo sapiens
  MAP TO AC005247.1; EXPRESSED IN PLACENTA, SIGNAL = 1.8; EXPRESSED IN LUNG, SIGNAL = 1.9; EXPRESSED IN HELA, SIGNAL = 1.8; EXPRESSED IN FETAL LIVER, SIGNAL = 1.9; EXPRESSED IN BONE MARROW, SIGNAL = 1.7; EXPRESSED IN ADULT LIVER, SIGNAL = 1.8; EXPRESSED IN HEART, SIGNAL =   2; EXPRESSED IN BRAIN, SIGNAL = 2.1
MCVPTGRTKGLEENKYFTKEDLCYVR

SEQ ID NO: 40091 - protein, 63 aa, Homo sapiens
  MAP TO AC004671.1; EXPRESSED IN PLACENTA, SIGNAL = 3.7; EXPRESSED IN LUNG, SIGNAL =   4; EXPRESSED IN HEART, SIGNAL = 3.6; EXPRESSED IN BRAIN, SIGNAL = 3.8; EXPRESSED IN ADULT LIVER, SIGNAL = 3.1; EXPRESSED IN FETAL LIVER, SIGNAL = 3.6; EXPRESSED IN BONE MARROW, SIGNAL = 3.6; EXPRESSED IN HELA, SIGNAL = 3.5; EST_HUMAN HIT: AW451636.1, EVALUE 4.50e+00; SWISSPROT HIT: Q10691, EVALUE 2.60e+00
RARQHLAWVLYKHLAEGLPENHWAAGGRMGTVPLQLHGPVHLLALLLQDLPSTLSPARSLVSF

SEQ ID NO: 40092 - protein, 54 aa, Homo sapiens; identical to SEQ ID NO: 39958
  MAP TO AC005080.1; EXPRESSED IN PLACENTA, SIGNAL =  35; EXPRESSED IN HELA, SIGNAL =  34; EXPRESSED IN HEART, SIGNAL =  28; EXPRESSED IN FETAL LIVER, SIGNAL =  33; EXPRESSED IN BRAIN, SIGNAL =  35; EXPRESSED IN BONE MARROW, SIGNAL =  36; EXPRESSED IN LUNG, SIGNAL =  40; EXPRESSED IN ADULT LIVER, SIGNAL =  34; EST_HUMAN HIT: N48128.1, EVALUE 2.00e-18

SEQ ID NO: 40093 - protein, 39 aa, Homo sapiens
  MAP TO AC004676.1; EXPRESSED IN LUNG, SIGNAL = 2.3; EXPRESSED IN HEART, SIGNAL = 2.2; EXPRESSED IN FETAL LIVER, SIGNAL = 2.2; EXPRESSED IN BRAIN, SIGNAL = 2.2; EXPRESSED IN BONE MARROW, SIGNAL = 1.9; EXPRESSED IN HELA, SIGNAL =   2; EXPRESSED IN PLACENTA, SIGNAL = 2.1; EXPRESSED IN ADULT LIVER, SIGNAL = 2.2; EST_HUMAN HIT: BF684261.1, EVALUE 7.20e+00; SWISSPROT HIT: P05423, EVALUE 3.70e+00
AASQRGAFGIVLAFVVPGNHPQQDLLGLNTHPQGQEGEV

SEQ ID NO: 40094 - protein, 39 aa, Homo sapiens
  MAP TO AC004676.1; EXPRESSED IN LUNG, SIGNAL = 2.3; EXPRESSED IN HEART, SIGNAL = 2.2; EXPRESSED IN FETAL LIVER, SIGNAL = 2.2; EXPRESSED IN BRAIN, SIGNAL = 2.2; EXPRESSED IN BONE MARROW, SIGNAL = 1.9; EXPRESSED IN HELA, SIGNAL =   2; EXPRESSED IN PLACENTA, SIGNAL = 2.1; EXPRESSED IN ADULT LIVER, SIGNAL = 2.2; SWISSPROT HIT: Q9R1E0, EVALUE 8.30e+00; EST_HUMAN HIT: BE613118.1, EVALUE 2.50e-02
GCLPTWGLRHCSGLCGSWKSPTAGSVRPEYPSTRAGGRG

SEQ ID NO: 40095 - protein, 50 aa, Homo sapiens
  MAP TO AC004816.1; EXPRESSED IN PLACENTA, SIGNAL =   6; EXPRESSED IN HEART, SIGNAL = 5.7; EXPRESSED IN ADULT LIVER, SIGNAL = 6.1; EXPRESSED IN LUNG, SIGNAL = 6.2; EXPRESSED IN FETAL LIVER, SIGNAL = 5.8; EXPRESSED IN BRAIN, SIGNAL = 6.6; EXPRESSED IN BONE MARROW, SIGNAL = 6.1; EXPRESSED IN HELA, SIGNAL = 5.8; EST_HUMAN HIT: BE061839.1, EVALUE 1.00e+00; SWISSPROT HIT: P71517, EVALUE 3.60e+00
RKRGSERGMAYFRKFGKPCMPGWSREPEGRVKKVKLEKKETMTQRPFWST

SEQ ID NO: 40096 - protein, 52 aa, Homo sapiens
  MAP TO AC004622.1; EXPRESSED IN PLACENTA, SIGNAL = 3.5; EXPRESSED IN HEART, SIGNAL = 3.6; EXPRESSED IN BONE MARROW, SIGNAL = 3.2; EXPRESSED IN ADULT LIVER, SIGNAL = 3.3; EXPRESSED IN LUNG, SIGNAL = 3.8; EXPRESSED IN HELA, SIGNAL = 3.2; EXPRESSED IN FETAL LIVER, SIGNAL = 3.3; EXPRESSED IN BRAIN, SIGNAL = 3.7; EST_HUMAN HIT: AW615296.1, EVALUE 5.00e-09; SWISSPROT HIT: P28827, EVALUE 8.00e+00
LIALAKTSSILFSRTHESRQPCLVPDHRGKAHSLSPLSMMSAVGFSYVAFIT

SEQ ID NO: 40097 - protein, 174 aa, Homo sapiens
  MAP TO AC005191.1; EXPRESSED IN PLACENTA, SIGNAL = 1.8; EXPRESSED IN LUNG, SIGNAL = 1.5; EXPRESSED IN FETAL LIVER, SIGNAL = 2.9; EXPRESSED IN BONE MARROW, SIGNAL = 3.1; EXPRESSED IN ADULT LIVER, SIGNAL = 2.6; EXPRESSED IN HELA, SIGNAL = 2.1; EXPRESSED IN HEART, SIGNAL =   2; EXPRESSED IN BRAIN, SIGNAL = 1.5; EST_HUMAN HIT: N69526.1, EVALUE 3.00e-12; SWISSPROT HIT: Q9UL62, EVALUE 3.00e-83
VPTLMMDTQFSEFTPDITPIMLAAHTNNYEIIKLLVQKRVTIPRPHQIRCNCVECVSSSEVDSLRHSRSRLNIYKALASPSLIALSSEDPILTAFRLGWELKELSKVENEFKAEYEELSQQCKLFAKDLLDQARSSRELEIILNHRDDHSEELDPQKYHDLAKLKVAIKYHQKE

SEQ ID NO: 40098 - protein, 44 aa, Homo sapiens
  MAP TO AC004782.1; EXPRESSED IN PLACENTA, SIGNAL = 3.1; EXPRESSED IN BONE MARROW, SIGNAL =   3; EXPRESSED IN ADULT LIVER, SIGNAL = 3.3; EXPRESSED IN LUNG, SIGNAL = 2.8; EXPRESSED IN HELA, SIGNAL = 2.9; EXPRESSED IN HEART, SIGNAL = 3.1; EXPRESSED IN FETAL LIVER, SIGNAL = 3.5; EXPRESSED IN BRAIN, SIGNAL = 3.4; EST_HUMAN HIT: AA243729.1, EVALUE 5.40e-02; SWISSPROT HIT: P53781, EVALUE 1.20e+00
PSSLPRPSPGHLHLSPGRFHWPPDTSCHWLPLLLPEPLLHIAAR

SEQ ID NO: 40099 - protein, 164 aa, Homo sapiens
  MAP TO AC005156.1; EXPRESSED IN BRAIN, SIGNAL = 5.9; EXPRESSED IN PLACENTA, SIGNAL = 6.1; EXPRESSED IN LUNG, SIGNAL = 6.8; EXPRESSED IN HEART, SIGNAL = 5.4; EXPRESSED IN BONE MARROW, SIGNAL = 5.4; EXPRESSED IN ADULT LIVER, SIGNAL = 5.4; EXPRESSED IN HELA, SIGNAL = 5.6; EXPRESSED IN FETAL LIVER, SIGNAL = 5.3; EST_HUMAN HIT: BF217905.1, EVALUE 6.00e-54; SWISSPROT HIT: Q69154, EVALUE 8.10e+00
MSGFCKAALNTSAGNSNPYLPYSCELPLCYFSSKCMCSSGGPVDRAPDSSKDGRNHHKTMGHYNHNDSLRKTQINSLKNSVACPGAQKAITSSEAVDRFMPRTTQLQERKRRREDDRKLGTFLQTNPTGNEIMIGPLLPDISKVDMHDDSLNTTANLIRHKLKE

SEQ ID NO: 40100 - protein, 33 aa, Homo sapiens
  MAP TO AC005291.1; EXPRESSED IN PLACENTA, SIGNAL = 1.5; EXPRESSED IN HEART, SIGNAL = 1.7; EXPRESSED IN BRAIN, SIGNAL = 1.9; EXPRESSED IN BONE MARROW, SIGNAL = 1.8; EXPRESSED IN ADULT LIVER, SIGNAL = 1.8; EXPRESSED IN LUNG, SIGNAL = 1.7; EXPRESSED IN HELA, SIGNAL = 1.8; EXPRESSED IN FETAL LIVER, SIGNAL =   2
KIYVMTVVKIQEPEPGVCDLNTLDSTLQYIQSE

SEQ ID NO: 40101 - protein, 36 aa, Homo sapiens
  MAP TO AC005165.1; EXPRESSED IN BRAIN, SIGNAL = 3.4; EXPRESSED IN ADULT LIVER, SIGNAL = 3.3; EXPRESSED IN PLACENTA, SIGNAL = 3.4; EXPRESSED IN LUNG, SIGNAL = 3.7; EXPRESSED IN HELA, SIGNAL = 3.6; EXPRESSED IN HEART, SIGNAL = 3.1; EXPRESSED IN BONE MARROW, SIGNAL = 3.2; EXPRESSED IN FETAL LIVER, SIGNAL = 3.2
VFAITIIVIIITIIIITMIIKSILQKKKLSCQVIYI

SEQ ID NO: 40102 - protein, 23 aa, Homo sapiens
  MAP TO AC005234.1; EXPRESSED IN LUNG, SIGNAL = 1.4; EXPRESSED IN BRAIN, SIGNAL = 1.6; EXPRESSED IN PLACENTA, SIGNAL = 1.5; EXPRESSED IN HEART, SIGNAL = 1.3; EXPRESSED IN BONE MARROW, SIGNAL = 1.5; EXPRESSED IN ADULT LIVER, SIGNAL = 1.5; EXPRESSED IN FETAL LIVER, SIGNAL = 1.4
RDTQGPGDRRGLKEAQVGTGRMG

SEQ ID NO: 40103 - protein, 46 aa, Homo sapiens
  MAP TO AC005102.1; EXPRESSED IN HELA, SIGNAL =  35; EXPRESSED IN HEART, SIGNAL =  34; EXPRESSED IN BONE MARROW, SIGNAL =  37; EXPRESSED IN PLACENTA, SIGNAL =  43; EXPRESSED IN LUNG, SIGNAL =  48; EXPRESSED IN FETAL LIVER, SIGNAL =  37; EXPRESSED IN BRAIN, SIGNAL =  47; EXPRESSED IN ADULT LIVER, SIGNAL =  35; EST_HUMAN HIT: AA297145.1, EVALUE 4.00e-05; SWISSPROT HIT: O14628, EVALUE 2.00e-03
VDLEPLDSSHLPALASQDAGIIGVNHHTRPTQEHFANRKALQNNEQ

SEQ ID NO: 40104 - protein, 114 aa, Homo sapiens
  MAP TO AC004132.1; EXPRESSED IN PLACENTA, SIGNAL = 3.5; EXPRESSED IN HELA, SIGNAL = 3.9; EXPRESSED IN HEART, SIGNAL =   3; EXPRESSED IN FETAL LIVER, SIGNAL = 4.3; EXPRESSED IN BRAIN, SIGNAL = 5.4; EXPRESSED IN ADULT LIVER, SIGNAL = 4.4; EXPRESSED IN LUNG, SIGNAL = 5.5; EXPRESSED IN BONE MARROW, SIGNAL = 3.8; EST_HUMAN HIT: AU129622.1, EVALUE 5.00e-42; SWISSPROT HIT: P35680, EVALUE 5.00e-43
MVSKLTSLQQELLSALLSSGVTKEVLVQALEELLPSPNFGVKLETLPLSPGSGAEPDTKPVFHTLTNGHAKGRLSGDEGSEDGDDYDTPPILKELQALNTEEAAEQRAEVDRML

SEQ ID NO: 40105 - protein, 55 aa, Homo sapiens
  MAP TO AC005237.2; EXPRESSED IN PLACENTA, SIGNAL = 3.5; EXPRESSED IN LUNG, SIGNAL = 3.8; EXPRESSED IN FETAL LIVER, SIGNAL = 3.7; EXPRESSED IN BRAIN, SIGNAL = 3.6; EXPRESSED IN BONE MARROW, SIGNAL = 3.3; EXPRESSED IN ADULT LIVER, SIGNAL = 3.4; EXPRESSED IN HELA, SIGNAL = 3.4; EXPRESSED IN HEART, SIGNAL = 3.7; SWISSPROT HIT: P45969, EVALUE 7.00e-10; EST_HUMAN HIT: AA613644.1, EVALUE 4.00e-25
MNDNLLESWSDLDELKGARSLETVYLERNPLQKDPQYRRKVMLALPSVRQIDATF

SEQ ID NO: 40106 - protein, 26 aa, Homo sapiens
  MAP TO AC005317.1; EXPRESSED IN BRAIN, SIGNAL =   2; EXPRESSED IN ADULT LIVER, SIGNAL =   2; EXPRESSED IN PLACENTA, SIGNAL = 2.2; EXPRESSED IN HELA, SIGNAL = 2.3; EXPRESSED IN HEART, SIGNAL = 1.6; EXPRESSED IN FETAL LIVER, SIGNAL =   2; EXPRESSED IN BONE MARROW, SIGNAL = 2.2; EXPRESSED IN LUNG, SIGNAL = 2.6; EST_HUMAN HIT: BE281630.1, EVALUE 7.00e-09; SWISSPROT HIT: P54098, EVALUE 5.00e-10
DLMQYCAQDVWATHEVFQQQLPLFLE

SEQ ID NO: 40107 - protein, 37 aa, Homo sapiens
  MAP TO AC005317.1; EXPRESSED IN BRAIN, SIGNAL =   2; EXPRESSED IN ADULT LIVER, SIGNAL =   2; EXPRESSED IN PLACENTA, SIGNAL = 2.2; EXPRESSED IN HELA, SIGNAL = 2.3; EXPRESSED IN HEART, SIGNAL = 1.6; EXPRESSED IN FETAL LIVER, SIGNAL =   2; EXPRESSED IN BONE MARROW, SIGNAL = 2.2; EXPRESSED IN LUNG, SIGNAL = 2.6; EST_HUMAN HIT: BE615382.1, EVALUE 7.40e+00; SWISSPROT HIT: P07646, EVALUE 2.80e+00
AALGEMQLPGLTLRAGGGNGMAAHLAPSCHLVPGPDA

SEQ ID NO: 40108 - protein, 66 aa, Homo sapiens
  MAP TO AC005151.1; EXPRESSED IN PLACENTA, SIGNAL =  12; EXPRESSED IN LUNG, SIGNAL =  12; EXPRESSED IN FETAL LIVER, SIGNAL =  11; EXPRESSED IN BRAIN, SIGNAL = 8.3; EXPRESSED IN BONE MARROW, SIGNAL =  10; EXPRESSED IN ADULT LIVER, SIGNAL =  11; EXPRESSED IN HELA, SIGNAL =  11; EXPRESSED IN HEART, SIGNAL =  11; EST_HUMAN HIT: BE961586.1, EVALUE 1.30e-01; SWISSPROT HIT: Q62919, EVALUE 2.50e-01
CTDSMGVPRALGETWNSSLSGCCQHQCQAPDTIVPVDLGCPSPRPESCLRFGEVALLLPTKDPCCL

SEQ ID NO: 40109 - protein, 62 aa, Homo sapiens
  MAP TO AC004148.1; EXPRESSED IN LUNG, SIGNAL = 7.3; EXPRESSED IN HELA, SIGNAL = 6.6; EXPRESSED IN BONE MARROW, SIGNAL = 6.3; EXPRESSED IN ADULT LIVER, SIGNAL = 7.8; EXPRESSED IN PLACENTA, SIGNAL = 6.5; EXPRESSED IN HEART, SIGNAL = 5.3; EXPRESSED IN FETAL LIVER, SIGNAL = 7.9; EXPRESSED IN BRAIN, SIGNAL = 7.4; EST_HUMAN HIT: BE155230.1, EVALUE 1.00e-32; SWISSPROT HIT: O09175, EVALUE 1.50e+00
PGNIGKLLGPLPMHPAAEDNYGYDACAVLCLPCVPNILVIATESGMLYHCVVLEGEEEDDHT

SEQ ID NO: 40110 - protein, 25 aa, Homo sapiens
  MAP TO AC002519.1; EXPRESSED IN PLACENTA, SIGNAL =   2; EXPRESSED IN LUNG, SIGNAL = 2.3; EXPRESSED IN HELA, SIGNAL = 2.2; EXPRESSED IN HEART, SIGNAL = 2.3; EXPRESSED IN BONE MARROW, SIGNAL = 2.1; EXPRESSED IN FETAL LIVER, SIGNAL =  17; EXPRESSED IN BRAIN, SIGNAL = 2.5; EXPRESSED IN ADULT LIVER, SIGNAL =  23; EST_HUMAN HIT: BF183230.1, EVALUE 5.00e-06
FIHRIRVQLRWGNSRKREIHSMDSC

SEQ ID NO: 40111 - protein, 27 aa, Homo sapiens
  MAP TO AC004159.1; EXPRESSED IN PLACENTA, SIGNAL =   6; EXPRESSED IN LUNG, SIGNAL = 7.3; EXPRESSED IN HELA, SIGNAL = 8.1; EXPRESSED IN HEART, SIGNAL =   6; EXPRESSED IN FETAL LIVER, SIGNAL = 7.9; EXPRESSED IN ADULT LIVER, SIGNAL = 9.3; EXPRESSED IN BRAIN, SIGNAL = 5.3; EXPRESSED IN BONE MARROW, SIGNAL = 6.1
ANFAAPKPTSNGEKKPTIFSAVIKPMK

SEQ ID NO: 40112 - protein, 73 aa, Homo sapiens
  MAP TO AC005281.2; EXPRESSED IN FETAL LIVER, SIGNAL = 3.5; EXPRESSED IN BONE MARROW, SIGNAL = 3.2; EXPRESSED IN ADULT LIVER, SIGNAL = 3.4; EXPRESSED IN HELA, SIGNAL = 3.8; EXPRESSED IN PLACENTA, SIGNAL = 3.4; EXPRESSED IN LUNG, SIGNAL = 3.7; EXPRESSED IN HEART, SIGNAL = 3.9; EXPRESSED IN BRAIN, SIGNAL =   4; SWISSPROT HIT: Q28046, EVALUE 2.00e-30; EST_HUMAN HIT: AU129689.1, EVALUE 8.00e-16
MARELYHEEFARAGKQAGLQVWRIEKLELVPVPQSAHGDFYVGDAYLVLHTAKTSRGFTYHLHFWLGKGRRAA

SEQ ID NO: 40113 - protein, 50 aa, Homo sapiens
  MAP TO AC005074.1; EXPRESSED IN LUNG, SIGNAL =  26; EXPRESSED IN HELA, SIGNAL =  22; EXPRESSED IN BONE MARROW, SIGNAL =  23; EXPRESSED IN ADULT LIVER, SIGNAL =  23; EXPRESSED IN PLACENTA, SIGNAL =  21; EXPRESSED IN HEART, SIGNAL =  20; EXPRESSED IN FETAL LIVER, SIGNAL =  21; EXPRESSED IN BRAIN, SIGNAL =  23; EST_HUMAN HIT: BF326857.1, EVALUE 8.00e-24
YWLFSDEVPGLFIEKGWVHDSIDYRFNHHCKDHTVSGDEDYCPRSEYICI

SEQ ID NO: 40114 - protein, 90 aa, Homo sapiens
  MAP TO AC005212.1; EXPRESSED IN PLACENTA, SIGNAL = 6.7; EXPRESSED IN LUNG, SIGNAL = 7.1; EXPRESSED IN HELA, SIGNAL = 6.7; EXPRESSED IN FETAL LIVER, SIGNAL = 6.5; EXPRESSED IN BONE MARROW, SIGNAL = 6.6; EXPRESSED IN ADULT LIVER, SIGNAL = 6.8; EXPRESSED IN HEART, SIGNAL = 6.5; EXPRESSED IN BRAIN, SIGNAL = 6.3; EST_HUMAN HIT: R59253.1, EVALUE 3.00e-27; SWISSPROT HIT: Q99758, EVALUE 9.00e-47
DLEEFLIFRASVEGGGFNERCLVAASFRDVGERTVVNALFNNQAYHSPATALAVVDNLLFKLLCGPHASIVVSNFPQPRSALQAAKDQFN

SEQ ID NO: 40115 - protein, 34 aa, Homo sapiens
  MAP TO AC004061.1; EXPRESSED IN PLACENTA, SIGNAL = 2.8; EXPRESSED IN LUNG, SIGNAL = 1.8; EXPRESSED IN HELA, SIGNAL = 2.3; EXPRESSED IN FETAL LIVER, SIGNAL = 3.1; EXPRESSED IN BRAIN, SIGNAL = 2.3; EXPRESSED IN BONE MARROW, SIGNAL = 2.6; EXPRESSED IN ADULT LIVER, SIGNAL = 2.2; EXPRESSED IN HEART, SIGNAL = 2.2
VMVRLAAHAAIRLQTLSEGVSHLTLHFSKSLQKH

SEQ ID NO: 40116 - protein, 28 aa, Homo sapiens
  MAP TO AC005544.1; EXPRESSED IN LUNG, SIGNAL = 1.9; EXPRESSED IN BRAIN, SIGNAL = 1.9; EXPRESSED IN HEART, SIGNAL = 1.5; EXPRESSED IN FETAL LIVER, SIGNAL = 1.6; EXPRESSED IN BONE MARROW, SIGNAL = 1.5; EXPRESSED IN ADULT LIVER, SIGNAL = 1.6; EXPRESSED IN PLACENTA, SIGNAL = 1.7; SWISSPROT HIT: P05665, EVALUE 2.90e+00; EST_HUMAN HIT: BE904869.1, EVALUE 4.60e+00
LTWRTCSWMPWVREGTGRRAWVGLCEGS

SEQ ID NO: 40117 - protein, 37 aa, Homo sapiens
  MAP TO AC004126.1; EXPRESSED IN PLACENTA, SIGNAL = 1.1; EXPRESSED IN HEART, SIGNAL = 1.5; EXPRESSED IN BONE MARROW, SIGNAL = 0.95; EXPRESSED IN LUNG, SIGNAL = 0.9; EXPRESSED IN FETAL LIVER, SIGNAL = 1.3; EXPRESSED IN BRAIN, SIGNAL = 0.89; EXPRESSED IN ADULT LIVER, SIGNAL = 1.6; SWISSPROT HIT: P49301, EVALUE 6.40e+00; EST_HUMAN HIT: AA278947.1, EVALUE 6.00e-04
DSNPSALMDDFEGLRTSMEGVTADVEEMVRELESKGE

SEQ ID NO: 40118 - protein, 21 aa, Homo sapiens
  MAP TO AC004219.1; EXPRESSED IN PLACENTA, SIGNAL = 5.8; EXPRESSED IN LUNG, SIGNAL = 6.9; EXPRESSED IN HELA, SIGNAL = 5.9; EXPRESSED IN FETAL LIVER, SIGNAL = 6.7; EXPRESSED IN BRAIN, SIGNAL = 6.3; EXPRESSED IN ADULT LIVER, SIGNAL = 6.6; EXPRESSED IN HEART, SIGNAL =   5; EXPRESSED IN BONE MARROW, SIGNAL = 5.8; EST_HUMAN HIT: AL119842.1, EVALUE 7.00e-03
VMEMINENAKSRGRLIDFKEI

SEQ ID NO: 40119 - protein, 76 aa, Homo sapiens
  MAP TO AC004219.1; EXPRESSED IN PLACENTA, SIGNAL = 5.8; EXPRESSED IN LUNG, SIGNAL = 6.9; EXPRESSED IN HELA, SIGNAL = 5.9; EXPRESSED IN FETAL LIVER, SIGNAL = 6.7; EXPRESSED IN BRAIN, SIGNAL = 6.3; EXPRESSED IN ADULT LIVER, SIGNAL = 6.6; EXPRESSED IN HEART, SIGNAL =   5; EXPRESSED IN BONE MARROW, SIGNAL = 5.8; EST_HUMAN HIT: BE739870.1, EVALUE 2.00e-39; SWISSPROT HIT: P22861, EVALUE 6.60e-01
MQQLFHENYEHNRKGYIQDLHNSKIHAAITLHPNKRPAYQYRLHNYMLSRKISELRYRTIQLHRESALMSKLSNTE

SEQ ID NO: 40120 - protein, 109 aa, Homo sapiens
  MAP TO AC005291.1; EXPRESSED IN ADULT LIVER, SIGNAL = 0.85; EXPRESSED IN PLACENTA, SIGNAL = 1.1; EXPRESSED IN LUNG, SIGNAL = 1.7; EXPRESSED IN HEART, SIGNAL =  61; EXPRESSED IN BRAIN, SIGNAL = 0.71; EXPRESSED IN FETAL LIVER, SIGNAL =   1; EXPRESSED IN BONE MARROW, SIGNAL = 3.3; EST_HUMAN HIT: AU120424.1, EVALUE 2.00e-31; SWISSPROT HIT: P13535, EVALUE 2.00e-32
ARIEELGEEIEAERASRAKAEKQRSDLSRELEEISERLEEAGGATSAQVELNKKREAEFQKLRRDLEEATLQHEAMVAALRKKHADSMAELGEQIDNLQRVKQKLEKEK

SEQ ID NO: 40121 - protein, 50 aa, Homo sapiens
  MAP TO AC005291.1; EXPRESSED IN ADULT LIVER, SIGNAL = 0.85; EXPRESSED IN PLACENTA, SIGNAL = 1.1; EXPRESSED IN LUNG, SIGNAL = 1.7; EXPRESSED IN HEART, SIGNAL =  61; EXPRESSED IN BRAIN, SIGNAL = 0.71; EXPRESSED IN FETAL LIVER, SIGNAL =   1; EXPRESSED IN BONE MARROW, SIGNAL = 3.3; EST_HUMAN HIT: AU120424.1, EVALUE 2.00e-24; SWISSPROT HIT: P20934, EVALUE 1.20e+00
PALRSWGKKSRQRGRPEPKRRSSALTSPGNWRRSARGWKKPVGQLLLRWN

SEQ ID NO: 40122 - protein, 37 aa, Homo sapiens
  MAP TO AC005217.1; EXPRESSED IN LUNG, SIGNAL = 2.2; EXPRESSED IN BONE MARROW, SIGNAL = 2.7; EXPRESSED IN PLACENTA, SIGNAL = 1.5; EXPRESSED IN HELA, SIGNAL = 2.3; EXPRESSED IN HEART, SIGNAL =  68; EXPRESSED IN FETAL LIVER, SIGNAL = 2.7; EXPRESSED IN BRAIN, SIGNAL = 1.7; EXPRESSED IN ADULT LIVER, SIGNAL = 3.9; SWISSPROT HIT: P33124, EVALUE 6.00e-13; EST_HUMAN HIT: AL044279.1, EVALUE 2.00e-14
IFSQANTPLKRWLLEFAAKRKQAEVRSGIIRNDSIWD

SEQ ID NO: 40123 - protein, 19 aa, Homo sapiens
  MAP TO AC005217.1; EXPRESSED IN LUNG, SIGNAL = 2.2; EXPRESSED IN BONE MARROW, SIGNAL = 2.7; EXPRESSED IN PLACENTA, SIGNAL = 1.5; EXPRESSED IN HELA, SIGNAL = 2.3; EXPRESSED IN HEART, SIGNAL =  68; EXPRESSED IN FETAL LIVER, SIGNAL = 2.7; EXPRESSED IN BRAIN, SIGNAL = 1.7; EXPRESSED IN ADULT LIVER, SIGNAL = 3.9; EST_HUMAN HIT: AL044279.1, EVALUE 9.00e-04
LQPGKHTIKALAPGVCSKA

SEQ ID NO: 40124 - protein, 32 aa, Homo sapiens
  MAP TO AC005355.1; EXPRESSED IN PLACENTA, SIGNAL = 1.4; EXPRESSED IN ADULT LIVER, SIGNAL = 1.3; EXPRESSED IN LUNG, SIGNAL = 1.5; EXPRESSED IN HEART, SIGNAL = 1.4; EXPRESSED IN FETAL LIVER, SIGNAL = 1.1; EXPRESSED IN BRAIN, SIGNAL = 1.2; EXPRESSED IN BONE MARROW, SIGNAL = 1.1
IHRPMERRVYGLQVKNGWLLFPHVHTHILPHT

SEQ ID NO: 40125 - protein, 18 aa, Homo sapiens
  MAP TO AC005355.1; EXPRESSED IN PLACENTA, SIGNAL = 1.4; EXPRESSED IN ADULT LIVER, SIGNAL = 1.3; EXPRESSED IN LUNG, SIGNAL = 1.5; EXPRESSED IN HEART, SIGNAL = 1.4; EXPRESSED IN FETAL LIVER, SIGNAL = 1.1; EXPRESSED IN BRAIN, SIGNAL = 1.2; EXPRESSED IN BONE MARROW, SIGNAL = 1.1
LYVGVCVYVHGGREASRS

SEQ ID NO: 40126 - protein, 61 aa, Homo sapiens
  MAP TO AC005521.1; EXPRESSED IN PLACENTA, SIGNAL = 1.2; EXPRESSED IN HEART, SIGNAL = 1.3; EXPRESSED IN ADULT LIVER, SIGNAL =   1; EXPRESSED IN LUNG, SIGNAL = 1.1; EXPRESSED IN FETAL LIVER, SIGNAL =   1; EXPRESSED IN BRAIN, SIGNAL = 0.99; EXPRESSED IN BONE MARROW, SIGNAL = 0.97; EST_HUMAN HIT: BE769917.1, EVALUE 4.60e+00
GHYEYYYHDFHHYYCINGYRLLITTVYQARVQEPASLLKPSDPTKIQKLSLMQAKFTSSPS

SEQ ID NO: 40127 - protein, 30 aa, Homo sapiens
  MAP TO AB019437.1; EXPRESSED IN LUNG, SIGNAL = 1.1; EXPRESSED IN BRAIN, SIGNAL = 1.4; EXPRESSED IN HEART, SIGNAL = 1.3; EXPRESSED IN FETAL LIVER, SIGNAL = 2.3; EXPRESSED IN BONE MARROW, SIGNAL = 1.4; EXPRESSED IN ADULT LIVER, SIGNAL = 1.8; EXPRESSED IN PLACENTA, SIGNAL = 1.4
PRFPLPGLHGQHRTSRRCSELTQGRTPGKS

SEQ ID NO: 40128 - protein, 30 aa, Homo sapiens
  MAP TO AB019437.1; EXPRESSED IN LUNG, SIGNAL = 1.1; EXPRESSED IN BRAIN, SIGNAL = 1.4; EXPRESSED IN HEART, SIGNAL = 1.3; EXPRESSED IN FETAL LIVER, SIGNAL = 2.3; EXPRESSED IN BONE MARROW, SIGNAL = 1.4; EXPRESSED IN ADULT LIVER, SIGNAL = 1.8; EXPRESSED IN PLACENTA, SIGNAL = 1.4
QDFLYLDFMGSTGPAGDAQNSPKAEPQGRA

SEQ ID NO: 40129 - protein, 67 aa, Homo sapiens
  MAP TO AC004685.1; EXPRESSED IN PLACENTA, SIGNAL = 3.6; EXPRESSED IN HEART, SIGNAL = 3.8; EXPRESSED IN BONE MARROW, SIGNAL = 3.6; EXPRESSED IN ADULT LIVER, SIGNAL = 3.5; EXPRESSED IN HELA, SIGNAL = 3.9; EXPRESSED IN FETAL LIVER, SIGNAL = 3.7; EXPRESSED IN LUNG, SIGNAL = 3.6; EXPRESSED IN BRAIN, SIGNAL =   4; SWISSPROT HIT: P51526, EVALUE 3.00e+00; EST_HUMAN HIT: BE894007.1, EVALUE 1.90e+00
DKHPMRSETHHITETALAGVTRTFAFLHPVVSAHLTLHGLAATGDTIDHPSSPPVHFLHLAAGCHTL

SEQ ID NO: 40130 - protein, 29 aa, Homo sapiens
  MAP TO AC004685.1; EXPRESSED IN PLACENTA, SIGNAL = 3.6; EXPRESSED IN HEART, SIGNAL = 3.8; EXPRESSED IN BONE MARROW, SIGNAL = 3.6; EXPRESSED IN ADULT LIVER, SIGNAL = 3.5; EXPRESSED IN HELA, SIGNAL = 3.9; EXPRESSED IN FETAL LIVER, SIGNAL = 3.7; EXPRESSED IN LUNG, SIGNAL = 3.6; EXPRESSED IN BRAIN, SIGNAL =   4
SQVKKVYWRGGRVINGVTSCCQAMQGKVS

SEQ ID NO: 40131 - protein, 68 aa, Homo sapiens
  MAP TO AC002506.1; EXPRESSED IN PLACENTA, SIGNAL = 1.9; EXPRESSED IN ADULT LIVER, SIGNAL =   2; EXPRESSED IN LUNG, SIGNAL = 2.2; EXPRESSED IN HEART, SIGNAL = 2.1; EXPRESSED IN FETAL LIVER, SIGNAL =   2; EXPRESSED IN BRAIN, SIGNAL = 2.1; EXPRESSED IN HELA, SIGNAL = 2.3; EXPRESSED IN BONE MARROW, SIGNAL = 2.1; EST_HUMAN HIT: BE868949.1, EVALUE 1.40e+00
TPPTPPPPSSPCIGTIRHLLDGKEKLSCQLGFICTFPRLVCGLAVQLAALTGRRGPKPLPAAWAGERG

SEQ ID NO: 40132 - protein, 26 aa, Homo sapiens
  MAP TO AC002480.1; EXPRESSED IN LUNG, SIGNAL = 3.3; EXPRESSED IN HELA, SIGNAL = 2.7; EXPRESSED IN BONE MARROW, SIGNAL = 2.6; EXPRESSED IN ADULT LIVER, SIGNAL = 2.9; EXPRESSED IN PLACENTA, SIGNAL = 2.8; EXPRESSED IN HEART, SIGNAL = 2.4; EXPRESSED IN FETAL LIVER, SIGNAL = 3.1; EXPRESSED IN BRAIN, SIGNAL = 3.1
VSGAQEEGDSFRIDTLEKVRRAGFTT

SEQ ID NO: 40133 - protein, 44 aa, Homo sapiens
  MAP TO AC004150.8; EXPRESSED IN LUNG, SIGNAL = 8.9; EXPRESSED IN FETAL LIVER, SIGNAL = 7.4; EXPRESSED IN BRAIN, SIGNAL = 7.5; EXPRESSED IN BONE MARROW, SIGNAL = 6.8; EXPRESSED IN PLACENTA, SIGNAL = 7.2; EXPRESSED IN HELA, SIGNAL = 7.1; EXPRESSED IN HEART, SIGNAL = 6.3; EXPRESSED IN ADULT LIVER, SIGNAL = 8.9; EST_HUMAN HIT: BE965907.2, EVALUE 5.30e+00
RIDEVIGLPFQMLAVQVSLAATSVGADKSVGGAGRVHQRRRLAA

SEQ ID NO: 40134 - protein, 50 aa, Homo sapiens; identical to SEQ ID NO: 38510
  MAP TO AC005317.1; EXPRESSED IN BONE MARROW, SIGNAL = 7.5; EXPRESSED IN PLACENTA, SIGNAL = 7.9; EXPRESSED IN LUNG, SIGNAL = 8.8; EXPRESSED IN HELA, SIGNAL = 7.3; EXPRESSED IN HEART, SIGNAL = 6.4; EXPRESSED IN FETAL LIVER, SIGNAL = 7.9; EXPRESSED IN BRAIN, SIGNAL = 8.4; EXPRESSED IN ADULT LIVER, SIGNAL = 7.7; SWISSPROT HIT: P54098, EVALUE 5.00e-19; EST_HUMAN HIT: BE903223.1, EVALUE 6.00e-18

SEQ ID NO: 40135 - protein, 63 aa, Homo sapiens; identical to SEQ ID NO: 39597
  MAP TO AC005527.3; EXPRESSED IN LUNG, SIGNAL = 4.6; EXPRESSED IN BRAIN, SIGNAL = 4.2; EXPRESSED IN BONE MARROW, SIGNAL = 3.7; EXPRESSED IN PLACENTA, SIGNAL =   4; EXPRESSED IN HELA, SIGNAL = 3.8; EXPRESSED IN HEART, SIGNAL = 3.3; EXPRESSED IN FETAL LIVER, SIGNAL = 4.4; EXPRESSED IN ADULT LIVER, SIGNAL = 4.2; EST_HUMAN HIT: BF476518.1, EVALUE 9.00e-33; SWISSPROT HIT: P93526, EVALUE 1.20e+00

SEQ ID NO: 40136 - protein, 22 aa, Homo sapiens
  MAP TO AC005527.3; EXPRESSED IN LUNG, SIGNAL = 4.6; EXPRESSED IN BRAIN, SIGNAL = 4.2; EXPRESSED IN BONE MARROW, SIGNAL = 3.7; EXPRESSED IN PLACENTA, SIGNAL =   4; EXPRESSED IN HELA, SIGNAL = 3.8; EXPRESSED IN HEART, SIGNAL = 3.3; EXPRESSED IN FETAL LIVER, SIGNAL = 4.4; EXPRESSED IN ADULT LIVER, SIGNAL = 4.2; EST_HUMAN HIT: BE349183.1, EVALUE 1.00e-06
PWRAKSMCATRSCVALGPATSC

SEQ ID NO: 40137 - protein, 32 aa, Homo sapiens
  MAP TO AC002527.1; EXPRESSED IN LUNG, SIGNAL = 2.6; EXPRESSED IN HEART, SIGNAL = 2.3; EXPRESSED IN FETAL LIVER, SIGNAL = 2.2; EXPRESSED IN BRAIN, SIGNAL = 2.6; EXPRESSED IN BONE MARROW, SIGNAL = 2.5; EXPRESSED IN HELA, SIGNAL = 2.5; EXPRESSED IN PLACENTA, SIGNAL = 2.4; EXPRESSED IN ADULT LIVER, SIGNAL = 2.3
MEMRKTLSKPYHKVSVGGASLKTIQGHVDFMK

SEQ ID NO: 40138 - protein, 30 aa, Homo sapiens
  MAP TO AC002527.1; EXPRESSED IN LUNG, SIGNAL = 2.6; EXPRESSED IN HEART, SIGNAL = 2.3; EXPRESSED IN FETAL LIVER, SIGNAL = 2.2; EXPRESSED IN BRAIN, SIGNAL = 2.6; EXPRESSED IN BONE MARROW, SIGNAL = 2.5; EXPRESSED IN HELA, SIGNAL = 2.5; EXPRESSED IN PLACENTA, SIGNAL = 2.4; EXPRESSED IN ADULT LIVER, SIGNAL = 2.3
WRCVKPFQNHITKSQWEEQASKQFKDTWTS

SEQ ID NO: 40139 - protein, 52 aa, Homo sapiens
  MAP TO AC005320.1; EXPRESSED IN PLACENTA, SIGNAL =  12; EXPRESSED IN HELA, SIGNAL =  11; EXPRESSED IN BRAIN, SIGNAL =  14; EXPRESSED IN BONE MARROW, SIGNAL =  12; EXPRESSED IN ADULT LIVER, SIGNAL =  13; EXPRESSED IN HEART, SIGNAL =  10; EXPRESSED IN LUNG, SIGNAL =  15; EXPRESSED IN FETAL LIVER, SIGNAL =  12; EST_HUMAN HIT: T88849.1, EVALUE 1.10e-01; SWISSPROT HIT: P45053, EVALUE 6.10e+00
DRVLPCCPSWGNIIKDGPGCLLVLAWALIPPIFCPFGSYGIQGAFSLRRTVM

SEQ ID NO: 40140 - protein, 41 aa, Homo sapiens
  MAP TO AC002066.1; EXPRESSED IN FETAL LIVER, SIGNAL = 1.4; EXPRESSED IN BONE MARROW, SIGNAL = 1.6; EXPRESSED IN PLACENTA, SIGNAL = 1.6; EXPRESSED IN LUNG, SIGNAL = 1.5; EXPRESSED IN HEART, SIGNAL = 1.8; EXPRESSED IN BRAIN, SIGNAL = 1.7; EXPRESSED IN ADULT LIVER, SIGNAL = 1.3; EST_HUMAN HIT: AW377288.1, EVALUE 1.20e-01; SWISSPROT HIT: Q20952, EVALUE 4.80e+00
ESPPNFPDHHQGLHSGRPELKCLPVLCELWEFFSLQLLGHP

SEQ ID NO: 40141 - protein, 75 aa, Homo sapiens
  MAP TO AC002069.1; EXPRESSED IN PLACENTA, SIGNAL = 1.3; EXPRESSED IN ADULT LIVER, SIGNAL = 1.5; EXPRESSED IN LUNG, SIGNAL = 1.7; EXPRESSED IN HEART, SIGNAL = 1.5; EXPRESSED IN FETAL LIVER, SIGNAL = 1.1; EXPRESSED IN BRAIN, SIGNAL =   1; EXPRESSED IN BONE MARROW, SIGNAL = 1.1
GLMVRRKEKEEKKEEEEEEEEKEEERGRREKEKKKKNKEDGEEDRKWKKKEEEEGEINAGNAVCKQSRKIFECHA

SEQ ID NO: 40142 - protein, 56 aa, Homo sapiens
  MAP TO AC005324.1; EXPRESSED IN LUNG, SIGNAL = 1.7; EXPRESSED IN FETAL LIVER, SIGNAL = 1.7; EXPRESSED IN BRAIN, SIGNAL = 1.8; EXPRESSED IN BONE MARROW, SIGNAL = 1.5; EXPRESSED IN PLACENTA, SIGNAL = 1.9; EXPRESSED IN HELA, SIGNAL =   2; EXPRESSED IN HEART, SIGNAL = 1.5; EXPRESSED IN ADULT LIVER, SIGNAL = 1.6; SWISSPROT HIT: Q62556, EVALUE 1.00e-03; EST_HUMAN HIT: BF031451.1, EVALUE 4.00e-29
AYDITFDPDTAHKYLRLQEENRKVTNTTPWEHPYPDLPSRFLHWRQVLSQQSLYLH

SEQ ID NO: 40143 - protein, 67 aa, Homo sapiens
  MAP TO AC005324.1; EXPRESSED IN LUNG, SIGNAL = 1.7; EXPRESSED IN FETAL LIVER, SIGNAL = 1.7; EXPRESSED IN BRAIN, SIGNAL = 1.8; EXPRESSED IN BONE MARROW, SIGNAL = 1.5; EXPRESSED IN PLACENTA, SIGNAL = 1.9; EXPRESSED IN HELA, SIGNAL =   2; EXPRESSED IN HEART, SIGNAL = 1.5; EXPRESSED IN ADULT LIVER, SIGNAL = 1.6; SWISSPROT HIT: P10360, EVALUE 3.40e+00; EST_HUMAN HIT: BE787323.1, EVALUE 3.00e-26
LTRTQHTSISGCRRRTARSPTPRPGSIPTRTSPAGSCTGGRCCPSRVCTCTGTILRWRSSGQAPMLA

SEQ ID NO: 40144 - protein, 34 aa, Homo sapiens
  MAP TO AC005539.1; EXPRESSED IN LUNG, SIGNAL =   2; EXPRESSED IN FETAL LIVER, SIGNAL = 1.6; EXPRESSED IN BONE MARROW, SIGNAL = 1.8; EXPRESSED IN PLACENTA, SIGNAL = 1.9; EXPRESSED IN HELA, SIGNAL = 1.8; EXPRESSED IN HEART, SIGNAL = 1.5; EXPRESSED IN BRAIN, SIGNAL = 1.7; EXPRESSED IN ADULT LIVER, SIGNAL = 1.9
VRFKEWLDLRSNHGIQLKNKTSCYQVANVQVFAS

SEQ ID NO: 40145 - protein, 44 aa, Homo sapiens
  MAP TO AC002463.1; EXPRESSED IN LUNG, SIGNAL = 0.75; EXPRESSED IN BONE MARROW, SIGNAL = 0.55; EXPRESSED IN ADULT LIVER, SIGNAL = 0.58; EXPRESSED IN PLACENTA, SIGNAL = 0.59; EXPRESSED IN HEART, SIGNAL = 1.5
QMYNNVGKGIADREACQDHTNLTKFYILVRDSAIEKVEASSPQE

SEQ ID NO: 40146 - protein, 26 aa, Homo sapiens
  MAP TO AC005343.1; EXPRESSED IN HELA, SIGNAL = 3.8; EXPRESSED IN FETAL LIVER, SIGNAL =   4; EXPRESSED IN BRAIN, SIGNAL = 4.3; EXPRESSED IN BONE MARROW, SIGNAL =   4; EXPRESSED IN ADULT LIVER, SIGNAL = 4.8; EXPRESSED IN PLACENTA, SIGNAL = 3.8; EXPRESSED IN HEART, SIGNAL = 3.3; EXPRESSED IN LUNG, SIGNAL = 4.2
SAGEPMVVTASTAVAVTVDKRTAIAA

SEQ ID NO: 40147 - protein, 18 aa, Homo sapiens
  MAP TO AC005343.1; EXPRESSED IN HELA, SIGNAL = 3.8; EXPRESSED IN FETAL LIVER, SIGNAL =   4; EXPRESSED IN BRAIN, SIGNAL = 4.3; EXPRESSED IN BONE MARROW, SIGNAL =   4; EXPRESSED IN ADULT LIVER, SIGNAL = 4.8; EXPRESSED IN PLACENTA, SIGNAL = 3.8; EXPRESSED IN HEART, SIGNAL = 3.3; EXPRESSED IN LUNG, SIGNAL = 4.2
RGQPLLQVGTALVVLRPG

SEQ ID NO: 40148 - protein, 77 aa, Homo sapiens
  MAP TO AC002467.1; EXPRESSED IN BONE MARROW, SIGNAL = 1.3; EXPRESSED IN PLACENTA, SIGNAL = 1.3; EXPRESSED IN LUNG, SIGNAL = 1.4; EXPRESSED IN HEART, SIGNAL = 1.4; EXPRESSED IN FETAL LIVER, SIGNAL = 1.3; EXPRESSED IN BRAIN, SIGNAL = 1.6; EXPRESSED IN ADULT LIVER, SIGNAL = 1.3; EST_HUMAN HIT: BF351233.1, EVALUE 3.00e-19; SWISSPROT HIT: O43511, EVALUE 1.00e-27
NGIISDAVSTNNAFEPDEDIEDLEELDIPTKEIEIQVDWNSELPVKVNVPKVPIHSLVLDCGAISFLDVVGVRSLRV

SEQ ID NO: 40149 - protein, 28 aa, Homo sapiens
  MAP TO AC002467.1; EXPRESSED IN BONE MARROW, SIGNAL = 1.3; EXPRESSED IN PLACENTA, SIGNAL = 1.3; EXPRESSED IN LUNG, SIGNAL = 1.4; EXPRESSED IN HEART, SIGNAL = 1.4; EXPRESSED IN FETAL LIVER, SIGNAL = 1.3; EXPRESSED IN BRAIN, SIGNAL = 1.6; EXPRESSED IN ADULT LIVER, SIGNAL = 1.3
VMLFQQIMLLSLMRILKIWRNLISQPRK

SEQ ID NO: 40150 - protein, 68 aa, Homo sapiens
  MAP TO AC005323.1; EXPRESSED IN LUNG, SIGNAL = 0.91; EXPRESSED IN ADULT LIVER, SIGNAL = 0.49; EXPRESSED IN HEART, SIGNAL = 2.3; EXPRESSED IN BONE MARROW, SIGNAL = 1.5; EST_HUMAN HIT: AW950723.1, EVALUE 2.00e-30; SWISSPROT HIT: P12882, EVALUE 4.00e-31
DTQIHLDDALRSQEDLKEQLAMVERRANLLQAEIEELRATLEQTERSRKIAEQELLDASERVQLLHTQ

SEQ ID NO: 40151 - protein, 121 aa, Homo sapiens
  MAP TO AC004552.1; EXPRESSED IN LUNG, SIGNAL = 0.55; EXPRESSED IN PLACENTA, SIGNAL = 2.1; EXPRESSED IN BONE MARROW, SIGNAL = 1.8; EXPRESSED IN HEART, SIGNAL = 2.4; EXPRESSED IN ADULT LIVER, SIGNAL = 0.42; EXPRESSED IN BRAIN, SIGNAL = 3.1; EXPRESSED IN HELA, SIGNAL = 2.8; EXPRESSED IN FETAL LIVER, SIGNAL = 2.5; SWISSPROT HIT: P00745, EVALUE 3.70e-01; EST_HUMAN HIT: AW959501.1, EVALUE 3.00e-29
DCPPPPELRVSTSGQKEERKVGQPCELNIAKAGSCVDTWKGRPCDLAVPSEVDVEKLAKGYQSVTAADPQLPVWPAQEVEDPFGFALEAGCQAWDTKPSIMQSFNDPLLCGKIRPRKKARQ

SEQ ID NO: 40152 - protein, 40 aa, Homo sapiens
  MAP TO AC004552.1; EXPRESSED IN LUNG, SIGNAL = 0.55; EXPRESSED IN PLACENTA, SIGNAL = 2.1; EXPRESSED IN BONE MARROW, SIGNAL = 1.8; EXPRESSED IN HEART, SIGNAL = 2.4; EXPRESSED IN ADULT LIVER, SIGNAL = 0.42; EXPRESSED IN BRAIN, SIGNAL = 3.1; EXPRESSED IN HELA, SIGNAL = 2.8; EXPRESSED IN FETAL LIVER, SIGNAL = 2.5; SWISSPROT HIT: P47652, EVALUE 4.80e+00; EST_HUMAN HIT: AW959501.1, EVALUE 9.40e+00
LPGFFTWPYFTTEKRIIKRLHDAWLGVPGLTASFQRKSKR

SEQ ID NO: 40153 - protein, 119 aa, Homo sapiens
  MAP TO AC012629.4; EXPRESSED IN BONE MARROW, SIGNAL =   2; EXPRESSED IN PLACENTA, SIGNAL = 2.3; EXPRESSED IN ADULT LIVER, SIGNAL = 2.4; EXPRESSED IN HEART, SIGNAL = 1.7; EXPRESSED IN BRAIN, SIGNAL = 1.8; EXPRESSED IN LUNG, SIGNAL = 1.7; EXPRESSED IN FETAL LIVER, SIGNAL = 1.7; EST_HUMAN HIT: AA984295.1, EVALUE 3.00e-37; SWISSPROT HIT: P27401, EVALUE 9.00e-13
ATIKDLKDAGVVTPMTSLFNSPIWPVQKTGGSWGITVDYHKLNLVVTLSAAAVPDVVSLLEQINTSPGTWYAAIDLANAFFSISVHKAHQKQFAFIWQDQQYTFTVLPQGVYQLSGFVS

SEQ ID NO: 40154 - protein, 55 aa, Homo sapiens
  MAP TO AP001426.1; EXPRESSED IN PLACENTA, SIGNAL = 2.1; EXPRESSED IN BONE MARROW, SIGNAL = 2.1; EXPRESSED IN LUNG, SIGNAL = 1.3; EXPRESSED IN ADULT LIVER, SIGNAL = 0.76; EXPRESSED IN HEART, SIGNAL = 2.1; EXPRESSED IN FETAL LIVER, SIGNAL = 2.1; EXPRESSED IN BRAIN, SIGNAL =   2; SWISSPROT HIT: P11308, EVALUE 7.00e-27; EST_HUMAN HIT: AU136709.1, EVALUE 8.00e-26
EALSVVSEDQSLFECAYGTPHLAKTEMTASSSSDYGQTSKMSPRVPQQDWLSQPP

SEQ ID NO: 40155 - protein, 44 aa, Homo sapiens
  MAP TO AC015999.3; EXPRESSED IN LUNG, SIGNAL = 1.4; EXPRESSED IN PLACENTA, SIGNAL = 2.9; EXPRESSED IN ADULT LIVER, SIGNAL = 5.5; EXPRESSED IN HELA, SIGNAL = 6.5; EXPRESSED IN FETAL LIVER, SIGNAL = 3.8; EXPRESSED IN BRAIN, SIGNAL = 3.4; EXPRESSED IN BONE MARROW, SIGNAL = 3.5; EXPRESSED IN HEART, SIGNAL = 3.1; SWISSPROT HIT: P17408, EVALUE 1.00e-06; EST_HUMAN HIT: BE501953.1, EVALUE 5.00e-11
NLRTVFHNGCTSLHSHLQCTRILFSLHPCRHLLSLVFLIIPILT

SEQ ID NO: 40156 - protein, 97 aa, Homo sapiens
  MAP TO AL162458.1; EXPRESSED IN LUNG, SIGNAL = 1.2; EXPRESSED IN PLACENTA, SIGNAL = 2.3; EXPRESSED IN ADULT LIVER, SIGNAL =   4; EXPRESSED IN HELA, SIGNAL = 3.6; EXPRESSED IN HEART, SIGNAL = 2.1; EXPRESSED IN FETAL LIVER, SIGNAL = 2.3; EXPRESSED IN BRAIN, SIGNAL = 2.5; EXPRESSED IN BONE MARROW, SIGNAL = 2.6; EST_HUMAN HIT: AI751854.1, EVALUE 6.00e-03; SWISSPROT HIT: P04258, EVALUE 5.00e-04
CLPSRPLVPLQVAVVKSEDVEAGLASPGGQPSPEGATPQVVTLHVAEPGGGAAAESQLGPPDLPQITLAPGPFGGTGYSVITAPPMEEGTSAPGTPY

SEQ ID NO: 40157 - protein, 18 aa, Homo sapiens
  MAP TO AL162458.1; EXPRESSED IN LUNG, SIGNAL = 1.2; EXPRESSED IN PLACENTA, SIGNAL = 2.3; EXPRESSED IN ADULT LIVER, SIGNAL =   4; EXPRESSED IN HELA, SIGNAL = 3.6; EXPRESSED IN HEART, SIGNAL = 2.1; EXPRESSED IN FETAL LIVER, SIGNAL = 2.3; EXPRESSED IN BRAIN, SIGNAL = 2.5; EXPRESSED IN BONE MARROW, SIGNAL = 2.6
WSPSTWQSQGAVQQPRAS

SEQ ID NO: 40158 - protein, 70 aa, Homo sapiens
  MAP TO AC024575.1; EXPRESSED IN HELA, SIGNAL = 5.5; EXPRESSED IN LUNG, SIGNAL = 4.8; EXPRESSED IN PLACENTA, SIGNAL = 4.1; EXPRESSED IN ADULT LIVER, SIGNAL = 5.2; EXPRESSED IN HEART, SIGNAL = 3.8; EXPRESSED IN FETAL LIVER, SIGNAL = 4.6; EXPRESSED IN BRAIN, SIGNAL = 4.4; EXPRESSED IN BONE MARROW, SIGNAL =   5; EST_HUMAN HIT: BF352841.1, EVALUE 3.00e-23; SWISSPROT HIT: Q03386, EVALUE 1.40e-01
AVVSVLGSWLQDHPQDFRDPPAHSDLGSVRTFLGWAAPGSAEAQKAEKLLEDFLEEAEREQEEEPPQVWT

SEQ ID NO: 40159 - protein, 70 aa, Homo sapiens [sequence omitted]

SEQ ID NO: 40160 - protein, 84 aa, Homo sapiens
  MAP TO AC022918.2; EXPRESSED IN PLACENTA, SIGNAL = 6.5; EXPRESSED IN LUNG, SIGNAL = 9.7; EXPRESSED IN ADULT LIVER, SIGNAL = 8.8; EXPRESSED IN FETAL LIVER, SIGNAL =  19; EXPRESSED IN BRAIN, SIGNAL = 9.9; EXPRESSED IN BONE MARROW, SIGNAL =  21; EXPRESSED IN HELA, SIGNAL =  12; EXPRESSED IN HEART, SIGNAL = 8.9; EST_HUMAN HIT: AI253497.1, EVALUE 2.00e-34; SWISSPROT HIT: O60312, EVALUE 3.80e+00
SNQGVDLGHINVIELLHSLFDLVLVGFNIHSEHKCVVVFYLLYGQLSDQRKLHDSIVVKLVSPVSALPRIFERPPESQCLGPPE

SEQ ID NO: 40161 - protein, 21 aa, Homo sapiens
  MAP TO AC022918.2; EXPRESSED IN PLACENTA, SIGNAL = 6.5; EXPRESSED IN LUNG, SIGNAL = 9.7; EXPRESSED IN ADULT LIVER, SIGNAL = 8.8; EXPRESSED IN FETAL LIVER, SIGNAL =  19; EXPRESSED IN BRAIN, SIGNAL = 9.9; EXPRESSED IN BONE MARROW, SIGNAL =  21; EXPRESSED IN HELA, SIGNAL =  12; EXPRESSED IN HEART, SIGNAL = 8.9
WCQKRRRKFLPLLKLKPKGRL

SEQ ID NO: 40162 - protein, 97 aa, Homo sapiens
  MAP TO AC013611.3; EXPRESSED IN ADULT LIVER, SIGNAL = 1.4; EXPRESSED IN LUNG, SIGNAL = 3.6; EXPRESSED IN HEART, SIGNAL = 1.7; EXPRESSED IN BRAIN, SIGNAL =   2; EXPRESSED IN BONE MARROW, SIGNAL = 3.6; EXPRESSED IN PLACENTA, SIGNAL = 2.1; EXPRESSED IN FETAL LIVER, SIGNAL = 6.6; EST_HUMAN HIT: AA485613.1, EVALUE 4.00e-53; SWISSPROT HIT: P02747, EVALUE 5.00e-54
GDYDTSTGKFTCKVPGLYYFVYHASHTANLCVLLYRSGVKVVTFCGHTSKTNQVNSGGVLLRLQVGEEVWLAVNDYYDMVGIQGSDSVFSGFLLFPD

SEQ ID NO: 40163 - protein, 50 aa, Homo sapiens
  MAP TO AC015908.4; EXPRESSED IN LUNG, SIGNAL = 5.6; EXPRESSED IN HEART, SIGNAL = 4.2; EXPRESSED IN HELA, SIGNAL = 8.5; EXPRESSED IN BONE MARROW, SIGNAL =   6; EXPRESSED IN BRAIN, SIGNAL = 4.7; EXPRESSED IN FETAL LIVER, SIGNAL = 4.8; EXPRESSED IN ADULT LIVER, SIGNAL = 5.7; EXPRESSED IN PLACENTA, SIGNAL = 4.7; SWISSPROT HIT: Q10390, EVALUE 3.20e-01; EST_HUMAN HIT: AI871703.1, EVALUE 2.60e-01
RPPATPPAPRNWSKLPTSPRRGDDGVTPPPSGHSCEIVFSLTSGIYKLAQ

SEQ ID NO: 40164 - protein, 40 aa, Homo sapiens
  MAP TO AC015908.4; EXPRESSED IN LUNG, SIGNAL = 5.6; EXPRESSED IN HEART, SIGNAL = 4.2; EXPRESSED IN HELA, SIGNAL = 8.5; EXPRESSED IN BONE MARROW, SIGNAL =   6; EXPRESSED IN BRAIN, SIGNAL = 4.7; EXPRESSED IN FETAL LIVER, SIGNAL = 4.8; EXPRESSED IN ADULT LIVER, SIGNAL = 5.7; EXPRESSED IN PLACENTA, SIGNAL = 4.7; EST_HUMAN HIT: BE256948.1, EVALUE 3.20e+00
GPQPLHRPRAIGPSCPLAHGEVMMVSHHHLVATPVKSYSP

SEQ ID NO: 40165 - protein, 41 aa, Homo sapiens
  MAP TO AC019250.3; EXPRESSED IN LUNG, SIGNAL = 7.1; EXPRESSED IN PLACENTA, SIGNAL =  39; EXPRESSED IN ADULT LIVER, SIGNAL =  50; EXPRESSED IN HELA, SIGNAL =  68; EXPRESSED IN HEART, SIGNAL =  61; EXPRESSED IN FETAL LIVER, SIGNAL =  37; EXPRESSED IN BRAIN, SIGNAL =  15; EXPRESSED IN BONE MARROW, SIGNAL =  21; EST_HUMAN HIT: AV730071.1, EVALUE 6.30e-01
HLCSCPNFPVQKTRWAGGKLTWLLPLQSAQFASSRNQHCTF

SEQ ID NO: 40166 - protein, 59 aa, Homo sapiens
  MAP TO AC019276.3; EXPRESSED IN LUNG, SIGNAL = 1.8; EXPRESSED IN PLACENTA, SIGNAL = 1.5; EXPRESSED IN HEART, SIGNAL = 1.7; EXPRESSED IN BRAIN, SIGNAL = 1.6; EXPRESSED IN BONE MARROW, SIGNAL = 1.9; EXPRESSED IN ADULT LIVER, SIGNAL = 1.7; EXPRESSED IN FETAL LIVER, SIGNAL = 1.8; EST_HUMAN HIT: AI087915.1, EVALUE 1.10e-01; SWISSPROT HIT: P87137, EVALUE 2.70e+00
MPTQGFCLGLPLEAFWLLNQRHKGTHSWERLRRSNAKRGQSSSEGHVQTQSPLPVGPWA

SEQ ID NO: 40167 - protein, 78 aa, Homo sapiens
  MAP TO AC019194.2; EXPRESSED IN BRAIN, SIGNAL =   2; EXPRESSED IN LUNG, SIGNAL = 1.8; EXPRESSED IN PLACENTA, SIGNAL = 1.8; EXPRESSED IN ADULT LIVER, SIGNAL = 1.6; EXPRESSED IN BONE MARROW, SIGNAL = 2.1; EXPRESSED IN HEART, SIGNAL =   2; EXPRESSED IN FETAL LIVER, SIGNAL =   2; EST_HUMAN HIT: R81864.1, EVALUE 6.90e+00; SWISSPROT HIT: O84767, EVALUE 5.20e+00
DLKDIIIDLGEIRERALQSPGVNRSLFLITLERCFQMLNSLECVEILGKVLRGSSGSFLQPDITERLPRDLREDAFKN

SEQ ID NO: 40168 - protein, 57 aa, Homo sapiens
  MAP TO AC015599.3; EXPRESSED IN LUNG, SIGNAL = 1.2; EXPRESSED IN PLACENTA, SIGNAL =   2; EXPRESSED IN ADULT LIVER, SIGNAL = 2.5; EXPRESSED IN HELA, SIGNAL = 2.8; EXPRESSED IN HEART, SIGNAL = 1.8; EXPRESSED IN FETAL LIVER, SIGNAL = 1.6; EXPRESSED IN BRAIN, SIGNAL = 1.8; EXPRESSED IN BONE MARROW, SIGNAL = 1.9; EST_HUMAN HIT: BE747464.1, EVALUE 2.00e-17; SWISSPROT HIT: Q61116, EVALUE 8.00e-11
VKPFKCSLCEYATRSKSNLKAHMNRHSTEKTHLCDMCGKKFKSKGTLKSHKLLHTAD

SEQ ID NO: 40169 - protein, 25 aa, Homo sapiens
  MAP TO AL132981.5; EXPRESSED IN LUNG, SIGNAL = 6.9; EXPRESSED IN ADULT LIVER, SIGNAL = 7.3; EXPRESSED IN HELA, SIGNAL = 7.6; EXPRESSED IN FETAL LIVER, SIGNAL = 7.2; EXPRESSED IN BRAIN, SIGNAL = 7.3; EXPRESSED IN PLACENTA, SIGNAL = 6.7; EXPRESSED IN HEART, SIGNAL = 6.6; EXPRESSED IN BONE MARROW, SIGNAL = 6.9
PPTSKLAKIPLSQLKSLHRRVLRME

SEQ ID NO: 40170 - protein, 20 aa, Homo sapiens
  MAP TO AC016487.4; EXPRESSED IN PLACENTA, SIGNAL = 2.1; EXPRESSED IN ADULT LIVER, SIGNAL = 4.1; EXPRESSED IN HELA, SIGNAL = 2.8; EXPRESSED IN HEART, SIGNAL = 3.7; EXPRESSED IN BRAIN, SIGNAL = 3.6; EXPRESSED IN BONE MARROW, SIGNAL = 3.6; EXPRESSED IN LUNG, SIGNAL = 3.7; EXPRESSED IN FETAL LIVER, SIGNAL = 3.8
CSPFYPICGEEEEEEKEEEG

SEQ ID NO: 40171 - protein, 65 aa, Homo sapiens
  MAP TO AC016549.4; EXPRESSED IN PLACENTA, SIGNAL = 1.1; EXPRESSED IN HEART, SIGNAL = 1.2; EXPRESSED IN ADULT LIVER, SIGNAL = 1.2; EXPRESSED IN FETAL LIVER, SIGNAL = 1.3; EXPRESSED IN BRAIN, SIGNAL = 1.3; EXPRESSED IN BONE MARROW, SIGNAL =   1; EXPRESSED IN LUNG, SIGNAL = 1.1; EST_HUMAN HIT: BE082538.1, EVALUE 3.00e-30; SWISSPROT HIT: O75962, EVALUE 7.00e-32
QTKERVKLLIQLADGFCEKGHAHAAEIKKCVTAVDKRYRDFSLRMEKYRTSLEKALGISSDSNKS

SEQ ID NO: 40172 - protein, 48 aa, Homo sapiens
  MAP TO AC015474.3; EXPRESSED IN LUNG, SIGNAL = 3.6; EXPRESSED IN HEART, SIGNAL = 3.6; EXPRESSED IN BONE MARROW, SIGNAL = 3.2; EXPRESSED IN FETAL LIVER, SIGNAL = 3.1; EXPRESSED IN PLACENTA, SIGNAL = 2.1; EXPRESSED IN ADULT LIVER, SIGNAL = 3.4; EXPRESSED IN HELA, SIGNAL = 4.3; EXPRESSED IN BRAIN, SIGNAL = 2.7; EST_HUMAN HIT: T77645.1, EVALUE 6.70e+00
YYNIAGKTQQNQQNNTNRANMKVQQVCQIQYRTKKNIKKLKGWRWSMD

SEQ ID NO: 40173 - protein, 97 aa, Homo sapiens
  MAP TO AC025249.2; EXPRESSED IN ADULT LIVER, SIGNAL = 1.1; EXPRESSED IN FETAL LIVER, SIGNAL = 1.2; EXPRESSED IN BONE MARROW, SIGNAL = 1.1; EXPRESSED IN HEART, SIGNAL = 1.2; EXPRESSED IN LUNG, SIGNAL = 1.3; EXPRESSED IN PLACENTA, SIGNAL = 1.1; EXPRESSED IN BRAIN, SIGNAL = 1.2; EST_HUMAN HIT: BE616936.1, EVALUE 4.80e-01; SWISSPROT HIT: Q9UJU3, EVALUE 2.20e+00
HPEDGLPDGLGLHTVNDGVEHRRHHQVHIGNKSMYNVGQVPPKMVDHGHGDTWNKEDKDSRNVGNAGVEGPDALPGSSQTHDCVQDEGIGQKDEQRV

SEQ ID NO: 40174 - protein, 59 aa, Homo sapiens
  MAP TO AC021498.4; EXPRESSED IN BONE MARROW, SIGNAL = 1.5; EXPRESSED IN LUNG, SIGNAL = 1.2; EXPRESSED IN ADULT LIVER, SIGNAL = 1.4; EXPRESSED IN PLACENTA, SIGNAL =   1; EXPRESSED IN HEART, SIGNAL = 1.3; EXPRESSED IN FETAL LIVER, SIGNAL = 3.2; EXPRESSED IN BRAIN, SIGNAL = 1.9; EST_HUMAN HIT: BF129470.1, EVALUE 1.20e+00
DVCGLSYSHFSRCYRYYGIWETIFQCKEGKVSCFDIDLVGKSEKVQVSMGIHNILNTFE

SEQ ID NO: 40175 - protein, 58 aa, Homo sapiens
  MAP TO AC021498.4; EXPRESSED IN BONE MARROW, SIGNAL = 1.5; EXPRESSED IN LUNG, SIGNAL = 1.2; EXPRESSED IN ADULT LIVER, SIGNAL = 1.4; EXPRESSED IN PLACENTA, SIGNAL =   1; EXPRESSED IN HEART, SIGNAL = 1.3; EXPRESSED IN FETAL LIVER, SIGNAL = 3.2; EXPRESSED IN BRAIN, SIGNAL = 1.9; SWISSPROT HIT: P50080, EVALUE 1.40e+00; EST_HUMAN HIT: BE957907.2, EVALUE 1.60e+00
MYVGFPIVISVDAIDIMVFGKLYFNVKKARCHALTLIWWVRVRKCKCLWEYTTYLIPL

SEQ ID NO: 40176 - protein, 44 aa, Homo sapiens
  MAP TO AC018761.2; EXPRESSED IN LUNG, SIGNAL = 2.4; EXPRESSED IN ADULT LIVER, SIGNAL = 1.9; EXPRESSED IN HEART, SIGNAL = 1.6; EXPRESSED IN BRAIN, SIGNAL = 2.7; EXPRESSED IN BONE MARROW, SIGNAL =   2; EXPRESSED IN PLACENTA, SIGNAL = 1.7; EXPRESSED IN FETAL LIVER, SIGNAL =   2; SWISSPROT HIT: Q92973, EVALUE 2.00e-17; EST_HUMAN HIT: AU119841.1, EVALUE 3.00e-19
GAFGALQKICEDSSELLDSDALNRPLNIMIPKFLQFFKHCSPKI

SEQ ID NO: 40177 - protein, 28 aa, Homo sapiens
  MAP TO AC018761.2; EXPRESSED IN LUNG, SIGNAL = 2.4; EXPRESSED IN ADULT LIVER, SIGNAL = 1.9; EXPRESSED IN HEART, SIGNAL = 1.6; EXPRESSED IN BRAIN, SIGNAL = 2.7; EXPRESSED IN BONE MARROW, SIGNAL =   2; EXPRESSED IN PLACENTA, SIGNAL = 1.7; EXPRESSED IN FETAL LIVER, SIGNAL =   2; EST_HUMAN HIT: AU119841.1, EVALUE 3.00e-10
EPLEPCRRSVKTHQSFWTVTPSTGPSTS

SEQ ID NO: 40178 - protein, 63 aa, Homo sapiens; identical to SEQ ID NO: 36425
  MAP TO AC007981.43; EXPRESSED IN LUNG, SIGNAL =  17; EXPRESSED IN PLACENTA, SIGNAL =  17; EXPRESSED IN HEART, SIGNAL =  17; EXPRESSED IN FETAL LIVER, SIGNAL =  17; EXPRESSED IN ADULT LIVER, SIGNAL =  19; EXPRESSED IN HELA, SIGNAL =  25; EXPRESSED IN BRAIN, SIGNAL =  17; EXPRESSED IN BONE MARROW, SIGNAL =  19; EST_HUMAN HIT: AI906419.1, EVALUE 1.00e-23; SWISSPROT HIT: P19440, EVALUE 9.00e-31

SEQ ID NO: 40179 - protein, 64 aa, Homo sapiens
  MAP TO AC007981.43; EXPRESSED IN LUNG, SIGNAL =  17; EXPRESSED IN PLACENTA, SIGNAL =  17; EXPRESSED IN HEART, SIGNAL =  17; EXPRESSED IN FETAL LIVER, SIGNAL =  17; EXPRESSED IN ADULT LIVER, SIGNAL =  19; EXPRESSED IN HELA, SIGNAL =  25; EXPRESSED IN BRAIN, SIGNAL =  17; EXPRESSED IN BONE MARROW, SIGNAL =  19; EST_HUMAN HIT: AI906419.1, EVALUE 3.00e-07
RCLGRSEAMSWHTSGMGGCPGLASSSPASSWPARASPWARAWRQSWKTSGPSSSSSLSCGMSVG

SEQ ID NO: 40180 - protein, 68 aa, Homo sapiens
  MAP TO AL133293.14; EXPRESSED IN PLACENTA, SIGNAL = 2.7; EXPRESSED IN HELA, SIGNAL =   4; EXPRESSED IN HEART, SIGNAL = 3.1; EXPRESSED IN FETAL LIVER, SIGNAL = 3.1; EXPRESSED IN BONE MARROW, SIGNAL = 3.3; EXPRESSED IN LUNG, SIGNAL = 2.9; EXPRESSED IN ADULT LIVER, SIGNAL = 2.7; EXPRESSED IN BRAIN, SIGNAL = 2.8; EST_HUMAN HIT: BF529622.1, EVALUE 2.00e-30; SWISSPROT HIT: P05480, EVALUE 2.00e-38
MVNREVLDQVERGYRMPCPPECPESLHDLMCQCWRKEPEERPTFEYLQAFLEDYFTSTEPQYQPGENL

SEQ ID NO: 40181 - protein, 42 aa, Homo sapiens
  MAP TO AC013634.3; EXPRESSED IN LUNG, SIGNAL = 2.8; EXPRESSED IN FETAL LIVER, SIGNAL = 4.3; EXPRESSED IN BONE MARROW, SIGNAL = 4.2; EXPRESSED IN HELA, SIGNAL = 3.3; EXPRESSED IN HEART, SIGNAL = 3.6; EXPRESSED IN PLACENTA, SIGNAL = 3.3; EXPRESSED IN ADULT LIVER, SIGNAL = 3.7; EXPRESSED IN BRAIN, SIGNAL = 4.1; EST_HUMAN HIT: AA130165.1, EVALUE 2.00e-11
RHPEEGIVIIGDDSSMHVIAPADRPVRQDVAVGDSGIDDPDP

SEQ ID NO: 40182 - protein, 29 aa, Homo sapiens
  MAP TO AL157381.7; EXPRESSED IN BRAIN, SIGNAL = 1.1; EXPRESSED IN BONE MARROW, SIGNAL = 1.1; EXPRESSED IN LUNG, SIGNAL = 1.3; EXPRESSED IN PLACENTA, SIGNAL = 1.4; EXPRESSED IN ADULT LIVER, SIGNAL = 1.7; EXPRESSED IN HEART, SIGNAL = 1.2; EXPRESSED IN FETAL LIVER, SIGNAL = 0.93
LTPKRQVIESPKIVCILSISICLYSPSGI

SEQ ID NO: 40183 - protein, 27 aa, Homo sapiens
  MAP TO AL158012.2; EXPRESSED IN LUNG, SIGNAL = 1.9; EXPRESSED IN ADULT LIVER, SIGNAL = 1.7; EXPRESSED IN FETAL LIVER, SIGNAL = 2.3; EXPRESSED IN HEART, SIGNAL =   3; EXPRESSED IN PLACENTA, SIGNAL = 2.2; EXPRESSED IN BRAIN, SIGNAL = 2.5; EXPRESSED IN BONE MARROW, SIGNAL = 2.7
MVGINLGVKVQGKNSQVMRRLLGTYLV

SEQ ID NO: 40184 - protein, 28 aa, Homo sapiens
  MAP TO AC010802.4; EXPRESSED IN PLACENTA, SIGNAL = 1.2; EXPRESSED IN ADULT LIVER, SIGNAL = 1.4; EXPRESSED IN HEART, SIGNAL = 1.3; EXPRESSED IN FETAL LIVER, SIGNAL = 1.1; EXPRESSED IN BONE MARROW, SIGNAL = 1.1; EXPRESSED IN BRAIN, SIGNAL = 1.3; EXPRESSED IN LUNG, SIGNAL = 1.3
AYPSLHSSEAMKLGLLVMPSTISPPLAK

SEQ ID NO: 40185 - protein, 40 aa, Homo sapiens
  MAP TO AC009467.3; EXPRESSED IN LUNG, SIGNAL =   5; EXPRESSED IN PLACENTA, SIGNAL = 6.7; EXPRESSED IN HELA, SIGNAL =  14; EXPRESSED IN FETAL LIVER, SIGNAL = 6.9; EXPRESSED IN BONE MARROW, SIGNAL = 6.6; EXPRESSED IN ADULT LIVER, SIGNAL =  14; EXPRESSED IN HEART, SIGNAL =   7; EXPRESSED IN BRAIN, SIGNAL = 6.9; EST_HUMAN HIT: AA373373.1, EVALUE 4.20e+00
MVPASASGDGFKLKKEGSWKKVKGSQAGCVQIAHNQKGSK

SEQ ID NO: 40186 - protein, 28 aa, Homo sapiens
  MAP TO AC016648.3; EXPRESSED IN LUNG, SIGNAL = 1.3; EXPRESSED IN PLACENTA, SIGNAL = 1.3; EXPRESSED IN ADULT LIVER, SIGNAL = 1.5; EXPRESSED IN HEART, SIGNAL = 1.2; EXPRESSED IN FETAL LIVER, SIGNAL = 1.3; EXPRESSED IN BRAIN, SIGNAL = 1.3; EXPRESSED IN BONE MARROW, SIGNAL = 1.2
MKEHAPDKDIENRDIENIENNTLYLCLR

SEQ ID NO: 40187 - protein, 62 aa, Homo sapiens
  MAP TO AC009046.4; EXPRESSED IN BONE MARROW, SIGNAL =  15; EXPRESSED IN PLACENTA, SIGNAL = 1.8; EXPRESSED IN ADULT LIVER, SIGNAL = 4.8; EXPRESSED IN HELA, SIGNAL = 9.3; EXPRESSED IN BRAIN, SIGNAL = 9.1; EXPRESSED IN LUNG, SIGNAL = 5.8; EXPRESSED IN HEART, SIGNAL = 3.6; EXPRESSED IN FETAL LIVER, SIGNAL =  22; EST_HUMAN HIT: BF341334.1, EVALUE 3.00e-22; SWISSPROT HIT: P44808, EVALUE 3.50e+00
SAGPSASGALELPALGVDVGFGVAVRGSRGLAKMPVHLSALERTGEQDGAAALAGVHGQLVE

SEQ ID NO: 40188 - protein, 35 aa, Homo sapiens
  MAP TO AC009046.4; EXPRESSED IN BONE MARROW, SIGNAL =  15; EXPRESSED IN PLACENTA, SIGNAL = 1.8; EXPRESSED IN ADULT LIVER, SIGNAL = 4.8; EXPRESSED IN HELA, SIGNAL = 9.3; EXPRESSED IN BRAIN, SIGNAL = 9.1; EXPRESSED IN LUNG, SIGNAL = 5.8; EXPRESSED IN HEART, SIGNAL = 3.6; EXPRESSED IN FETAL LIVER, SIGNAL =  22; EST_HUMAN HIT: AW250563.1, EVALUE 5.00e-12; SWISSPROT HIT: P42828, EVALUE 1.30e+00
SPVLSRAERCTGILARPREPRTATPNPTSTPRAGS

SEQ ID NO: 40189 - protein, 42 aa, Homo sapiens
  MAP TO AC015908.4; EXPRESSED IN ADULT LIVER, SIGNAL = 5.8; EXPRESSED IN HELA, SIGNAL = 8.1; EXPRESSED IN BONE MARROW, SIGNAL = 4.6; EXPRESSED IN LUNG, SIGNAL = 5.8; EXPRESSED IN HEART, SIGNAL = 4.8; EXPRESSED IN BRAIN, SIGNAL = 4.4; EXPRESSED IN PLACENTA, SIGNAL = 5.6; EXPRESSED IN FETAL LIVER, SIGNAL = 4.3; EST_HUMAN HIT: AI478186.1, EVALUE 8.00e-05
GMARNLRNQREENLDDLTSSSLYPYLSTPPSIHPSITDQALT

SEQ ID NO: 40190 - protein, 27 aa, Homo sapiens
  MAP TO AC018528.3; EXPRESSED IN HELA, SIGNAL = 2.8; EXPRESSED IN LUNG, SIGNAL = 1.6; EXPRESSED IN PLACENTA, SIGNAL = 1.6; EXPRESSED IN ADULT LIVER, SIGNAL = 1.7; EXPRESSED IN FETAL LIVER, SIGNAL = 1.4; EXPRESSED IN BRAIN, SIGNAL = 1.8; EXPRESSED IN BONE MARROW, SIGNAL = 1.3; EXPRESSED IN HEART, SIGNAL = 1.4
MRKSASVKAAEQEASGWQQQGEELDMQ

SEQ ID NO: 40191 - protein, 58 aa, Homo sapiens
  MAP TO AC022470.3; EXPRESSED IN PLACENTA, SIGNAL = 1.4; EXPRESSED IN BRAIN, SIGNAL = 1.9; EXPRESSED IN BONE MARROW, SIGNAL = 1.6; EXPRESSED IN LUNG, SIGNAL = 1.3; EXPRESSED IN HEART, SIGNAL = 1.6; EXPRESSED IN FETAL LIVER, SIGNAL = 1.5; EST_HUMAN HIT: AW956882.1, EVALUE 8.00e-23; SWISSPROT HIT: O14646, EVALUE 6.90e-01
VSNSSGETLGADSDLSSNAGDGPGGEGSVHLASSRGTLSDSEIETNSATSTIFVSFVY

SEQ ID NO: 40192 - protein, 18 aa, Homo sapiens
  MAP TO AC009635.4; EXPRESSED IN ADULT LIVER, SIGNAL = 1.7; EXPRESSED IN LUNG, SIGNAL = 1.6; EXPRESSED IN PLACENTA, SIGNAL = 1.4; EXPRESSED IN FETAL LIVER, SIGNAL = 1.4; EXPRESSED IN BRAIN, SIGNAL = 1.6; EXPRESSED IN BONE MARROW, SIGNAL = 1.5; EXPRESSED IN HEART, SIGNAL = 1.5
LSTMTKNQNKMFSQNLSS

SEQ ID NO: 40193 - protein, 52 aa, Homo sapiens
  MAP TO AL137786.2; EXPRESSED IN LUNG, SIGNAL = 3.4; EXPRESSED IN PLACENTA, SIGNAL = 4.5; EXPRESSED IN ADULT LIVER, SIGNAL = 6.6; EXPRESSED IN HEART, SIGNAL = 5.7; EXPRESSED IN FETAL LIVER, SIGNAL =   6; EXPRESSED IN BRAIN, SIGNAL = 6.3; EXPRESSED IN HELA, SIGNAL = 6.1; EXPRESSED IN BONE MARROW, SIGNAL = 5.7; EST_HUMAN HIT: BE262730.1, EVALUE 9.80e-01
KVAPTIKLGPFVSPPLPPSLSLLPASVPLRGALQPPSPSGRFAVAPRRRGEE

SEQ ID NO: 40194 - protein, 38 aa, Homo sapiens
  MAP TO AC016080.3; EXPRESSED IN BONE MARROW, SIGNAL = 2.9; EXPRESSED IN ADULT LIVER, SIGNAL = 2.5; EXPRESSED IN LUNG, SIGNAL = 2.3; EXPRESSED IN PLACENTA, SIGNAL = 2.8; EXPRESSED IN HELA, SIGNAL = 4.4; EXPRESSED IN HEART, SIGNAL = 2.6; EXPRESSED IN FETAL LIVER, SIGNAL =   2; EXPRESSED IN BRAIN, SIGNAL = 1.8
MYSPQCIFIEFTNYHYAFYLSNNITLNCESTFKLRENN

SEQ ID NO: 40195 - protein, 25 aa, Homo sapiens
  MAP TO AC016080.3; EXPRESSED IN BONE MARROW, SIGNAL = 2.9; EXPRESSED IN ADULT LIVER, SIGNAL = 2.5; EXPRESSED IN LUNG, SIGNAL = 2.3; EXPRESSED IN PLACENTA, SIGNAL = 2.8; EXPRESSED IN HELA, SIGNAL = 4.4; EXPRESSED IN HEART, SIGNAL = 2.6; EXPRESSED IN FETAL LIVER, SIGNAL =   2; EXPRESSED IN BRAIN, SIGNAL = 1.8
CTAHSAYLLNSPITIMHSICQIILL

SEQ ID NO: 40196 - protein, 35 aa, Homo sapiens
  MAP TO AC019276.3; EXPRESSED IN PLACENTA, SIGNAL = 3.1; EXPRESSED IN FETAL LIVER, SIGNAL = 4.2; EXPRESSED IN LUNG, SIGNAL = 4.2; EXPRESSED IN BONE MARROW, SIGNAL = 4.6; EXPRESSED IN BRAIN, SIGNAL = 3.6; EXPRESSED IN HEART, SIGNAL = 3.4; EXPRESSED IN HELA, SIGNAL = 5.2; EXPRESSED IN ADULT LIVER, SIGNAL = 4.2; EST_HUMAN HIT: BE964306.2, EVALUE 1.50e+00; SWISSPROT HIT: P53804, EVALUE 4.90e+00
RKWKGSSKAGSCSGPGRLTDPRESDRGWGGCSASS

SEQ ID NO: 40197 - protein, 44 aa, Homo sapiens
  MAP TO AL136419.2; EXPRESSED IN ADULT LIVER, SIGNAL = 7.8; EXPRESSED IN FETAL LIVER, SIGNAL = 9.6; EXPRESSED IN BRAIN, SIGNAL = 7.7; EXPRESSED IN LUNG, SIGNAL = 7.9; EXPRESSED IN HELA, SIGNAL = 8.1; EXPRESSED IN PLACENTA, SIGNAL = 7.1; EXPRESSED IN HEART, SIGNAL = 5.9; EXPRESSED IN BONE MARROW, SIGNAL = 8.2; EST_HUMAN HIT: AA354238.1, EVALUE 3.00e-07
TYSTTLNGNDESGHLCLIPNLSRKAFDFSLLSMILAVGLSYMAF

SEQ ID NO: 40198 - protein, 67 aa, Homo sapiens
  MAP TO AC011599.8; EXPRESSED IN LUNG, SIGNAL = 7.1; EXPRESSED IN ADULT LIVER, SIGNAL = 7.3; EXPRESSED IN HEART, SIGNAL = 6.3; EXPRESSED IN BRAIN, SIGNAL = 6.2; EXPRESSED IN HELA, SIGNAL = 8.4; EXPRESSED IN BONE MARROW, SIGNAL =   7; EXPRESSED IN FETAL LIVER, SIGNAL = 6.3; EXPRESSED IN PLACENTA, SIGNAL = 6.2; EST_HUMAN HIT: AI439424.1, EVALUE 1.00e-12; SWISSPROT HIT: O57428, EVALUE 5.80e+00
WMELEVMMLSEISQVQKNKISHVLTYLWDLKIKTIKLMDIETRTVIRIGKGSRGTEGEVGMVNEYKK

SEQ ID NO: 40199 - protein, 27 aa, Homo sapiens
  MAP TO AC013629.3; EXPRESSED IN PLACENTA, SIGNAL = 1.6; EXPRESSED IN FETAL LIVER, SIGNAL = 1.4; EXPRESSED IN HEART, SIGNAL = 2.3; EXPRESSED IN BONE MARROW, SIGNAL = 1.2; EXPRESSED IN ADULT LIVER, SIGNAL = 2.3; EXPRESSED IN BRAIN, SIGNAL = 1.7; EXPRESSED IN LUNG, SIGNAL = 1.6
LRKLKRSFRDLKKREIHPIHTGITSLK

SEQ ID NO: 40200 - protein, 45 aa, Homo sapiens
  MAP TO AC013764.3; EXPRESSED IN HEART, SIGNAL = 3.8; EXPRESSED IN BONE MARROW, SIGNAL = 3.8; EXPRESSED IN LUNG, SIGNAL = 3.9; EXPRESSED IN HELA, SIGNAL = 4.3; EXPRESSED IN PLACENTA, SIGNAL = 4.1; EXPRESSED IN ADULT LIVER, SIGNAL = 4.6; EXPRESSED IN FETAL LIVER, SIGNAL = 3.5; EXPRESSED IN BRAIN, SIGNAL =   5; EST_HUMAN HIT: AI187978.1, EVALUE 6.00e-11
MRTVWGNHPHDSIISHRVTSYNTWELWELQFKMRFGWRHSQTILD

SEQ ID NO: 40201 - protein, 60 aa, Homo sapiens
  MAP TO AC013490.3; EXPRESSED IN PLACENTA, SIGNAL = 1.9; EXPRESSED IN FETAL LIVER, SIGNAL = 1.9; EXPRESSED IN BONE MARROW, SIGNAL = 1.9; EXPRESSED IN HEART, SIGNAL = 1.9; EXPRESSED IN ADULT LIVER, SIGNAL = 2.1; EXPRESSED IN LUNG, SIGNAL = 2.1; EXPRESSED IN HELA, SIGNAL = 2.6; EXPRESSED IN BRAIN, SIGNAL = 2.6; SWISSPROT HIT: P47869, EVALUE 7.00e-07
KKEKASVMIQNNAYAVAVANYAPNLSKDPVLSTISKSATTPEPNKKPENKPAEAKKTFNS

SEQ ID NO: 40202 - protein, 41 aa, Homo sapiens
  MAP TO AC021000.3; EXPRESSED IN LUNG, SIGNAL = 1.5; EXPRESSED IN PLACENTA, SIGNAL = 1.4; EXPRESSED IN HEART, SIGNAL = 1.7; EXPRESSED IN BRAIN, SIGNAL = 5.2; EXPRESSED IN FETAL LIVER, SIGNAL = 1.8; EXPRESSED IN ADULT LIVER, SIGNAL = 1.8; EXPRESSED IN HELA, SIGNAL = 2.6; EXPRESSED IN BONE MARROW, SIGNAL = 1.8; EST_HUMAN HIT: AV724222.1, EVALUE 9.00e-17; SWISSPROT HIT: P54938, EVALUE 7.00e-18
DTIQQLENELRGTKWEMARHLREYQDLLNVKMALDIEIAAY

SEQ ID NO: 40203 - protein, 35 aa, Homo sapiens
  MAP TO AC021000.3; EXPRESSED IN LUNG, SIGNAL = 1.5; EXPRESSED IN PLACENTA, SIGNAL = 1.4; EXPRESSED IN HEART, SIGNAL = 1.7; EXPRESSED IN BRAIN, SIGNAL = 5.2; EXPRESSED IN FETAL LIVER, SIGNAL = 1.8; EXPRESSED IN ADULT LIVER, SIGNAL = 1.8; EXPRESSED IN HELA, SIGNAL = 2.6; EXPRESSED IN BONE MARROW, SIGNAL = 1.8; EST_HUMAN HIT: AV724222.1, EVALUE 7.00e-15
TPSSSWKMSFGAQSGKWLVICANTRTSSTSRWLWI

SEQ ID NO: 40204 - protein, 24 aa, Homo sapiens
  MAP TO AC016549.4; EXPRESSED IN LUNG, SIGNAL = 4.4; EXPRESSED IN HELA, SIGNAL = 5.2; EXPRESSED IN PLACENTA, SIGNAL =   4; EXPRESSED IN FETAL LIVER, SIGNAL = 3.4; EXPRESSED IN ADULT LIVER, SIGNAL = 4.6; EXPRESSED IN HEART, SIGNAL = 3.6; EXPRESSED IN BRAIN, SIGNAL = 3.8; EXPRESSED IN BONE MARROW, SIGNAL = 3.7; SWISSPROT HIT: O75962, EVALUE 3.00e-03; EST_HUMAN HIT: BF058117.1, EVALUE 5.00e-06
FRKNDEMKAMDVLPILKEKVAYLS

SEQ ID NO: 40205 - protein, 34 aa, Homo sapiens
  MAP TO AL139008.3; EXPRESSED IN PLACENTA, SIGNAL = 2.3; EXPRESSED IN ADULT LIVER, SIGNAL = 2.4; EXPRESSED IN HEART, SIGNAL = 2.2; EXPRESSED IN FETAL LIVER, SIGNAL = 1.9; EXPRESSED IN BRAIN, SIGNAL = 2.3; EXPRESSED IN BONE MARROW, SIGNAL = 2.5; EXPRESSED IN LUNG, SIGNAL = 2.3
LKTTASTTTATTIIIIIIIIIIIIMIMVIVVVVN

SEQ ID NO: 40206 - protein, 31 aa, Homo sapiens
  MAP TO AC019253.3; EXPRESSED IN LUNG, SIGNAL = 1.3; EXPRESSED IN ADULT LIVER, SIGNAL = 1.3; EXPRESSED IN BRAIN, SIGNAL = 1.5; EXPRESSED IN PLACENTA, SIGNAL = 1.1; EXPRESSED IN HEART, SIGNAL = 1.4; EXPRESSED IN FETAL LIVER, SIGNAL = 1.2; EXPRESSED IN BONE MARROW, SIGNAL = 1.2; EST_HUMAN HIT: BF693637.1, EVALUE 2.00e+00
SGSSSCQCRERLWPSSQSSCFLLKAAMSLDQ

SEQ ID NO: 40207 - protein, 47 aa, Homo sapiens
  MAP TO AC025324.2; EXPRESSED IN ADULT LIVER, SIGNAL = 1.2; EXPRESSED IN HEART, SIGNAL = 1.2; EXPRESSED IN FETAL LIVER, SIGNAL = 1.4; EXPRESSED IN LUNG, SIGNAL = 1.1; EXPRESSED IN PLACENTA, SIGNAL = 1.8; EXPRESSED IN BRAIN, SIGNAL = 1.2; EXPRESSED IN BONE MARROW, SIGNAL = 0.98; SWISSPROT HIT: P49379, EVALUE 1.20e+00
IPLKSDRRDQAKSRRSSMYLEGTSPVTLQSTLRALGLGCSQSGLQRR

SEQ ID NO: 40208 - protein, 43 aa, Homo sapiens
  MAP TO AL133334.14; EXPRESSED IN ADULT LIVER, SIGNAL = 1.6; EXPRESSED IN PLACENTA, SIGNAL = 1.6; EXPRESSED IN HEART, SIGNAL = 1.4; EXPRESSED IN FETAL LIVER, SIGNAL = 1.4; EXPRESSED IN BONE MARROW, SIGNAL = 1.3; EXPRESSED IN LUNG, SIGNAL = 1.5; EXPRESSED IN BRAIN, SIGNAL = 1.5; EST_HUMAN HIT: BF569763.1, EVALUE 1.10e+00
NRLDVQDNMLTHHSMSLASPEKAVCVSPPLAQRTRCMRQPTVA

SEQ ID NO: 40209 - protein, 36 aa, Homo sapiens
  MAP TO AL133334.14; EXPRESSED IN ADULT LIVER, SIGNAL = 1.6; EXPRESSED IN PLACENTA, SIGNAL = 1.6; EXPRESSED IN HEART, SIGNAL = 1.4; EXPRESSED IN FETAL LIVER, SIGNAL = 1.4; EXPRESSED IN BONE MARROW, SIGNAL = 1.3; EXPRESSED IN LUNG, SIGNAL = 1.5; EXPRESSED IN BRAIN, SIGNAL = 1.5
IDWMCRITCSLTTQCPWPLQRKLFVYLHHWPRGHAA

SEQ ID NO: 40210 - protein, 17 aa, Homo sapiens
  MAP TO AC021641.4; EXPRESSED IN PLACENTA, SIGNAL = 5.4; EXPRESSED IN BONE MARROW, SIGNAL = 7.3; EXPRESSED IN ADULT LIVER, SIGNAL =   5; EXPRESSED IN FETAL LIVER, SIGNAL = 5.6; EXPRESSED IN BRAIN, SIGNAL = 5.4; EXPRESSED IN LUNG, SIGNAL = 4.8; EXPRESSED IN HELA, SIGNAL = 3.9; EXPRESSED IN HEART, SIGNAL = 4.4
GQVKVMKTHPALKQITL

SEQ ID NO: 40211 - protein, 41 aa, Homo sapiens
  MAP TO AC025747.3; EXPRESSED IN HELA, SIGNAL = 5.5; EXPRESSED IN LUNG, SIGNAL = 4.1; EXPRESSED IN PLACENTA, SIGNAL = 3.6; EXPRESSED IN ADULT LIVER, SIGNAL =   6; EXPRESSED IN FETAL LIVER, SIGNAL = 4.3; EXPRESSED IN BRAIN, SIGNAL =   4; EXPRESSED IN BONE MARROW, SIGNAL = 4.4; EXPRESSED IN HEART, SIGNAL = 3.1; EST_HUMAN HIT: AW956683.1, EVALUE 4.00e-10
VKQQTFAVSVTALKGGATGVARSSWWVRGLADFRSEATNIS

SEQ ID NO: 40212 - protein, 39 aa, Homo sapiens
  MAP TO AL139250.2; EXPRESSED IN PLACENTA, SIGNAL = 2.9; EXPRESSED IN ADULT LIVER, SIGNAL = 1.1; EXPRESSED IN FETAL LIVER, SIGNAL = 2.8; EXPRESSED IN HELA, SIGNAL = 4.6; EXPRESSED IN BRAIN, SIGNAL = 2.5; EXPRESSED IN BONE MARROW, SIGNAL = 2.5; EXPRESSED IN LUNG, SIGNAL = 2.2; EXPRESSED IN HEART, SIGNAL =   3
PLRELQLFPAILPSVHLLGCRDAHGPPFPGLPHPPGGLW

SEQ ID NO: 40213 - protein, 20 aa, Homo sapiens
  MAP TO AL121917.12; EXPRESSED IN ADULT LIVER, SIGNAL = 4.4; EXPRESSED IN HELA, SIGNAL = 4.9; EXPRESSED IN LUNG, SIGNAL = 5.6; EXPRESSED IN PLACENTA, SIGNAL = 2.8; EXPRESSED IN FETAL LIVER, SIGNAL = 6.4; EXPRESSED IN BRAIN, SIGNAL =   9; EXPRESSED IN BONE MARROW, SIGNAL = 5.4; EXPRESSED IN HEART, SIGNAL = 7.7; EST_HUMAN HIT: BE838997.1, EVALUE 1.00e-03; SWISSPROT HIT: P29797, EVALUE 8.00e-05
TIVAAMSNLVPPVELANPEN

SEQ ID NO: 40214 - protein, 105 aa, Homo sapiens
  MAP TO AC022429.2; EXPRESSED IN LUNG, SIGNAL = 1.7; EXPRESSED IN PLACENTA, SIGNAL = 1.6; EXPRESSED IN ADULT LIVER, SIGNAL = 1.8; EXPRESSED IN HEART, SIGNAL = 1.8; EXPRESSED IN FETAL LIVER, SIGNAL = 1.9; EXPRESSED IN BRAIN, SIGNAL = 1.7; EXPRESSED IN BONE MARROW, SIGNAL = 1.7; EST_HUMAN HIT: AW263999.1, EVALUE 1.80e+00; SWISSPROT HIT: P75789, EVALUE 3.10e+00
MAFQRLQAHYLTDSDCNSTKEADRIIPIQLMKNINQKRNQPEVTQLAQEKLILNPSLLVAPFCKSMAPVSRQMEQRQRLQPWAWKSGCVLGASRPQLKTDSDSGH

SEQ ID NO: 40215 - protein, 29 aa, Homo sapiens
  MAP TO AC022429.2; EXPRESSED IN LUNG, SIGNAL = 1.7; EXPRESSED IN PLACENTA, SIGNAL = 1.6; EXPRESSED IN ADULT LIVER, SIGNAL = 1.8; EXPRESSED IN HEART, SIGNAL = 1.8; EXPRESSED IN FETAL LIVER, SIGNAL = 1.9; EXPRESSED IN BRAIN, SIGNAL = 1.7; EXPRESSED IN BONE MARROW, SIGNAL = 1.7
WHSKGSKHIILLILTVTQQRRLIGSSPFS

SEQ ID NO: 40216 - protein, 54 aa, Homo sapiens
  MAP TO AL121586.28; EXPRESSED IN ADULT LIVER, SIGNAL =  10; EXPRESSED IN HELA, SIGNAL =  15; EXPRESSED IN HEART, SIGNAL = 8.5; EXPRESSED IN FETAL LIVER, SIGNAL = 9.3; EXPRESSED IN BONE MARROW, SIGNAL =  11; EXPRESSED IN LUNG, SIGNAL = 8.6; EXPRESSED IN PLACENTA, SIGNAL = 9.3; EXPRESSED IN BRAIN, SIGNAL = 9.6; EST_HUMAN HIT: BF688219.1, EVALUE 2.00e-12; SWISSPROT HIT: P43026, EVALUE 2.00e-26
EPKEPFRPPPITPHEYMLSLYRTLSDADRKGGNSSVKLEAGLANTITSFIDKGQ

SEQ ID NO: 40217 - protein, 29 aa, Homo sapiens
  MAP TO AC015873.2; EXPRESSED IN BONE MARROW, SIGNAL = 1.6; EXPRESSED IN PLACENTA, SIGNAL = 1.6; EXPRESSED IN ADULT LIVER, SIGNAL = 1.8; EXPRESSED IN HELA, SIGNAL = 2.4; EXPRESSED IN HEART, SIGNAL = 1.7; EXPRESSED IN LUNG, SIGNAL = 1.5; EXPRESSED IN FETAL LIVER, SIGNAL = 1.7; EXPRESSED IN BRAIN, SIGNAL = 1.6
TFHPNLPLQLPGHLQPLRRGLQESLAHCL

SEQ ID NO: 40218 - protein, 52 aa, Homo sapiens
  MAP TO AC015525.3; EXPRESSED IN LUNG, SIGNAL = 1.7; EXPRESSED IN PLACENTA, SIGNAL = 1.4; EXPRESSED IN ADULT LIVER, SIGNAL = 1.5; EXPRESSED IN FETAL LIVER, SIGNAL = 1.2; EXPRESSED IN BONE MARROW, SIGNAL = 1.1; EXPRESSED IN HEART, SIGNAL = 1.3; EXPRESSED IN BRAIN, SIGNAL = 1.1; SWISSPROT HIT: P54316, EVALUE 1.00e-03; EST_HUMAN HIT: AA149791.1, EVALUE 1.00e-13
MDDLVKGLLSVEDMNVVVVDWNRGATTLIYTHASSKTRKVAMVLKEFIDQML

SEQ ID NO: 40219 - protein, 60 aa, Homo sapiens
  MAP TO AC012629.4; EXPRESSED IN PLACENTA, SIGNAL = 5.6; EXPRESSED IN ADULT LIVER, SIGNAL = 7.2; EXPRESSED IN HEART, SIGNAL = 4.7; EXPRESSED IN FETAL LIVER, SIGNAL = 7.3; EXPRESSED IN BRAIN, SIGNAL = 4.8; EXPRESSED IN LUNG, SIGNAL = 6.2; EXPRESSED IN HELA, SIGNAL =  11; EXPRESSED IN BONE MARROW, SIGNAL = 5.5; SWISSPROT HIT: P24563, EVALUE 6.00e+00; EST_HUMAN HIT: AI277587.1, EVALUE 3.00e-28
MEHPSKHLPACLSEQHPGGDAALQQHQVRPVQTPALPLQKSRSILNASQSSARGRAVISR

SEQ ID NO: 40220 - protein, 60 aa, Homo sapiens
  MAP TO AC012629.4; EXPRESSED IN PLACENTA, SIGNAL = 5.6; EXPRESSED IN ADULT LIVER, SIGNAL = 7.2; EXPRESSED IN HEART, SIGNAL = 4.7; EXPRESSED IN FETAL LIVER, SIGNAL = 7.3; EXPRESSED IN BRAIN, SIGNAL = 4.8; EXPRESSED IN LUNG, SIGNAL = 6.2; EXPRESSED IN HELA, SIGNAL =  11; EXPRESSED IN BONE MARROW, SIGNAL = 5.5; SWISSPROT HIT: P71613, EVALUE 3.50e+00; EST_HUMAN HIT: AI277587.1, EVALUE 4.00e-30
WNTPASTSQPAFRSSTQEGMPRSSNTRSGLCRPLPCRCRNPEASLMLLSLQPEGGLLFPE

SEQ ID NO: 40221 - protein, 17 aa, Homo sapiens
  MAP TO AC018530.4; EXPRESSED IN LUNG, SIGNAL = 1.3; EXPRESSED IN ADULT LIVER, SIGNAL = 1.2; EXPRESSED IN FETAL LIVER, SIGNAL = 1.1; EXPRESSED IN BRAIN, SIGNAL = 1.3; EXPRESSED IN HEART, SIGNAL = 1.2; EXPRESSED IN PLACENTA, SIGNAL = 1.3; EXPRESSED IN BONE MARROW, SIGNAL = 1.3
IFLSSQNLCLGVPPAMQ

SEQ ID NO: 40222 - protein, 27 aa, Homo sapiens
  MAP TO AL157381.7; EXPRESSED IN LUNG, SIGNAL = 1.9; EXPRESSED IN HEART, SIGNAL = 1.8; EXPRESSED IN FETAL LIVER, SIGNAL = 1.7; EXPRESSED IN BRAIN, SIGNAL = 1.8; EXPRESSED IN PLACENTA, SIGNAL = 2.7; EXPRESSED IN ADULT LIVER, SIGNAL = 2.4; EXPRESSED IN BONE MARROW, SIGNAL = 2.4; SWISSPROT HIT: O41033, EVALUE 2.20e+00; EST_HUMAN HIT: AI935086.1, EVALUE 2.00e-05
AKKAVTVLARVIDPDYQDEISLLLHNG

SEQ ID NO: 40223 - protein, 49 aa, Homo sapiens
  MAP TO AC011111.3; EXPRESSED IN LUNG, SIGNAL = 1.2; EXPRESSED IN PLACENTA, SIGNAL = 1.1; EXPRESSED IN HEART, SIGNAL = 1.3; EXPRESSED IN FETAL LIVER, SIGNAL = 1.2; EXPRESSED IN BRAIN, SIGNAL = 1.2; EXPRESSED IN BONE MARROW, SIGNAL = 1.3; EXPRESSED IN ADULT LIVER, SIGNAL = 1.2; EST_HUMAN HIT: BF055235.1, EVALUE 7.70e-01
LPSYQLQLVCNTLWNFDVLEPLILSPSPSAELAEKEGAEEGVEEGAEEG

SEQ ID NO: 40224 - protein, 20 aa, Homo sapiens
  MAP TO AC011111.3; EXPRESSED IN LUNG, SIGNAL = 1.2; EXPRESSED IN PLACENTA, SIGNAL = 1.1; EXPRESSED IN HEART, SIGNAL = 1.3; EXPRESSED IN FETAL LIVER, SIGNAL = 1.2; EXPRESSED IN BRAIN, SIGNAL = 1.2; EXPRESSED IN BONE MARROW, SIGNAL = 1.3; EXPRESSED IN ADULT LIVER, SIGNAL = 1.2
QSWLRRRVPKKGLKKVLKKE

SEQ ID NO: 40225 - protein, 38 aa, Homo sapiens
  MAP TO AL161777.1; EXPRESSED IN ADULT LIVER, SIGNAL = 1.3; EXPRESSED IN PLACENTA, SIGNAL = 1.1; EXPRESSED IN HEART, SIGNAL = 1.2; EXPRESSED IN FETAL LIVER, SIGNAL = 1.3; EXPRESSED IN BRAIN, SIGNAL = 1.2; EXPRESSED IN LUNG, SIGNAL = 1.3; EXPRESSED IN BONE MARROW, SIGNAL = 1.5; SWISSPROT HIT: P10911, EVALUE 2.00e-17; EST_HUMAN HIT: H06093.1, EVALUE 2.00e-16
GYRAEMDNPEMFDLMPPLLRNKKDILFGNMAEIYEFHN

SEQ ID NO: 40226 - protein, 18 aa, Homo sapiens
  MAP TO AL161777.1; EXPRESSED IN ADULT LIVER, SIGNAL = 1.3; EXPRESSED IN PLACENTA, SIGNAL = 1.1; EXPRESSED IN HEART, SIGNAL = 1.2; EXPRESSED IN FETAL LIVER, SIGNAL = 1.3; EXPRESSED IN BRAIN, SIGNAL = 1.2; EXPRESSED IN LUNG, SIGNAL = 1.3; EXPRESSED IN BONE MARROW, SIGNAL = 1.5; EST_HUMAN HIT: H06093.1, EVALUE 1.00e-03
VIERRWIIQRCLILCHLS

SEQ ID NO: 40227 - protein, 55 aa, Homo sapiens
  MAP TO AL158206.3; EXPRESSED IN LUNG, SIGNAL = 2.6; EXPRESSED IN PLACENTA, SIGNAL = 3.1; EXPRESSED IN HEART, SIGNAL = 3.7; EXPRESSED IN FETAL LIVER, SIGNAL = 3.2; EXPRESSED IN BONE MARROW, SIGNAL = 2.9; EXPRESSED IN ADULT LIVER, SIGNAL = 2.6; EXPRESSED IN HELA, SIGNAL = 2.4; EXPRESSED IN BRAIN, SIGNAL = 3.1; EST_HUMAN HIT: AW103153.1, EVALUE 7.00e-14; SWISSPROT HIT: P45394, EVALUE 3.00e-08
VGETIGISEEIMGLTILAAGTSIPDLITSVIVARKGLGDMAVSSSVGSNIFDITV

SEQ ID NO: 40228 - protein, 47 aa, Homo sapiens
  MAP TO AC011472.3; EXPRESSED IN PLACENTA, SIGNAL = 1.8; EXPRESSED IN FETAL LIVER, SIGNAL = 1.6; EXPRESSED IN BONE MARROW, SIGNAL = 1.4; EXPRESSED IN LUNG, SIGNAL = 1.7; EXPRESSED IN ADULT LIVER, SIGNAL = 1.9; EXPRESSED IN HEART, SIGNAL = 1.4; EXPRESSED IN BRAIN, SIGNAL = 1.3; EST_HUMAN HIT: BE871338.1, EVALUE 5.00e-07
VKSMALHLLLGQRLDTPRKLRFPGRFLDDITALVGSVGLEVITRVHK

SEQ ID NO: 40229 - protein, 36 aa, Homo sapiens
  MAP TO AL118525.17; EXPRESSED IN HELA, SIGNAL = 2.3; EXPRESSED IN PLACENTA, SIGNAL = 2.5; EXPRESSED IN ADULT LIVER, SIGNAL = 2.4; EXPRESSED IN FETAL LIVER, SIGNAL = 2.2; EXPRESSED IN BONE MARROW, SIGNAL = 2.2; EXPRESSED IN LUNG, SIGNAL = 2.3; EXPRESSED IN HEART, SIGNAL = 2.6; EXPRESSED IN BRAIN, SIGNAL = 2.5; SWISSPROT HIT: Q16647, EVALUE 6.00e-16
MPMADGREFNLRRGDRLLLFPFLSPQRDPEIYTDPE

SEQ ID NO: 40230 - protein, 17 aa, Homo sapiens
  MAP TO AL118525.17; EXPRESSED IN HELA, SIGNAL = 2.3; EXPRESSED IN PLACENTA, SIGNAL = 2.5; EXPRESSED IN ADULT LIVER, SIGNAL = 2.4; EXPRESSED IN FETAL LIVER, SIGNAL = 2.2; EXPRESSED IN BONE MARROW, SIGNAL = 2.2; EXPRESSED IN LUNG, SIGNAL = 2.3; EXPRESSED IN HEART, SIGNAL = 2.6; EXPRESSED IN BRAIN, SIGNAL = 2.5
RDSPLTLPCTCPMQIAC

SEQ ID NO: 40231 - protein, 30 aa, Homo sapiens
  MAP TO AC013818.3; EXPRESSED IN PLACENTA, SIGNAL = 2.3; EXPRESSED IN ADULT LIVER, SIGNAL =   3; EXPRESSED IN BRAIN, SIGNAL = 2.1; EXPRESSED IN BONE MARROW, SIGNAL = 1.8; EXPRESSED IN LUNG, SIGNAL =   2; EXPRESSED IN HELA, SIGNAL = 3.2; EXPRESSED IN HEART, SIGNAL =   2; EXPRESSED IN FETAL LIVER, SIGNAL = 1.4; EST_HUMAN HIT: AI141943.1, EVALUE 3.00e-08
IFLSSSEPFKLFQLLPITQFQSCFHIFRCH

SEQ ID NO: 40232 - protein, 55 aa, Homo sapiens
  MAP TO AC009695.4; EXPRESSED IN LUNG, SIGNAL = 5.2; EXPRESSED IN PLACENTA, SIGNAL =   7; EXPRESSED IN ADULT LIVER, SIGNAL = 5.8; EXPRESSED IN HEART, SIGNAL = 4.7; EXPRESSED IN FETAL LIVER, SIGNAL = 4.8; EXPRESSED IN BRAIN, SIGNAL = 5.3; EXPRESSED IN BONE MARROW, SIGNAL =   5; EXPRESSED IN HELA, SIGNAL = 5.8; SWISSPROT HIT: P24094, EVALUE 3.50e+00; EST_HUMAN HIT: W90525.1, EVALUE 1.00e-09
MVGRPKETQNHGRGEKETSTSLPRWSRRQGEHEGEVPHTFKQPDLVRTHCHENSK

SEQ ID NO: 40233 - protein, 45 aa, Homo sapiens
  MAP TO AC009695.4; EXPRESSED IN LUNG, SIGNAL = 5.2; EXPRESSED IN PLACENTA, SIGNAL =   7; EXPRESSED IN ADULT LIVER, SIGNAL = 5.8; EXPRESSED IN HEART, SIGNAL = 4.7; EXPRESSED IN FETAL LIVER, SIGNAL = 4.8; EXPRESSED IN BRAIN, SIGNAL = 5.3; EXPRESSED IN BONE MARROW, SIGNAL =   5; EXPRESSED IN HELA, SIGNAL = 5.8; SWISSPROT HIT: O54951, EVALUE 2.10e+00; EST_HUMAN HIT: AV721480.1, EVALUE 1.00e-05
WLEGLKKLRIMAEAKRKQARLYHGGAGDRESMKEKCHTLSNSQIS

SEQ ID NO: 40234 - protein, 39 aa, Homo sapiens
  MAP TO AC024193.2; EXPRESSED IN HELA, SIGNAL = 2.3; EXPRESSED IN LUNG, SIGNAL = 1.8; EXPRESSED IN ADULT LIVER, SIGNAL = 2.1; EXPRESSED IN HEART, SIGNAL = 1.5; EXPRESSED IN BRAIN, SIGNAL = 1.8; EXPRESSED IN PLACENTA, SIGNAL = 1.5; EXPRESSED IN FETAL LIVER, SIGNAL = 1.6; EXPRESSED IN BONE MARROW, SIGNAL = 1.6; SWISSPROT HIT: O31151, EVALUE 3.70e+00; EST_HUMAN HIT: AW863096.1, EVALUE 7.20e+00
KRELRFREGKQLVQAQKATRTIIANLQGALTLSQMLFSK

SEQ ID NO: 40235 - protein, 51 aa, Homo sapiens
  MAP TO AL121895.18; EXPRESSED IN HELA, SIGNAL =   8; EXPRESSED IN LUNG, SIGNAL = 4.6; EXPRESSED IN FETAL LIVER, SIGNAL = 5.8; EXPRESSED IN BONE MARROW, SIGNAL = 5.3; EXPRESSED IN PLACENTA, SIGNAL =   5; EXPRESSED IN ADULT LIVER, SIGNAL = 5.6; EXPRESSED IN HEART, SIGNAL = 5.4; EXPRESSED IN BRAIN, SIGNAL = 5.2; EST_HUMAN HIT: T96986.1, EVALUE 4.40e-01; SWISSPROT HIT: P06131, EVALUE 7.10e-01
PMIPRQPNGNDHHSNNNRYNLWKAYPVPGTRLCTQHKYCYLLIHFTNEETE

SEQ ID NO: 40236 - protein, 28 aa, Homo sapiens
  MAP TO AC015750.4; EXPRESSED IN BONE MARROW, SIGNAL = 2.1; EXPRESSED IN PLACENTA, SIGNAL =   1; EXPRESSED IN ADULT LIVER, SIGNAL = 0.96; EXPRESSED IN HEART, SIGNAL = 1.3; EXPRESSED IN BRAIN, SIGNAL = 1.1; EXPRESSED IN LUNG, SIGNAL =   1; EXPRESSED IN FETAL LIVER, SIGNAL = 2.7
ETGRFSADEAADCSKMRRHTHNPDAVGE

SEQ ID NO: 40237 - protein, 27 aa, Homo sapiens
  MAP TO AC015750.4; EXPRESSED IN BONE MARROW, SIGNAL = 2.1; EXPRESSED IN PLACENTA, SIGNAL =   1; EXPRESSED IN ADULT LIVER, SIGNAL = 0.96; EXPRESSED IN HEART, SIGNAL = 1.3; EXPRESSED IN BRAIN, SIGNAL = 1.1; EXPRESSED IN LUNG, SIGNAL =   1; EXPRESSED IN FETAL LIVER, SIGNAL = 2.7
KLEDSLQMRLLTVLKCVDTLIIQMLLE

SEQ ID NO: 40238 - protein, 50 aa, Homo sapiens
  MAP TO AL158175.6; EXPRESSED IN LUNG, SIGNAL =   6; EXPRESSED IN BONE MARROW, SIGNAL = 4.9; EXPRESSED IN BRAIN, SIGNAL = 5.2; EXPRESSED IN FETAL LIVER, SIGNAL =   5; EXPRESSED IN HEART, SIGNAL = 5.6; EXPRESSED IN HELA, SIGNAL =   6; EXPRESSED IN ADULT LIVER, SIGNAL = 5.9; EXPRESSED IN PLACENTA, SIGNAL = 5.6
MEKDGDIFLIPTVGAYEQKSFLDVVMQHHTLTIFIIIIIATTELGAFSVP

SEQ ID NO: 40239 - protein, 26 aa, Homo sapiens
  MAP TO AC025747.3; EXPRESSED IN ADULT LIVER, SIGNAL = 3.9; EXPRESSED IN HELA, SIGNAL = 4.7; EXPRESSED IN BONE MARROW, SIGNAL = 2.8; EXPRESSED IN LUNG, SIGNAL = 3.4; EXPRESSED IN BRAIN, SIGNAL = 5.1; EXPRESSED IN PLACENTA, SIGNAL = 4.1; EXPRESSED IN HEART, SIGNAL =   2; EXPRESSED IN FETAL LIVER, SIGNAL = 3.2; SWISSPROT HIT: P44360, EVALUE 5.00e+00; EST_HUMAN HIT: AV720679.1, EVALUE 7.00e-07
IRGMSIDQALAQLEFNDKKGAKIIKE

SEQ ID NO: 40240 - protein, 22 aa, Homo sapiens
  MAP TO AC025747.3; EXPRESSED IN ADULT LIVER, SIGNAL = 3.9; EXPRESSED IN HELA, SIGNAL = 4.7; EXPRESSED IN BONE MARROW, SIGNAL = 2.8; EXPRESSED IN LUNG, SIGNAL = 3.4; EXPRESSED IN BRAIN, SIGNAL = 5.1; EXPRESSED IN PLACENTA, SIGNAL = 4.1; EXPRESSED IN HEART, SIGNAL =   2; EXPRESSED IN FETAL LIVER, SIGNAL = 3.2; EST_HUMAN HIT: H87659.1, EVALUE 8.00e-07
YEECLLTRLWLSWNSMTKKGPK

SEQ ID NO: 40241 - protein, 28 aa, Homo sapiens
  MAP TO AC025746.2; EXPRESSED IN ADULT LIVER, SIGNAL = 1.2; EXPRESSED IN HEART, SIGNAL = 1.7; EXPRESSED IN PLACENTA, SIGNAL = 1.6; EXPRESSED IN FETAL LIVER, SIGNAL = 1.5; EXPRESSED IN BRAIN, SIGNAL = 1.4; EXPRESSED IN BONE MARROW, SIGNAL = 1.5; EXPRESSED IN LUNG, SIGNAL = 1.8
MDSEGPNMVLNPPLLISGEQNQSIPDDM

SEQ ID NO: 40242 - protein, 27 aa, Homo sapiens [sequence omitted]

SEQ ID NO: 40243 - protein, 47 aa, Homo sapiens
  MAP TO AC018389.3; EXPRESSED IN HELA, SIGNAL = 4.8; EXPRESSED IN LUNG, SIGNAL = 3.2; EXPRESSED IN ADULT LIVER, SIGNAL = 3.4; EXPRESSED IN HEART, SIGNAL = 2.5; EXPRESSED IN BRAIN, SIGNAL = 4.4; EXPRESSED IN BONE MARROW, SIGNAL = 3.1; EXPRESSED IN PLACENTA, SIGNAL = 2.4; EXPRESSED IN FETAL LIVER, SIGNAL = 3.6; SWISSPROT HIT: P19524, EVALUE 2.80e+00
FSAKDYVDIISTVNNDYFVLSYPIYTLQLPSIVLVKTSSTRLNTKVD

SEQ ID NO: 40244 - protein, 31 aa, Homo sapiens
  MAP TO AP001441.1; EXPRESSED IN PLACENTA, SIGNAL =   2; EXPRESSED IN FETAL LIVER, SIGNAL = 1.7; EXPRESSED IN ADULT LIVER, SIGNAL = 0.95; EXPRESSED IN HELA, SIGNAL =   3; EXPRESSED IN BONE MARROW, SIGNAL = 1.8; EXPRESSED IN HEART, SIGNAL = 2.1; EXPRESSED IN BRAIN, SIGNAL = 1.9
EYQYRQTQNISGLKNPDIYRMGLLSINHLKI

SEQ ID NO: 40245 - protein, 19 aa, Homo sapiens
  MAP TO AP001441.1; EXPRESSED IN PLACENTA, SIGNAL =   2; EXPRESSED IN FETAL LIVER, SIGNAL = 1.7; EXPRESSED IN ADULT LIVER, SIGNAL = 0.95; EXPRESSED IN HELA, SIGNAL =   3; EXPRESSED IN BONE MARROW, SIGNAL = 1.8; EXPRESSED IN HEART, SIGNAL = 2.1; EXPRESSED IN BRAIN, SIGNAL = 1.9
RIPVQTDPEYLWAQESRHL

SEQ ID NO: 40246 - protein, 39 aa, Homo sapiens
  MAP TO AC008773.3; EXPRESSED IN PLACENTA, SIGNAL =   3; EXPRESSED IN LUNG, SIGNAL = 2.7; EXPRESSED IN ADULT LIVER, SIGNAL =   4; EXPRESSED IN HELA, SIGNAL = 4.1; EXPRESSED IN HEART, SIGNAL = 2.6; EXPRESSED IN FETAL LIVER, SIGNAL = 2.7; EXPRESSED IN BRAIN, SIGNAL = 2.3; EXPRESSED IN BONE MARROW, SIGNAL = 2.4; EST_HUMAN HIT: BE006077.1, EVALUE 8.40e-01; SWISSPROT HIT: P17301, EVALUE 7.00e-03
IPLMIMKPDEKAEVPTGVIIGSIIAGILLLLALVAILWK

SEQ ID NO: 40247 - protein, 90 aa, Homo sapiens
  MAP TO AC007009.2; EXPRESSED IN HELA, SIGNAL = 3.8; EXPRESSED IN LUNG, SIGNAL = 2.1; EXPRESSED IN ADULT LIVER, SIGNAL = 2.5; EXPRESSED IN FETAL LIVER, SIGNAL = 2.3; EXPRESSED IN BRAIN, SIGNAL = 2.3; EXPRESSED IN BONE MARROW, SIGNAL = 2.3; EXPRESSED IN PLACENTA, SIGNAL = 2.1; EXPRESSED IN HEART, SIGNAL = 3.7; SWISSPROT HIT: Q05084, EVALUE 2.00e-47; EST_HUMAN HIT: BE736046.1, EVALUE 1.00e-46
ACLGPVAGTPEPEGADKDDLLLLSEIFNASSLEEGEFSKEWAAVFGDGQVKEPVPTMALGEPDPKAQTGSGFLPSQLLDQNMKDLQASLQ

SEQ ID NO: 40248 - protein, 17 aa, Homo sapiens
  MAP TO AC009924.4; EXPRESSED IN ADULT LIVER, SIGNAL = 2.1; EXPRESSED IN HELA, SIGNAL = 2.2; EXPRESSED IN LUNG, SIGNAL = 1.9; EXPRESSED IN PLACENTA, SIGNAL = 1.7; EXPRESSED IN FETAL LIVER, SIGNAL = 1.8; EXPRESSED IN BONE MARROW, SIGNAL = 1.9; EXPRESSED IN HEART, SIGNAL = 1.6; EXPRESSED IN BRAIN, SIGNAL = 2.1
ALAICGTTSNVPTYVLW

SEQ ID NO: 40249 - protein, 38 aa, Homo sapiens
  MAP TO AC009155.3; EXPRESSED IN ADULT LIVER, SIGNAL = 8.3; EXPRESSED IN HELA, SIGNAL =  11; EXPRESSED IN HEART, SIGNAL = 6.8; EXPRESSED IN FETAL LIVER, SIGNAL = 9.7; EXPRESSED IN BRAIN, SIGNAL = 7.7; EXPRESSED IN BONE MARROW, SIGNAL = 7.5; EXPRESSED IN LUNG, SIGNAL = 7.5; EXPRESSED IN PLACENTA, SIGNAL = 9.1; EST_HUMAN HIT: AU133018.1, EVALUE 4.00e-05
HEILYDWINPTYLDMDYQVQIQEEFEESSEILLKEFLK

SEQ ID NO: 40250 - protein, 77 aa, Homo sapiens
  MAP TO AL133174.9; EXPRESSED IN PLACENTA, SIGNAL = 1.9; EXPRESSED IN HEART, SIGNAL = 2.2; EXPRESSED IN FETAL LIVER, SIGNAL = 2.7; EXPRESSED IN BRAIN, SIGNAL = 2.2; EXPRESSED IN LUNG, SIGNAL = 2.2; EXPRESSED IN ADULT LIVER, SIGNAL =   2; EXPRESSED IN BONE MARROW, SIGNAL = 2.4; EST_HUMAN HIT: BE781223.1, EVALUE 2.00e-06; SWISSPROT HIT: Q9Z108, EVALUE 3.00e-05
SFPLKQVARESGPPHMKNFVTKVSVGEFVGEGEGKSKKISKKNAAIAVLEELKKLPPLPAVERVKPRIKKKTKPIVK

SEQ ID NO: 40251 - protein, 71 aa, Homo sapiens
  MAP TO AL117336.16; EXPRESSED IN PLACENTA, SIGNAL = 1.7; EXPRESSED IN ADULT LIVER, SIGNAL = 1.7; EXPRESSED IN HEART, SIGNAL = 1.3; EXPRESSED IN FETAL LIVER, SIGNAL = 1.6; EXPRESSED IN BRAIN, SIGNAL = 1.3; EXPRESSED IN LUNG, SIGNAL = 1.5; EXPRESSED IN HELA, SIGNAL = 2.2; EXPRESSED IN BONE MARROW, SIGNAL = 1.6; EST_HUMAN HIT: AI038649.1, EVALUE 4.40e-02; SWISSPROT HIT: Q93084, EVALUE 1.10e+00
WCEIQGHFKAGIDKEAIAGFLPPSTVDIRGGCPIHCRMFSGLPPLSTRCHASCSNSTLHNNNKKMFPDVAK

SEQ ID NO: 40252 - protein, 37 aa, Homo sapiens
  MAP TO AC021186.2; EXPRESSED IN PLACENTA, SIGNAL = 2.8; EXPRESSED IN ADULT LIVER, SIGNAL = 2.8; EXPRESSED IN HEART, SIGNAL = 2.4; EXPRESSED IN FETAL LIVER, SIGNAL = 2.4; EXPRESSED IN BRAIN, SIGNAL = 2.2; EXPRESSED IN BONE MARROW, SIGNAL = 2.5; EXPRESSED IN LUNG, SIGNAL = 2.9; EXPRESSED IN HELA, SIGNAL = 3.3
KSHYKNYAHTPTPMKTRRRTMMKAVKMTNENFLEHFK

SEQ ID NO: 40253 - protein, 71 aa, Homo sapiens
  MAP TO AL138796.2; EXPRESSED IN HELA, SIGNAL = 6.3; EXPRESSED IN HEART, SIGNAL = 5.9; EXPRESSED IN BRAIN, SIGNAL = 3.4; EXPRESSED IN BONE MARROW, SIGNAL = 3.8; EXPRESSED IN PLACENTA, SIGNAL = 2.6; EXPRESSED IN ADULT LIVER, SIGNAL = 1.2; EXPRESSED IN FETAL LIVER, SIGNAL = 3.8; EST_HUMAN HIT: AI950145.1, EVALUE 9.00e-34; SWISSPROT HIT: P13361, EVALUE 5.10e-01
SSEGTSPAQQQVALLDLQSALFCSQLEIQKLQRVVRQKERQLADAKQCVQFVEAAAHESEQQKEASWKHNQ

SEQ ID NO: 40254 - protein, 27 aa, Homo sapiens
  MAP TO AL121917.12; EXPRESSED IN ADULT LIVER, SIGNAL = 2.8; EXPRESSED IN LUNG, SIGNAL = 3.1; EXPRESSED IN BONE MARROW, SIGNAL = 3.4; EXPRESSED IN BRAIN, SIGNAL =   3; EXPRESSED IN FETAL LIVER, SIGNAL = 3.4; EXPRESSED IN HEART, SIGNAL = 2.7; EXPRESSED IN HELA, SIGNAL = 3.9; EXPRESSED IN PLACENTA, SIGNAL = 2.9; SWISSPROT HIT: O83790, EVALUE 8.60e+00
GRVSMGPTGIPSHTSFLGRGSTTCGTG

SEQ ID NO: 40255 - protein, 28 aa, Homo sapiens
  MAP TO AL121917.12; EXPRESSED IN ADULT LIVER, SIGNAL = 2.8; EXPRESSED IN LUNG, SIGNAL = 3.1; EXPRESSED IN BONE MARROW, SIGNAL = 3.4; EXPRESSED IN BRAIN, SIGNAL =   3; EXPRESSED IN FETAL LIVER, SIGNAL = 3.4; EXPRESSED IN HEART, SIGNAL = 2.7; EXPRESSED IN HELA, SIGNAL = 3.9; EXPRESSED IN PLACENTA, SIGNAL = 2.9
CLCHRSLNRVPETMCGRGFLWGPSKPCL

SEQ ID NO: 40256 - protein, 26 aa, Homo sapiens
  MAP TO AC011111.3; EXPRESSED IN HELA, SIGNAL = 3.8; EXPRESSED IN HEART, SIGNAL = 3.4; EXPRESSED IN BRAIN, SIGNAL =   3; EXPRESSED IN BONE MARROW, SIGNAL = 3.6; EXPRESSED IN PLACENTA, SIGNAL = 3.1; EXPRESSED IN ADULT LIVER, SIGNAL =   3; EXPRESSED IN FETAL LIVER, SIGNAL = 3.6; EXPRESSED IN LUNG, SIGNAL = 3.5
GGSSRDTQKMRESKDSLQDLSGLRKP

SEQ ID NO: 40257 - protein, 72 aa, Homo sapiens
  MAP TO AP001440.1; EXPRESSED IN LUNG, SIGNAL = 7.2; EXPRESSED IN PLACENTA, SIGNAL = 3.2; EXPRESSED IN FETAL LIVER, SIGNAL = 3.3; EXPRESSED IN BRAIN, SIGNAL =  10; EXPRESSED IN HEART, SIGNAL =   4; EXPRESSED IN HELA, SIGNAL = 3.9; EXPRESSED IN ADULT LIVER, SIGNAL = 7.1; EXPRESSED IN BONE MARROW, SIGNAL = 2.4; EST_HUMAN HIT: AU134772.1, EVALUE 2.00e-16; SWISSPROT HIT: Q95241, EVALUE 1.00e-17
EAANERQQLVETHMARVEAMLNDRRRLALENYITALQAVPPRVGLAAAEFTLQVTAQTVRVGHWELEAIQKE

SEQ ID NO: 40258 - protein, 35 aa, Homo sapiens
  MAP TO AP001440.1; EXPRESSED IN LUNG, SIGNAL = 7.2; EXPRESSED IN PLACENTA, SIGNAL = 3.2; EXPRESSED IN FETAL LIVER, SIGNAL = 3.3; EXPRESSED IN BRAIN, SIGNAL =  10; EXPRESSED IN HEART, SIGNAL =   4; EXPRESSED IN HELA, SIGNAL = 3.9; EXPRESSED IN ADULT LIVER, SIGNAL = 7.1; EXPRESSED IN BONE MARROW, SIGNAL = 2.4; EST_HUMAN HIT: BF357709.1, EVALUE 2.00e-12; SWISSPROT HIT: P48837, EVALUE 8.40e+00
MAAFPGESGIFGTGSSQRETAAGGDTHGQSGSHAQ

SEQ ID NO: 40259 - protein, 39 aa, Homo sapiens
  MAP TO AC015897.3; EXPRESSED IN LUNG, SIGNAL = 1.3; EXPRESSED IN ADULT LIVER, SIGNAL = 1.6; EXPRESSED IN HEART, SIGNAL = 1.6; EXPRESSED IN FETAL LIVER, SIGNAL = 1.3; EXPRESSED IN BRAIN, SIGNAL = 1.3; EXPRESSED IN PLACENTA, SIGNAL = 1.5; EXPRESSED IN BONE MARROW, SIGNAL = 1.1; EST_HUMAN HIT: BE379551.1, EVALUE 2.20e-01
SGGQKTETTQIKVAFLLQDLKENPVIFPFNILEAAYMPW

SEQ ID NO: 40260 - protein, 19 aa, Homo sapiens
  MAP TO AC015897.3; EXPRESSED IN LUNG, SIGNAL = 1.3; EXPRESSED IN ADULT LIVER, SIGNAL = 1.6; EXPRESSED IN HEART, SIGNAL = 1.6; EXPRESSED IN FETAL LIVER, SIGNAL = 1.3; EXPRESSED IN BRAIN, SIGNAL = 1.3; EXPRESSED IN PLACENTA, SIGNAL = 1.5; EXPRESSED IN BONE MARROW, SIGNAL = 1.1
LEVRRQKRLKLRWHSFCRI

SEQ ID NO: 40261 - protein, 22 aa, Homo sapiens
  MAP TO AC022860.3; EXPRESSED IN LUNG, SIGNAL = 3.7; EXPRESSED IN PLACENTA, SIGNAL = 3.6; EXPRESSED IN ADULT LIVER, SIGNAL = 4.7; EXPRESSED IN HEART, SIGNAL = 5.3; EXPRESSED IN FETAL LIVER, SIGNAL =   6; EXPRESSED IN BRAIN, SIGNAL = 6.4; EXPRESSED IN HELA, SIGNAL = 6.4; EXPRESSED IN BONE MARROW, SIGNAL = 5.1; EST_HUMAN HIT: AV702212.1, EVALUE 2.00e-03
MAARSAPTAAGCSAGPLRPSCS

SEQ ID NO: 40262 - protein, 20 aa, Homo sapiens
  MAP TO AC022860.3; EXPRESSED IN LUNG, SIGNAL = 3.7; EXPRESSED IN PLACENTA, SIGNAL = 3.6; EXPRESSED IN ADULT LIVER, SIGNAL = 4.7; EXPRESSED IN HEART, SIGNAL = 5.3; EXPRESSED IN FETAL LIVER, SIGNAL =   6; EXPRESSED IN BRAIN, SIGNAL = 6.4; EXPRESSED IN HELA, SIGNAL = 6.4; EXPRESSED IN BONE MARROW, SIGNAL = 5.1
KSRATSASTSSERTGSQSLR

SEQ ID NO: 40263 - protein, 30 aa, Homo sapiens
  MAP TO AC023296.2; EXPRESSED IN LUNG, SIGNAL = 1.7; EXPRESSED IN PLACENTA, SIGNAL = 1.8; EXPRESSED IN ADULT LIVER, SIGNAL = 1.7; EXPRESSED IN FETAL LIVER, SIGNAL = 1.7; EXPRESSED IN BRAIN, SIGNAL = 1.5; EXPRESSED IN HEART, SIGNAL = 1.6; EXPRESSED IN BONE MARROW, SIGNAL = 1.4
HQRRPFLHPVLVMTKRMRLRMFVSSRAAIN

SEQ ID NO: 40264 - protein, 67 aa, Homo sapiens
  MAP TO AC025738.1; EXPRESSED IN LUNG, SIGNAL = 1.6; EXPRESSED IN PLACENTA, SIGNAL = 1.5; EXPRESSED IN FETAL LIVER, SIGNAL = 1.5; EXPRESSED IN BONE MARROW, SIGNAL = 1.5; EXPRESSED IN ADULT LIVER, SIGNAL = 1.7; EXPRESSED IN HEART, SIGNAL = 1.5; EXPRESSED IN BRAIN, SIGNAL = 1.8; EST_HUMAN HIT: AW204480.1, EVALUE 2.00e-23; SWISSPROT HIT: P56145, EVALUE 6.70e-01
VEINLKRYPTPYPEDLKNMVKSVQNLVGKPSHGVRVENSNPTANTEQTVKEKYEHKWPVAPKEITVE

SEQ ID NO: 40265 - protein, 76 aa, Homo sapiens
  MAP TO AC015649.5; EXPRESSED IN PLACENTA, SIGNAL = 2.4; EXPRESSED IN ADULT LIVER, SIGNAL = 2.5; EXPRESSED IN HELA, SIGNAL = 3.1; EXPRESSED IN BRAIN, SIGNAL = 2.6; EXPRESSED IN BONE MARROW, SIGNAL = 4.9; EXPRESSED IN LUNG, SIGNAL = 2.6; EXPRESSED IN HEART, SIGNAL = 2.8; EXPRESSED IN FETAL LIVER, SIGNAL = 5.8; EST_HUMAN HIT: AU137698.1, EVALUE 1.00e-27; SWISSPROT HIT: P16157, EVALUE 1.00e-40
FWLSDCPRTAEAVNFATLLYKELTAVPYMAKFVIFAKMNDPREGRLRCYCMTDDKVDKTLEQHENFVEVARSRDIE

SEQ ID NO: 40266 - protein, 28 aa, Homo sapiens
  MAP TO AL162261.1; EXPRESSED IN LUNG, SIGNAL = 3.3; EXPRESSED IN PLACENTA, SIGNAL =   7; EXPRESSED IN ADULT LIVER, SIGNAL = 4.6; EXPRESSED IN HEART, SIGNAL = 3.8; EXPRESSED IN FETAL LIVER, SIGNAL = 4.4; EXPRESSED IN BRAIN, SIGNAL = 6.2; EXPRESSED IN BONE MARROW, SIGNAL = 4.8; EXPRESSED IN HELA, SIGNAL = 4.4; EST_HUMAN HIT: AA742809.1, EVALUE 8.00e-10
SLHVGQGVKDGSHLLSVDTGPAPTPCSQ

SEQ ID NO: 40267 - protein, 42 aa, Homo sapiens
  MAP TO AC024193.2; EXPRESSED IN BONE MARROW, SIGNAL = 2.6; EXPRESSED IN PLACENTA, SIGNAL =   4; EXPRESSED IN ADULT LIVER, SIGNAL = 3.9; EXPRESSED IN HELA, SIGNAL = 5.5; EXPRESSED IN HEART, SIGNAL = 2.1; EXPRESSED IN LUNG, SIGNAL = 4.4; EXPRESSED IN FETAL LIVER, SIGNAL = 2.6; EXPRESSED IN BRAIN, SIGNAL = 2.2; SWISSPROT HIT: P08009, EVALUE 4.80e+00
TFLYAYSPTFEGFLSQIVGLYPVYIEFLANIPEADTIQEKCK

SEQ ID NO: 40268 - protein, 25 aa, Homo sapiens
  MAP TO AC024193.2; EXPRESSED IN BONE MARROW, SIGNAL = 2.6; EXPRESSED IN PLACENTA, SIGNAL =   4; EXPRESSED IN ADULT LIVER, SIGNAL = 3.9; EXPRESSED IN HELA, SIGNAL = 5.5; EXPRESSED IN HEART, SIGNAL = 2.1; EXPRESSED IN LUNG, SIGNAL = 4.4; EXPRESSED IN FETAL LIVER, SIGNAL = 2.6; EXPRESSED IN BRAIN, SIGNAL = 2.2
LHSFMPILQPLKGFCPRLWASIQFT

SEQ ID NO: 40269 - protein, 35 aa, Homo sapiens
  MAP TO AC015954.3; EXPRESSED IN PLACENTA, SIGNAL = 1.7; EXPRESSED IN ADULT LIVER, SIGNAL = 1.9; EXPRESSED IN FETAL LIVER, SIGNAL = 1.9; EXPRESSED IN BRAIN, SIGNAL = 2.2; EXPRESSED IN BONE MARROW, SIGNAL =   2; EXPRESSED IN LUNG, SIGNAL = 1.8; EXPRESSED IN HELA, SIGNAL = 2.5; EXPRESSED IN HEART, SIGNAL = 2.3
SMFNGQSRFNVVVIDLYFSLISYEVRRCGYLCVAA

SEQ ID NO: 40270 - protein, 79 aa, Homo sapiens
  MAP TO AL121586.28; EXPRESSED IN HELA, SIGNAL = 3.8; EXPRESSED IN FETAL LIVER, SIGNAL = 2.3; EXPRESSED IN BONE MARROW, SIGNAL = 2.3; EXPRESSED IN LUNG, SIGNAL = 2.2; EXPRESSED IN PLACENTA, SIGNAL = 2.3; EXPRESSED IN ADULT LIVER, SIGNAL = 2.6; EXPRESSED IN HEART, SIGNAL = 2.1; EXPRESSED IN BRAIN, SIGNAL = 2.2; EST_HUMAN HIT: AL133787.1, EVALUE 1.90e-01; SWISSPROT HIT: Q11205, EVALUE 1.20e-02
ITSFLHQHSSQKDLRNMAKIHPGICHHPSNFSRKCNCSSEVHTCSACLHVPGESDWFDRRFDSTVEPLQRPQDPTSNDA

SEQ ID NO: 40271 - protein, 47 aa, Homo sapiens
  MAP TO AC021880.2; EXPRESSED IN ADULT LIVER, SIGNAL = 2.6; EXPRESSED IN HELA, SIGNAL = 3.5; EXPRESSED IN HEART, SIGNAL = 2.7; EXPRESSED IN BRAIN, SIGNAL = 2.6; EXPRESSED IN BONE MARROW, SIGNAL =   3; EXPRESSED IN LUNG, SIGNAL = 2.7; EXPRESSED IN PLACENTA, SIGNAL = 2.5; EXPRESSED IN FETAL LIVER, SIGNAL = 2.9; EST_HUMAN HIT: AA569593.1, EVALUE 7.80e-01; SWISSPROT HIT: P23622, EVALUE 2.10e+00
SVITSAKPFLPRQVTYSLVLGVGYLGRSRCICGGRWQRSGISRSFSC

SEQ ID NO: 40272 - protein, 50 aa, Homo sapiens
  MAP TO AF241727.1; EXPRESSED IN FETAL LIVER, SIGNAL = 0.99; EXPRESSED IN PLACENTA, SIGNAL = 1.3; EXPRESSED IN ADULT LIVER, SIGNAL = 1.3; EXPRESSED IN HEART, SIGNAL = 1.3; EXPRESSED IN BONE MARROW, SIGNAL = 1.2; EXPRESSED IN LUNG, SIGNAL = 1.3; EXPRESSED IN BRAIN, SIGNAL = 1.2
TPLRGKTTRAPFKIIQGSYGACARVPLLPAILILDGFAGEVTLFGEEEKK

SEQ ID NO: 40273 - protein, 26 aa, Homo sapiens
  MAP TO AC006038.2; EXPRESSED IN ADULT LIVER, SIGNAL = 1.8; EXPRESSED IN HELA, SIGNAL = 2.2; EXPRESSED IN BONE MARROW, SIGNAL = 1.8; EXPRESSED IN LUNG, SIGNAL = 1.8; EXPRESSED IN BRAIN, SIGNAL = 1.7; EXPRESSED IN PLACENTA, SIGNAL = 1.5; EXPRESSED IN HEART, SIGNAL = 1.5; EXPRESSED IN FETAL LIVER, SIGNAL = 1.6
NGNIPDKGISFILDSKMKRMWHRVVA

SEQ ID NO: 40274 - protein, 32 aa, Homo sapiens
  MAP TO AC021804.3; EXPRESSED IN PLACENTA, SIGNAL = 1.8; EXPRESSED IN FETAL LIVER, SIGNAL = 1.7; EXPRESSED IN LUNG, SIGNAL = 2.1; EXPRESSED IN BRAIN, SIGNAL =   2; EXPRESSED IN BONE MARROW, SIGNAL = 1.9; EXPRESSED IN ADULT LIVER, SIGNAL =   2; EXPRESSED IN HEART, SIGNAL = 1.9; SWISSPROT HIT: O42184, EVALUE 8.50e+00
MSGRSCQKPHGTFHQPQRESLPFIQHCQWDKE

SEQ ID NO: 40275 - protein, 54 aa, Homo sapiens; identical to SEQ ID NO: 37803
  MAP TO AC008103.27; EXPRESSED IN ADULT LIVER, SIGNAL = 1.8; EXPRESSED IN HELA, SIGNAL = 2.4; EXPRESSED IN HEART, SIGNAL = 1.8; EXPRESSED IN BRAIN, SIGNAL = 1.9; EXPRESSED IN PLACENTA, SIGNAL = 1.7; EXPRESSED IN BONE MARROW, SIGNAL = 2.3; EXPRESSED IN LUNG, SIGNAL = 1.7; EXPRESSED IN FETAL LIVER, SIGNAL = 2.5; EST_HUMAN HIT: AL043314.2, EVALUE 2.00e-24; SWISSPROT HIT: P11274, EVALUE 2.00e-24

SEQ ID NO: 40276 - protein, 23 aa, Homo sapiens
  MAP TO AL161668.1; EXPRESSED IN PLACENTA, SIGNAL = 1.2; EXPRESSED IN ADULT LIVER, SIGNAL = 1.3; EXPRESSED IN HEART, SIGNAL = 1.5; EXPRESSED IN FETAL LIVER, SIGNAL = 1.4; EXPRESSED IN BRAIN, SIGNAL = 1.1; EXPRESSED IN BONE MARROW, SIGNAL = 1.2; EXPRESSED IN LUNG, SIGNAL = 1.5; EST_HUMAN HIT: R82923.1, EVALUE 3.70e-02
GKMKLQFSKRSQARSTHCSWSNS

SEQ ID NO: 40277 - protein, 110 aa, Homo sapiens
  MAP TO AC012571.3; EXPRESSED IN ADULT LIVER, SIGNAL =   3; EXPRESSED IN HEART, SIGNAL = 1.7; EXPRESSED IN FETAL LIVER, SIGNAL =   3; EXPRESSED IN BRAIN, SIGNAL = 3.9; EXPRESSED IN LUNG, SIGNAL = 2.3; EXPRESSED IN HELA, SIGNAL = 2.9; EXPRESSED IN PLACENTA, SIGNAL = 2.1; EXPRESSED IN BONE MARROW, SIGNAL = 2.5; EST_HUMAN HIT: AA397551.1, EVALUE 2.00e-49; SWISSPROT HIT: P10272, EVALUE 7.00e-12
LYSLFVESPTITIVPGLDFNPASHIIPDTTPDPHDYISLIHLTFTSLLHISFFPVPHPDHTWFIDGSSTRPNCHSPAKAGYAIVSSTSIIEATALPPSTTCQQAELIALT

SEQ ID NO: 40278 - protein, 95 aa, Homo sapiens
  MAP TO AP001429.1; EXPRESSED IN HELA, SIGNAL = 6.8; EXPRESSED IN BONE MARROW, SIGNAL =   8; EXPRESSED IN LUNG, SIGNAL = 4.3; EXPRESSED IN HEART, SIGNAL = 7.5; EXPRESSED IN PLACENTA, SIGNAL = 6.2; EXPRESSED IN ADULT LIVER, SIGNAL = 2.6; EXPRESSED IN FETAL LIVER, SIGNAL = 7.2; EXPRESSED IN BRAIN, SIGNAL =   7; EST_HUMAN HIT: AU142402.1, EVALUE 1.00e-48; SWISSPROT HIT: P53804, EVALUE 1.00e-49
RILQCIKQYADKIKSGIQNTAMLLKELLSWKVLSTEDYTTCFSSRNFLNEAVDYVIRHLIQENNRVKTRIFLHVLSELKEVEPKLAAWIQKLNSF

SEQ ID NO: 40279 - protein, 49 aa, Homo sapiens
  MAP TO AL157773.3; EXPRESSED IN LUNG, SIGNAL = 4.1; EXPRESSED IN ADULT LIVER, SIGNAL = 4.4; EXPRESSED IN HEART, SIGNAL = 3.8; EXPRESSED IN FETAL LIVER, SIGNAL = 3.6; EXPRESSED IN BRAIN, SIGNAL = 3.2; EXPRESSED IN BONE MARROW, SIGNAL = 3.8; EXPRESSED IN PLACENTA, SIGNAL =   4; EXPRESSED IN HELA, SIGNAL = 6.4; SWISSPROT HIT: Q13516, EVALUE 3.60e+00; EST_HUMAN HIT: BF026119.1, EVALUE 4.50e-01
RGCWIHPAALWHSGHCAAVKMPLTPPHPSEIIIIDCCSCIPAVTTTSTT

SEQ ID NO: 40280 - protein, 43 aa, Homo sapiens
  MAP TO AL157773.3; EXPRESSED IN LUNG, SIGNAL = 4.1; EXPRESSED IN ADULT LIVER, SIGNAL = 4.4; EXPRESSED IN HEART, SIGNAL = 3.8; EXPRESSED IN FETAL LIVER, SIGNAL = 3.6; EXPRESSED IN BRAIN, SIGNAL = 3.2; EXPRESSED IN BONE MARROW, SIGNAL = 3.8; EXPRESSED IN PLACENTA, SIGNAL =   4; EXPRESSED IN HELA, SIGNAL = 6.4
RSSSLIAAVASLLSPPLPPQVTNLARWTLLLLPTTLTGLYLTN

SEQ ID NO: 40281 - protein, 19 aa, Homo sapiens
  MAP TO AL157773.3; EXPRESSED IN LUNG, SIGNAL = 4.1; EXPRESSED IN ADULT LIVER, SIGNAL = 4.4; EXPRESSED IN HEART, SIGNAL = 3.8; EXPRESSED IN FETAL LIVER, SIGNAL = 3.6; EXPRESSED IN BRAIN, SIGNAL = 3.2; EXPRESSED IN BONE MARROW, SIGNAL = 3.8; EXPRESSED IN PLACENTA, SIGNAL =   4; EXPRESSED IN HELA, SIGNAL = 6.4
ERMLDPSCCSLAFWALCCC

SEQ ID NO: 40282 - protein, 54 aa, Homo sapiens; identical to SEQ ID NO: 33642
  MAP TO AP001429.1; EXPRESSED IN HELA, SIGNAL = 8.4; EXPRESSED IN ADULT LIVER, SIGNAL = 7.4; EXPRESSED IN BONE MARROW, SIGNAL = 6.1; EXPRESSED IN LUNG, SIGNAL = 7.1; EXPRESSED IN PLACENTA, SIGNAL =  11; EXPRESSED IN HEART, SIGNAL = 6.4; EXPRESSED IN FETAL LIVER, SIGNAL = 5.9; EXPRESSED IN BRAIN, SIGNAL = 6.6; SWISSPROT HIT: P53804, EVALUE 2.00e-27; EST_HUMAN HIT: AU143698.1, EVALUE 3.00e-26

SEQ ID NO: 40283 - protein, 35 aa, Homo sapiens
  MAP TO AC015861.5; EXPRESSED IN LUNG, SIGNAL = 7.2; EXPRESSED IN PLACENTA, SIGNAL = 6.9; EXPRESSED IN HELA, SIGNAL = 2.9; EXPRESSED IN FETAL LIVER, SIGNAL = 7.3; EXPRESSED IN BONE MARROW, SIGNAL = 7.8; EXPRESSED IN ADULT LIVER, SIGNAL = 5.6; EXPRESSED IN HEART, SIGNAL = 8.1; EXPRESSED IN BRAIN, SIGNAL = 7.2; SWISSPROT HIT: P04930, EVALUE 1.70e+00; EST_HUMAN HIT: T50226.1, EVALUE 2.60e-02
DELPWDELHWDGLHWDGLHWDELHWDEFMGRKKFS

SEQ ID NO: 40284 - protein, 40 aa, Homo sapiens
  MAP TO AL122008.9; EXPRESSED IN LUNG, SIGNAL = 3.3; EXPRESSED IN ADULT LIVER, SIGNAL = 3.7; EXPRESSED IN HELA, SIGNAL = 4.7; EXPRESSED IN BRAIN, SIGNAL = 2.8; EXPRESSED IN BONE MARROW, SIGNAL = 3.3; EXPRESSED IN PLACENTA, SIGNAL = 3.1; EXPRESSED IN HEART, SIGNAL = 3.2; EXPRESSED IN FETAL LIVER, SIGNAL = 3.3; EST_HUMAN HIT: BF690191.1, EVALUE 9.40e+00
MQHGTQAAVQDPQPFIWEPQLVHTELQHSGWDEGRVVSKP

SEQ ID NO: 40285 - protein, 41 aa, Homo sapiens
  MAP TO AC022459.3; EXPRESSED IN LUNG, SIGNAL = 1.6; EXPRESSED IN PLACENTA, SIGNAL = 1.4; EXPRESSED IN ADULT LIVER, SIGNAL = 1.7; EXPRESSED IN BRAIN, SIGNAL = 1.4; EXPRESSED IN HEART, SIGNAL = 1.3; EXPRESSED IN FETAL LIVER, SIGNAL = 1.3; EXPRESSED IN BONE MARROW, SIGNAL = 1.2; SWISSPROT HIT: P14720, EVALUE 4.80e+00
NLHNLPQACSVGGSCYQGGWCTVRLSERGSQDGTSILLQVA

SEQ ID NO: 40286 - protein, 27 aa, Homo sapiens
  MAP TO AL133377.4; EXPRESSED IN HELA, SIGNAL = 3.8; EXPRESSED IN HEART, SIGNAL = 2.7; EXPRESSED IN BONE MARROW, SIGNAL =   3; EXPRESSED IN BRAIN, SIGNAL = 2.8; EXPRESSED IN FETAL LIVER, SIGNAL = 3.2; EXPRESSED IN ADULT LIVER, SIGNAL = 1.8; EXPRESSED IN PLACENTA, SIGNAL = 2.3; EXPRESSED IN LUNG, SIGNAL = 1.9
CSVCYIASPSSTTAHSTTWAVAGRKPS

SEQ ID NO: 40287 - protein, 57 aa, Homo sapiens
  MAP TO AC010329.3; EXPRESSED IN HELA, SIGNAL = 3.8; EXPRESSED IN FETAL LIVER, SIGNAL = 2.7; EXPRESSED IN BONE MARROW, SIGNAL = 3.3; EXPRESSED IN LUNG, SIGNAL =   3; EXPRESSED IN PLACENTA, SIGNAL = 2.3; EXPRESSED IN ADULT LIVER, SIGNAL = 2.9; EXPRESSED IN HEART, SIGNAL = 3.2; EXPRESSED IN BRAIN, SIGNAL = 2.9; EST_HUMAN HIT: AI791535.1, EVALUE 8.00e-09
NRTASGFGGVFVSPCSWSSRSSVHCSLSSSPRGPASVALCPAGIGRSTAKTPGPPGS

SEQ ID NO: 40288 - protein, 69 aa, Homo sapiens
  MAP TO AC016113.4; EXPRESSED IN PLACENTA, SIGNAL = 1.2; EXPRESSED IN ADULT LIVER, SIGNAL = 2.2; EXPRESSED IN FETAL LIVER, SIGNAL = 1.6; EXPRESSED IN BRAIN, SIGNAL = 1.7; EXPRESSED IN BONE MARROW, SIGNAL = 2.3; EXPRESSED IN LUNG, SIGNAL = 1.9; EXPRESSED IN HEART, SIGNAL = 1.2; EST_HUMAN HIT: AI276815.1, EVALUE 4.00e-21
VKKGLCSVVSSRGELSRPVKEPVGRSRGPQQKLLVELIWSSICKAICSLMALILEETNLTRSLKIQGPK

SEQ ID NO: 40289 - protein, 56 aa, Homo sapiens
  MAP TO AL158138.1; EXPRESSED IN PLACENTA, SIGNAL = 2.5; EXPRESSED IN HELA, SIGNAL = 2.8; EXPRESSED IN FETAL LIVER, SIGNAL = 1.7; EXPRESSED IN BONE MARROW, SIGNAL = 2.5; EXPRESSED IN LUNG, SIGNAL = 3.3; EXPRESSED IN ADULT LIVER, SIGNAL = 2.9; EXPRESSED IN HEART, SIGNAL = 2.7; EXPRESSED IN BRAIN, SIGNAL = 2.3; SWISSPROT HIT: O28438, EVALUE 1.20e+00; EST_HUMAN HIT: AV714177.1, EVALUE 4.00e-26
KIDPPVMNITQVNGSLLVILHAPNLPYRYQKEKNVSIEDYYELLYRVFIINNSLEK

SEQ ID NO: 40290 - protein, 116 aa, Homo sapiens
  MAP TO AC019159.3; EXPRESSED IN HELA, SIGNAL = 5.7; EXPRESSED IN BONE MARROW, SIGNAL = 5.1; EXPRESSED IN LUNG, SIGNAL = 5.3; EXPRESSED IN PLACENTA, SIGNAL = 4.5; EXPRESSED IN ADULT LIVER, SIGNAL = 4.6; EXPRESSED IN HEART, SIGNAL = 3.6; EXPRESSED IN FETAL LIVER, SIGNAL = 4.2; EXPRESSED IN BRAIN, SIGNAL = 5.4
PSPSPSPPLPPPLSTPPLPVPSLPSPLPPSALPLSLSPLPPSPPPLSPQPLSPPLPRPPPSSSPPPPSPSSSPPSPPPPSAPPSPSALTLCPPPPSIPPLPQHYHHHHHCCHHHCH

SEQ ID NO: 40291 - protein, 55 aa, Homo sapiens
  MAP TO AC016851.3; EXPRESSED IN HELA, SIGNAL = 5.2; EXPRESSED IN LUNG, SIGNAL = 2.8; EXPRESSED IN PLACENTA, SIGNAL =   3; EXPRESSED IN ADULT LIVER, SIGNAL = 2.8; EXPRESSED IN HEART, SIGNAL = 2.1; EXPRESSED IN BRAIN, SIGNAL =   2; EXPRESSED IN FETAL LIVER, SIGNAL = 2.5; EXPRESSED IN BONE MARROW, SIGNAL =   2; EST_HUMAN HIT: AA628120.1, EVALUE 4.30e-01
FVVTKHRLIMKQWRSSLMSLPRSSLMKIGCQDKSIISMHEMSLFWHCCPSKTLMR

SEQ ID NO: 40292 - protein, 27 aa, Homo sapiens
  MAP TO AC021037.4; EXPRESSED IN PLACENTA, SIGNAL = 1.6; EXPRESSED IN HELA, SIGNAL = 4.9; EXPRESSED IN FETAL LIVER, SIGNAL = 6.7; EXPRESSED IN LUNG, SIGNAL = 3.6; EXPRESSED IN ADULT LIVER, SIGNAL =   3; EXPRESSED IN BRAIN, SIGNAL = 2.9; EXPRESSED IN BONE MARROW, SIGNAL = 5.1; EXPRESSED IN HEART, SIGNAL = 2.7; SWISSPROT HIT: Q61937, EVALUE 1.50e-01; EST_HUMAN HIT: BF570880.1, EVALUE 6.00e-07
VCRHLMEDSMDMDVSPLRPRTIFSVVN

SEQ ID NO: 40293 - protein, 106 aa, Homo sapiens
  MAP TO AL135844.8; EXPRESSED IN LUNG, SIGNAL = 1.4; EXPRESSED IN PLACENTA, SIGNAL = 1.3; EXPRESSED IN ADULT LIVER, SIGNAL = 1.3; EXPRESSED IN FETAL LIVER, SIGNAL = 0.74; EXPRESSED IN BRAIN, SIGNAL = 1.1; EXPRESSED IN BONE MARROW, SIGNAL = 1.1; EXPRESSED IN HEART, SIGNAL = 1.8; EST_HUMAN HIT: BE549105.1, EVALUE 1.00e-21
SVRPGPVLGATSILRQESRQCCQFHPQDACSKPMHGLSSMPGPGGGSHVDTFTLSLLTQHILYCIVDSECKSRDVLQSYFDLLGELMKFNVDAFKRFNKYINTDAK

SEQ ID NO: 40294 - protein, 44 aa, Homo sapiens
  MAP TO AL135844.8; EXPRESSED IN LUNG, SIGNAL = 1.4; EXPRESSED IN PLACENTA, SIGNAL = 1.3; EXPRESSED IN ADULT LIVER, SIGNAL = 1.3; EXPRESSED IN FETAL LIVER, SIGNAL = 0.74; EXPRESSED IN BRAIN, SIGNAL = 1.1; EXPRESSED IN BONE MARROW, SIGNAL = 1.1; EXPRESSED IN HEART, SIGNAL = 1.8; EST_HUMAN HIT: BE549105.1, EVALUE 7.00e-06
ALVGAATLTPSPCPSSPSTSFTALWTASVSQGMCSRVTLTSWGS

SEQ ID NO: 40295 - protein, 26 aa, Homo sapiens
  MAP TO AC018684.2; EXPRESSED IN PLACENTA, SIGNAL = 1.2; EXPRESSED IN ADULT LIVER, SIGNAL = 1.3; EXPRESSED IN FETAL LIVER, SIGNAL = 1.1; EXPRESSED IN BRAIN, SIGNAL = 1.1; EXPRESSED IN BONE MARROW, SIGNAL = 1.1; EXPRESSED IN HEART, SIGNAL = 1.2; EXPRESSED IN LUNG, SIGNAL = 1.2; EST_HUMAN HIT: BE162332.1, EVALUE 4.70e+00
DRIVYVDSPRERPRKHLELIIKSQDT

SEQ ID NO: 40296 - protein, 17 aa, Homo sapiens
  MAP TO AC018684.2; EXPRESSED IN PLACENTA, SIGNAL = 1.2; EXPRESSED IN ADULT LIVER, SIGNAL = 1.3; EXPRESSED IN FETAL LIVER, SIGNAL = 1.1; EXPRESSED IN BRAIN, SIGNAL = 1.1; EXPRESSED IN BONE MARROW, SIGNAL = 1.1; EXPRESSED IN HEART, SIGNAL = 1.2; EXPRESSED IN LUNG, SIGNAL = 1.2
KIGLSMWTVPENVQEST

SEQ ID NO: 40297 - protein, 49 aa, Homo sapiens
  MAP TO AL096863.10; EXPRESSED IN LUNG, SIGNAL = 1.6; EXPRESSED IN ADULT LIVER, SIGNAL = 1.5; EXPRESSED IN HELA, SIGNAL = 2.2; EXPRESSED IN FETAL LIVER, SIGNAL = 1.6; EXPRESSED IN BRAIN, SIGNAL = 1.4; EXPRESSED IN PLACENTA, SIGNAL = 1.4; EXPRESSED IN HEART, SIGNAL = 1.3; EXPRESSED IN BONE MARROW, SIGNAL = 1.6
EPSINSELQPSAGEDLEGGGGVRGGRRKKEIKEGKRRRRKGSEENKEEE

SEQ ID NO: 40298 - protein, 30 aa, Homo sapiens
  MAP TO AF241729.1; EXPRESSED IN LUNG, SIGNAL = 1.5; EXPRESSED IN BONE MARROW, SIGNAL = 1.3; EXPRESSED IN HEART, SIGNAL = 1.4; EXPRESSED IN PLACENTA, SIGNAL = 1.5; EXPRESSED IN ADULT LIVER, SIGNAL = 1.4; EXPRESSED IN FETAL LIVER, SIGNAL = 1.3; EXPRESSED IN BRAIN, SIGNAL = 1.4
IGVKLNMEGQKSQETRNMMMSLMNREYSNS

SEQ ID NO: 40299 - protein, 35 aa, Homo sapiens
  MAP TO AL157777.3; EXPRESSED IN LUNG, SIGNAL = 2.2; EXPRESSED IN PLACENTA, SIGNAL =   2; EXPRESSED IN ADULT LIVER, SIGNAL = 2.2; EXPRESSED IN HEART, SIGNAL = 1.9; EXPRESSED IN FETAL LIVER, SIGNAL = 1.6; EXPRESSED IN BRAIN, SIGNAL = 1.6; EXPRESSED IN BONE MARROW, SIGNAL = 1.7
DFVFLILQLHVLRIDQHERVLTINLLKCPVFHLTC

SEQ ID NO: 40300 - protein, 28 aa, Homo sapiens
  MAP TO AL161781.2; EXPRESSED IN ADULT LIVER, SIGNAL = 1.7; EXPRESSED IN HELA, SIGNAL = 2.3; EXPRESSED IN HEART, SIGNAL = 1.3; EXPRESSED IN FETAL LIVER, SIGNAL = 1.4; EXPRESSED IN BRAIN, SIGNAL = 1.5; EXPRESSED IN PLACENTA, SIGNAL = 1.4; EXPRESSED IN BONE MARROW, SIGNAL = 1.6; EXPRESSED IN LUNG, SIGNAL = 1.6; EST_HUMAN HIT: BE560405.1, EVALUE 3.00e-09; SWISSPROT HIT: Q02548, EVALUE 2.00e-10
MFAWEIRDRLLAERVCDNDTVPSVSSIN

SEQ ID NO: 40301 - protein, 28 aa, Homo sapiens
  MAP TO AL161781.2; EXPRESSED IN ADULT LIVER, SIGNAL = 1.7; EXPRESSED IN HELA, SIGNAL = 2.3; EXPRESSED IN HEART, SIGNAL = 1.3; EXPRESSED IN FETAL LIVER, SIGNAL = 1.4; EXPRESSED IN BRAIN, SIGNAL = 1.5; EXPRESSED IN PLACENTA, SIGNAL = 1.4; EXPRESSED IN BONE MARROW, SIGNAL = 1.6; EXPRESSED IN LUNG, SIGNAL = 1.6; EST_HUMAN HIT: BE560405.1, EVALUE 3.00e-11; SWISSPROT HIT: Q06807, EVALUE 2.90e+00
CLPGRSGTGCWQSGCVTMTPCLASVPST

SEQ ID NO: 40302 - protein, 34 aa, Homo sapiens
  MAP TO AC016498.4; EXPRESSED IN LUNG, SIGNAL = 2.4; EXPRESSED IN ADULT LIVER, SIGNAL = 2.7; EXPRESSED IN HEART, SIGNAL = 1.9; EXPRESSED IN BONE MARROW, SIGNAL = 2.1; EXPRESSED IN BRAIN, SIGNAL = 2.4; EXPRESSED IN PLACENTA, SIGNAL =   2; EXPRESSED IN HELA, SIGNAL = 2.4; EXPRESSED IN FETAL LIVER, SIGNAL = 1.9
VQTLIVVIIGMLVLLLDFLGLVHLGQLLIFHIYL

SEQ ID NO: 40303 - protein, 58 aa, Homo sapiens
  MAP TO AC016326.4; EXPRESSED IN LUNG, SIGNAL = 0.93; EXPRESSED IN PLACENTA, SIGNAL =   1; EXPRESSED IN ADULT LIVER, SIGNAL = 0.68; EXPRESSED IN HEART, SIGNAL = 1.5; EXPRESSED IN FETAL LIVER, SIGNAL = 0.95; EXPRESSED IN BRAIN, SIGNAL = 1.3; EXPRESSED IN BONE MARROW, SIGNAL = 1.1; SWISSPROT HIT: P52934, EVALUE 4.60e+00; EST_HUMAN HIT: AA682949.1, EVALUE 3.00e-18
GSRRQNEGKQGKCQMLMKPSDLIRLTHYHENSMEETVPMIQLSPPGPVLDMWRLLQFK

SEQ ID NO: 40304 - protein, 41 aa, Homo sapiens
  MAP TO AL118505.13; EXPRESSED IN HELA, SIGNAL =  10; EXPRESSED IN HEART, SIGNAL = 6.4; EXPRESSED IN BONE MARROW, SIGNAL = 6.5; EXPRESSED IN LUNG, SIGNAL = 6.4; EXPRESSED IN ADULT LIVER, SIGNAL = 7.3; EXPRESSED IN FETAL LIVER, SIGNAL = 6.4; EXPRESSED IN BRAIN, SIGNAL = 5.6; EXPRESSED IN PLACENTA, SIGNAL = 6.1; SWISSPROT HIT: Q9Y490, EVALUE 9.00e-04; EST_HUMAN HIT: BF509616.1, EVALUE 2.00e-16
LAARILEAHQNVAQMPLVEAKLRFIQAWQSLPEFGLTYYLV

SEQ ID NO: 40305 - protein, 34 aa, Homo sapiens
  MAP TO AC019281.4; EXPRESSED IN ADULT LIVER, SIGNAL = 1.1; EXPRESSED IN BONE MARROW, SIGNAL = 0.69; EXPRESSED IN HEART, SIGNAL = 1.3; EXPRESSED IN FETAL LIVER, SIGNAL = 1.2; EXPRESSED IN BRAIN, SIGNAL = 0.69; SWISSPROT HIT: P53597, EVALUE 4.00e-14; EST_HUMAN HIT: AV724407.1, EVALUE 3.00e-14
PQNGIRHCSYTASRQHLYVDKNTKIICQGFTGKQ

SEQ ID NO: 40306 - protein, 34 aa, Homo sapiens
  MAP TO AC019281.4; EXPRESSED IN ADULT LIVER, SIGNAL = 1.1; EXPRESSED IN BONE MARROW, SIGNAL = 0.69; EXPRESSED IN HEART, SIGNAL = 1.3; EXPRESSED IN FETAL LIVER, SIGNAL = 1.2; EXPRESSED IN BRAIN, SIGNAL = 0.69; SWISSPROT HIT: Q9VRB3, EVALUE 4.90e+00; EST_HUMAN HIT: BE798678.1, EVALUE 2.00e-11
CRKMEFGIVPTQLLGNISMLIKIQRLFARVSLAN

SEQ ID NO: 40307 - protein, 32 aa, Homo sapiens
  MAP TO AC022882.3; EXPRESSED IN LUNG, SIGNAL = 1.4; EXPRESSED IN ADULT LIVER, SIGNAL = 1.4; EXPRESSED IN HEART, SIGNAL = 1.4; EXPRESSED IN FETAL LIVER, SIGNAL = 1.6; EXPRESSED IN BRAIN, SIGNAL = 1.1; EXPRESSED IN BONE MARROW, SIGNAL = 1.5; EXPRESSED IN PLACENTA, SIGNAL = 1.2
WVEEITQMCLTSSLRDCQILKRSRWPSLYYFS

SEQ ID NO: 40308 - protein, 33 aa, Homo sapiens
  MAP TO AC021371.3; EXPRESSED IN PLACENTA, SIGNAL = 1.2; EXPRESSED IN FETAL LIVER, SIGNAL = 1.2; EXPRESSED IN ADULT LIVER, SIGNAL = 0.94; EXPRESSED IN BRAIN, SIGNAL = 1.7; EXPRESSED IN BONE MARROW, SIGNAL = 1.4; EXPRESSED IN LUNG, SIGNAL = 1.1; EXPRESSED IN HEART, SIGNAL = 1.5; EST_HUMAN HIT: AI692856.1, EVALUE 2.00e-07; SWISSPROT HIT: O60908, EVALUE 6.50e+00
KKATVCKPGREPSPDTKSASTLILDFPASRTVR

SEQ ID NO: 40309 - protein, 87 aa, Homo sapiens
  MAP TO AL136308.4; EXPRESSED IN LUNG, SIGNAL = 1.5; EXPRESSED IN PLACENTA, SIGNAL = 1.3; EXPRESSED IN FETAL LIVER, SIGNAL = 1.1; EXPRESSED IN BONE MARROW, SIGNAL = 1.1; EXPRESSED IN ADULT LIVER, SIGNAL = 1.5; EXPRESSED IN HEART, SIGNAL = 1.2; EXPRESSED IN BRAIN, SIGNAL = 1.3; SWISSPROT HIT: Q99435, EVALUE 3.00e+00
SNYNRANYVLGCIHDPCNSSTCIHKTLHMYVSEFTNMDSKYCFIHQQNCTPKNEVETKMCFISFSNNVKFTDMLKSRLLTQIEPHSS

SEQ ID NO: 40310 - protein, 87 aa, Homo sapiens
  MAP TO AL136308.4; EXPRESSED IN LUNG, SIGNAL = 1.5; EXPRESSED IN PLACENTA, SIGNAL = 1.3; EXPRESSED IN FETAL LIVER, SIGNAL = 1.1; EXPRESSED IN BONE MARROW, SIGNAL = 1.1; EXPRESSED IN ADULT LIVER, SIGNAL = 1.5; EXPRESSED IN HEART, SIGNAL = 1.2; EXPRESSED IN BRAIN, SIGNAL = 1.3; EST_HUMAN HIT: AW085507.1, EVALUE 6.40e+00; SWISSPROT HIT: Q80946, EVALUE 2.60e+00
GKASSCSRTVFLQGPIITEPIMFWDAFTTLAILLHAYIKLCTCMCQNLLIWIPNIASSINRTVHPKTKWKLKCASLAFQIMLNLQTC

SEQ ID NO: 40311 - protein, 80 aa, Homo sapiens
  MAP TO AC021468.2; EXPRESSED IN ADULT LIVER, SIGNAL = 1.6; EXPRESSED IN BRAIN, SIGNAL = 1.6; EXPRESSED IN HEART, SIGNAL =   2; EXPRESSED IN BONE MARROW, SIGNAL = 1.7; EXPRESSED IN LUNG, SIGNAL = 1.6; EXPRESSED IN PLACENTA, SIGNAL = 1.4; EXPRESSED IN FETAL LIVER, SIGNAL = 1.9; EST_HUMAN HIT: AL120124.1, EVALUE 4.00e-44; SWISSPROT HIT: P24014, EVALUE 2.00e-11
GPFCEHPPPMVLLQTSPCDQYECQNGAQCIVVQQEPTCRCPPGFAGPRCEKLITVNFVGKDSYVELASAKVRPQANISLQ

SEQ ID NO: 40312 - protein, 86 aa, Homo sapiens
  MAP TO AC021468.2; EXPRESSED IN ADULT LIVER, SIGNAL = 1.6; EXPRESSED IN BRAIN, SIGNAL = 1.6; EXPRESSED IN HEART, SIGNAL =   2; EXPRESSED IN BONE MARROW, SIGNAL = 1.7; EXPRESSED IN LUNG, SIGNAL = 1.6; EXPRESSED IN PLACENTA, SIGNAL = 1.4; EXPRESSED IN FETAL LIVER, SIGNAL = 1.9; EST_HUMAN HIT: AL119942.1, EVALUE 4.00e-26; SWISSPROT HIT: P32323, EVALUE 7.40e+00
DPSVNTPHPWSYCRPAHATSTSARTGPSASWCSRSPPAAAHQASPAPDARSSSLSTSWAKTPTWNWPPPRSDPRPTSPCRCVPPCP

SEQ ID NO: 40313 - protein, 27 aa, Homo sapiens
  MAP TO AC011022.4; EXPRESSED IN LUNG, SIGNAL =   2; EXPRESSED IN PLACENTA, SIGNAL = 2.1; EXPRESSED IN ADULT LIVER, SIGNAL = 2.1; EXPRESSED IN HELA, SIGNAL = 3.2; EXPRESSED IN BRAIN, SIGNAL = 2.9; EXPRESSED IN FETAL LIVER, SIGNAL = 2.6; EXPRESSED IN HEART, SIGNAL =   2; EXPRESSED IN BONE MARROW, SIGNAL = 2.3; EST_HUMAN HIT: AA171578.1, EVALUE 6.00e-09
WEPFLMVFKDLCRISAVRPKASTSPEE

SEQ ID NO: 40314 - protein, 63 aa, Homo sapiens
  MAP TO AL161644.1; EXPRESSED IN LUNG, SIGNAL = 1.5; EXPRESSED IN PLACENTA, SIGNAL = 1.4; EXPRESSED IN ADULT LIVER, SIGNAL = 1.4; EXPRESSED IN HEART, SIGNAL = 1.4; EXPRESSED IN FETAL LIVER, SIGNAL = 1.6; EXPRESSED IN BRAIN, SIGNAL = 1.1; EXPRESSED IN BONE MARROW, SIGNAL = 1.5; SWISSPROT HIT: O84859, EVALUE 4.20e+00; EST_HUMAN HIT: AA328265.1, EVALUE 2.00e-11
GGLSPGDQLGITLRQTRLPEPCHPCPQSLLALCPRNNNKPPHPKTLCRHQRRLISLNPPNNLL

SEQ ID NO: 40315 - protein, 60 aa, Homo sapiens
  MAP TO AL161756.1; EXPRESSED IN LUNG, SIGNAL = 1.5; EXPRESSED IN PLACENTA, SIGNAL = 1.8; EXPRESSED IN ADULT LIVER, SIGNAL = 1.3; EXPRESSED IN HEART, SIGNAL = 1.2; EXPRESSED IN FETAL LIVER, SIGNAL = 1.1; EXPRESSED IN BRAIN, SIGNAL = 1.2; EXPRESSED IN BONE MARROW, SIGNAL = 1.1; SWISSPROT HIT: Q92731, EVALUE 3.00e-30; EST_HUMAN HIT: BF681516.1, EVALUE 3.50e+00
NKGMEHLLNMKCKNVVPVYDLLLEMLNAHVLRGCKSSITGSECSPAEDSKSKEGSQNPQS

SEQ ID NO: 40316 - protein, 57 aa, Homo sapiens
  MAP TO AL162458.1; EXPRESSED IN ADULT LIVER, SIGNAL =   2; EXPRESSED IN HELA, SIGNAL = 2.7; EXPRESSED IN HEART, SIGNAL = 1.8; EXPRESSED IN BRAIN, SIGNAL = 1.4; EXPRESSED IN PLACENTA, SIGNAL = 1.9; EXPRESSED IN FETAL LIVER, SIGNAL = 1.6; EXPRESSED IN BONE MARROW, SIGNAL = 6.1; EXPRESSED IN LUNG, SIGNAL =   2; EST_HUMAN HIT: T64837.1, EVALUE 9.00e-31; SWISSPROT HIT: P14780, EVALUE 8.00e-32
VPTRFGNADGAACHFPFIFEGRSYSACTTDGRSDGLPWCSTTANYDTDDRFGFCPSE

SEQ ID NO: 40317 - protein, 50 aa, Homo sapiens
  MAP TO AL162458.1; EXPRESSED IN ADULT LIVER, SIGNAL =   2; EXPRESSED IN HELA, SIGNAL = 2.7; EXPRESSED IN HEART, SIGNAL = 1.8; EXPRESSED IN BRAIN, SIGNAL = 1.4; EXPRESSED IN PLACENTA, SIGNAL = 1.9; EXPRESSED IN FETAL LIVER, SIGNAL = 1.6; EXPRESSED IN BONE MARROW, SIGNAL = 6.1; EXPRESSED IN LUNG, SIGNAL =   2; EST_HUMAN HIT: BE831812.1, EVALUE 8.80e-02
MARPATSPSSSRAAPTLPAPPTVAPTACPGAVPRPTTTPTTGLASAPARV

SEQ ID NO: 40318 - protein, 31 aa, Homo sapiens
  MAP TO AC012241.4; EXPRESSED IN PLACENTA, SIGNAL = 2.7; EXPRESSED IN FETAL LIVER, SIGNAL = 2.5; EXPRESSED IN BONE MARROW, SIGNAL = 3.4; EXPRESSED IN LUNG, SIGNAL = 2.7; EXPRESSED IN ADULT LIVER, SIGNAL = 5.9; EXPRESSED IN HELA, SIGNAL = 4.4; EXPRESSED IN HEART, SIGNAL = 2.4; EXPRESSED IN BRAIN, SIGNAL = 2.8
GMGELDNEVEYVMAMGKCYLREKAGRPRLLQ

SEQ ID NO: 40319 - protein, 36 aa, Homo sapiens
  MAP TO AC013584.3; EXPRESSED IN ADULT LIVER, SIGNAL = 1.6; EXPRESSED IN HEART, SIGNAL = 1.3; EXPRESSED IN BONE MARROW, SIGNAL = 1.5; EXPRESSED IN LUNG, SIGNAL = 1.5; EXPRESSED IN PLACENTA, SIGNAL = 1.5; EXPRESSED IN FETAL LIVER, SIGNAL = 1.2; EXPRESSED IN BRAIN, SIGNAL = 1.3; EST_HUMAN HIT: BE466687.1, EVALUE 2.60e-02
NDNVKRQQKGDHLQAKERGSEGTKSSTLILDFVLPE

SEQ ID NO: 40320 - protein, 45 aa, Homo sapiens
  MAP TO AC013823.3; EXPRESSED IN HELA, SIGNAL = 4.1; EXPRESSED IN LUNG, SIGNAL = 2.7; EXPRESSED IN PLACENTA, SIGNAL = 2.5; EXPRESSED IN ADULT LIVER, SIGNAL =   3; EXPRESSED IN FETAL LIVER, SIGNAL = 2.4; EXPRESSED IN HEART, SIGNAL = 2.3; EXPRESSED IN BRAIN, SIGNAL = 2.5; EXPRESSED IN BONE MARROW, SIGNAL = 2.5; EST_HUMAN HIT: T84499.1, EVALUE 8.00e-01
TADHFWSMTWGSGTPAVEDILFLIPARSFTFLVFSSMVRILGLII

SEQ ID NO: 40321 - protein, 23 aa, Homo sapiens
  MAP TO AL121901.10; EXPRESSED IN HELA, SIGNAL =  12; EXPRESSED IN HEART, SIGNAL =  13; EXPRESSED IN BONE MARROW, SIGNAL =  11; EXPRESSED IN LUNG, SIGNAL =  11; EXPRESSED IN PLACENTA, SIGNAL = 9.9; EXPRESSED IN ADULT LIVER, SIGNAL =   9; EXPRESSED IN FETAL LIVER, SIGNAL =  11; EXPRESSED IN BRAIN, SIGNAL =  13; EST_HUMAN HIT: BF358889.1, EVALUE 1.00e-08
PSAMACCLGACWAFWKTFRSWTS

SEQ ID NO: 40322 - protein, 49 aa, Homo sapiens
  MAP TO AL133395.14; EXPRESSED IN ADULT LIVER, SIGNAL = 4.4; EXPRESSED IN HELA, SIGNAL = 5.1; EXPRESSED IN LUNG, SIGNAL = 5.4; EXPRESSED IN PLACENTA, SIGNAL = 4.1; EXPRESSED IN HEART, SIGNAL = 4.2; EXPRESSED IN BRAIN, SIGNAL = 4.4; EXPRESSED IN BONE MARROW, SIGNAL = 4.5; EXPRESSED IN FETAL LIVER, SIGNAL = 4.7; SWISSPROT HIT: Q09566, EVALUE 6.20e+00; EST_HUMAN HIT: AV699702.1, EVALUE 1.00e+00
VPCWCSMEYKHQCKVVFIFTKLITWLWCGEVRCSNGSGTVGWEELAVES

SEQ ID NO: 40323 - protein, 22 aa, Homo sapiens
  MAP TO AL133395.14; EXPRESSED IN ADULT LIVER, SIGNAL = 4.4; EXPRESSED IN HELA, SIGNAL = 5.1; EXPRESSED IN LUNG, SIGNAL = 5.4; EXPRESSED IN PLACENTA, SIGNAL = 4.1; EXPRESSED IN HEART, SIGNAL = 4.2; EXPRESSED IN BRAIN, SIGNAL = 4.4; EXPRESSED IN BONE MARROW, SIGNAL = 4.5; EXPRESSED IN FETAL LIVER, SIGNAL = 4.7
YHAGAPWSTNTSAKWSSSSQNL

SEQ ID NO: 40324 - protein, 30 aa, Homo sapiens
  MAP TO AL161752.1; EXPRESSED IN HELA, SIGNAL = 2.5; EXPRESSED IN LUNG, SIGNAL = 2.6; EXPRESSED IN PLACENTA, SIGNAL = 2.4; EXPRESSED IN FETAL LIVER, SIGNAL = 1.8; EXPRESSED IN BONE MARROW, SIGNAL = 1.9; EXPRESSED IN ADULT LIVER, SIGNAL = 2.4; EXPRESSED IN HEART, SIGNAL =   2; EXPRESSED IN BRAIN, SIGNAL = 1.9
TTVLPDSTDQLSFEDFPYLSPSNSEQRVNQ

SEQ ID NO: 40325 - protein, 28 aa, Homo sapiens
  MAP TO AL161752.1; EXPRESSED IN HELA, SIGNAL = 2.5; EXPRESSED IN LUNG, SIGNAL = 2.6; EXPRESSED IN PLACENTA, SIGNAL = 2.4; EXPRESSED IN FETAL LIVER, SIGNAL = 1.8; EXPRESSED IN BONE MARROW, SIGNAL = 1.9; EXPRESSED IN ADULT LIVER, SIGNAL = 2.4; EXPRESSED IN HEART, SIGNAL =   2; EXPRESSED IN BRAIN, SIGNAL = 1.9
ELLSFQTRLISFPLKIFLIFLHPTRNKG

SEQ ID NO: 40326 - protein, 46 aa, Homo sapiens
  MAP TO AC013641.4; EXPRESSED IN ADULT LIVER, SIGNAL = 2.5; EXPRESSED IN BRAIN, SIGNAL = 3.8; EXPRESSED IN LUNG, SIGNAL = 3.6; EXPRESSED IN HELA, SIGNAL = 3.3; EXPRESSED IN BONE MARROW, SIGNAL = 3.7; EXPRESSED IN PLACENTA, SIGNAL = 2.4; EXPRESSED IN HEART, SIGNAL = 3.6; EXPRESSED IN FETAL LIVER, SIGNAL = 3.7; SWISSPROT HIT: Q06561, EVALUE 4.80e+00
MSRTEATPMTLGRKNENEETGVVLAWSLTRAPPVIRTLGKQPTIQF

SEQ ID NO: 40327 - protein, 29 aa, Homo sapiens
  MAP TO AC011831.4; EXPRESSED IN LUNG, SIGNAL = 3.3; EXPRESSED IN PLACENTA, SIGNAL = 3.2; EXPRESSED IN HEART, SIGNAL = 3.2; EXPRESSED IN FETAL LIVER, SIGNAL = 2.8; EXPRESSED IN BRAIN, SIGNAL =   3; EXPRESSED IN ADULT LIVER, SIGNAL = 3.7; EXPRESSED IN HELA, SIGNAL =   5; EXPRESSED IN BONE MARROW, SIGNAL =   3
MEKSKCVESKFMRMENVMGKKEKQSDAPK

SEQ ID NO: 40328 - protein, 39 aa, Homo sapiens
  MAP TO AL136172.12; EXPRESSED IN LUNG, SIGNAL = 3.3; EXPRESSED IN HEART, SIGNAL = 3.4; EXPRESSED IN FETAL LIVER, SIGNAL = 6.3; EXPRESSED IN BONE MARROW, SIGNAL = 4.2; EXPRESSED IN PLACENTA, SIGNAL = 2.7; EXPRESSED IN ADULT LIVER, SIGNAL =   3; EXPRESSED IN HELA, SIGNAL = 4.5; EXPRESSED IN BRAIN, SIGNAL =   3; SWISSPROT HIT: P01286, EVALUE 7.00e-16; EST_HUMAN HIT: BE219117.1, EVALUE 9.00e-15
ESNQERGARARLGRQVDSMWAEQKQMELESILVALLQKH

SEQ ID NO: 40329 - protein, 70 aa, Homo sapiens
  MAP TO AC015785.3; EXPRESSED IN PLACENTA, SIGNAL = 1.4; EXPRESSED IN HEART, SIGNAL = 1.3; EXPRESSED IN FETAL LIVER, SIGNAL = 1.4; EXPRESSED IN BONE MARROW, SIGNAL = 1.6; EXPRESSED IN LUNG, SIGNAL = 1.4; EXPRESSED IN ADULT LIVER, SIGNAL = 1.3; EXPRESSED IN BRAIN, SIGNAL = 1.3; EST_HUMAN HIT: BE670556.1, EVALUE 3.20e-02; SWISSPROT HIT: P10162, EVALUE 1.70e+00
LPPIWSFEEKAGLRNMDGCPPFPLQMSAASTPAFGKPQGKRTCQAANQPPAPVKGWNPAAQFGCSCPKPD

SEQ ID NO: 40330 - protein, 39 aa, Homo sapiens
  MAP TO AC016517.4; EXPRESSED IN LUNG, SIGNAL = 2.4; EXPRESSED IN FETAL LIVER, SIGNAL =   2; EXPRESSED IN BONE MARROW, SIGNAL = 2.1; EXPRESSED IN PLACENTA, SIGNAL = 2.1; EXPRESSED IN ADULT LIVER, SIGNAL = 2.3; EXPRESSED IN HEART, SIGNAL = 2.1; EXPRESSED IN BRAIN, SIGNAL = 2.4
SCYSQANEHLFASSSKSLVNIFNKLENRAFRHTSKNFSS

SEQ ID NO: 40331 - protein, 19 aa, Homo sapiens
  MAP TO AC016517.4; EXPRESSED IN LUNG, SIGNAL = 2.4; EXPRESSED IN FETAL LIVER, SIGNAL =   2; EXPRESSED IN BONE MARROW, SIGNAL = 2.1; EXPRESSED IN PLACENTA, SIGNAL = 2.1; EXPRESSED IN ADULT LIVER, SIGNAL = 2.3; EXPRESSED IN HEART, SIGNAL = 2.1; EXPRESSED IN BRAIN, SIGNAL = 2.4
LRVIHKLMSIYLLLHPSHW

SEQ ID NO: 40332 - protein, 61 aa, Homo sapiens
  MAP TO AC007000.2; EXPRESSED IN ADULT LIVER, SIGNAL =  10; EXPRESSED IN BRAIN, SIGNAL =  12; EXPRESSED IN BONE MARROW, SIGNAL =  14; EXPRESSED IN LUNG, SIGNAL =  12; EXPRESSED IN PLACENTA, SIGNAL =  11; EXPRESSED IN HELA, SIGNAL =  13; EXPRESSED IN HEART, SIGNAL =  11; EXPRESSED IN FETAL LIVER, SIGNAL =  13; SWISSPROT HIT: P54278, EVALUE 5.00e-27; EST_HUMAN HIT: AA770647.1, EVALUE 9.00e-29
TISTCHVSAKVGTRLVFDHDGKIIQKTPYPHPRGTTVSVKQLFSTLPVRHKEFQRNIKKVQ

SEQ ID NO: 40333 - protein, 37 aa, Homo sapiens
  MAP TO AL161747.1; EXPRESSED IN HELA, SIGNAL = 3.3; EXPRESSED IN HEART, SIGNAL = 3.9; EXPRESSED IN BONE MARROW, SIGNAL = 2.6; EXPRESSED IN LUNG, SIGNAL = 3.9; EXPRESSED IN PLACENTA, SIGNAL = 3.9; EXPRESSED IN ADULT LIVER, SIGNAL = 3.4; EXPRESSED IN FETAL LIVER, SIGNAL = 3.1; EXPRESSED IN BRAIN, SIGNAL = 3.8; SWISSPROT HIT: P53994, EVALUE 3.00e-13; EST_HUMAN HIT: W28130.1, EVALUE 4.00e-14
DLESRRDVKREEGEAFAREHGLIFMETSAKTACNVEE

SEQ ID NO: 40334 - protein, 48 aa, Homo sapiens
  MAP TO AC021237.3; EXPRESSED IN PLACENTA, SIGNAL = 1.3; EXPRESSED IN LUNG, SIGNAL = 1.2; EXPRESSED IN ADULT LIVER, SIGNAL =   1; EXPRESSED IN HEART, SIGNAL = 1.9; EXPRESSED IN FETAL LIVER, SIGNAL =   1; EXPRESSED IN BRAIN, SIGNAL = 0.88; EXPRESSED IN BONE MARROW, SIGNAL = 0.83; EST_HUMAN HIT: N42671.1, EVALUE 3.00e-20
LEISLIKKNEGLTWPELVIGDKQGELIRDSAQCAAIAERLMHLTSEEL

SEQ ID NO: 40335 - protein, 58 aa, Homo sapiens
  MAP TO AC016057.3; EXPRESSED IN ADULT LIVER, SIGNAL = 2.9; EXPRESSED IN BONE MARROW, SIGNAL = 2.7; EXPRESSED IN HELA, SIGNAL = 2.7; EXPRESSED IN HEART, SIGNAL = 2.8; EXPRESSED IN LUNG, SIGNAL = 2.7; EXPRESSED IN PLACENTA, SIGNAL = 2.7; EXPRESSED IN FETAL LIVER, SIGNAL = 2.5; EXPRESSED IN BRAIN, SIGNAL = 3.1; EST_HUMAN HIT: H25881.1, EVALUE 5.00e-04; SWISSPROT HIT: Q02357, EVALUE 1.00e-05
LHEMDDYGNTPLHCAVEKNQIESVKFLLSRGANPNLRNFNMMAPLHIAVQGMNNEVMK

SEQ ID NO: 40336 - protein, 35 aa, Homo sapiens
  MAP TO AC016890.4; EXPRESSED IN BRAIN, SIGNAL = 1.4; EXPRESSED IN LUNG, SIGNAL = 1.7; EXPRESSED IN PLACENTA, SIGNAL = 1.4; EXPRESSED IN ADULT LIVER, SIGNAL = 1.6; EXPRESSED IN FETAL LIVER, SIGNAL = 1.5; EXPRESSED IN BONE MARROW, SIGNAL = 1.7; EXPRESSED IN HEART, SIGNAL = 1.4
CLTLLFIIYSSIFFTFLISPVSGRITAGKLTAGLC

SEQ ID NO: 40337 - protein, 69 aa, Homo sapiens
  MAP TO AL133229.19; EXPRESSED IN PLACENTA, SIGNAL = 1.4; EXPRESSED IN FETAL LIVER, SIGNAL = 4.7; EXPRESSED IN LUNG, SIGNAL = 1.6; EXPRESSED IN ADULT LIVER, SIGNAL = 1.7; EXPRESSED IN HEART, SIGNAL =   2; EXPRESSED IN BONE MARROW, SIGNAL = 1.3; EXPRESSED IN BRAIN, SIGNAL = 1.5; SWISSPROT HIT: P16543, EVALUE 3.40e+00
MGATAPAVALGVIRGGVGPAIQSSLEAESHRLILLNSSTENRGNRSLAVLRWTLVRTWRGGFIILNPRI

SEQ ID NO: 40338 - protein, 91 aa, Homo sapiens
  MAP TO AC019221.3; EXPRESSED IN ADULT LIVER, SIGNAL = 1.4; EXPRESSED IN PLACENTA, SIGNAL = 1.3; EXPRESSED IN HELA, SIGNAL = 3.9; EXPRESSED IN FETAL LIVER, SIGNAL = 2.1; EXPRESSED IN BRAIN, SIGNAL = 2.5; EXPRESSED IN BONE MARROW, SIGNAL = 1.9; EXPRESSED IN LUNG, SIGNAL = 1.5; EXPRESSED IN HEART, SIGNAL = 1.4; SWISSPROT HIT: Q16760, EVALUE 5.00e-47; EST_HUMAN HIT: AW500549.1, EVALUE 4.00e-46
CSVLKEKLDSLLKTLDDESQASSSLPNPPPTIAEEAEDGDGSGSICGSTGDRLVASACPARPQIFRPREQLMLRANSLKKAIRQIIEHTEK

SEQ ID NO: 40339 - protein, 70 aa, Homo sapiens
  MAP TO AL133259.21; EXPRESSED IN LUNG, SIGNAL =  11; EXPRESSED IN ADULT LIVER, SIGNAL =  11; EXPRESSED IN FETAL LIVER, SIGNAL =  13; EXPRESSED IN BRAIN, SIGNAL =  14; EXPRESSED IN HELA, SIGNAL =   7; EXPRESSED IN PLACENTA, SIGNAL =  12; EXPRESSED IN HEART, SIGNAL =  13; EXPRESSED IN BONE MARROW, SIGNAL =  12; SWISSPROT HIT: Q01151, EVALUE 2.00e-38; EST_HUMAN HIT: AW403650.1, EVALUE 2.00e-37
LLEGGEERMETPQEDHLRGQHYHQKGQNGSFDAPNERPYSLKIRNTTSCNSGTYRCTLQDPDGQRNLSGK

SEQ ID NO: 40340 - protein, 40 aa, Homo sapiens
  MAP TO AL133259.21; EXPRESSED IN LUNG, SIGNAL =  11; EXPRESSED IN ADULT LIVER, SIGNAL =  11; EXPRESSED IN FETAL LIVER, SIGNAL =  13; EXPRESSED IN BRAIN, SIGNAL =  14; EXPRESSED IN HELA, SIGNAL =   7; EXPRESSED IN PLACENTA, SIGNAL =  12; EXPRESSED IN HEART, SIGNAL =  13; EXPRESSED IN BONE MARROW, SIGNAL =  12; SWISSPROT HIT: P01865, EVALUE 6.30e+00; EST_HUMAN HIT: BE830187.1, EVALUE 4.00e-18
YWRVVKRGWRHPRKTTSGDSTIIRRGKMVLSTPPMKGPIP

SEQ ID NO: 40341 - protein, 84 aa, Homo sapiens
  MAP TO AL161744.1; EXPRESSED IN LUNG, SIGNAL =  14; EXPRESSED IN ADULT LIVER, SIGNAL =  13; EXPRESSED IN HEART, SIGNAL =  14; EXPRESSED IN FETAL LIVER, SIGNAL =  11; EXPRESSED IN BRAIN, SIGNAL =  16; EXPRESSED IN BONE MARROW, SIGNAL =  10; EXPRESSED IN HELA, SIGNAL =  12; EXPRESSED IN PLACENTA, SIGNAL =  14; SWISSPROT HIT: Q10022, EVALUE 1.00e-05; EST_HUMAN HIT: AW157233.1, EVALUE 3.00e-43
IYTFGLFATDIFVNAGQVVTGNLAPHFLALCKPNYTALGCQQYTQFISGEEACTGNPDLIMRARKTFPSKEAALSVYAAMYLTV

SEQ ID NO: 40342 - protein, 69 aa, Homo sapiens
  MAP TO AL121747.19; EXPRESSED IN LUNG, SIGNAL = 1.7; EXPRESSED IN PLACENTA, SIGNAL = 1.8; EXPRESSED IN ADULT LIVER, SIGNAL = 1.5; EXPRESSED IN BRAIN, SIGNAL = 1.9; EXPRESSED IN FETAL LIVER, SIGNAL = 1.8; EXPRESSED IN HEART, SIGNAL = 1.7; EXPRESSED IN BONE MARROW, SIGNAL = 1.6; EST_HUMAN HIT: AI016234.1, EVALUE 9.00e-22; SWISSPROT HIT: Q01080, EVALUE 2.00e+00
TAASTFKDFELASAQQRPDMVLRQRFRGLLRPEDRTKDVLTKPRTNRFVKLAVMGLTVALGAAALAVVK

SEQ ID NO: 40343 - protein, 39 aa, Homo sapiens
  MAP TO AL121747.19; EXPRESSED IN LUNG, SIGNAL = 1.7; EXPRESSED IN PLACENTA, SIGNAL = 1.8; EXPRESSED IN ADULT LIVER, SIGNAL = 1.5; EXPRESSED IN BRAIN, SIGNAL = 1.9; EXPRESSED IN FETAL LIVER, SIGNAL = 1.8; EXPRESSED IN HEART, SIGNAL = 1.7; EXPRESSED IN BONE MARROW, SIGNAL = 1.6; EST_HUMAN HIT: AI363139.1, EVALUE 4.00e-18; SWISSPROT HIT: P32561, EVALUE 4.90e+00
RQPLLSKTLSWHQPSRGLIWCCGSGFGDFCGLKIEQKMS

SEQ ID NO: 40344 - protein, 45 aa, Homo sapiens
  MAP TO AC013550.4; EXPRESSED IN PLACENTA, SIGNAL = 2.2; EXPRESSED IN HEART, SIGNAL =   7; EXPRESSED IN FETAL LIVER, SIGNAL = 2.1; EXPRESSED IN BONE MARROW, SIGNAL = 2.1; EXPRESSED IN LUNG, SIGNAL = 2.2; EXPRESSED IN ADULT LIVER, SIGNAL = 2.1; EXPRESSED IN BRAIN, SIGNAL = 2.3; EST_HUMAN HIT: C03894.1, EVALUE 2.00e-13; SWISSPROT HIT: P54296, EVALUE 1.00e-20
IPLKSELAYEIFDKGRVRFWLQAEHLSPDASYRFIINDREVSDSE

SEQ ID NO: 40345 - protein, 37 aa, Homo sapiens
  MAP TO AL133227.7; EXPRESSED IN PLACENTA, SIGNAL =   2; EXPRESSED IN ADULT LIVER, SIGNAL = 1.8; EXPRESSED IN HELA, SIGNAL = 2.3; EXPRESSED IN HEART, SIGNAL = 1.9; EXPRESSED IN BRAIN, SIGNAL = 2.2; EXPRESSED IN LUNG, SIGNAL =   2; EXPRESSED IN FETAL LIVER, SIGNAL = 2.3; EXPRESSED IN BONE MARROW, SIGNAL = 1.9; SWISSPROT HIT: Q92556, EVALUE 1.00e-10; EST_HUMAN HIT: AU125848.1, EVALUE 8.00e-14
ELREKIQPEILELIKQQRLNRLCEGSSFRKIGNRRRQ

SEQ ID NO: 40346 - protein, 19 aa, Homo sapiens
  MAP TO AL133227.7; EXPRESSED IN PLACENTA, SIGNAL =   2; EXPRESSED IN ADULT LIVER, SIGNAL = 1.8; EXPRESSED IN HELA, SIGNAL = 2.3; EXPRESSED IN HEART, SIGNAL = 1.9; EXPRESSED IN BRAIN, SIGNAL = 2.2; EXPRESSED IN LUNG, SIGNAL =   2; EXPRESSED IN FETAL LIVER, SIGNAL = 2.3; EXPRESSED IN BONE MARROW, SIGNAL = 1.9
SSTVPMTFRSLQCVSTPGS

SEQ ID NO: 40347 - protein, 46 aa, Homo sapiens
  MAP TO AC009416.2; EXPRESSED IN ADULT LIVER, SIGNAL = 1.7; EXPRESSED IN HELA, SIGNAL = 2.4; EXPRESSED IN HEART, SIGNAL = 1.4; EXPRESSED IN FETAL LIVER, SIGNAL = 1.3; EXPRESSED IN LUNG, SIGNAL = 1.4; EXPRESSED IN PLACENTA, SIGNAL = 1.5; EXPRESSED IN BRAIN, SIGNAL = 1.5; EXPRESSED IN BONE MARROW, SIGNAL = 1.4; EST_HUMAN HIT: AW949220.1, EVALUE 4.60e-01
PCHQYENYLRLACWKIRNNMDQSQVILAKAILDQPTQPHSQLITDA

SEQ ID NO: 40348 - protein, 66 aa, Homo sapiens
  MAP TO AL137143.6; EXPRESSED IN LUNG, SIGNAL = 1.4; EXPRESSED IN PLACENTA, SIGNAL = 1.4; EXPRESSED IN ADULT LIVER, SIGNAL = 1.4; EXPRESSED IN HEART, SIGNAL = 1.4; EXPRESSED IN FETAL LIVER, SIGNAL = 1.2; EXPRESSED IN BRAIN, SIGNAL = 1.5; EXPRESSED IN BONE MARROW, SIGNAL = 1.4
LLPLATVTSSLRFHLLLARTGRKGRQPCYPSMWTQTVNQENMSSKVYLSTSPLRLNARFVSLWQSP

SEQ ID NO: 40349 - protein, 64 aa, Homo sapiens
  MAP TO AC011666.18; EXPRESSED IN HELA, SIGNAL = 2.2; EXPRESSED IN HEART, SIGNAL = 1.5; EXPRESSED IN BRAIN, SIGNAL = 1.4; EXPRESSED IN BONE MARROW, SIGNAL = 1.1e+02; EXPRESSED IN FETAL LIVER, SIGNAL =  14; EXPRESSED IN ADULT LIVER, SIGNAL = 1.8; EXPRESSED IN PLACENTA, SIGNAL = 2.2; EXPRESSED IN LUNG, SIGNAL = 5.2; SWISSPROT HIT: P06702, EVALUE 2.00e-34; EST_HUMAN HIT: AI720432.1, EVALUE 2.00e-33
KENKNEKVIEHIMEDLDTNADKQLSFEEFIMLMARLTWASHEKMHEGDEGPGHHHKPGLGEGTP

SEQ ID NO: 40350 - protein, 127 aa, Homo sapiens
  MAP TO AC022470.3; EXPRESSED IN BONE MARROW, SIGNAL = 1.1; EXPRESSED IN ADULT LIVER, SIGNAL = 1.4; EXPRESSED IN HEART, SIGNAL = 1.3; EXPRESSED IN LUNG, SIGNAL = 1.5; EXPRESSED IN PLACENTA, SIGNAL = 5.4; EXPRESSED IN FETAL LIVER, SIGNAL = 1.5; EXPRESSED IN BRAIN, SIGNAL = 0.96; SWISSPROT HIT: Q62685, EVALUE 4.00e-13; EST_HUMAN HIT: T86331.1, EVALUE 4.00e-12
EIVDFAKQLPGFLQLSREDQIALLKTSAIEVAGEGQGMKGEAEWDYLWEGPPDIELGEPNLLGSRDEENRPPWKRPCSKTSPPSPRLRFAACVQVMLLETSRRYNPGSESITFLKDFSYNREDFAKA

SEQ ID NO: 40351 - protein, 52 aa, Homo sapiens
  MAP TO AL136984.7; EXPRESSED IN HELA, SIGNAL = 2.6; EXPRESSED IN LUNG, SIGNAL = 2.2; EXPRESSED IN PLACENTA, SIGNAL = 2.2; EXPRESSED IN HEART, SIGNAL = 2.1; EXPRESSED IN BONE MARROW, SIGNAL = 2.2; EXPRESSED IN ADULT LIVER, SIGNAL =   2; EXPRESSED IN FETAL LIVER, SIGNAL = 2.1; EXPRESSED IN BRAIN, SIGNAL = 2.2
LINKQNWRHRAEFKDRNSKPLLSQKQKSKHSGNIVNHPSRKNANKGSRNIHG

SEQ ID NO: 40352 - protein, 93 aa, Homo sapiens
  MAP TO AC017086.3; EXPRESSED IN PLACENTA, SIGNAL = 5.2; EXPRESSED IN FETAL LIVER, SIGNAL = 4.5; EXPRESSED IN BONE MARROW, SIGNAL = 5.7; EXPRESSED IN LUNG, SIGNAL = 5.7; EXPRESSED IN ADULT LIVER, SIGNAL = 6.4; EXPRESSED IN HELA, SIGNAL = 4.9; EXPRESSED IN HEART, SIGNAL = 4.5; EXPRESSED IN BRAIN, SIGNAL = 5.2; SWISSPROT HIT: O86490, EVALUE 4.60e+00; EST_HUMAN HIT: H53272.1, EVALUE 1.00e-19
PLEASNDGGRRRGNLRITWQKQEQERGEEVPHTFKRPDLMKTHYCEDSTKRIVLNYSREILPHDPVTSHQAPPPTLGITFQHEIWMETHSSFI

SEQ ID NO: 40353 - protein, 39 aa, Homo sapiens [sequence omitted]

SEQ ID NO: 40354 - protein, 57 aa, Homo sapiens
  MAP TO AL161642.2; EXPRESSED IN ADULT LIVER, SIGNAL = 2.9; EXPRESSED IN HELA, SIGNAL = 2.3; EXPRESSED IN LUNG, SIGNAL = 2.4; EXPRESSED IN PLACENTA, SIGNAL = 1.5; EXPRESSED IN FETAL LIVER, SIGNAL = 2.1; EXPRESSED IN BRAIN, SIGNAL = 2.5; EXPRESSED IN BONE MARROW, SIGNAL = 3.7; EXPRESSED IN HEART, SIGNAL = 1.2; SWISSPROT HIT: P00606, EVALUE 4.60e+00; EST_HUMAN HIT: AI761963.1, EVALUE 3.00e-13
CTRVRLSRTRVRLSCTRVRLSCTRVRLSCTRVRLSCTRVRLSCTRVRLSCTRDPRNT

SEQ ID NO: 40355 - protein, 43 aa, Homo sapiens
  MAP TO AC008521.5; EXPRESSED IN PLACENTA, SIGNAL = 1.4; EXPRESSED IN ADULT LIVER, SIGNAL = 2.8; EXPRESSED IN HEART, SIGNAL = 1.2; EXPRESSED IN FETAL LIVER, SIGNAL = 1.2; EXPRESSED IN BRAIN, SIGNAL = 1.5; EXPRESSED IN BONE MARROW, SIGNAL = 1.1; EXPRESSED IN HELA, SIGNAL = 2.3; EST_HUMAN HIT: BF196068.1, EVALUE 2.00e-16; SWISSPROT HIT: Q61085, EVALUE 2.00e-05
VATNSKVREQVRLELSFVNSDLQMLKEELEGLNISVGVYQNTE

SEQ ID NO: 40356 - protein, 18 aa, Homo sapiens
  MAP TO AL133173.13; EXPRESSED IN LUNG, SIGNAL = 4.4; EXPRESSED IN ADULT LIVER, SIGNAL = 3.7; EXPRESSED IN FETAL LIVER, SIGNAL = 6.4; EXPRESSED IN BRAIN, SIGNAL = 2.3; EXPRESSED IN BONE MARROW, SIGNAL = 5.9; EXPRESSED IN HELA, SIGNAL = 4.6; EXPRESSED IN PLACENTA, SIGNAL = 2.4; EXPRESSED IN HEART, SIGNAL = 2.1; EST_HUMAN HIT: R89343.1, EVALUE 1.60e+00
HALVVLVKSLACWWRLVI

SEQ ID NO: 40357 - protein, 54 aa, Homo sapiens
  MAP TO AC022262.3; EXPRESSED IN HEART, SIGNAL = 2.7; EXPRESSED IN BRAIN, SIGNAL = 3.4; EXPRESSED IN LUNG, SIGNAL =   3; EXPRESSED IN PLACENTA, SIGNAL =   3; EXPRESSED IN ADULT LIVER, SIGNAL = 3.2; EXPRESSED IN FETAL LIVER, SIGNAL = 2.9; EXPRESSED IN BONE MARROW, SIGNAL = 2.6; SWISSPROT HIT: P27119, EVALUE 4.00e-13; EST_HUMAN HIT: BF352776.1, EVALUE 1.00e-23
IASVINSALDLYFPEGCGVDIFAELGRYYVTSAFTVAVSIIAKKEVLLDQPGRE

SEQ ID NO: 40358 - protein, 81 aa, Homo sapiens
  MAP TO AC015897.3; EXPRESSED IN PLACENTA, SIGNAL = 2.7; EXPRESSED IN FETAL LIVER, SIGNAL = 2.3; EXPRESSED IN HEART, SIGNAL = 2.2; EXPRESSED IN BONE MARROW, SIGNAL = 2.6; EXPRESSED IN LUNG, SIGNAL = 3.1; EXPRESSED IN ADULT LIVER, SIGNAL = 2.7; EXPRESSED IN BRAIN, SIGNAL = 3.4; EXPRESSED IN HELA, SIGNAL = 2.9; EST_HUMAN HIT: AA128875.1, EVALUE 8.30e+00
MAEKFREEAVDEDPEEEEDKECTLETEAMQDRNSEGDGDMEGEGNTQKNEGMGGGRVVAVEVLHGGGETAETAAEEREVLA

SEQ ID NO: 40359 - protein, 90 aa, Homo sapiens
  MAP TO AC015897.3; EXPRESSED IN PLACENTA, SIGNAL = 2.7; EXPRESSED IN FETAL LIVER, SIGNAL = 2.3; EXPRESSED IN HEART, SIGNAL = 2.2; EXPRESSED IN BONE MARROW, SIGNAL = 2.6; EXPRESSED IN LUNG, SIGNAL = 3.1; EXPRESSED IN ADULT LIVER, SIGNAL = 2.7; EXPRESSED IN BRAIN, SIGNAL = 3.4; EXPRESSED IN HELA, SIGNAL = 2.9; SWISSPROT HIT: Q93100, EVALUE 8.50e+00; EST_HUMAN HIT: BE393918.1, EVALUE 5.10e-01
WQKSSGRKRWMRTQRRKRTKSALWRQKRCRTGTRKGTGTWKEKETHKRMRAWEEEGLWLWKFYTEVVKRQKQPQRRGRCWQVRRQPRRKQ

SEQ ID NO: 40360 - protein, 30 aa, Homo sapiens
  MAP TO AL139352.8; EXPRESSED IN ADULT LIVER, SIGNAL = 1.4; EXPRESSED IN PLACENTA, SIGNAL = 1.2; EXPRESSED IN FETAL LIVER, SIGNAL = 1.2; EXPRESSED IN BONE MARROW, SIGNAL = 1.3; EXPRESSED IN LUNG, SIGNAL = 1.4; EXPRESSED IN HEART, SIGNAL = 1.2; EXPRESSED IN BRAIN, SIGNAL = 1.3
AAGCAPHLLNPLGTPGGSGAHPPAGGFAQQ

SEQ ID NO: 40361 - protein, 30 aa, Homo sapiens
  MAP TO AL139352.8; EXPRESSED IN ADULT LIVER, SIGNAL = 1.4; EXPRESSED IN PLACENTA, SIGNAL = 1.2; EXPRESSED IN FETAL LIVER, SIGNAL = 1.2; EXPRESSED IN BONE MARROW, SIGNAL = 1.3; EXPRESSED IN LUNG, SIGNAL = 1.4; EXPRESSED IN HEART, SIGNAL = 1.2; EXPRESSED IN BRAIN, SIGNAL = 1.3; EST_HUMAN HIT: T56679.1, EVALUE 3.00e-01
GCWVCPSSSQPPGDPWRIWSTPSSWGICPA

SEQ ID NO: 40362 - protein, 68 aa, Homo sapiens
  MAP TO AC007956.5; EXPRESSED IN LUNG, SIGNAL = 1.1; EXPRESSED IN PLACENTA, SIGNAL = 1.8; EXPRESSED IN ADULT LIVER, SIGNAL = 3.6; EXPRESSED IN FETAL LIVER, SIGNAL = 1.9; EXPRESSED IN BRAIN, SIGNAL = 1.7; EXPRESSED IN HELA, SIGNAL = 3.4; EXPRESSED IN HEART, SIGNAL = 1.6; EXPRESSED IN BONE MARROW, SIGNAL = 1.9; SWISSPROT HIT: Q04674, EVALUE 1.20e+00; EST_HUMAN HIT: AU118051.1, EVALUE 1.00e-35
DEKNIVERNVSTSGVSIYFEAYLYNATNCSSTPWHLPPMHMTSSQRRPSTAVDEEDEDSPSECHTPEK

SEQ ID NO: 40363 - protein, 62 aa, Homo sapiens
  MAP TO AL158176.5; EXPRESSED IN ADULT LIVER, SIGNAL = 1.8; EXPRESSED IN HELA, SIGNAL = 2.6; EXPRESSED IN FETAL LIVER, SIGNAL = 1.5; EXPRESSED IN LUNG, SIGNAL = 1.6; EXPRESSED IN PLACENTA, SIGNAL = 1.6; EXPRESSED IN HEART, SIGNAL = 1.7; EXPRESSED IN BRAIN, SIGNAL = 1.5; EXPRESSED IN BONE MARROW, SIGNAL = 1.6; EST_HUMAN HIT: BE897259.1, EVALUE 8.00e-08
DTSPAPGSGRRSRPTALTLCSLALLTTRSFPGRNNKKWPIGWKPNCTNSLTVATFRTQSFMN

SEQ ID NO: 40364 - protein, 54 aa, Homo sapiens
  MAP TO AL136089.8; EXPRESSED IN PLACENTA, SIGNAL = 1.6; EXPRESSED IN HEART, SIGNAL = 1.4; EXPRESSED IN LUNG, SIGNAL = 1.5; EXPRESSED IN ADULT LIVER, SIGNAL = 1.8; EXPRESSED IN FETAL LIVER, SIGNAL = 1.6; EXPRESSED IN BRAIN, SIGNAL = 1.3; EXPRESSED IN BONE MARROW, SIGNAL = 1.3; SWISSPROT HIT: Q39055, EVALUE 1.00e-14; EST_HUMAN HIT: BE898369.1, EVALUE 1.00e-22
QLQRLEGLRTIGVTTNGINLARLLPQLQKAGLSAINISLDTLVPAKFEFIVRRK

SEQ ID NO: 40365 - protein, 58 aa, Homo sapiens
  MAP TO AC010876.2; EXPRESSED IN BONE MARROW, SIGNAL =   2; EXPRESSED IN ADULT LIVER, SIGNAL = 2.1; EXPRESSED IN HELA, SIGNAL = 2.7; EXPRESSED IN BRAIN, SIGNAL =   2; EXPRESSED IN LUNG, SIGNAL = 1.8; EXPRESSED IN HEART, SIGNAL =   2; EXPRESSED IN PLACENTA, SIGNAL = 2.1; EXPRESSED IN FETAL LIVER, SIGNAL = 1.9; SWISSPROT HIT: P13296, EVALUE 4.60e+00
MTTDIQTILQLLQKQTTVVPPAYSMVTAGSEYQRPIIQLMRTSQPEASIKTDRSFSPS

SEQ ID NO: 40366 - protein, 58 aa, Homo sapiens
  MAP TO AC008468.4; EXPRESSED IN PLACENTA, SIGNAL = 0.96; EXPRESSED IN FETAL LIVER, SIGNAL = 0.89; EXPRESSED IN ADULT LIVER, SIGNAL =   1; EXPRESSED IN BONE MARROW, SIGNAL =   1; EXPRESSED IN HEART, SIGNAL = 1.2; EXPRESSED IN BRAIN, SIGNAL = 1.2; EXPRESSED IN LUNG, SIGNAL = 1.1; EST_HUMAN HIT: AI969295.1, EVALUE 2.00e-25; SWISSPROT HIT: O95865, EVALUE 4.60e+00
EAKHGTFVGRIAQDLGLELAELVPRLFRVASKRHGDLLEVNLQNGILFVNSRIDREEL

SEQ ID NO: 40367 - protein, 31 aa, Homo sapiens
  MAP TO AC015807.3; EXPRESSED IN PLACENTA, SIGNAL = 3.1; EXPRESSED IN ADULT LIVER, SIGNAL = 3.5; EXPRESSED IN HEART, SIGNAL = 4.2; EXPRESSED IN FETAL LIVER, SIGNAL = 2.9; EXPRESSED IN BRAIN, SIGNAL = 2.9; EXPRESSED IN BONE MARROW, SIGNAL = 3.1; EXPRESSED IN LUNG, SIGNAL = 3.2; EXPRESSED IN HELA, SIGNAL = 4.3; SWISSPROT HIT: P23312, EVALUE 6.50e+00
DFFLRNGRVELPCTVVSKIMAKADLEEMRLG

SEQ ID NO: 40368 - protein, 26 aa, Homo sapiens
  MAP TO AC015873.2; EXPRESSED IN LUNG, SIGNAL = 3.3; EXPRESSED IN ADULT LIVER, SIGNAL =   3; EXPRESSED IN FETAL LIVER, SIGNAL = 3.2; EXPRESSED IN BRAIN, SIGNAL = 3.1; EXPRESSED IN BONE MARROW, SIGNAL = 3.4; EXPRESSED IN PLACENTA, SIGNAL = 2.7; EXPRESSED IN HEART, SIGNAL = 3.2
MKKLFWVEWPDALLAKPKVTKSCLIC

SEQ ID NO: 40369 - protein, 37 aa, Homo sapiens
  MAP TO AC016224.6; EXPRESSED IN PLACENTA, SIGNAL =   2; EXPRESSED IN HELA, SIGNAL = 2.3; EXPRESSED IN HEART, SIGNAL =   2; EXPRESSED IN FETAL LIVER, SIGNAL = 1.9; EXPRESSED IN BRAIN, SIGNAL = 2.1; EXPRESSED IN BONE MARROW, SIGNAL = 1.9; EXPRESSED IN LUNG, SIGNAL = 1.2
MSSSRAPLKVIFPSHFCLMSCDFLNFTISGRGGPADI

SEQ ID NO: 40370 - protein, 154 aa, Homo sapiens
  MAP TO AL121883.13; EXPRESSED IN ADULT LIVER, SIGNAL = 1.3; EXPRESSED IN HEART, SIGNAL = 1.2; EXPRESSED IN FETAL LIVER, SIGNAL = 1.5; EXPRESSED IN BONE MARROW, SIGNAL = 1.3; EXPRESSED IN LUNG, SIGNAL = 1.2; EXPRESSED IN PLACENTA, SIGNAL = 1.3; EXPRESSED IN BRAIN, SIGNAL = 1.2; EST_HUMAN HIT: BE745597.1, EVALUE 5.00e-69
SSQESYKSLEEAEDCYPPSLLTLDLRDLFNQVEQGPLLSCPKAGTDLSMGRAREVGWMAAGLMIGAGACYCVYKLTIGRDDSEKLEEEGEEEWDDDQELDEEEPDIWFDFETMARPWTEDGDWTEPGAPGGTEDRPSGGGKANRAHPIKQRPFP

SEQ ID NO: 40371 - protein, 25 aa, Homo sapiens
  MAP TO AL121883.13; EXPRESSED IN ADULT LIVER, SIGNAL = 1.3; EXPRESSED IN HEART, SIGNAL = 1.2; EXPRESSED IN FETAL LIVER, SIGNAL = 1.5; EXPRESSED IN BONE MARROW, SIGNAL = 1.3; EXPRESSED IN LUNG, SIGNAL = 1.2; EXPRESSED IN PLACENTA, SIGNAL = 1.3; EXPRESSED IN BRAIN, SIGNAL = 1.2; EST_HUMAN HIT: W31672.1, EVALUE 4.00e-09
IHHKRATRAWKKLKTATLHPYSPWT

SEQ ID NO: 40372 - protein, 58 aa, Homo sapiens
  MAP TO AL158046.1; EXPRESSED IN PLACENTA, SIGNAL = 0.72; EXPRESSED IN HEART, SIGNAL = 1.2; EXPRESSED IN BONE MARROW, SIGNAL = 0.49; EXPRESSED IN ADULT LIVER, SIGNAL = 0.58; EXPRESSED IN FETAL LIVER, SIGNAL = 0.55; EXPRESSED IN BRAIN, SIGNAL = 0.61; SWISSPROT HIT: P01860, EVALUE 2.70e+00; EST_HUMAN HIT: W68046.1, EVALUE 1.80e-01
PQQTETKLQPPEIRRTLQHVCVPVSTVFVWLSTPGDWDHPCPLCPKPHTQHLQQLANK

SEQ ID NO: 40373 - protein, 44 aa, Homo sapiens
  MAP TO AL138914.5; EXPRESSED IN LUNG, SIGNAL = 1.8; EXPRESSED IN PLACENTA, SIGNAL = 1.6; EXPRESSED IN HEART, SIGNAL = 1.6; EXPRESSED IN FETAL LIVER, SIGNAL = 1.6; EXPRESSED IN BRAIN, SIGNAL = 1.7; EXPRESSED IN BONE MARROW, SIGNAL = 1.6; EXPRESSED IN ADULT LIVER, SIGNAL = 1.6; SWISSPROT HIT: P93258, EVALUE 4.80e+00; EST_HUMAN HIT: BF217612.1, EVALUE 1.40e+00
MATQPTAFIEGTEVTCDVAGSRDGTGGWKVHGRGDGMEGRYTVW

SEQ ID NO: 40374 - protein, 44 aa, Homo sapiens
  MAP TO AL138914.5; EXPRESSED IN LUNG, SIGNAL = 1.8; EXPRESSED IN PLACENTA, SIGNAL = 1.6; EXPRESSED IN HEART, SIGNAL = 1.6; EXPRESSED IN FETAL LIVER, SIGNAL = 1.6; EXPRESSED IN BRAIN, SIGNAL = 1.7; EXPRESSED IN BONE MARROW, SIGNAL = 1.6; EXPRESSED IN ADULT LIVER, SIGNAL = 1.6; EST_HUMAN HIT: BE296478.1, EVALUE 1.10e+00
WPRSQQHSSRELRSHVMWQDPGMGLEVGRCMGVEMGWREGTQCG

SEQ ID NO: 40375 - protein, 42 aa, Homo sapiens
  MAP TO AL158049.2; EXPRESSED IN PLACENTA, SIGNAL = 2.3; EXPRESSED IN ADULT LIVER, SIGNAL = 2.5; EXPRESSED IN HELA, SIGNAL = 3.9; EXPRESSED IN HEART, SIGNAL = 2.4; EXPRESSED IN BONE MARROW, SIGNAL = 2.3; EXPRESSED IN LUNG, SIGNAL = 2.3; EXPRESSED IN BRAIN, SIGNAL = 1.9; EXPRESSED IN FETAL LIVER, SIGNAL = 2.2; SWISSPROT HIT: P45988, EVALUE 4.80e+00
ERRNKILGRLKQTTNKVKTGSKLSSVAGNDMCYGGKQSRKET

SEQ ID NO: 40376 - protein, 50 aa, Homo sapiens
  MAP TO AL132654.12; EXPRESSED IN LUNG, SIGNAL = 2.5; EXPRESSED IN HEART, SIGNAL = 2.2; EXPRESSED IN BONE MARROW, SIGNAL = 2.2; EXPRESSED IN ADULT LIVER, SIGNAL = 2.8; EXPRESSED IN BRAIN, SIGNAL = 2.3; EXPRESSED IN PLACENTA, SIGNAL = 2.2; EXPRESSED IN FETAL LIVER, SIGNAL = 2.3; EST_HUMAN HIT: AU137048.1, EVALUE 3.00e-18; SWISSPROT HIT: Q14693, EVALUE 2.00e-19
NGYKFLYCSARAIGMADLTKGYLQWVSEGGCSLPKGPILLSPSSLFSALH

SEQ ID NO: 40377 - protein, 24 aa, Homo sapiens
  MAP TO AL132654.12; EXPRESSED IN LUNG, SIGNAL = 2.5; EXPRESSED IN HEART, SIGNAL = 2.2; EXPRESSED IN BONE MARROW, SIGNAL = 2.2; EXPRESSED IN ADULT LIVER, SIGNAL = 2.8; EXPRESSED IN BRAIN, SIGNAL = 2.3; EXPRESSED IN PLACENTA, SIGNAL = 2.2; EXPRESSED IN FETAL LIVER, SIGNAL = 2.3; EST_HUMAN HIT: AI208765.1, EVALUE 9.00e-08
MGTSSCTARRGPLAWRTSPRGTCS

SEQ ID NO: 40378 - protein, 67 aa, Homo sapiens
  MAP TO AC013800.3; EXPRESSED IN LUNG, SIGNAL = 3.4; EXPRESSED IN PLACENTA, SIGNAL = 2.8; EXPRESSED IN ADULT LIVER, SIGNAL = 2.1; EXPRESSED IN HEART, SIGNAL = 2.8; EXPRESSED IN BRAIN, SIGNAL = 2.7; EXPRESSED IN FETAL LIVER, SIGNAL = 2.5; EXPRESSED IN BONE MARROW, SIGNAL = 2.3; EST_HUMAN HIT: AA416550.1, EVALUE 2.00e-04; SWISSPROT HIT: P97435, EVALUE 1.00e-07
LHFLVFDTEEVHDVLRIWDGPVESGVLLKELSGPALPKDLHSTFNSVVLQFSTDFFTSKQGFAIQFS

SEQ ID NO: 40379 - protein, 27 aa, Homo sapiens
  MAP TO AC013800.3; EXPRESSED IN LUNG, SIGNAL = 3.4; EXPRESSED IN PLACENTA, SIGNAL = 2.8; EXPRESSED IN ADULT LIVER, SIGNAL = 2.1; EXPRESSED IN HEART, SIGNAL = 2.8; EXPRESSED IN BRAIN, SIGNAL = 2.7; EXPRESSED IN FETAL LIVER, SIGNAL = 2.5; EXPRESSED IN BONE MARROW, SIGNAL = 2.3; EST_HUMAN HIT: BF316804.1, EVALUE 6.10e+00
YTSWCLTQRRFTTCCASGMGLWRAGFC

SEQ ID NO: 40380 - protein, 95 aa, Homo sapiens
  MAP TO AC025226.2; EXPRESSED IN ADULT LIVER, SIGNAL = 1.6; EXPRESSED IN BONE MARROW, SIGNAL = 1.2; EXPRESSED IN LUNG, SIGNAL = 1.2; EXPRESSED IN PLACENTA, SIGNAL = 1.1; EXPRESSED IN HEART, SIGNAL = 2.7; EXPRESSED IN FETAL LIVER, SIGNAL = 1.3; EXPRESSED IN BRAIN, SIGNAL = 1.5; EST_HUMAN HIT: X97511.1, EVALUE 2.00e-12
REKLSNLQGTLVSTSSSVRNVGAASASPAQQLALSPPAGCATSAAFALLRASSIMALVSAVSRASSTTAPLMMKTTVLMSPALVGLVLALSAGQP

SEQ ID NO: 40381 - protein, 48 aa, Homo sapiens
  MAP TO AL121908.7; EXPRESSED IN ADULT LIVER, SIGNAL = 6.1; EXPRESSED IN HELA, SIGNAL = 7.7; EXPRESSED IN FETAL LIVER, SIGNAL =   6; EXPRESSED IN BRAIN, SIGNAL = 6.1; EXPRESSED IN LUNG, SIGNAL = 5.4; EXPRESSED IN PLACENTA, SIGNAL = 5.5; EXPRESSED IN HEART, SIGNAL = 5.2; EXPRESSED IN BONE MARROW, SIGNAL =   6; EST_HUMAN HIT: AW816517.1, EVALUE 8.80e+00
GSFVCFRVVCERRRSDLEPDPPLAANIRVLSVVCLFTLFMVSLVDRSF

SEQ ID NO: 40382 - protein, 49 aa, Homo sapiens
  MAP TO AL121908.7; EXPRESSED IN ADULT LIVER, SIGNAL = 6.1; EXPRESSED IN HELA, SIGNAL = 7.7; EXPRESSED IN FETAL LIVER, SIGNAL =   6; EXPRESSED IN BRAIN, SIGNAL = 6.1; EXPRESSED IN LUNG, SIGNAL = 5.4; EXPRESSED IN PLACENTA, SIGNAL = 5.5; EXPRESSED IN HEART, SIGNAL = 5.2; EXPRESSED IN BONE MARROW, SIGNAL =   6; EST_HUMAN HIT: AW500135.1, EVALUE 8.70e+00
GGRSCVSEWFVSAVDLIWNPILRWLQIFVSCLLCVFSLCLWCPWLIEAF

SEQ ID NO: 40383 - protein, 49 aa, Homo sapiens
  MAP TO AL133544.5; EXPRESSED IN LUNG, SIGNAL = 5.3; EXPRESSED IN HEART, SIGNAL = 3.7; EXPRESSED IN BONE MARROW, SIGNAL = 6.6; EXPRESSED IN BRAIN, SIGNAL = 6.6; EXPRESSED IN FETAL LIVER, SIGNAL = 5.1; EXPRESSED IN HELA, SIGNAL = 4.4; EXPRESSED IN ADULT LIVER, SIGNAL = 7.3; EXPRESSED IN PLACENTA, SIGNAL = 3.7; EST_HUMAN HIT: AW818408.1, EVALUE 3.00e-12; SWISSPROT HIT: P35672, EVALUE 4.70e+00
WGPVSQLLWLQLWLKGAKIQLRLLIQRVKASSLGSFHVVLSLWVCRRQE

SEQ ID NO: 40384 - protein, 55 aa, Homo sapiens
  MAP TO AL133319.21; EXPRESSED IN PLACENTA, SIGNAL = 1.1; EXPRESSED IN ADULT LIVER, SIGNAL = 1.2; EXPRESSED IN FETAL LIVER, SIGNAL = 0.95; EXPRESSED IN LUNG, SIGNAL = 0.99; EXPRESSED IN HEART, SIGNAL = 1.2; EXPRESSED IN BRAIN, SIGNAL = 1.1; EXPRESSED IN BONE MARROW, SIGNAL = 0.97; EST_HUMAN HIT: AA442861.1, EVALUE 3.70e+00; SWISSPROT HIT: P43372, EVALUE 3.50e+00
TLLLSSTITINFNYVSDSHTSFCIVLICFSSNLEYSIPTLKLKIRTYFKYQFHQE

SEQ ID NO: 40385 - protein, 98 aa, Homo sapiens
  MAP TO AC020906.3; EXPRESSED IN PLACENTA, SIGNAL = 3.8; EXPRESSED IN FETAL LIVER, SIGNAL = 3.4; EXPRESSED IN ADULT LIVER, SIGNAL = 4.4; EXPRESSED IN BONE MARROW, SIGNAL = 3.6; EXPRESSED IN HEART, SIGNAL = 4.2; EXPRESSED IN BRAIN, SIGNAL = 3.9; EXPRESSED IN LUNG, SIGNAL = 4.3; EST_HUMAN HIT: BE763051.1, EVALUE 1.00e-21; SWISSPROT HIT: P35580, EVALUE 3.00e-16
CKVPVVINDKTLDLWPRSLKLTLTSFSLSLHLHLTVEGIVGLEQVSSLGDGPPGGRPRRGMFRTVGQLYKESLSRLMATLSNTNPSFVRCIVPNHEKR

SEQ ID NO: 40386 - protein, 27 aa, Homo sapiens
  MAP TO AL158059.2; EXPRESSED IN ADULT LIVER, SIGNAL = 2.2; EXPRESSED IN HELA, SIGNAL = 3.2; EXPRESSED IN HEART, SIGNAL = 2.3; EXPRESSED IN FETAL LIVER, SIGNAL = 2.2; EXPRESSED IN BRAIN, SIGNAL = 1.9; EXPRESSED IN LUNG, SIGNAL = 1.9; EXPRESSED IN PLACENTA, SIGNAL = 1.9; EXPRESSED IN BONE MARROW, SIGNAL =   2; SWISSPROT HIT: O44001, EVALUE 8.60e+00
PNSLPVELCVHDEFEQQVKQNEREERK

SEQ ID NO: 40387 - protein, 105 aa, Homo sapiens; identical to SEQ ID NO: 34334
  MAP TO AC008164.3; EXPRESSED IN BONE MARROW, SIGNAL = 1.8; EXPRESSED IN ADULT LIVER, SIGNAL = 1.4; EXPRESSED IN BRAIN, SIGNAL = 1.6; EXPRESSED IN LUNG, SIGNAL = 1.3; EXPRESSED IN PLACENTA, SIGNAL = 1.1; EXPRESSED IN HEART, SIGNAL = 1.2; EXPRESSED IN FETAL LIVER, SIGNAL = 1.6; EST_HUMAN HIT: AA971603.1, EVALUE 5.00e-37; SWISSPROT HIT: P19028, EVALUE 2.00e-07

SEQ ID NO: 40388 - protein, 18 aa, Homo sapiens
  MAP TO AC008164.3; EXPRESSED IN BONE MARROW, SIGNAL = 1.8; EXPRESSED IN ADULT LIVER, SIGNAL = 1.4; EXPRESSED IN BRAIN, SIGNAL = 1.6; EXPRESSED IN LUNG, SIGNAL = 1.3; EXPRESSED IN PLACENTA, SIGNAL = 1.1; EXPRESSED IN HEART, SIGNAL = 1.2; EXPRESSED IN FETAL LIVER, SIGNAL = 1.6
DFQESRSGSGSSTPHPHP

SEQ ID NO: 40389 - protein, 71 aa, Homo sapiens
  MAP TO AC024196.2; EXPRESSED IN LUNG, SIGNAL = 2.5; EXPRESSED IN PLACENTA, SIGNAL = 2.7; EXPRESSED IN ADULT LIVER, SIGNAL =   2; EXPRESSED IN HEART, SIGNAL = 2.3; EXPRESSED IN FETAL LIVER, SIGNAL = 1.9; EXPRESSED IN BONE MARROW, SIGNAL = 1.7; EXPRESSED IN BRAIN, SIGNAL = 1.7; EST_HUMAN HIT: BE614844.1, EVALUE 4.00e-20; SWISSPROT HIT: P13647, EVALUE 3.00e-21
VRFLEQQNQVLETKWNLLQQLDLNNCRKNLEPIYEGYISNLQKQLEMLSGDGVRLDSELRNMQDLVEDYKK

SEQ ID NO: 40390 - protein, 19 aa, Homo sapiens
  MAP TO AL136363.4; EXPRESSED IN ADULT LIVER, SIGNAL = 0.86; EXPRESSED IN HEART, SIGNAL = 1.3; EXPRESSED IN BONE MARROW, SIGNAL =   1; EXPRESSED IN LUNG, SIGNAL = 1.1; EXPRESSED IN BRAIN, SIGNAL = 0.86; EXPRESSED IN PLACENTA, SIGNAL = 0.99; EXPRESSED IN FETAL LIVER, SIGNAL = 0.89; EST_HUMAN HIT: AW297838.1, EVALUE 7.30e-01
LQVSQLWIPAPAFMEVTGE

SEQ ID NO: 40391 - protein, 83 aa, Homo sapiens
  MAP TO AC015599.3; EXPRESSED IN LUNG, SIGNAL = 3.6; EXPRESSED IN PLACENTA, SIGNAL = 3.5; EXPRESSED IN HELA, SIGNAL =   5; EXPRESSED IN FETAL LIVER, SIGNAL = 3.6; EXPRESSED IN BONE MARROW, SIGNAL = 3.7; EXPRESSED IN HEART, SIGNAL = 3.7; EXPRESSED IN ADULT LIVER, SIGNAL = 3.7; EXPRESSED IN BRAIN, SIGNAL = 3.3; EST_HUMAN HIT: AA677035.1, EVALUE 1.80e+00; SWISSPROT HIT: Q9W0Y1, EVALUE 5.00e+00
KSVILLQKGLALPLPHHSFLITTSHPFFASHRTCHKAPALEEVCPLAHSSVKLQVHQELFLVYGKHVKIWCVNVQVHKKGIQV

SEQ ID NO: 40392 - protein, 27 aa, Homo sapiens
  MAP TO AC020704.3; EXPRESSED IN LUNG, SIGNAL = 2.6; EXPRESSED IN PLACENTA, SIGNAL = 1.9; EXPRESSED IN FETAL LIVER, SIGNAL = 2.6; EXPRESSED IN ADULT LIVER, SIGNAL = 2.3; EXPRESSED IN HEART, SIGNAL = 2.7; EXPRESSED IN BRAIN, SIGNAL = 2.5; EXPRESSED IN BONE MARROW, SIGNAL = 3.4; EST_HUMAN HIT: BE791855.1, EVALUE 5.00e-03
QVLMEMLQQVIQKIQLRSSMKVATLNS

SEQ ID NO: 40393 - protein, 29 aa, Homo sapiens
  MAP TO AC013591.3; EXPRESSED IN HEART, SIGNAL =   2; EXPRESSED IN LUNG, SIGNAL = 2.6; EXPRESSED IN PLACENTA, SIGNAL =   2; EXPRESSED IN ADULT LIVER, SIGNAL = 1.9; EXPRESSED IN BRAIN, SIGNAL = 3.3; EXPRESSED IN FETAL LIVER, SIGNAL = 2.3; EXPRESSED IN BONE MARROW, SIGNAL = 2.1
RLNMLCLNSSNMRSPSMYICSMVEPTLVS

SEQ ID NO: 40394 - protein, 67 aa, Homo sapiens
  MAP TO AC019214.2; EXPRESSED IN LUNG, SIGNAL = 3.7; EXPRESSED IN BONE MARROW, SIGNAL = 3.2; EXPRESSED IN BRAIN, SIGNAL = 3.3; EXPRESSED IN FETAL LIVER, SIGNAL = 5.9; EXPRESSED IN HEART, SIGNAL = 3.1; EXPRESSED IN HELA, SIGNAL = 3.4; EXPRESSED IN ADULT LIVER, SIGNAL = 3.9; EXPRESSED IN PLACENTA, SIGNAL = 3.6; SWISSPROT HIT: P16144, EVALUE 3.00e-40; EST_HUMAN HIT: BF204513.1, EVALUE 4.00e-11
SGQTCNCSTGSLSDIQPCLREGEDKPCSGRGECQCGHCVCYGEGRYEGQFCEYDNFQCPRTSGFLCN

SEQ ID NO: 40395 - protein, 35 aa, Homo sapiens
  MAP TO AL136320.7; EXPRESSED IN PLACENTA, SIGNAL = 2.4; EXPRESSED IN FETAL LIVER, SIGNAL =   2; EXPRESSED IN HELA, SIGNAL = 2.9; EXPRESSED IN HEART, SIGNAL = 2.4; EXPRESSED IN BONE MARROW, SIGNAL = 2.4; EXPRESSED IN LUNG, SIGNAL = 1.5; EXPRESSED IN BRAIN, SIGNAL = 1.9
EGSFFEHVLCISDPVSGALHVSSFCPYQNPEGRWW

SEQ ID NO: 40396 - protein, 30 aa, Homo sapiens
  MAP TO AC019221.3; EXPRESSED IN ADULT LIVER, SIGNAL =  10; EXPRESSED IN HELA, SIGNAL =  14; EXPRESSED IN BRAIN, SIGNAL = 8.2; EXPRESSED IN BONE MARROW, SIGNAL = 8.6; EXPRESSED IN LUNG, SIGNAL = 9.7; EXPRESSED IN PLACENTA, SIGNAL = 9.4; EXPRESSED IN HEART, SIGNAL = 9.7; EXPRESSED IN FETAL LIVER, SIGNAL = 8.6; EST_HUMAN HIT: AW502172.1, EVALUE 3.50e+00
MSWEIVKGGAWPTEGSTIVSTSSAGLAKEG

SEQ ID NO: 40397 - protein, 47 aa, Homo sapiens
  MAP TO AC026437.1; EXPRESSED IN ADULT LIVER, SIGNAL = 1.7; EXPRESSED IN HELA, SIGNAL = 2.7; EXPRESSED IN HEART, SIGNAL = 1.9; EXPRESSED IN BRAIN, SIGNAL = 1.8; EXPRESSED IN BONE MARROW, SIGNAL = 1.6; EXPRESSED IN LUNG, SIGNAL = 1.7; EXPRESSED IN PLACENTA, SIGNAL = 1.6; EXPRESSED IN FETAL LIVER, SIGNAL = 1.9; EST_HUMAN HIT: BE793798.1, EVALUE 4.00e-22; SWISSPROT HIT: P30026, EVALUE 8.10e+00
HLECREPLLIPILSLYMGALVRCTTLCLGYYKNIHDIIPDRSGPELG

SEQ ID NO: 40398 - protein, 42 aa, Homo sapiens
  MAP TO AL117381.9; EXPRESSED IN ADULT LIVER, SIGNAL = 1.9; EXPRESSED IN HEART, SIGNAL = 1.6; EXPRESSED IN LUNG, SIGNAL = 2.2; EXPRESSED IN PLACENTA, SIGNAL = 1.5; EXPRESSED IN FETAL LIVER, SIGNAL = 4.1; EXPRESSED IN BRAIN, SIGNAL =   2; EXPRESSED IN BONE MARROW, SIGNAL = 5.5; EST_HUMAN HIT: BE378810.1, EVALUE 2.00e-17; SWISSPROT HIT: Q07817, EVALUE 1.00e-18
DTFVELYGNNAAAESRKGQERFNRWFLTGMTVAGVVLLGSLF

SEQ ID NO: 40399 - protein, 26 aa, Homo sapiens
  MAP TO AL117381.9; EXPRESSED IN ADULT LIVER, SIGNAL = 1.9; EXPRESSED IN HEART, SIGNAL = 1.6; EXPRESSED IN LUNG, SIGNAL = 2.2; EXPRESSED IN PLACENTA, SIGNAL = 1.5; EXPRESSED IN FETAL LIVER, SIGNAL = 4.1; EXPRESSED IN BRAIN, SIGNAL =   2; EXPRESSED IN BONE MARROW, SIGNAL = 5.5; EST_HUMAN HIT: BE395937.1, EVALUE 1.00e-07
ILLWNSMGTMQQPRAERARNASTAGS

SEQ ID NO: 40400 - protein, 60 aa, Homo sapiens
  MAP TO AL133419.11; EXPRESSED IN LUNG, SIGNAL = 1.1; EXPRESSED IN ADULT LIVER, SIGNAL = 1.4; EXPRESSED IN FETAL LIVER, SIGNAL = 1.2; EXPRESSED IN BRAIN, SIGNAL = 1.2; EXPRESSED IN PLACENTA, SIGNAL = 1.3; EXPRESSED IN HEART, SIGNAL = 1.2; EXPRESSED IN BONE MARROW, SIGNAL = 1.1
SSLQFQDRCTKFLNSFLSFRHNFNEVKLGNKIHSIYCLLSLVHSSLIVSSRDSLFSFLAL

SEQ ID NO: 40401 - protein, 39 aa, Homo sapiens
  MAP TO AC022392.3; EXPRESSED IN PLACENTA, SIGNAL = 1.5; EXPRESSED IN FETAL LIVER, SIGNAL = 1.3; EXPRESSED IN ADULT LIVER, SIGNAL = 1.8; EXPRESSED IN BRAIN, SIGNAL = 1.4; EXPRESSED IN BONE MARROW, SIGNAL = 1.4; EXPRESSED IN LUNG, SIGNAL = 1.7; EXPRESSED IN HEART, SIGNAL = 1.4; EST_HUMAN HIT: BE543503.1, EVALUE 3.00e-16
DISGGKPLEVEMAGIEYMNDDPGMVDVLYAKVHMKDGSN

SEQ ID NO: 40402 - protein, 50 aa, Homo sapiens
  MAP TO AC022882.3; EXPRESSED IN HELA, SIGNAL =  12; EXPRESSED IN LUNG, SIGNAL = 9.7; EXPRESSED IN PLACENTA, SIGNAL = 2.7; EXPRESSED IN ADULT LIVER, SIGNAL = 9.5; EXPRESSED IN FETAL LIVER, SIGNAL =  19; EXPRESSED IN BRAIN, SIGNAL = 8.1; EXPRESSED IN BONE MARROW, SIGNAL =  13; EXPRESSED IN HEART, SIGNAL = 5.7; SWISSPROT HIT: Q55470, EVALUE 3.60e+00; EST_HUMAN HIT: BE275664.1, EVALUE 2.00e-20
LAWTRSMKAKWRRLVMNTMWKALMVSQVPLPAIWVQALPELPLAIKFLAP

SEQ ID NO: 40403 - protein, 29 aa, Homo sapiens
  MAP TO AC022860.3; EXPRESSED IN BONE MARROW, SIGNAL = 5.2; EXPRESSED IN ADULT LIVER, SIGNAL = 4.9; EXPRESSED IN HELA, SIGNAL = 6.9; EXPRESSED IN BRAIN, SIGNAL = 3.2; EXPRESSED IN LUNG, SIGNAL = 5.3; EXPRESSED IN PLACENTA, SIGNAL = 2.2; EXPRESSED IN HEART, SIGNAL = 3.5; EXPRESSED IN FETAL LIVER, SIGNAL = 6.8
AENLPQRCWGQQLLQSAHTAHAVPLECVS

SEQ ID NO: 40404 - protein, 57 aa, Homo sapiens
  MAP TO AL078591.18; EXPRESSED IN LUNG, SIGNAL = 1.9; EXPRESSED IN PLACENTA, SIGNAL = 2.3; EXPRESSED IN FETAL LIVER, SIGNAL = 2.4; EXPRESSED IN BRAIN, SIGNAL = 2.5; EXPRESSED IN BONE MARROW, SIGNAL =   2; EXPRESSED IN ADULT LIVER, SIGNAL =   2; EXPRESSED IN HELA, SIGNAL = 2.5; EXPRESSED IN HEART, SIGNAL =   2; SWISSPROT HIT: Q26563, EVALUE 2.70e+00; EST_HUMAN HIT: BE169919.1, EVALUE 6.20e+00
ADDLNALQLISSRTLKLHFSPHRGLHHHVNVMFDYFHLSVVSVTVHASLVALHQPLI

SEQ ID NO: 40405 - protein, 128 aa, Homo sapiens
  MAP TO AL121673.27; EXPRESSED IN PLACENTA, SIGNAL = 3.7; EXPRESSED IN ADULT LIVER, SIGNAL = 4.3; EXPRESSED IN FETAL LIVER, SIGNAL = 3.3; EXPRESSED IN BRAIN, SIGNAL = 3.7; EXPRESSED IN LUNG, SIGNAL = 3.6; EXPRESSED IN HEART, SIGNAL = 3.5; EXPRESSED IN BONE MARROW, SIGNAL = 3.5; EXPRESSED IN HELA, SIGNAL = 4.3; EST_HUMAN HIT: AI624282.1, EVALUE 1.30e+00; SWISSPROT HIT: Q02085, EVALUE 6.60e-01
PQLLRTHPEARPKSAMAQTFVHQGPVALQQLTTNRGVETSMSSDGPAVRSPTPSPWADVCASRADAVAFPASGSCHSPWLMAPSSHPLNPHSPLNLPPPSFHCKDPVMTLHPQTLVTQGHLSTSGRLT

SEQ ID NO: 40406 - protein, 106 aa, Homo sapiens
  MAP TO AL133174.9; EXPRESSED IN LUNG, SIGNAL = 2.2; EXPRESSED IN PLACENTA, SIGNAL = 2.2; EXPRESSED IN HEART, SIGNAL = 2.2; EXPRESSED IN BONE MARROW, SIGNAL = 2.6; EXPRESSED IN ADULT LIVER, SIGNAL = 2.9; EXPRESSED IN FETAL LIVER, SIGNAL = 3.1; EXPRESSED IN BRAIN, SIGNAL = 2.6; EST_HUMAN HIT: BE674157.1, EVALUE 1.00e-56; SWISSPROT HIT: Q9Z108, EVALUE 6.00e-54
NKEDEFRMPYLSHQQLPAGILPMVPEVAQAVGVSQGHHTKDFTRAAPNPAKATVTAMIARELLYGGTSPTAETILKNNISSGHVPHGPLTRPSEQLDYLSRVQGFQ

SEQ ID NO: 40407 - protein, 79 aa, Homo sapiens
  MAP TO AL135998.2; EXPRESSED IN ADULT LIVER, SIGNAL = 1.3; EXPRESSED IN BRAIN, SIGNAL = 1.2; EXPRESSED IN LUNG, SIGNAL = 1.7; EXPRESSED IN PLACENTA, SIGNAL =   2; EXPRESSED IN HEART, SIGNAL = 1.4; EXPRESSED IN FETAL LIVER, SIGNAL = 1.3; EXPRESSED IN BONE MARROW, SIGNAL = 1.2; EST_HUMAN HIT: AI885671.1, EVALUE 1.00e-42; SWISSPROT HIT: P50281, EVALUE 2.00e-43
IQNYTPKVGEYATYEAIRKAFRVWESATPLRFREVPYAYIREGHEKQADIMIFFAEGFHGDSTPFDGEGGFLAHAYFPG

SEQ ID NO: 40408 - protein, 35 aa, Homo sapiens
  MAP TO AC019042.3; EXPRESSED IN HELA, SIGNAL = 3.9; EXPRESSED IN BONE MARROW, SIGNAL = 3.2; EXPRESSED IN BRAIN, SIGNAL = 3.7; EXPRESSED IN FETAL LIVER, SIGNAL = 2.6; EXPRESSED IN HEART, SIGNAL = 3.4; EXPRESSED IN ADULT LIVER, SIGNAL = 1.4; EXPRESSED IN PLACENTA, SIGNAL = 2.3; EXPRESSED IN LUNG, SIGNAL = 2.3; EST_HUMAN HIT: BE062167.1, EVALUE 3.00e-09
RLVALTKTLTVIWTMKSRLRWSQMEMRNLLGTGAK

SEQ ID NO: 40409 - protein, 35 aa, Homo sapiens
  MAP TO AC009503.3; EXPRESSED IN LUNG, SIGNAL = 1.3; EXPRESSED IN PLACENTA, SIGNAL = 1.1; EXPRESSED IN FETAL LIVER, SIGNAL = 1.2; EXPRESSED IN BONE MARROW, SIGNAL = 1.1; EXPRESSED IN ADULT LIVER, SIGNAL =   1; EXPRESSED IN HEART, SIGNAL = 1.2; EXPRESSED IN BRAIN, SIGNAL = 1.2; EST_HUMAN HIT: AI248042.1, EVALUE 9.00e-03
FEIECVFHTYSKSQFKLATFQMLNGYWQLHWMAQL

SEQ ID NO: 40410 - protein, 27 aa, Homo sapiens
  MAP TO AC024196.2; EXPRESSED IN HELA, SIGNAL = 5.6; EXPRESSED IN LUNG, SIGNAL = 6.7; EXPRESSED IN ADULT LIVER, SIGNAL =   6; EXPRESSED IN BRAIN, SIGNAL = 6.2; EXPRESSED IN BONE MARROW, SIGNAL = 7.4; EXPRESSED IN PLACENTA, SIGNAL = 7.3; EXPRESSED IN HEART, SIGNAL =   7; EXPRESSED IN FETAL LIVER, SIGNAL = 6.6; SWISSPROT HIT: P23805, EVALUE 2.90e+00; EST_HUMAN HIT: BF310156.1, EVALUE 7.90e+00
QQPGDQAQLGPRSPPHLPNPCSCRSFL

SEQ ID NO: 40411 - protein, 27 aa, Homo sapiens
  MAP TO AC024196.2; EXPRESSED IN HELA, SIGNAL = 5.6; EXPRESSED IN LUNG, SIGNAL = 6.7; EXPRESSED IN ADULT LIVER, SIGNAL =   6; EXPRESSED IN BRAIN, SIGNAL = 6.2; EXPRESSED IN BONE MARROW, SIGNAL = 7.4; EXPRESSED IN PLACENTA, SIGNAL = 7.3; EXPRESSED IN HEART, SIGNAL =   7; EXPRESSED IN FETAL LIVER, SIGNAL = 6.6
PAARRSSSAGSQEPSASSEPLLLQELS

SEQ ID NO: 40412 - protein, 28 aa, Homo sapiens
  MAP TO AL139423.2; EXPRESSED IN LUNG, SIGNAL = 2.5; EXPRESSED IN ADULT LIVER, SIGNAL = 4.5; EXPRESSED IN HEART, SIGNAL = 3.4; EXPRESSED IN FETAL LIVER, SIGNAL = 2.1; EXPRESSED IN BRAIN, SIGNAL = 2.3; EXPRESSED IN PLACENTA, SIGNAL = 3.3; EXPRESSED IN BONE MARROW, SIGNAL = 2.2; EST_HUMAN HIT: AA114294.1, EVALUE 6.00e-07
MQGDVGWSSLSFSKQWRASLYDEQQLLK

SEQ ID NO: 40413 - protein, 26 aa, Homo sapiens
  MAP TO AL139423.2; EXPRESSED IN LUNG, SIGNAL = 2.5; EXPRESSED IN ADULT LIVER, SIGNAL = 4.5; EXPRESSED IN HEART, SIGNAL = 3.4; EXPRESSED IN FETAL LIVER, SIGNAL = 2.1; EXPRESSED IN BRAIN, SIGNAL = 2.3; EXPRESSED IN PLACENTA, SIGNAL = 3.3; EXPRESSED IN BONE MARROW, SIGNAL = 2.2; EST_HUMAN HIT: AA114294.1, EVALUE 1.00e-06; SWISSPROT HIT: P16380, EVALUE 8.70e+00
CKVTWDGLPCLSPSNGGLPSTMNSSS

SEQ ID NO: 40414 - protein, 52 aa, Homo sapiens
  MAP TO AC021677.3; EXPRESSED IN LUNG, SIGNAL =  11; EXPRESSED IN PLACENTA, SIGNAL =  16; EXPRESSED IN ADULT LIVER, SIGNAL = 8.1; EXPRESSED IN HEART, SIGNAL =  13; EXPRESSED IN FETAL LIVER, SIGNAL =  14; EXPRESSED IN BRAIN, SIGNAL =  11; EXPRESSED IN BONE MARROW, SIGNAL =  14; EXPRESSED IN HELA, SIGNAL =  21; EST_HUMAN HIT: BE259364.1, EVALUE 2.20e+00; SWISSPROT HIT: Q42870, EVALUE 4.70e+00
CIRFTWWIQTWSVIQREMAVHREVIYHIVISTHMPWASWNFRILIIPMSVEI

SEQ ID NO: 40415 - protein, 98 aa, Homo sapiens
  MAP TO AC024196.2; EXPRESSED IN LUNG, SIGNAL = 1.5; EXPRESSED IN PLACENTA, SIGNAL = 1.5; EXPRESSED IN ADULT LIVER, SIGNAL = 1.4; EXPRESSED IN HEART, SIGNAL = 1.3; EXPRESSED IN FETAL LIVER, SIGNAL = 1.4; EXPRESSED IN BRAIN, SIGNAL = 1.1; EXPRESSED IN BONE MARROW, SIGNAL = 1.3
VVTSSVSSGYGSGSGYGGGLGGGLGGGLGGGLAGGSSGSYYSSSSGGVGLGGGLSVGGSGFSASSGRGLGVGFGSGGGSSSSVKFVSTTSSSRKSFKS

SEQ ID NO: 40416 - protein, 50 aa, Homo sapiens
  MAP TO AC024196.2; EXPRESSED IN LUNG, SIGNAL = 1.5; EXPRESSED IN PLACENTA, SIGNAL = 1.5; EXPRESSED IN ADULT LIVER, SIGNAL = 1.4; EXPRESSED IN HEART, SIGNAL = 1.3; EXPRESSED IN FETAL LIVER, SIGNAL = 1.4; EXPRESSED IN BRAIN, SIGNAL = 1.1; EXPRESSED IN BONE MARROW, SIGNAL = 1.3
LLSQAVFPLDMAVAVAMAVASVEVLAAASVEVLPEVAVEATTPAAVGVSA

SEQ ID NO: 40417 - protein, 47 aa, Homo sapiens
  MAP TO AC013746.4; EXPRESSED IN LUNG, SIGNAL = 3.5; EXPRESSED IN PLACENTA, SIGNAL = 3.2; EXPRESSED IN ADULT LIVER, SIGNAL = 2.1; EXPRESSED IN FETAL LIVER, SIGNAL = 4.1; EXPRESSED IN BRAIN, SIGNAL = 1.9; EXPRESSED IN HELA, SIGNAL = 5.3; EXPRESSED IN HEART, SIGNAL = 2.7; EXPRESSED IN BONE MARROW, SIGNAL = 3.9; SWISSPROT HIT: P35679, EVALUE 6.20e+00
MKTWKECTVMVTIGGNRIQSLTSAEADGIPQLKVRNSKKIMEFRDME

SEQ ID NO: 40418 - protein, 34 aa, Homo sapiens
  MAP TO AP001254.2; EXPRESSED IN LUNG, SIGNAL = 1.3; EXPRESSED IN ADULT LIVER, SIGNAL = 1.3; EXPRESSED IN FETAL LIVER, SIGNAL = 0.97; EXPRESSED IN BRAIN, SIGNAL = 1.2; EXPRESSED IN PLACENTA, SIGNAL = 1.2; EXPRESSED IN HEART, SIGNAL = 1.2; EXPRESSED IN BONE MARROW, SIGNAL = 1.2; EST_HUMAN HIT: AW839877.1, EVALUE 2.00e-04
SATCETARETFLLPPSPQPPQGEDTKMKTFMMIC

SEQ ID NO: 40419 - protein, 27 aa, Homo sapiens
  MAP TO AP001254.2; EXPRESSED IN LUNG, SIGNAL = 1.3; EXPRESSED IN ADULT LIVER, SIGNAL = 1.3; EXPRESSED IN FETAL LIVER, SIGNAL = 0.97; EXPRESSED IN BRAIN, SIGNAL = 1.2; EXPRESSED IN PLACENTA, SIGNAL = 1.2; EXPRESSED IN HEART, SIGNAL = 1.2; EXPRESSED IN BONE MARROW, SIGNAL = 1.2
HLPPVRQQEKPFFFLLVLSLLKVKTRR

SEQ ID NO: 40420 - protein, 65 aa, Homo sapiens
  MAP TO AC025119.2; EXPRESSED IN LUNG, SIGNAL = 1.3; EXPRESSED IN ADULT LIVER, SIGNAL = 1.1; EXPRESSED IN HEART, SIGNAL = 1.2; EXPRESSED IN BRAIN, SIGNAL = 0.99; EXPRESSED IN BONE MARROW, SIGNAL = 1.1; EXPRESSED IN PLACENTA, SIGNAL = 1.4; EXPRESSED IN FETAL LIVER, SIGNAL = 1.3; EST_HUMAN HIT: AW749130.1, EVALUE 2.00e-31; SWISSPROT HIT: P57221, EVALUE 2.60e+00
TLLSTASITGALGLNTSAISPFVSSMDTVNNGLSTPALCQSQGVGWGDTEENIFLLDACCANSPL

SEQ ID NO: 40421 - protein, 51 aa, Homo sapiens
  MAP TO AP001441.1; EXPRESSED IN LUNG, SIGNAL = 2.7; EXPRESSED IN PLACENTA, SIGNAL = 2.4; EXPRESSED IN ADULT LIVER, SIGNAL = 2.8; EXPRESSED IN HEART, SIGNAL = 2.2; EXPRESSED IN BRAIN, SIGNAL = 3.6; EXPRESSED IN HELA, SIGNAL = 2.4; EXPRESSED IN FETAL LIVER, SIGNAL = 1.7; EXPRESSED IN BONE MARROW, SIGNAL =   2; SWISSPROT HIT: Q95241, EVALUE 2.00e-15; EST_HUMAN HIT: AW630017.1, EVALUE 2.00e-14
TCSEKSTNLHDYGMLLPCGIDKFRGVEFVCCPLAEESDNVDSADAEEDDSD

SEQ ID NO: 40422 - protein, 40 aa, Homo sapiens
  MAP TO AC015638.4; EXPRESSED IN ADULT LIVER, SIGNAL = 5.7; EXPRESSED IN HELA, SIGNAL = 7.2; EXPRESSED IN BRAIN, SIGNAL =   5; EXPRESSED IN LUNG, SIGNAL = 6.6; EXPRESSED IN PLACENTA, SIGNAL =   6; EXPRESSED IN FETAL LIVER, SIGNAL = 5.4; EXPRESSED IN HEART, SIGNAL = 6.1; EXPRESSED IN BONE MARROW, SIGNAL = 5.4
FKQKIMLVCSALASSQGTAQYIEDAEKALMEIKRSVAQVE

SEQ ID NO: 40423 - protein, 21 aa, Homo sapiens
  MAP TO AC015638.4; EXPRESSED IN ADULT LIVER, SIGNAL = 5.7; EXPRESSED IN HELA, SIGNAL = 7.2; EXPRESSED IN BRAIN, SIGNAL =   5; EXPRESSED IN LUNG, SIGNAL = 6.6; EXPRESSED IN PLACENTA, SIGNAL =   6; EXPRESSED IN FETAL LIVER, SIGNAL = 5.4; EXPRESSED IN HEART, SIGNAL = 6.1; EXPRESSED IN BONE MARROW, SIGNAL = 5.4
SSKRSCWYARLWLLHKAQHSI

SEQ ID NO: 40424 - protein, 62 aa, Homo sapiens
  MAP TO AL138796.2; EXPRESSED IN BRAIN, SIGNAL = 0.77; EXPRESSED IN BONE MARROW, SIGNAL = 0.43; EXPRESSED IN PLACENTA, SIGNAL = 0.59; EXPRESSED IN HEART, SIGNAL =   3; SWISSPROT HIT: P28741, EVALUE 3.50e+00; EST_HUMAN HIT: T31080.1, EVALUE 2.00e-11
HSQETESLREALLSSRSHLQELEKELEHQKVERQQLLEDLREKQQEVLHFREERLSLQENDS

SEQ ID NO: 40425 - protein, 81 aa, Homo sapiens
  MAP TO AC009334.3; EXPRESSED IN PLACENTA, SIGNAL = 1.7; EXPRESSED IN ADULT LIVER, SIGNAL = 1.9; EXPRESSED IN HELA, SIGNAL = 2.4; EXPRESSED IN FETAL LIVER, SIGNAL = 1.6; EXPRESSED IN BRAIN, SIGNAL = 1.6; EXPRESSED IN LUNG, SIGNAL = 1.9; EXPRESSED IN HEART, SIGNAL = 1.4; EXPRESSED IN BONE MARROW, SIGNAL = 1.9; SWISSPROT HIT: Q99698, EVALUE 5.00e-44; EST_HUMAN HIT: BF001827.1, EVALUE 1.00e-10
VRDDVYHNILTNNLPNLLEYGNITALTNLWYTGQITNFEYLTHLNKHAGRSFNDLMQYPVFPFILADYVSETLDLNDLLIY

SEQ ID NO: 40426 - protein, 25 aa, Homo sapiens
  MAP TO AC009334.3; EXPRESSED IN PLACENTA, SIGNAL = 1.7; EXPRESSED IN ADULT LIVER, SIGNAL = 1.9; EXPRESSED IN HELA, SIGNAL = 2.4; EXPRESSED IN FETAL LIVER, SIGNAL = 1.6; EXPRESSED IN BRAIN, SIGNAL = 1.6; EXPRESSED IN LUNG, SIGNAL = 1.9; EXPRESSED IN HEART, SIGNAL = 1.4; EXPRESSED IN BONE MARROW, SIGNAL = 1.9; EST_HUMAN HIT: BE816345.1, EVALUE 2.70e+00
FVMMYTTIYSQITSLIFWNMVTSPL

SEQ ID NO: 40427 - protein, 55 aa, Homo sapiens
  MAP TO AL133377.4; EXPRESSED IN LUNG, SIGNAL = 5.4; EXPRESSED IN ADULT LIVER, SIGNAL = 5.2; EXPRESSED IN HELA, SIGNAL = 4.8; EXPRESSED IN HEART, SIGNAL = 4.7; EXPRESSED IN FETAL LIVER, SIGNAL = 4.6; EXPRESSED IN BRAIN, SIGNAL = 5.1; EXPRESSED IN BONE MARROW, SIGNAL =   5; EXPRESSED IN PLACENTA, SIGNAL = 4.9; EST_HUMAN HIT: BE818120.1, EVALUE 4.00e-11
SQSENEASPVKRPRLLENTERSEETSRSKQKSRRRCFQCQTKLELVQQELGSCRC

SEQ ID NO: 40428 - protein, 26 aa, Homo sapiens
  MAP TO AC018501.5; EXPRESSED IN LUNG, SIGNAL = 1.4; EXPRESSED IN ADULT LIVER, SIGNAL = 4.5; EXPRESSED IN HEART, SIGNAL = 3.2; EXPRESSED IN BRAIN, SIGNAL = 3.2; EXPRESSED IN HELA, SIGNAL = 5.2; EXPRESSED IN PLACENTA, SIGNAL = 3.1; EXPRESSED IN FETAL LIVER, SIGNAL = 3.2; EXPRESSED IN BONE MARROW, SIGNAL = 3.3; EST_HUMAN HIT: BE164798.1, EVALUE 1.00e-09; SWISSPROT HIT: P20922, EVALUE 2.90e+00
TMPRSCSWPSWKAGTTVKTQRGYFIT

SEQ ID NO: 40429 - protein, 17 aa, Homo sapiens
  MAP TO AC025752.2; EXPRESSED IN PLACENTA, SIGNAL = 1.8; EXPRESSED IN FETAL LIVER, SIGNAL = 2.1; EXPRESSED IN BONE MARROW, SIGNAL = 1.1; EXPRESSED IN HEART, SIGNAL = 1.2; EXPRESSED IN HELA, SIGNAL = 2.2; EXPRESSED IN LUNG, SIGNAL = 1.5; EXPRESSED IN ADULT LIVER, SIGNAL = 1.7; EXPRESSED IN BRAIN, SIGNAL = 1.3
NSIYYDDRNPYWVHEPD

SEQ ID NO: 40430 - protein, 71 aa, Homo sapiens
  MAP TO AC022429.2; EXPRESSED IN HELA, SIGNAL = 4.1; EXPRESSED IN LUNG, SIGNAL = 4.1; EXPRESSED IN PLACENTA, SIGNAL =   8; EXPRESSED IN ADULT LIVER, SIGNAL = 4.2; EXPRESSED IN FETAL LIVER, SIGNAL =  13; EXPRESSED IN BRAIN, SIGNAL = 4.6; EXPRESSED IN BONE MARROW, SIGNAL = 2.8; EXPRESSED IN HEART, SIGNAL = 3.5; EST_HUMAN HIT: AI830794.1, EVALUE 2.10e-01; SWISSPROT HIT: Q64291, EVALUE 1.50e+00
RRAPSHTILHCTTMSVPLPTARRAVLTEQREAPWGSRRATASSPAGPLPRASSGLLFFCGSYFSLASCSHP

SEQ ID NO: 40431 - protein, 60 aa, Homo sapiens
  MAP TO AC007923.2; EXPRESSED IN ADULT LIVER, SIGNAL = 5.6; EXPRESSED IN BRAIN, SIGNAL = 4.5; EXPRESSED IN PLACENTA, SIGNAL = 4.7; EXPRESSED IN HELA, SIGNAL = 6.4; EXPRESSED IN FETAL LIVER, SIGNAL = 5.6; EXPRESSED IN BONE MARROW, SIGNAL = 5.4; EXPRESSED IN LUNG, SIGNAL = 5.7; EXPRESSED IN HEART, SIGNAL = 5.4; SWISSPROT HIT: Q05319, EVALUE 2.70e+00; EST_HUMAN HIT: BF058338.1, EVALUE 2.00e-03
LHGNLGNEQAIIMVKVSSLPATEGVTTGNGTLSKPHSQKIVLLELSLSALENPTCKALFI

SEQ ID NO: 40432 - protein, 63 aa, Homo sapiens
  MAP TO AC019281.4; EXPRESSED IN ADULT LIVER, SIGNAL = 1.1; EXPRESSED IN FETAL LIVER, SIGNAL = 1.5; EXPRESSED IN BRAIN, SIGNAL = 1.3; EXPRESSED IN HEART, SIGNAL = 2.5; EXPRESSED IN BONE MARROW, SIGNAL = 0.91; SWISSPROT HIT: O19069, EVALUE 5.00e-18; EST_HUMAN HIT: AA872632.1, EVALUE 1.00e-17
GPNSKPVVSFIAGLTAPPGRRMGHAGAIIAGGKGGAKEKISALQSAGVVVSMSPAQLGTTIYK

SEQ ID NO: 40433 - protein, 34 aa, Homo sapiens
  MAP TO AC009155.3; EXPRESSED IN LUNG, SIGNAL =  12; EXPRESSED IN PLACENTA, SIGNAL =  11; EXPRESSED IN HELA, SIGNAL = 5.2; EXPRESSED IN HEART, SIGNAL = 9.9; EXPRESSED IN FETAL LIVER, SIGNAL =  10; EXPRESSED IN ADULT LIVER, SIGNAL =  12; EXPRESSED IN BRAIN, SIGNAL =  13; EXPRESSED IN BONE MARROW, SIGNAL =  13; SWISSPROT HIT: P25713, EVALUE 1.70e+00
CCSCCPAECEKCAKDCVCKGGEAAEAEAEKCSCC

SEQ ID NO: 40434 - protein, 51 aa, Homo sapiens
  MAP TO AC021468.2; EXPRESSED IN PLACENTA, SIGNAL = 1.8; EXPRESSED IN FETAL LIVER, SIGNAL = 1.8; EXPRESSED IN ADULT LIVER, SIGNAL = 0.72; EXPRESSED IN BRAIN, SIGNAL = 2.2; EXPRESSED IN BONE MARROW, SIGNAL = 1.9; EXPRESSED IN HEART, SIGNAL = 2.2; EXPRESSED IN LUNG, SIGNAL = 1.8; EST_HUMAN HIT: W60309.1, EVALUE 2.00e-13
VETVNDGQFHSVELVTLNQTLNLVVDKGTPKSLGKLQKQPAVGINSPLYLG

SEQ ID NO: 40435 - protein, 29 aa, Homo sapiens
  MAP TO AL133227.7; EXPRESSED IN ADULT LIVER, SIGNAL = 1.6; EXPRESSED IN BRAIN, SIGNAL = 1.8; EXPRESSED IN LUNG, SIGNAL = 1.8; EXPRESSED IN PLACENTA, SIGNAL = 1.1; EXPRESSED IN FETAL LIVER, SIGNAL = 2.7; EXPRESSED IN BONE MARROW, SIGNAL = 4.4; EXPRESSED IN HEART, SIGNAL = 2.1; EST_HUMAN HIT: AW594046.1, EVALUE 4.00e-06
MEQVPLIFKVCQFIVPICQKHKQHLTQLK

SEQ ID NO: 40436 - protein, 70 aa, Homo sapiens
  MAP TO AC009466.2; EXPRESSED IN PLACENTA, SIGNAL = 1.3; EXPRESSED IN FETAL LIVER, SIGNAL = 1.1; EXPRESSED IN BONE MARROW, SIGNAL =   1; EXPRESSED IN HEART, SIGNAL = 1.7; EXPRESSED IN ADULT LIVER, SIGNAL = 0.87; EXPRESSED IN BRAIN, SIGNAL = 2.3; EST_HUMAN HIT: AU124625.1, EVALUE 2.00e-35; SWISSPROT HIT: P13591, EVALUE 2.00e-36
DAKDKDISWFSPNGEKLTPNQQRISVVWNDDSSSTLTIYNANIDDAGIYKCVVTGEDGSESEATVNVKIF

SEQ ID NO: 40437 - protein, 67 aa, Homo sapiens
  MAP TO AC009466.2; EXPRESSED IN PLACENTA, SIGNAL = 1.3; EXPRESSED IN FETAL LIVER, SIGNAL = 1.1; EXPRESSED IN BONE MARROW, SIGNAL =   1; EXPRESSED IN HEART, SIGNAL = 1.7; EXPRESSED IN ADULT LIVER, SIGNAL = 0.87; EXPRESSED IN BRAIN, SIGNAL = 2.3; EST_HUMAN HIT: AU117490.1, EVALUE 3.00e-22; SWISSPROT HIT: Q61221, EVALUE 7.70e+00
EMPKIKTSPGSPPMEKSSPQTSSGSQWCGMMIPPPPSPSITPTSTTPAFTSVWLQARMAVSQRPPST

SEQ ID NO: 40438 - protein, 106 aa, Homo sapiens
  MAP TO AC010905.3; EXPRESSED IN PLACENTA, SIGNAL = 3.3; EXPRESSED IN ADULT LIVER, SIGNAL = 3.5; EXPRESSED IN HELA, SIGNAL = 3.4; EXPRESSED IN FETAL LIVER, SIGNAL = 3.2; EXPRESSED IN BRAIN, SIGNAL = 3.1; EXPRESSED IN LUNG, SIGNAL = 3.7; EXPRESSED IN HEART, SIGNAL = 3.6; EXPRESSED IN BONE MARROW, SIGNAL = 3.4; EST_HUMAN HIT: AW340174.1, EVALUE 2.00e-31; SWISSPROT HIT: P19028, EVALUE 2.00e-05
NHGSRNQGVELEVATLTITPSDPLTTYLLPVSVTLCSAGLEVLVSEGGMLPPGNIAMIQLNWKLRLPPGHFALLLPLHQQPKKGGTVLAGMIDSDYQDSISLLLCN

SEQ ID NO: 40439 - protein, 52 aa, Homo sapiens
  MAP TO AL121747.19; EXPRESSED IN BONE MARROW, SIGNAL = 2.5; EXPRESSED IN FETAL LIVER, SIGNAL = 2.2; EXPRESSED IN LUNG, SIGNAL =   2; EXPRESSED IN PLACENTA, SIGNAL = 2.5; EXPRESSED IN ADULT LIVER, SIGNAL = 2.5; EXPRESSED IN HELA, SIGNAL = 3.5; EXPRESSED IN HEART, SIGNAL = 2.6; EXPRESSED IN BRAIN, SIGNAL = 2.1; EST_HUMAN HIT: AU131227.1, EVALUE 3.00e-05
VPVVEAAAAAAALPSAHTDNMAAMEEETHGSAASRRDQSEAAAAAAGSGNPL

SEQ ID NO: 40440 - protein, 35 aa, Homo sapiens
  MAP TO AL121747.19; EXPRESSED IN BONE MARROW, SIGNAL = 2.5; EXPRESSED IN FETAL LIVER, SIGNAL = 2.2; EXPRESSED IN LUNG, SIGNAL =   2; EXPRESSED IN PLACENTA, SIGNAL = 2.5; EXPRESSED IN ADULT LIVER, SIGNAL = 2.5; EXPRESSED IN HELA, SIGNAL = 3.5; EXPRESSED IN HEART, SIGNAL = 2.6; EXPRESSED IN BRAIN, SIGNAL = 2.1; EST_HUMAN HIT: AU132198.1, EVALUE 9.80e+00
RGFPLPAAAAAASLWSLRLAAEPCVSSSIAAILSV

SEQ ID NO: 40441 - protein, 38 aa, Homo sapiens
  MAP TO AC026882.2; EXPRESSED IN PLACENTA, SIGNAL = 2.4; EXPRESSED IN HELA, SIGNAL = 2.3; EXPRESSED IN LUNG, SIGNAL = 2.2; EXPRESSED IN HEART, SIGNAL = 2.3; EXPRESSED IN FETAL LIVER, SIGNAL = 2.2; EXPRESSED IN BONE MARROW, SIGNAL = 2.3; EXPRESSED IN ADULT LIVER, SIGNAL = 2.7; EXPRESSED IN BRAIN, SIGNAL = 1.9
NHTENCKIFTQKRQMATWRRESHISSQPHFGKKHHQQN

SEQ ID NO: 40442 - protein, 41 aa, Homo sapiens
  MAP TO AL136089.8; EXPRESSED IN PLACENTA, SIGNAL =   2; EXPRESSED IN FETAL LIVER, SIGNAL =   2; EXPRESSED IN HEART, SIGNAL = 2.4; EXPRESSED IN LUNG, SIGNAL = 2.6; EXPRESSED IN ADULT LIVER, SIGNAL = 2.4; EXPRESSED IN BRAIN, SIGNAL =   2; EXPRESSED IN BONE MARROW, SIGNAL = 2.1; EST_HUMAN HIT: AU124858.1, EVALUE 3.00e-08
GVQAEAVPAGACGPLLRLPHRQLRPAAQLPADLPHREVQPQ

SEQ ID NO: 40443 - protein, 42 aa, Homo sapiens
  MAP TO AL136089.8; EXPRESSED IN PLACENTA, SIGNAL =   2; EXPRESSED IN FETAL LIVER, SIGNAL =   2; EXPRESSED IN HEART, SIGNAL = 2.4; EXPRESSED IN LUNG, SIGNAL = 2.6; EXPRESSED IN ADULT LIVER, SIGNAL = 2.4; EXPRESSED IN BRAIN, SIGNAL =   2; EXPRESSED IN BONE MARROW, SIGNAL = 2.1; EST_HUMAN HIT: AU141295.1, EVALUE 4.00e-03
RCPGGGSSCGSMRPPSPPSSQTASAGSTATCGSPSQRSATSD

SEQ ID NO: 40444 - protein, 26 aa, Homo sapiens
  MAP TO AC012480.3; EXPRESSED IN LUNG, SIGNAL =  11; EXPRESSED IN ADULT LIVER, SIGNAL =  19; EXPRESSED IN FETAL LIVER, SIGNAL =  13; EXPRESSED IN BRAIN, SIGNAL =  10; EXPRESSED IN BONE MARROW, SIGNAL =  13; EXPRESSED IN PLACENTA, SIGNAL =  15; EXPRESSED IN HELA, SIGNAL =  22; EXPRESSED IN HEART, SIGNAL =  13
ELITSVMAIFIMNVNDQPNWSVIIIK

SEQ ID NO: 40445 - protein, 40 aa, Homo sapiens
  MAP TO AL133354.8; EXPRESSED IN ADULT LIVER, SIGNAL = 1.6; EXPRESSED IN BRAIN, SIGNAL = 1.4; EXPRESSED IN BONE MARROW, SIGNAL = 1.6; EXPRESSED IN LUNG, SIGNAL = 1.7; EXPRESSED IN PLACENTA, SIGNAL = 1.2; EXPRESSED IN HEART, SIGNAL = 1.4; EXPRESSED IN FETAL LIVER, SIGNAL = 1.1; EST_HUMAN HIT: AU127582.1, EVALUE 5.00e-16; SWISSPROT HIT: P50749, EVALUE 4.00e-17
KQKLKATDYPLIARILQGPCEQISKVFLMEKDQVEEVTYD

SEQ ID NO: 40446 - protein, 55 aa, Homo sapiens
  MAP TO AL158049.2; EXPRESSED IN HELA, SIGNAL = 6.8; EXPRESSED IN BONE MARROW, SIGNAL = 3.2; EXPRESSED IN LUNG, SIGNAL = 3.6; EXPRESSED IN FETAL LIVER, SIGNAL = 3.2; EXPRESSED IN PLACENTA, SIGNAL =   4; EXPRESSED IN ADULT LIVER, SIGNAL = 3.5; EXPRESSED IN HEART, SIGNAL = 3.2; EXPRESSED IN BRAIN, SIGNAL = 2.8; EST_HUMAN HIT: BE252643.1, EVALUE 4.00e-11; SWISSPROT HIT: Q14571, EVALUE 1.00e-10
ESLFPARVVYDLLFFFIVIIIVLNLIFGVIIDTFADLRSEKQKKEEILKTTCFIC

SEQ ID NO: 40447 - protein, 22 aa, Homo sapiens
  MAP TO AL158049.2; EXPRESSED IN HELA, SIGNAL = 6.8; EXPRESSED IN BONE MARROW, SIGNAL = 3.2; EXPRESSED IN LUNG, SIGNAL = 3.6; EXPRESSED IN FETAL LIVER, SIGNAL = 3.2; EXPRESSED IN PLACENTA, SIGNAL =   4; EXPRESSED IN ADULT LIVER, SIGNAL = 3.5; EXPRESSED IN HEART, SIGNAL = 3.2; EXPRESSED IN BRAIN, SIGNAL = 2.8
SLSSQPEWSMTSCSSSSSSSLC

SEQ ID NO: 40448 - protein, 27 aa, Homo sapiens
  MAP TO AL136059.2; EXPRESSED IN LUNG, SIGNAL = 2.2; EXPRESSED IN PLACENTA, SIGNAL = 1.7; EXPRESSED IN FETAL LIVER, SIGNAL = 1.6; EXPRESSED IN HEART, SIGNAL = 1.3; EXPRESSED IN ADULT LIVER, SIGNAL = 1.6; EXPRESSED IN BRAIN, SIGNAL = 1.6; EXPRESSED IN BONE MARROW, SIGNAL = 2.2
LYLRGVFQKLKVDAELLKLEEPDDKEH

SEQ ID NO: 40449 - protein, 53 aa, Homo sapiens
  MAP TO AL132874.14; EXPRESSED IN LUNG, SIGNAL = 1.8; EXPRESSED IN ADULT LIVER, SIGNAL = 2.3; EXPRESSED IN HEART, SIGNAL = 2.3; EXPRESSED IN FETAL LIVER, SIGNAL = 1.9; EXPRESSED IN BRAIN, SIGNAL = 2.1; EXPRESSED IN PLACENTA, SIGNAL =   2; EXPRESSED IN HELA, SIGNAL = 3.3; EXPRESSED IN BONE MARROW, SIGNAL = 1.9; EST_HUMAN HIT: AA639848.1, EVALUE 3.80e+00
GQEVSDKGTKKAGNACIDKQKPEACLLAILMMKTFLQKSASFEHFWQTQRPAE

SEQ ID NO: 40450 - protein, 30 aa, Homo sapiens
  MAP TO AL132874.14; EXPRESSED IN LUNG, SIGNAL = 1.8; EXPRESSED IN ADULT LIVER, SIGNAL = 2.3; EXPRESSED IN HEART, SIGNAL = 2.3; EXPRESSED IN FETAL LIVER, SIGNAL = 1.9; EXPRESSED IN BRAIN, SIGNAL = 2.1; EXPRESSED IN PLACENTA, SIGNAL =   2; EXPRESSED IN HELA, SIGNAL = 3.3; EXPRESSED IN BONE MARROW, SIGNAL = 1.9; SWISSPROT HIT: P10339, EVALUE 2.90e+00
GRKYLIKELKRLETRALTSKSRRLACLQFL

SEQ ID NO: 40451 - protein, 17 aa, Homo sapiens
  MAP TO AC021824.2; EXPRESSED IN LUNG, SIGNAL =  11; EXPRESSED IN PLACENTA, SIGNAL =  10; EXPRESSED IN ADULT LIVER, SIGNAL =  10; EXPRESSED IN HELA, SIGNAL = 5.5; EXPRESSED IN BRAIN, SIGNAL = 8.1; EXPRESSED IN BONE MARROW, SIGNAL = 9.4; EXPRESSED IN FETAL LIVER, SIGNAL = 8.4; EXPRESSED IN HEART, SIGNAL =   9; EST_HUMAN HIT: BE409108.1, EVALUE 4.90e-02
MPLRTFAIHGRRPKYQH

SEQ ID NO: 40452 - protein, 73 aa, Homo sapiens
  MAP TO AL121845.12; EXPRESSED IN ADULT LIVER, SIGNAL =   4; EXPRESSED IN HELA, SIGNAL = 2.8; EXPRESSED IN BRAIN, SIGNAL = 2.4; EXPRESSED IN LUNG, SIGNAL = 3.1; EXPRESSED IN BONE MARROW, SIGNAL = 2.8; EXPRESSED IN PLACENTA, SIGNAL = 2.3; EXPRESSED IN FETAL LIVER, SIGNAL = 2.9; EXPRESSED IN HEART, SIGNAL = 2.4; EST_HUMAN HIT: BF337599.1, EVALUE 4.00e-27
VWADTRKAGWSPSMLWCCLEGSRWTSVWRPCRSRPGLARLAPTSPPGAGEEGPGLGAAQLLGMCLTSSMKSCK

SEQ ID NO: 40453 - protein, 28 aa, Homo sapiens
  MAP TO AC007981.43; EXPRESSED IN ADULT LIVER, SIGNAL = 3.2; EXPRESSED IN HELA, SIGNAL = 2.7; EXPRESSED IN LUNG, SIGNAL =   3; EXPRESSED IN PLACENTA, SIGNAL =   3; EXPRESSED IN FETAL LIVER, SIGNAL =   3; EXPRESSED IN BRAIN, SIGNAL =   3; EXPRESSED IN HEART, SIGNAL =   3; EXPRESSED IN BONE MARROW, SIGNAL = 2.9
VVQVAPLRRESSKYSGITYRENNLDAKK

SEQ ID NO: 40454 - protein, 32 aa, Homo sapiens
  MAP TO AC011815.2; EXPRESSED IN PLACENTA, SIGNAL = 5.4; EXPRESSED IN ADULT LIVER, SIGNAL = 4.1; EXPRESSED IN HEART, SIGNAL = 2.5; EXPRESSED IN BRAIN, SIGNAL = 4.9; EXPRESSED IN BONE MARROW, SIGNAL = 4.1; EXPRESSED IN LUNG, SIGNAL = 4.2; EXPRESSED IN HELA, SIGNAL = 4.4; EXPRESSED IN FETAL LIVER, SIGNAL = 3.8; EST_HUMAN HIT: BE149356.1, EVALUE 1.00e-06
IFSAQQMKTDTSRLPRKPTGPSQMLWVIITVE

SEQ ID NO: 40455 - protein, 31 aa, Homo sapiens
  MAP TO AC019083.5; EXPRESSED IN PLACENTA, SIGNAL = 1.3; EXPRESSED IN ADULT LIVER, SIGNAL = 1.5; EXPRESSED IN BRAIN, SIGNAL =   1; EXPRESSED IN BONE MARROW, SIGNAL =   1; EXPRESSED IN LUNG, SIGNAL = 1.6; EXPRESSED IN HEART, SIGNAL = 1.2; EXPRESSED IN FETAL LIVER, SIGNAL = 1.1
KETGFVYQKEQQTCHESWVQMPVLTMNKPLA

SEQ ID NO: 40456 - protein, 92 aa, Homo sapiens
  MAP TO AL161756.1; EXPRESSED IN LUNG, SIGNAL = 1.7; EXPRESSED IN PLACENTA, SIGNAL = 1.3; EXPRESSED IN FETAL LIVER, SIGNAL = 1.2; EXPRESSED IN HEART, SIGNAL = 1.5; EXPRESSED IN ADULT LIVER, SIGNAL = 2.2; EXPRESSED IN BRAIN, SIGNAL = 1.2; EXPRESSED IN BONE MARROW, SIGNAL = 1.3; SWISSPROT HIT: P15771, EVALUE 2.70e-01; EST_HUMAN HIT: AW364874.1, EVALUE 9.00e-40
GLEDEKEASENETDMEDPREIQTDSWRKRGESEEPSSPQSLCHLVAPGHERSGCETPVSVDSIPLEWDHTGDVGGSSSHEEDEEGPYYSALS

SEQ ID NO: 40457 - protein, 43 aa, Homo sapiens
  MAP TO AL161756.1; EXPRESSED IN LUNG, SIGNAL = 1.7; EXPRESSED IN PLACENTA, SIGNAL = 1.3; EXPRESSED IN FETAL LIVER, SIGNAL = 1.2; EXPRESSED IN HEART, SIGNAL = 1.5; EXPRESSED IN ADULT LIVER, SIGNAL = 2.2; EXPRESSED IN BRAIN, SIGNAL = 1.2; EXPRESSED IN BONE MARROW, SIGNAL = 1.3; SWISSPROT HIT: P24209, EVALUE 6.30e+00; EST_HUMAN HIT: AW364874.1, EVALUE 3.00e-19
AWKMKRRPLRMKQTWKTPEKSRLILGVNGERARNRHLLSPCVI

SEQ ID NO: 40458 - protein, 32 aa, Homo sapiens
  MAP TO AC007492.2; EXPRESSED IN LUNG, SIGNAL = 1.6; EXPRESSED IN ADULT LIVER, SIGNAL = 1.7; EXPRESSED IN BRAIN, SIGNAL = 1.5; EXPRESSED IN BONE MARROW, SIGNAL = 1.3; EXPRESSED IN PLACENTA, SIGNAL = 1.4; EXPRESSED IN FETAL LIVER, SIGNAL = 1.5; EXPRESSED IN HEART, SIGNAL = 1.4
LPPLEALLKVYRELLIRSDEGVIKKPPTIYLV

SEQ ID NO: 40459 - protein, 37 aa, Homo sapiens
  MAP TO AL161752.1; EXPRESSED IN ADULT LIVER, SIGNAL = 1.8; EXPRESSED IN BRAIN, SIGNAL = 1.6; EXPRESSED IN LUNG, SIGNAL = 1.7; EXPRESSED IN HEART, SIGNAL = 1.6; EXPRESSED IN BONE MARROW, SIGNAL = 1.5; EXPRESSED IN PLACENTA, SIGNAL = 1.3; EXPRESSED IN FETAL LIVER, SIGNAL = 1.7
NQVHIFHAAERIKHVGQFIAIYCLLNISLIDVSILTQ

SEQ ID NO: 40460 - protein, 54 aa, Homo sapiens
  MAP TO AL117333.23; EXPRESSED IN BONE MARROW, SIGNAL = 2.3; EXPRESSED IN PLACENTA, SIGNAL = 2.6; EXPRESSED IN HELA, SIGNAL = 3.4; EXPRESSED IN HEART, SIGNAL = 2.7; EXPRESSED IN FETAL LIVER, SIGNAL = 2.1; EXPRESSED IN LUNG, SIGNAL = 2.6; EXPRESSED IN ADULT LIVER, SIGNAL = 2.7; EXPRESSED IN BRAIN, SIGNAL =   2; SWISSPROT HIT: Q02207, EVALUE 9.20e-01
AYLLFAKAADMGNLKAMEKMADALLFGNFGVQNITAAIQLYESLAKEGSCKAQN

SEQ ID NO: 40461 - protein, 17 aa, Homo sapiens
  MAP TO AL117333.23; EXPRESSED IN BONE MARROW, SIGNAL = 2.3; EXPRESSED IN PLACENTA, SIGNAL = 2.6; EXPRESSED IN HELA, SIGNAL = 3.4; EXPRESSED IN HEART, SIGNAL = 2.7; EXPRESSED IN FETAL LIVER, SIGNAL = 2.1; EXPRESSED IN LUNG, SIGNAL = 2.6; EXPRESSED IN ADULT LIVER, SIGNAL = 2.7; EXPRESSED IN BRAIN, SIGNAL =   2
WRKWLTLCYLEILACKI

SEQ ID NO: 40462 - protein, 43 aa, Homo sapiens
  MAP TO AC021973.2; EXPRESSED IN ADULT LIVER, SIGNAL =   2; EXPRESSED IN HELA, SIGNAL =   3; EXPRESSED IN FETAL LIVER, SIGNAL = 1.5; EXPRESSED IN BONE MARROW, SIGNAL = 1.6; EXPRESSED IN LUNG, SIGNAL = 1.8; EXPRESSED IN PLACENTA, SIGNAL = 2.3; EXPRESSED IN HEART, SIGNAL = 1.8; EXPRESSED IN BRAIN, SIGNAL = 1.5; SWISSPROT HIT: P25491, EVALUE 1.20e+00
AWRSKHQDSEMKGGLAGLKRNKQNNCGECGQRKGDKGQVVKYM

SEQ ID NO: 40463 - protein, 46 aa, Homo sapiens
  MAP TO AC009234.3; EXPRESSED IN PLACENTA, SIGNAL = 1.5; EXPRESSED IN HEART, SIGNAL = 1.6; EXPRESSED IN FETAL LIVER, SIGNAL = 1.3; EXPRESSED IN BONE MARROW, SIGNAL = 1.7; EXPRESSED IN LUNG, SIGNAL = 1.1; EXPRESSED IN BRAIN, SIGNAL = 1.5; EST_HUMAN HIT: AI000364.1, EVALUE 2.00e-05
DAEGSKVKVPADFTSGEGPLPGSQVALFLLCHCMAAVTRETSGVSF

SEQ ID NO: 40464 - protein, 31 aa, Homo sapiens
  MAP TO AL158049.2; EXPRESSED IN ADULT LIVER, SIGNAL = 1.4; EXPRESSED IN HEART, SIGNAL = 2.4; EXPRESSED IN BRAIN, SIGNAL = 1.3; EXPRESSED IN LUNG, SIGNAL = 1.1; EXPRESSED IN PLACENTA, SIGNAL = 1.1; EXPRESSED IN FETAL LIVER, SIGNAL = 1.5; EXPRESSED IN BONE MARROW, SIGNAL = 1.4; EST_HUMAN HIT: AW007218.1, EVALUE 1.00e-11
TLEELKEIDKGMWKKLQEKFAPKGPEEDHKA

SEQ ID NO: 40465 - protein, 52 aa, Homo sapiens
  MAP TO AL132654.12; EXPRESSED IN LUNG, SIGNAL = 5.1; EXPRESSED IN HEART, SIGNAL = 4.5; EXPRESSED IN FETAL LIVER, SIGNAL = 4.5; EXPRESSED IN BONE MARROW, SIGNAL = 4.7; EXPRESSED IN ADULT LIVER, SIGNAL = 4.8; EXPRESSED IN PLACENTA, SIGNAL = 4.6; EXPRESSED IN HELA, SIGNAL = 2.4; EXPRESSED IN BRAIN, SIGNAL = 4.6; EST_HUMAN HIT: AA448097.1, EVALUE 3.00e-08
YLSTCAFIACTSLKFIVCPEFIPSGRSVVLLTSRKELRTFVVSVTALKDGMD

SEQ ID NO: 40466 - protein, 149 aa, Homo sapiens
  MAP TO AC024196.2; EXPRESSED IN PLACENTA, SIGNAL = 1.3; EXPRESSED IN HEART, SIGNAL = 1.5; EXPRESSED IN LUNG, SIGNAL = 0.92; EXPRESSED IN BRAIN, SIGNAL =   1; EXPRESSED IN ADULT LIVER, SIGNAL = 1.1; EXPRESSED IN FETAL LIVER, SIGNAL =   1; EXPRESSED IN BONE MARROW, SIGNAL = 1.1; EST_HUMAN HIT: AU121127.1, EVALUE 3.00e-21; SWISSPROT HIT: P19013, EVALUE 5.00e-21
MSRQFTYKSGAAAKGGFSGCSAVLSGGSSSSYRAGGKGLSGGFSSRSLYSLGGARSISFNVASGSGWAGGYGFGRGRASGFAGSMFGSVALGSVCLSLCPPGGIHQVTINKSLLAPLNVELDPEIQKVRAQEREQIKVLNNKFASFIDK

SEQ ID NO: 40467 - protein, 42 aa, Homo sapiens
  MAP TO AL133293.14; EXPRESSED IN HEART, SIGNAL = 1.4; EXPRESSED IN FETAL LIVER, SIGNAL = 1.6; EXPRESSED IN BONE MARROW, SIGNAL = 1.6; EXPRESSED IN LUNG, SIGNAL = 1.5; EXPRESSED IN PLACENTA, SIGNAL = 1.4; EXPRESSED IN ADULT LIVER, SIGNAL = 1.5; EXPRESSED IN BRAIN, SIGNAL = 2.6; EST_HUMAN HIT: BE736740.1, EVALUE 2.00e-16; SWISSPROT HIT: P00523, EVALUE 2.00e-17
MSPEAFLQEAQVMKKLRHEKLVQLYAVVSEEPIYIVTEYMSK

SEQ ID NO: 40468 - protein, 102 aa, Homo sapiens
  MAP TO AC015525.3; EXPRESSED IN ADULT LIVER, SIGNAL = 1.6; EXPRESSED IN LUNG, SIGNAL = 1.9; EXPRESSED IN PLACENTA, SIGNAL = 1.4; EXPRESSED IN HEART, SIGNAL = 1.5; EXPRESSED IN FETAL LIVER, SIGNAL = 1.5; EXPRESSED IN BRAIN, SIGNAL = 1.6; EXPRESSED IN BONE MARROW, SIGNAL = 1.6; SWISSPROT HIT: Q9WV70, EVALUE 1.70e+00; EST_HUMAN HIT: AA015693.1, EVALUE 2.00e-07
ESKTFNGLQDELTAMGNHPSPKLLEDQQEKGMVRTELIESVHSPVTTTVLTSVSEDSRDQFENSVLQLREHDESETAVSQGNSNTVDGESTSGTEDIKIQFS

SEQ ID NO: 40469 - protein, 36 aa, Homo sapiens
  MAP TO AC015525.3; EXPRESSED IN ADULT LIVER, SIGNAL = 1.6; EXPRESSED IN LUNG, SIGNAL = 1.9; EXPRESSED IN PLACENTA, SIGNAL = 1.4; EXPRESSED IN HEART, SIGNAL = 1.5; EXPRESSED IN FETAL LIVER, SIGNAL = 1.5; EXPRESSED IN BRAIN, SIGNAL = 1.6; EXPRESSED IN BONE MARROW, SIGNAL = 1.6; EST_HUMAN HIT: AA015693.1, EVALUE 3.00e-07
KAKPSMDYKMSSQLWGTTLLPSCSRTSRKRGWYEQS

SEQ ID NO: 40470 - protein, 138 aa, Homo sapiens
  MAP TO AL132716.4; EXPRESSED IN LUNG, SIGNAL = 1.5; EXPRESSED IN HEART, SIGNAL = 1.2; EXPRESSED IN PLACENTA, SIGNAL = 1.2; EXPRESSED IN FETAL LIVER, SIGNAL = 1.2; EXPRESSED IN ADULT LIVER, SIGNAL = 1.2; EXPRESSED IN BRAIN, SIGNAL = 1.9; EXPRESSED IN BONE MARROW, SIGNAL = 1.3; EST_HUMAN HIT: BE612586.1, EVALUE 2.00e-31; SWISSPROT HIT: P51513, EVALUE 2.00e-32
LGLSQAAATGALAAAAASANPAAAAANLLATYASEASASGSTAGGTAGTFALGSLAAATAATNGYFGAASPLAASAILGTEKSTDGSKDVVEIAVPENLVGAILGKGGKTLVEYQELTGARIQISKKGEFVPGTRNRK

SEQ ID NO: 40471 - protein, 32 aa, Homo sapiens
  MAP TO AL132716.4; EXPRESSED IN LUNG, SIGNAL = 1.5; EXPRESSED IN HEART, SIGNAL = 1.2; EXPRESSED IN PLACENTA, SIGNAL = 1.2; EXPRESSED IN FETAL LIVER, SIGNAL = 1.2; EXPRESSED IN ADULT LIVER, SIGNAL = 1.2; EXPRESSED IN BRAIN, SIGNAL = 1.9; EXPRESSED IN BONE MARROW, SIGNAL = 1.3
SQSSSSNRGFGCSSCQCQPSSSSSQFIGHLCQ

SEQ ID NO: 40472 - protein, 47 aa, Homo sapiens
  MAP TO AC021308.3; EXPRESSED IN ADULT LIVER, SIGNAL = 7.8; EXPRESSED IN HEART, SIGNAL = 4.7; EXPRESSED IN LUNG, SIGNAL = 5.3; EXPRESSED IN PLACENTA, SIGNAL = 8.1; EXPRESSED IN HELA, SIGNAL = 2.4; EXPRESSED IN FETAL LIVER, SIGNAL = 5.1; EXPRESSED IN BRAIN, SIGNAL = 6.2; EXPRESSED IN BONE MARROW, SIGNAL = 6.6; EST_HUMAN HIT: AI018036.1, EVALUE 1.00e-11; SWISSPROT HIT: P48231, EVALUE 8.10e+00
VTLMQEMGSYSLGQLRLCGFAGYSPLPGCFLRLALSACGFSRPMVEA

SEQ ID NO: 40473 - protein, 25 aa, Homo sapiens
  MAP TO AC027273.2; EXPRESSED IN HELA, SIGNAL = 9.1; EXPRESSED IN LUNG, SIGNAL = 8.9; EXPRESSED IN PLACENTA, SIGNAL =   7; EXPRESSED IN ADULT LIVER, SIGNAL =  12; EXPRESSED IN FETAL LIVER, SIGNAL = 3.2; EXPRESSED IN HEART, SIGNAL = 6.5; EXPRESSED IN BRAIN, SIGNAL = 7.8; EXPRESSED IN BONE MARROW, SIGNAL = 7.4; EST_HUMAN HIT: AA311439.1, EVALUE 4.80e-02
MVDPLTACTVHLKKLQTINTNSESS

SEQ ID NO: 40474 - protein, 47 aa, Homo sapiens
  MAP TO AC018525.4; EXPRESSED IN PLACENTA, SIGNAL =  15; EXPRESSED IN HELA, SIGNAL =  14; EXPRESSED IN HEART, SIGNAL =  13; EXPRESSED IN FETAL LIVER, SIGNAL =  11; EXPRESSED IN BRAIN, SIGNAL =  14; EXPRESSED IN BONE MARROW, SIGNAL =  16; EXPRESSED IN LUNG, SIGNAL =  16; EXPRESSED IN ADULT LIVER, SIGNAL =  15
NLPFNWEDRQKQRKRKRKEERRKKGREEGRKEERKEEKEEERKEGRK

SEQ ID NO: 40475 - protein, 48 aa, Homo sapiens
  MAP TO AC013698.3; EXPRESSED IN PLACENTA, SIGNAL = 1.2; EXPRESSED IN LUNG, SIGNAL = 2.4; EXPRESSED IN HEART, SIGNAL = 1.4; EXPRESSED IN FETAL LIVER, SIGNAL = 1.1; EXPRESSED IN BRAIN, SIGNAL = 1.3; EXPRESSED IN BONE MARROW, SIGNAL = 1.2; EXPRESSED IN ADULT LIVER, SIGNAL =   2; EST_HUMAN HIT: AW020467.1, EVALUE 6.00e-22; SWISSPROT HIT: P28817, EVALUE 6.00e-05
LFPDVGGGYFLPRLQGKLGYFLALTGFRLKGRDVYRAGIATHFVDSEK

SEQ ID NO: 40476 - protein, 24 aa, Homo sapiens
  MAP TO AC013698.3; EXPRESSED IN PLACENTA, SIGNAL = 1.2; EXPRESSED IN LUNG, SIGNAL = 2.4; EXPRESSED IN HEART, SIGNAL = 1.4; EXPRESSED IN FETAL LIVER, SIGNAL = 1.1; EXPRESSED IN BRAIN, SIGNAL = 1.3; EXPRESSED IN BONE MARROW, SIGNAL = 1.2; EXPRESSED IN ADULT LIVER, SIGNAL =   2; EST_HUMAN HIT: AW020467.1, EVALUE 1.00e-07
DCSLMWVEVISCHDSKENLVTSLH

SEQ ID NO: 40477 - protein, 73 aa, Homo sapiens
  MAP TO AC024196.2; EXPRESSED IN ADULT LIVER, SIGNAL = 2.3; EXPRESSED IN HELA, SIGNAL = 2.7; EXPRESSED IN HEART, SIGNAL =   2; EXPRESSED IN FETAL LIVER, SIGNAL = 1.4; EXPRESSED IN BONE MARROW, SIGNAL = 1.3; EXPRESSED IN LUNG, SIGNAL = 1.6; EXPRESSED IN PLACENTA, SIGNAL = 1.6; EXPRESSED IN BRAIN, SIGNAL = 1.4; EST_HUMAN HIT: AA354256.1, EVALUE 1.00e-29; SWISSPROT HIT: P13647, EVALUE 5.00e-25
CADLETAIADAEQRGDCALKDARAKLDELEGALHQAKEELARMLREYQELVSLKLALDMEIATYRKLLESEEC

SEQ ID NO: 40478 - protein, 18 aa, Homo sapiens
  MAP TO AC024196.2; EXPRESSED IN ADULT LIVER, SIGNAL = 2.3; EXPRESSED IN HELA, SIGNAL = 2.7; EXPRESSED IN HEART, SIGNAL =   2; EXPRESSED IN FETAL LIVER, SIGNAL = 1.4; EXPRESSED IN BONE MARROW, SIGNAL = 1.3; EXPRESSED IN LUNG, SIGNAL = 1.6; EXPRESSED IN PLACENTA, SIGNAL = 1.6; EXPRESSED IN BRAIN, SIGNAL = 1.4; EST_HUMAN HIT: AA354256.1, EVALUE 4.90e-02
VPIWRRPSPTLNSGGTAP

SEQ ID NO: 40479 - protein, 32 aa, Homo sapiens
  MAP TO AL133260.7; EXPRESSED IN ADULT LIVER, SIGNAL =  15; EXPRESSED IN BRAIN, SIGNAL =  14; EXPRESSED IN LUNG, SIGNAL =  16; EXPRESSED IN PLACENTA, SIGNAL =  15; EXPRESSED IN HELA, SIGNAL =  22; EXPRESSED IN HEART, SIGNAL =  14; EXPRESSED IN FETAL LIVER, SIGNAL =  17; EXPRESSED IN BONE MARROW, SIGNAL =  17
WTSLQKAAFCMGRLYFPKKVLPIDVSPSMCSS

SEQ ID NO: 40480 - protein, 48 aa, Homo sapiens
  MAP TO AL135784.4; EXPRESSED IN LUNG, SIGNAL = 2.1; EXPRESSED IN FETAL LIVER, SIGNAL = 2.6; EXPRESSED IN BONE MARROW, SIGNAL = 2.3; EXPRESSED IN HEART, SIGNAL = 2.3; EXPRESSED IN ADULT LIVER, SIGNAL = 1.9; EXPRESSED IN PLACENTA, SIGNAL = 1.4; EXPRESSED IN BRAIN, SIGNAL = 1.6
DEVNNQREDFTKVTQVVENRSETKTMGMFMSLCVKTNMYSTKNSRTTK

SEQ ID NO: 40481 - protein, 18 aa, Homo sapiens
  MAP TO AL135784.4; EXPRESSED IN LUNG, SIGNAL = 2.1; EXPRESSED IN FETAL LIVER, SIGNAL = 2.6; EXPRESSED IN BONE MARROW, SIGNAL = 2.3; EXPRESSED IN HEART, SIGNAL = 2.3; EXPRESSED IN ADULT LIVER, SIGNAL = 1.9; EXPRESSED IN PLACENTA, SIGNAL = 1.4; EXPRESSED IN BRAIN, SIGNAL = 1.6
VSVSKQTCIQPKTQELPN

SEQ ID NO: 40482 - protein, 57 aa, Homo sapiens
  MAP TO AL133324.7; EXPRESSED IN PLACENTA, SIGNAL = 1.5; EXPRESSED IN ADULT LIVER, SIGNAL = 1.2; EXPRESSED IN FETAL LIVER, SIGNAL = 1.1; EXPRESSED IN BONE MARROW, SIGNAL = 1.7; EXPRESSED IN LUNG, SIGNAL = 1.9; EXPRESSED IN HEART, SIGNAL =  19; EXPRESSED IN BRAIN, SIGNAL = 0.92; SWISSPROT HIT: P13540, EVALUE 1.00e-26; EST_HUMAN HIT: AI819050.1, EVALUE 6.00e-28
FNSFEQLCINFTNEKLQQFFNQHMFVLEQEEYKREGIDWVFIDFGLDLQPCIDLIEK

SEQ ID NO: 40483 - protein, 59 aa, Homo sapiens
  MAP TO AL133324.7; EXPRESSED IN PLACENTA, SIGNAL = 1.5; EXPRESSED IN ADULT LIVER, SIGNAL = 1.2; EXPRESSED IN FETAL LIVER, SIGNAL = 1.1; EXPRESSED IN BONE MARROW, SIGNAL = 1.7; EXPRESSED IN LUNG, SIGNAL = 1.9; EXPRESSED IN HEART, SIGNAL =  19; EXPRESSED IN BRAIN, SIGNAL = 0.92
SNSCASTSPMRNCSSSSTSTCLCWSRRSTSGRASTGSSSTSALTCSLASTSSRRWVPRQ

SEQ ID NO: 40484 - protein, 26 aa, Homo sapiens
  MAP TO AC011930.3; EXPRESSED IN PLACENTA, SIGNAL = 1.2; EXPRESSED IN HEART, SIGNAL = 1.3; EXPRESSED IN BRAIN, SIGNAL = 1.5; EXPRESSED IN BONE MARROW, SIGNAL = 1.6; EXPRESSED IN LUNG, SIGNAL = 1.5; EXPRESSED IN ADULT LIVER, SIGNAL = 1.9; EXPRESSED IN FETAL LIVER, SIGNAL = 1.3; EST_HUMAN HIT: AA078318.1, EVALUE 4.00e-06
RDVDHFLLPQDITLVHYIDDIMLTGS

SEQ ID NO: 40485 - protein, 21 aa, Homo sapiens
  MAP TO AC011930.3; EXPRESSED IN PLACENTA, SIGNAL = 1.2; EXPRESSED IN HEART, SIGNAL = 1.3; EXPRESSED IN BRAIN, SIGNAL = 1.5; EXPRESSED IN BONE MARROW, SIGNAL = 1.6; EXPRESSED IN LUNG, SIGNAL = 1.5; EXPRESSED IN ADULT LIVER, SIGNAL = 1.9; EXPRESSED IN FETAL LIVER, SIGNAL = 1.3; EST_HUMAN HIT: AA403053.1, EVALUE 4.20e-01
GGLLWWERPNGSHLTPYLGKQ

SEQ ID NO: 40486 - protein, 22 aa, Homo sapiens
  MAP TO AC007923.2; EXPRESSED IN ADULT LIVER, SIGNAL = 3.1; EXPRESSED IN BRAIN, SIGNAL = 3.3; EXPRESSED IN LUNG, SIGNAL = 3.5; EXPRESSED IN PLACENTA, SIGNAL = 3.3; EXPRESSED IN HELA, SIGNAL = 3.8; EXPRESSED IN FETAL LIVER, SIGNAL = 3.2; EXPRESSED IN HEART, SIGNAL = 3.6; EXPRESSED IN BONE MARROW, SIGNAL = 3.4
IMMMMMMMMMMMMMMMIRANIH

SEQ ID NO: 40487 - protein, 28 aa, Homo sapiens
  MAP TO AL121747.19; EXPRESSED IN LUNG, SIGNAL =   4; EXPRESSED IN PLACENTA, SIGNAL = 3.9; EXPRESSED IN HEART, SIGNAL = 4.3; EXPRESSED IN FETAL LIVER, SIGNAL = 3.7; EXPRESSED IN ADULT LIVER, SIGNAL = 3.8; EXPRESSED IN BRAIN, SIGNAL = 3.6; EXPRESSED IN HELA, SIGNAL =   5; EXPRESSED IN BONE MARROW, SIGNAL = 3.9; EST_HUMAN HIT: BE385583.1, EVALUE 1.00e-08
MNCKEYQEDLALRAQNDVAARQTTEMLK

SEQ ID NO: 40488 - protein, 93 aa, Homo sapiens
  MAP TO AL121829.12; EXPRESSED IN HELA, SIGNAL = 7.6; EXPRESSED IN HEART, SIGNAL = 7.8; EXPRESSED IN BONE MARROW, SIGNAL =   7; EXPRESSED IN LUNG, SIGNAL = 7.8; EXPRESSED IN PLACENTA, SIGNAL =   7; EXPRESSED IN ADULT LIVER, SIGNAL = 7.9; EXPRESSED IN FETAL LIVER, SIGNAL = 6.1; EXPRESSED IN BRAIN, SIGNAL = 6.6; SWISSPROT HIT: P42694, EVALUE 6.00e-11; EST_HUMAN HIT: BE062855.1, EVALUE 4.00e-38
AVDTLPEEQLVVPDLPTCALPRPWSVPPLRRGNRKQELAVALIAGWGPGDGRRVPPLLIYGPFGTGKTYTLAMASLEVIRRPETKVLICTHTN

SEQ ID NO: 40489 - protein, 57 aa, Homo sapiens
  MAP TO AL121829.12; EXPRESSED IN HELA, SIGNAL = 7.6; EXPRESSED IN HEART, SIGNAL = 7.8; EXPRESSED IN BONE MARROW, SIGNAL =   7; EXPRESSED IN LUNG, SIGNAL = 7.8; EXPRESSED IN PLACENTA, SIGNAL =   7; EXPRESSED IN ADULT LIVER, SIGNAL = 7.9; EXPRESSED IN FETAL LIVER, SIGNAL = 6.1; EXPRESSED IN BRAIN, SIGNAL = 6.6; EST_HUMAN HIT: BE062855.1, EVALUE 1.00e-07
SWPWRSSRAGALGMGGVSPRYSSMAPLAPARPTRWPWPPWRSSGGLKPRCSSAHTPT

SEQ ID NO: 40490 - protein, 48 aa, Homo sapiens
  MAP TO AC022995.2; EXPRESSED IN PLACENTA, SIGNAL = 1.5; EXPRESSED IN LUNG, SIGNAL = 1.5; EXPRESSED IN HEART, SIGNAL = 1.4; EXPRESSED IN FETAL LIVER, SIGNAL = 1.5; EXPRESSED IN BRAIN, SIGNAL = 1.5; EXPRESSED IN BONE MARROW, SIGNAL = 1.4; EXPRESSED IN ADULT LIVER, SIGNAL = 1.7; EST_HUMAN HIT: BE145672.1, EVALUE 1.00e-07
TSSTMLDNSGESWQSCCVSDLREKSFTFSPIQYDTSRVSVVYGFYYVE

SEQ ID NO: 40491 - protein, 44 aa, Homo sapiens
  MAP TO AC026443.1; EXPRESSED IN ADULT LIVER, SIGNAL = 1.3; EXPRESSED IN HELA, SIGNAL =   3; EXPRESSED IN HEART, SIGNAL = 1.3; EXPRESSED IN FETAL LIVER, SIGNAL = 1.4; EXPRESSED IN BRAIN, SIGNAL = 1.4; EXPRESSED IN BONE MARROW, SIGNAL = 1.4; EXPRESSED IN LUNG, SIGNAL = 1.2; EXPRESSED IN PLACENTA, SIGNAL = 1.1; EST_HUMAN HIT: AV701291.1, EVALUE 2.00e-19
TTILPSDAMTSMCVTLEGKGLHLSLLVPRMGFTVDVPPTPPLHQ

SEQ ID NO: 40492 - protein, 28 aa, Homo sapiens
  MAP TO AC026443.1; EXPRESSED IN ADULT LIVER, SIGNAL = 1.3; EXPRESSED IN HELA, SIGNAL =   3; EXPRESSED IN HEART, SIGNAL = 1.3; EXPRESSED IN FETAL LIVER, SIGNAL = 1.4; EXPRESSED IN BRAIN, SIGNAL = 1.4; EXPRESSED IN BONE MARROW, SIGNAL = 1.4; EXPRESSED IN LUNG, SIGNAL = 1.2; EXPRESSED IN PLACENTA, SIGNAL = 1.1; EST_HUMAN HIT: AV703866.1, EVALUE 2.00e-10
PASCPICCLRWGSKTRLSLRSAARTVTW

SEQ ID NO: 40493 - protein, 29 aa, Homo sapiens
  MAP TO AC011929.3; EXPRESSED IN LUNG, SIGNAL = 2.5; EXPRESSED IN ADULT LIVER, SIGNAL = 2.2; EXPRESSED IN HEART, SIGNAL = 2.3; EXPRESSED IN FETAL LIVER, SIGNAL = 1.8; EXPRESSED IN BONE MARROW, SIGNAL = 2.3; EXPRESSED IN PLACENTA, SIGNAL = 2.2; EXPRESSED IN HELA, SIGNAL = 2.5; EXPRESSED IN BRAIN, SIGNAL =   2
DLLETLIRHKNNHLAGENHVSKPNANKVM

SEQ ID NO: 40494 - protein, 73 aa, Homo sapiens; identical to SEQ ID NO: 36877
  MAP TO AL109614.27; EXPRESSED IN LUNG, SIGNAL = 6.5; EXPRESSED IN PLACENTA, SIGNAL = 3.4; EXPRESSED IN HELA, SIGNAL =  15; EXPRESSED IN HEART, SIGNAL = 3.8; EXPRESSED IN FETAL LIVER, SIGNAL =  16; EXPRESSED IN ADULT LIVER, SIGNAL = 6.9; EXPRESSED IN BRAIN, SIGNAL =  17; EXPRESSED IN BONE MARROW, SIGNAL =  13; SWISSPROT HIT: P16152, EVALUE 8.40e+00; EST_HUMAN HIT: BE300363.1, EVALUE 2.00e-30

SEQ ID NO: 40495 - protein, 65 aa, Homo sapiens
  MAP TO AL080312.14; EXPRESSED IN ADULT LIVER, SIGNAL = 1.2; EXPRESSED IN BRAIN, SIGNAL = 1.4; EXPRESSED IN PLACENTA, SIGNAL = 1.6; EXPRESSED IN LUNG, SIGNAL = 1.4; EXPRESSED IN HEART, SIGNAL = 1.8; EXPRESSED IN FETAL LIVER, SIGNAL = 1.4; EXPRESSED IN BONE MARROW, SIGNAL = 1.5; EST_HUMAN HIT: AW024994.1, EVALUE 2.00e-39; SWISSPROT HIT: Q60519, EVALUE 1.80e+00
GTTGDHVPPGQHAEEAWSPPWGPCCHLHARVPIGCGSNAGLCQDRSCPHSHLCWLQCRVLGWEDQ

SEQ ID NO: 40496 - protein, 55 aa, Homo sapiens
  MAP TO AC007325.51; EXPRESSED IN ADULT LIVER, SIGNAL = 4.6; EXPRESSED IN FETAL LIVER, SIGNAL = 5.3; EXPRESSED IN LUNG, SIGNAL = 4.5; EXPRESSED IN BONE MARROW, SIGNAL = 5.2; EXPRESSED IN BRAIN, SIGNAL =   5; EXPRESSED IN HEART, SIGNAL = 5.4; EXPRESSED IN HELA, SIGNAL = 6.7; EXPRESSED IN PLACENTA, SIGNAL = 4.6; EST_HUMAN HIT: BF087215.1, EVALUE 3.00e-21; SWISSPROT HIT: Q26422, EVALUE 3.40e+00
LGWAGACADGIQACVCSCSSQRCWPSGGASFTKWLWSKGRRAWLPWTPSWRWRCC

SEQ ID NO: 40497 - protein, 50 aa, Homo sapiens
  MAP TO AC007325.51; EXPRESSED IN ADULT LIVER, SIGNAL = 4.6; EXPRESSED IN FETAL LIVER, SIGNAL = 5.3; EXPRESSED IN LUNG, SIGNAL = 4.5; EXPRESSED IN BONE MARROW, SIGNAL = 5.2; EXPRESSED IN BRAIN, SIGNAL =   5; EXPRESSED IN HEART, SIGNAL = 5.4; EXPRESSED IN HELA, SIGNAL = 6.7; EXPRESSED IN PLACENTA, SIGNAL = 4.6; EST_HUMAN HIT: BF087215.1, EVALUE 6.00e-14; SWISSPROT HIT: Q10978, EVALUE 2.70e+00
WGGQGRVQMAFRPAFAAAVLRGAGQVEVLLSPNGCGARAGGPGCHGHQAG

SEQ ID NO: 40498 - protein, 20 aa, Homo sapiens
  MAP TO AL157756.2; EXPRESSED IN ADULT LIVER, SIGNAL =   3; EXPRESSED IN HELA, SIGNAL = 4.3; EXPRESSED IN BRAIN, SIGNAL = 3.5; EXPRESSED IN LUNG, SIGNAL = 3.1; EXPRESSED IN PLACENTA, SIGNAL = 2.9; EXPRESSED IN BONE MARROW, SIGNAL = 3.9; EXPRESSED IN HEART, SIGNAL = 3.1; EXPRESSED IN FETAL LIVER, SIGNAL =   4
LNAFKCDKYALLIPIVSDPA

SEQ ID NO: 40499 - protein, 71 aa, Homo sapiens
  MAP TO AL136528.9; EXPRESSED IN PLACENTA, SIGNAL = 1.9; EXPRESSED IN ADULT LIVER, SIGNAL =   2; EXPRESSED IN FETAL LIVER, SIGNAL = 2.8; EXPRESSED IN BRAIN, SIGNAL = 2.3; EXPRESSED IN BONE MARROW, SIGNAL = 2.5; EXPRESSED IN LUNG, SIGNAL =   2; EXPRESSED IN HELA, SIGNAL = 2.7; EXPRESSED IN HEART, SIGNAL = 2.4; EST_HUMAN HIT: BE746404.1, EVALUE 5.00e-35; SWISSPROT HIT: P21684, EVALUE 2.50e+00
MGGKKKALHDYAAEFTDLVVKHLIEHSDSGDTSVVETLYCRACELPVRVRRDRILEHLSSGRQHGLRTPIL

SEQ ID NO: 40500 - protein, 19 aa, Homo sapiens
  MAP TO AL136528.9; EXPRESSED IN PLACENTA, SIGNAL = 1.9; EXPRESSED IN ADULT LIVER, SIGNAL =   2; EXPRESSED IN FETAL LIVER, SIGNAL = 2.8; EXPRESSED IN BRAIN, SIGNAL = 2.3; EXPRESSED IN BONE MARROW, SIGNAL = 2.5; EXPRESSED IN LUNG, SIGNAL =   2; EXPRESSED IN HELA, SIGNAL = 2.7; EXPRESSED IN HEART, SIGNAL = 2.4; EST_HUMAN HIT: BE746404.1, EVALUE 4.00e-04
WAGKRRLYTTTRRSSPTWW

SEQ ID NO: 40501 - protein, 32 aa, Homo sapiens
  MAP TO AC015473.3; EXPRESSED IN PLACENTA, SIGNAL = 1.7; EXPRESSED IN ADULT LIVER, SIGNAL = 2.4; EXPRESSED IN HEART, SIGNAL =   2; EXPRESSED IN FETAL LIVER, SIGNAL = 1.9; EXPRESSED IN BRAIN, SIGNAL = 2.1; EXPRESSED IN LUNG, SIGNAL = 2.3; EXPRESSED IN BONE MARROW, SIGNAL = 1.9
SLLRCCVLGLASGKLSSGVCVRLLGKLLLRRC

SEQ ID NO: 40502 - protein, 59 aa, Homo sapiens
  MAP TO AL162261.1; EXPRESSED IN LUNG, SIGNAL = 1.8; EXPRESSED IN PLACENTA, SIGNAL = 3.1; EXPRESSED IN ADULT LIVER, SIGNAL = 2.2; EXPRESSED IN BRAIN, SIGNAL = 1.8; EXPRESSED IN BONE MARROW, SIGNAL = 1.6; EXPRESSED IN HEART, SIGNAL = 3.5; EXPRESSED IN FETAL LIVER, SIGNAL = 1.4; EST_HUMAN HIT: T80284.1, EVALUE 2.00e-17
YIDLVGIHCEGSPKVKALGSGARPHSHIPLLLVLVLPRRTNQFCVYSVDGAGQMHKELW

SEQ ID NO: 40503 - protein, 21 aa, Homo sapiens
  MAP TO AL162261.1; EXPRESSED IN LUNG, SIGNAL = 1.8; EXPRESSED IN PLACENTA, SIGNAL = 3.1; EXPRESSED IN ADULT LIVER, SIGNAL = 2.2; EXPRESSED IN BRAIN, SIGNAL = 1.8; EXPRESSED IN BONE MARROW, SIGNAL = 1.6; EXPRESSED IN HEART, SIGNAL = 3.5; EXPRESSED IN FETAL LIVER, SIGNAL = 1.4; EST_HUMAN HIT: T80284.1, EVALUE 5.00e-04
EPTSSVFILSMVLVRCTRSSG

SEQ ID NO: 40504 - protein, 46 aa, Homo sapiens
  MAP TO AC013627.3; EXPRESSED IN LUNG, SIGNAL = 5.1; EXPRESSED IN ADULT LIVER, SIGNAL = 5.2; EXPRESSED IN HEART, SIGNAL = 4.6; EXPRESSED IN BRAIN, SIGNAL = 4.6; EXPRESSED IN BONE MARROW, SIGNAL = 4.5; EXPRESSED IN PLACENTA, SIGNAL = 4.9; EXPRESSED IN HELA, SIGNAL = 3.7; EXPRESSED IN FETAL LIVER, SIGNAL =   5; EST_HUMAN HIT: AI200976.1, EVALUE 1.60e-01; SWISSPROT HIT: Q14204, EVALUE 2.80e+00
HHDKSNSYRHREVSFLALDEQKVCSAQDVARDYSNPKWDETSLGFL

SEQ ID NO: 40505 - protein, 99 aa, Homo sapiens
  MAP TO AC013627.3; EXPRESSED IN LUNG, SIGNAL = 5.1; EXPRESSED IN ADULT LIVER, SIGNAL = 5.2; EXPRESSED IN HEART, SIGNAL = 4.6; EXPRESSED IN BRAIN, SIGNAL = 4.6; EXPRESSED IN BONE MARROW, SIGNAL = 4.5; EXPRESSED IN PLACENTA, SIGNAL = 4.9; EXPRESSED IN HELA, SIGNAL = 3.7; EXPRESSED IN FETAL LIVER, SIGNAL =   5; SWISSPROT HIT: P28476, EVALUE 2.50e+00; EST_HUMAN HIT: AA843600.1, EVALUE 2.60e-01
ICLGLTFCRSILPGSSESCRILKRRESCRTCQRNVFCLILDTMTSPTLTGIVKSLSWHWMNRKFAPLRMLPGITPIPNGMKPHLASSVGSLLFVPQICP

SEQ ID NO: 40506 - protein, 58 aa, Homo sapiens
  MAP TO AC008750.4; EXPRESSED IN PLACENTA, SIGNAL =   5; EXPRESSED IN ADULT LIVER, SIGNAL =   4; EXPRESSED IN HELA, SIGNAL = 4.9; EXPRESSED IN HEART, SIGNAL = 3.6; EXPRESSED IN FETAL LIVER, SIGNAL =   5; EXPRESSED IN LUNG, SIGNAL = 3.6; EXPRESSED IN BRAIN, SIGNAL = 3.9; EXPRESSED IN BONE MARROW, SIGNAL = 3.5; EST_HUMAN HIT: AI745263.1, EVALUE 8.00e-17; SWISSPROT HIT: P55344, EVALUE 1.00e-31
MYSFMGGGLFCAWVGTILLVVAMATDHWMQYRLSGSFAHQGLWRYCLGNKCYLQTDSI

SEQ ID NO: 40507 - protein, 58 aa, Homo sapiens
  MAP TO AC008750.4; EXPRESSED IN PLACENTA, SIGNAL =   5; EXPRESSED IN ADULT LIVER, SIGNAL =   4; EXPRESSED IN HELA, SIGNAL = 4.9; EXPRESSED IN HEART, SIGNAL = 3.6; EXPRESSED IN FETAL LIVER, SIGNAL =   5; EXPRESSED IN LUNG, SIGNAL = 3.6; EXPRESSED IN BRAIN, SIGNAL = 3.9; EXPRESSED IN BONE MARROW, SIGNAL = 3.5; EST_HUMAN HIT: AI745263.1, EVALUE 3.00e-12; SWISSPROT HIT: Q9R1C8, EVALUE 2.70e+00
CTASWVVACSVPGWGPSSWWWPWQQTTGCSTGCQGPSPTRACGGTAWATSATCRQTAS

SEQ ID NO: 40508 - protein, 44 aa, Homo sapiens
  MAP TO AL157392.2; EXPRESSED IN ADULT LIVER, SIGNAL = 2.4; EXPRESSED IN BRAIN, SIGNAL = 2.2; EXPRESSED IN BONE MARROW, SIGNAL = 2.4; EXPRESSED IN LUNG, SIGNAL =   3; EXPRESSED IN PLACENTA, SIGNAL = 2.5; EXPRESSED IN HEART, SIGNAL = 2.4; EXPRESSED IN FETAL LIVER, SIGNAL = 2.7; EST_HUMAN HIT: W04141.1, EVALUE 8.00e-03
SQESDSSQSAKKDMLAALKSRQEALEETLRQRLEELKKLCLREA

SEQ ID NO: 40509 - protein, 18 aa, Homo sapiens
  MAP TO AL157392.2; EXPRESSED IN ADULT LIVER, SIGNAL = 2.4; EXPRESSED IN BRAIN, SIGNAL = 2.2; EXPRESSED IN BONE MARROW, SIGNAL = 2.4; EXPRESSED IN LUNG, SIGNAL =   3; EXPRESSED IN PLACENTA, SIGNAL = 2.5; EXPRESSED IN HEART, SIGNAL = 2.4; EXPRESSED IN FETAL LIVER, SIGNAL = 2.7; EST_HUMAN HIT: W04141.1, EVALUE 1.00e-03
VLRNQIARSRPRRTCWLP

SEQ ID NO: 40510 - protein, 18 aa, Homo sapiens
  MAP TO AC011159.3; EXPRESSED IN PLACENTA, SIGNAL = 1.1; EXPRESSED IN ADULT LIVER, SIGNAL = 1.2; EXPRESSED IN HEART, SIGNAL = 1.2; EXPRESSED IN FETAL LIVER, SIGNAL = 1.1; EXPRESSED IN BRAIN, SIGNAL = 1.1; EXPRESSED IN BONE MARROW, SIGNAL =   1; EXPRESSED IN LUNG, SIGNAL = 1.3
KYDDDDDDHDDHDDDDDD

SEQ ID NO: 40511 - protein, 25 aa, Homo sapiens
  MAP TO AC018395.4; EXPRESSED IN BONE MARROW, SIGNAL = 1.7; EXPRESSED IN LUNG, SIGNAL =   2; EXPRESSED IN ADULT LIVER, SIGNAL = 1.6; EXPRESSED IN FETAL LIVER, SIGNAL = 1.8; EXPRESSED IN PLACENTA, SIGNAL = 1.9; EXPRESSED IN HEART, SIGNAL = 1.9; EXPRESSED IN BRAIN, SIGNAL = 1.6
DQSCLCKINVRPQIMIMRRAWTLLK

SEQ ID NO: 40512 - protein, 99 aa, Homo sapiens
  MAP TO AC015525.3; EXPRESSED IN ADULT LIVER, SIGNAL = 2.1; EXPRESSED IN FETAL LIVER, SIGNAL = 2.3; EXPRESSED IN BRAIN, SIGNAL = 2.2; EXPRESSED IN PLACENTA, SIGNAL = 2.1; EXPRESSED IN HELA, SIGNAL = 3.2; EXPRESSED IN BONE MARROW, SIGNAL = 2.6; EXPRESSED IN LUNG, SIGNAL = 2.2; EXPRESSED IN HEART, SIGNAL = 2.4; EST_HUMAN HIT: BE348588.1, EVALUE 3.00e-09; SWISSPROT HIT: P13784, EVALUE 2.20e-01
PHRCISSCQSYSTFSSENFSVSDGEEGNTSDHSNSPDELADKLEDRLAEKLDDLLSQTPEIPIDISSHSDGLSDKECAVRRVKTQMSLGKLCVEERGYE

SEQ ID NO: 40513 - protein, 38 aa, Homo sapiens
  MAP TO AC015525.3; EXPRESSED IN ADULT LIVER, SIGNAL = 2.1; EXPRESSED IN FETAL LIVER, SIGNAL = 2.3; EXPRESSED IN BRAIN, SIGNAL = 2.2; EXPRESSED IN PLACENTA, SIGNAL = 2.1; EXPRESSED IN HELA, SIGNAL = 3.2; EXPRESSED IN BONE MARROW, SIGNAL = 2.6; EXPRESSED IN LUNG, SIGNAL = 2.2; EXPRESSED IN HEART, SIGNAL = 2.4
PIAVSAAASHIQPLALRISLCLMEKREIPVTTQTVLMS

SEQ ID NO: 40514 - protein, 45 aa, Homo sapiens
  MAP TO AL139819.2; EXPRESSED IN ADULT LIVER, SIGNAL = 5.1; EXPRESSED IN HELA, SIGNAL =   5; EXPRESSED IN BRAIN, SIGNAL = 4.1; EXPRESSED IN LUNG, SIGNAL = 5.1; EXPRESSED IN PLACENTA, SIGNAL = 4.2; EXPRESSED IN BONE MARROW, SIGNAL = 4.5; EXPRESSED IN FETAL LIVER, SIGNAL = 3.9; EXPRESSED IN HEART, SIGNAL = 4.2; EST_HUMAN HIT: BF061077.1, EVALUE 1.00e-10
CYLALAKGGLSDDHVLILPIGHYQSVVELSAEVVEEVEKYKATLR

SEQ ID NO: 40515 - protein, 33 aa, Homo sapiens
  MAP TO AL139819.2; EXPRESSED IN ADULT LIVER, SIGNAL = 5.1; EXPRESSED IN HELA, SIGNAL =   5; EXPRESSED IN BRAIN, SIGNAL = 4.1; EXPRESSED IN LUNG, SIGNAL = 5.1; EXPRESSED IN PLACENTA, SIGNAL = 4.2; EXPRESSED IN BONE MARROW, SIGNAL = 4.5; EXPRESSED IN FETAL LIVER, SIGNAL = 3.9; EXPRESSED IN HEART, SIGNAL = 4.2; EST_HUMAN HIT: BF061077.1, EVALUE 2.00e-14
ATLPWPKEAYLMTMSSSCLLDTTSQWWSFQQRW

SEQ ID NO: 40516 - protein, 27 aa, Homo sapiens
  MAP TO AC012619.3; EXPRESSED IN LUNG, SIGNAL = 1.8; EXPRESSED IN PLACENTA, SIGNAL = 2.3; EXPRESSED IN HEART, SIGNAL = 3.1; EXPRESSED IN ADULT LIVER, SIGNAL = 2.2; EXPRESSED IN FETAL LIVER, SIGNAL = 2.5; EXPRESSED IN BRAIN, SIGNAL = 2.8; EXPRESSED IN BONE MARROW, SIGNAL = 2.3
AHWMAHFWTLTMMMMMMMMMMIKQGRQ

SEQ ID NO: 40517 - protein, 24 aa, Homo sapiens
  MAP TO AC025747.3; EXPRESSED IN FETAL LIVER, SIGNAL = 2.3; EXPRESSED IN HELA, SIGNAL = 3.8; EXPRESSED IN HEART, SIGNAL = 2.6; EXPRESSED IN BONE MARROW, SIGNAL = 2.4; EXPRESSED IN BRAIN, SIGNAL = 2.2; EXPRESSED IN ADULT LIVER, SIGNAL = 3.6; EXPRESSED IN PLACENTA, SIGNAL = 2.6; EXPRESSED IN LUNG, SIGNAL = 2.7
SPWATRTAREIRNTSIEHGITCLN

SEQ ID NO: 40518 - protein, 52 aa, Homo sapiens
  MAP TO AL132857.3; EXPRESSED IN LUNG, SIGNAL =   2; EXPRESSED IN PLACENTA, SIGNAL = 1.9; EXPRESSED IN ADULT LIVER, SIGNAL = 1.8; EXPRESSED IN HEART, SIGNAL = 1.8; EXPRESSED IN FETAL LIVER, SIGNAL = 1.8; EXPRESSED IN BRAIN, SIGNAL = 1.8; EXPRESSED IN BONE MARROW, SIGNAL = 1.7; EST_HUMAN HIT: BF348824.1, EVALUE 1.00e-07; SWISSPROT HIT: P12798, EVALUE 9.00e-10
IAVELLMVISVILKTKFLVGLSRQKVDLDKLMKEAFHEFQKYEIQLKEAEKQ

SEQ ID NO: 40519 - protein, 48 aa, Homo sapiens
  MAP TO AC010503.3; EXPRESSED IN PLACENTA, SIGNAL = 1.7; EXPRESSED IN ADULT LIVER, SIGNAL = 2.2; EXPRESSED IN HELA, SIGNAL = 2.8; EXPRESSED IN HEART, SIGNAL = 1.8; EXPRESSED IN FETAL LIVER, SIGNAL = 1.8; EXPRESSED IN BONE MARROW, SIGNAL = 1.5; EXPRESSED IN LUNG, SIGNAL = 1.2; EXPRESSED IN BRAIN, SIGNAL = 1.4; EST_HUMAN HIT: AA676730.1, EVALUE 2.00e-07
RPEAITAIIVVFSLLAALLLAVGLALLVRKLREKRQTEGTYRPSSEEQ

SEQ ID NO: 40520 - protein, 68 aa, Homo sapiens
  MAP TO AC010503.3; EXPRESSED IN PLACENTA, SIGNAL = 1.7; EXPRESSED IN ADULT LIVER, SIGNAL = 2.2; EXPRESSED IN HELA, SIGNAL = 2.8; EXPRESSED IN HEART, SIGNAL = 1.8; EXPRESSED IN FETAL LIVER, SIGNAL = 1.8; EXPRESSED IN BONE MARROW, SIGNAL = 1.5; EXPRESSED IN LUNG, SIGNAL = 1.2; EXPRESSED IN BRAIN, SIGNAL = 1.4; SWISSPROT HIT: P01267, EVALUE 1.80e+00; EST_HUMAN HIT: AI557509.1, EVALUE 2.00e-10
VQKPSLLSSWSSPSWLPCSWLWGWHCWCGSFGRSGRRRAPTGPVARSRWVPACHRPPTSSCRRKSGSS

SEQ ID NO: 40521 - protein, 73 aa, Homo sapiens
  MAP TO AL137853.3; EXPRESSED IN ADULT LIVER, SIGNAL = 1.2; EXPRESSED IN BRAIN, SIGNAL = 1.2; EXPRESSED IN LUNG, SIGNAL = 1.5; EXPRESSED IN PLACENTA, SIGNAL = 1.3; EXPRESSED IN BONE MARROW, SIGNAL = 1.1; EXPRESSED IN HEART, SIGNAL = 1.3; EXPRESSED IN FETAL LIVER, SIGNAL = 1.1; EST_HUMAN HIT: BE930680.1, EVALUE 2.00e-17; SWISSPROT HIT: Q13813, EVALUE 3.00e-03
EKTESLIQQYEAISLLNSERYARLERAQVLVNQFWETYEELSPWIEETRALIAQLPSPAIDHEQLRQQQEEMR

SEQ ID NO: 40522 - protein, 33 aa, Homo sapiens
  MAP TO AC022038.2; EXPRESSED IN BRAIN, SIGNAL = 1.1; EXPRESSED IN PLACENTA, SIGNAL = 1.3; EXPRESSED IN ADULT LIVER, SIGNAL = 1.4; EXPRESSED IN HEART, SIGNAL = 1.2; EXPRESSED IN FETAL LIVER, SIGNAL = 1.1; EXPRESSED IN BONE MARROW, SIGNAL = 1.2; EXPRESSED IN LUNG, SIGNAL = 1.3
QQIDDSSRSRLKNTKIQKYYQSHFMQFMQLNFP

SEQ ID NO: 40523 - protein, 59 aa, Homo sapiens
  MAP TO AC025011.2; EXPRESSED IN HELA, SIGNAL =  11; EXPRESSED IN BONE MARROW, SIGNAL = 6.8; EXPRESSED IN LUNG, SIGNAL = 4.9; EXPRESSED IN ADULT LIVER, SIGNAL = 5.3; EXPRESSED IN FETAL LIVER, SIGNAL = 9.3; EXPRESSED IN PLACENTA, SIGNAL = 7.2; EXPRESSED IN HEART, SIGNAL = 6.3; EXPRESSED IN BRAIN, SIGNAL =  10; EST_HUMAN HIT: AW960931.1, EVALUE 8.00e-08; SWISSPROT HIT: P30436, EVALUE 1.00e-07
ALNMDLTEFQINLVASTRIYIPPAIYVPVICREGVPQQLFLAGIANACFQPASQMAKCD

SEQ ID NO: 40524 - protein, 35 aa, Homo sapiens
  MAP TO AC025011.2; EXPRESSED IN HELA, SIGNAL =  11; EXPRESSED IN BONE MARROW, SIGNAL = 6.8; EXPRESSED IN LUNG, SIGNAL = 4.9; EXPRESSED IN ADULT LIVER, SIGNAL = 5.3; EXPRESSED IN FETAL LIVER, SIGNAL = 9.3; EXPRESSED IN PLACENTA, SIGNAL = 7.2; EXPRESSED IN HEART, SIGNAL = 6.3; EXPRESSED IN BRAIN, SIGNAL =  10; EST_HUMAN HIT: AA180912.1, EVALUE 8.60e-01
LVPSWWTTKPSMTIAATTWTLSPQPTPTSTSSLAK

SEQ ID NO: 40525 - protein, 94 aa, Homo sapiens
  MAP TO AC013626.3; EXPRESSED IN FETAL LIVER, SIGNAL = 1.1; EXPRESSED IN LUNG, SIGNAL =   1; EXPRESSED IN PLACENTA, SIGNAL =   1; EXPRESSED IN ADULT LIVER, SIGNAL = 1.1; EXPRESSED IN BRAIN, SIGNAL =   1; EXPRESSED IN BONE MARROW, SIGNAL = 1.3; EXPRESSED IN HEART, SIGNAL = 1.4; EST_HUMAN HIT: AA300640.1, EVALUE 6.90e-02; SWISSPROT HIT: Q09731, EVALUE 2.80e+00
VMPMLLEPGPQFEEHYYRGNIPLAEMLGLMSKPELTHCPVIHSRQASCQQTVEEHAKYTSIEQMHRFKKTPLNSCFCLRKQIGPVSDKCIHGYQ

SEQ ID NO: 40526 - protein, 50 aa, Homo sapiens
  MAP TO AC019276.3; EXPRESSED IN ADULT LIVER, SIGNAL = 0.87; EXPRESSED IN LUNG, SIGNAL = 1.1; EXPRESSED IN PLACENTA, SIGNAL = 1.2; EXPRESSED IN HEART, SIGNAL = 1.4; EXPRESSED IN FETAL LIVER, SIGNAL = 1.6; EXPRESSED IN BRAIN, SIGNAL = 1.2; EXPRESSED IN BONE MARROW, SIGNAL = 1.2; EST_HUMAN HIT: AA668858.1, EVALUE 3.00e-20; SWISSPROT HIT: P29376, EVALUE 2.10e+00
GNWGDQGGAPGPPLIQPEKLSSLPGSQAGFPWAGVGGSAALKPLERLENQ

SEQ ID NO: 40527 - protein, 34 aa, Homo sapiens
  MAP TO AC013691.3; EXPRESSED IN PLACENTA, SIGNAL = 2.2; EXPRESSED IN ADULT LIVER, SIGNAL = 2.4; EXPRESSED IN FETAL LIVER, SIGNAL = 2.2; EXPRESSED IN BRAIN, SIGNAL = 2.2; EXPRESSED IN BONE MARROW, SIGNAL = 1.7; EXPRESSED IN LUNG, SIGNAL = 2.3; EXPRESSED IN HELA, SIGNAL = 2.9; EXPRESSED IN HEART, SIGNAL = 2.6; SWISSPROT HIT: P14501, EVALUE 3.80e+00
MAWQRALLQLAGPSFHAVLLVAGRSDGRKGSLDT

SEQ ID NO: 40528 - protein, 34 aa, Homo sapiens
  MAP TO AC013691.3; EXPRESSED IN PLACENTA, SIGNAL = 2.2; EXPRESSED IN ADULT LIVER, SIGNAL = 2.4; EXPRESSED IN FETAL LIVER, SIGNAL = 2.2; EXPRESSED IN BRAIN, SIGNAL = 2.2; EXPRESSED IN BONE MARROW, SIGNAL = 1.7; EXPRESSED IN LUNG, SIGNAL = 2.3; EXPRESSED IN HELA, SIGNAL = 2.9; EXPRESSED IN HEART, SIGNAL = 2.6; EST_HUMAN HIT: BF092084.1, EVALUE 1.50e+00
WPGRGPCCSWQDQVSMRCCWWLGGVMAARVPWTQ

SEQ ID NO: 40529 - protein, 94 aa, Homo sapiens
  MAP TO AL137225.7; EXPRESSED IN LUNG, SIGNAL = 1.3; EXPRESSED IN FETAL LIVER, SIGNAL = 1.1; EXPRESSED IN HEART, SIGNAL = 1.3; EXPRESSED IN PLACENTA, SIGNAL = 1.3; EXPRESSED IN ADULT LIVER, SIGNAL = 1.2; EXPRESSED IN BRAIN, SIGNAL = 1.3; EXPRESSED IN BONE MARROW, SIGNAL = 1.2; EST_HUMAN HIT: W26876.1, EVALUE 5.40e-02; SWISSPROT HIT: P51989, EVALUE 2.00e-03
FPSGYGQTEAGQSGGYDQFGTGSFGRYGQSEAGSINVQSGSRPSNGMGQLGAESMNSQPGAKPSGSHGQFGTGSLGAYSQSGSGSSGSLGRSGA

SEQ ID NO: 40530 - protein, 59 aa, Homo sapiens
  MAP TO AL136419.2; EXPRESSED IN HEART, SIGNAL = 1.4; EXPRESSED IN BONE MARROW, SIGNAL = 1.3; EXPRESSED IN ADULT LIVER, SIGNAL = 2.2; EXPRESSED IN BRAIN, SIGNAL = 1.3; EXPRESSED IN LUNG, SIGNAL = 1.5; EXPRESSED IN PLACENTA, SIGNAL = 1.2; EXPRESSED IN FETAL LIVER, SIGNAL = 1.4; EST_HUMAN HIT: BE798992.1, EVALUE 3.00e-26; SWISSPROT HIT: Q13268, EVALUE 8.00e-23
IGFAIARRLAQDGAHVVVSSRKQQNVDQAVATLQGEGLSVTGTVCHVGKAEDRERLVAT

SEQ ID NO: 40531 - protein, 49 aa, Homo sapiens
  MAP TO AL136419.2; EXPRESSED IN HEART, SIGNAL = 1.4; EXPRESSED IN BONE MARROW, SIGNAL = 1.3; EXPRESSED IN ADULT LIVER, SIGNAL = 2.2; EXPRESSED IN BRAIN, SIGNAL = 1.3; EXPRESSED IN LUNG, SIGNAL = 1.5; EXPRESSED IN PLACENTA, SIGNAL = 1.2; EXPRESSED IN FETAL LIVER, SIGNAL = 1.4
PGGGHAAGGGAERDGHRVPCGEGGGPGAAGGHGELQGNGHRARRWKTEP

SEQ ID NO: 40532 - protein, 72 aa, Homo sapiens
  MAP TO AC024193.2; EXPRESSED IN LUNG, SIGNAL = 1.2; EXPRESSED IN PLACENTA, SIGNAL = 1.2; EXPRESSED IN HEART, SIGNAL = 1.2; EXPRESSED IN BONE MARROW, SIGNAL = 1.2; EXPRESSED IN ADULT LIVER, SIGNAL = 1.7; EXPRESSED IN FETAL LIVER, SIGNAL = 1.2; EXPRESSED IN BRAIN, SIGNAL = 1.1; SWISSPROT HIT: O83990, EVALUE 6.90e+00; EST_HUMAN HIT: AA492130.1, EVALUE 1.00e-07
MKEFSSKPTDLDVNLTLKNTFTAASRLVFDQISGYRGLAKLKCKINHHTSHQPHEVNIIIPMLQMRKLRLRE

SEQ ID NO: 40533 - protein, 65 aa, Homo sapiens
  MAP TO AC013751.3; EXPRESSED IN HEART, SIGNAL = 1.8; EXPRESSED IN BRAIN, SIGNAL = 1.9; EXPRESSED IN BONE MARROW, SIGNAL = 1.8; EXPRESSED IN LUNG, SIGNAL = 2.2; EXPRESSED IN HELA, SIGNAL = 2.5; EXPRESSED IN PLACENTA, SIGNAL = 1.9; EXPRESSED IN ADULT LIVER, SIGNAL = 1.9; EXPRESSED IN FETAL LIVER, SIGNAL = 1.8; SWISSPROT HIT: O15255, EVALUE 4.80e-01; EST_HUMAN HIT: BE293560.1, EVALUE 3.00e-19
SWMQRRSSFSICSFRSTFSCMSSIKWLCSFSMAPCRAGWASPHTESPPVPGTRAAASGSFWTEAT

SEQ ID NO: 40534 - protein, 19 aa, Homo sapiens
  MAP TO AC013751.3; EXPRESSED IN HEART, SIGNAL = 1.8; EXPRESSED IN BRAIN, SIGNAL = 1.9; EXPRESSED IN BONE MARROW, SIGNAL = 1.8; EXPRESSED IN LUNG, SIGNAL = 2.2; EXPRESSED IN HELA, SIGNAL = 2.5; EXPRESSED IN PLACENTA, SIGNAL = 1.9; EXPRESSED IN ADULT LIVER, SIGNAL = 1.9; EXPRESSED IN FETAL LIVER, SIGNAL = 1.8; EST_HUMAN HIT: BE275270.1, EVALUE 7.00e-04
GPWRSCRATLWSSCRRRWT

SEQ ID NO: 40535 - protein, 32 aa, Homo sapiens
  MAP TO AC015502.3; EXPRESSED IN PLACENTA, SIGNAL = 1.2; EXPRESSED IN FETAL LIVER, SIGNAL = 1.3; EXPRESSED IN ADULT LIVER, SIGNAL = 1.6; EXPRESSED IN BONE MARROW, SIGNAL = 1.3; EXPRESSED IN HEART, SIGNAL = 1.3; EXPRESSED IN BRAIN, SIGNAL = 1.3; EXPRESSED IN LUNG, SIGNAL = 2.6; EXPRESSED IN HELA, SIGNAL = 2.4
ARGGVCFPRHCKSLLFYPLSYSVQMWIIRHLK

SEQ ID NO: 40536 - protein, 34 aa, Homo sapiens
  MAP TO AC011930.3; EXPRESSED IN LUNG, SIGNAL = 2.6; EXPRESSED IN BRAIN, SIGNAL = 2.4; EXPRESSED IN PLACENTA, SIGNAL = 2.2; EXPRESSED IN ADULT LIVER, SIGNAL = 2.1; EXPRESSED IN HEART, SIGNAL = 2.1; EXPRESSED IN FETAL LIVER, SIGNAL = 2.5; EXPRESSED IN BONE MARROW, SIGNAL = 2.5; EST_HUMAN HIT: H08109.1, EVALUE 3.00e-11; SWISSPROT HIT: Q41266, EVALUE 8.50e+00
KVITVLAACLESENQNAQRIGAAALWALIYNYQK

SEQ ID NO: 40537 - protein, 28 aa, Homo sapiens
  MAP TO AC011930.3; EXPRESSED IN LUNG, SIGNAL = 2.6; EXPRESSED IN BRAIN, SIGNAL = 2.4; EXPRESSED IN PLACENTA, SIGNAL = 2.2; EXPRESSED IN ADULT LIVER, SIGNAL = 2.1; EXPRESSED IN HEART, SIGNAL = 2.1; EXPRESSED IN FETAL LIVER, SIGNAL = 2.5; EXPRESSED IN BONE MARROW, SIGNAL = 2.5; EST_HUMAN HIT: R14782.1, EVALUE 4.00e-09
KKSLLCLLPVWKVRIKMLRGLEQLPFGL

SEQ ID NO: 40538 - protein, 31 aa, Homo sapiens
  MAP TO AC025119.2; EXPRESSED IN BONE MARROW, SIGNAL = 1.5; EXPRESSED IN ADULT LIVER, SIGNAL = 1.9; EXPRESSED IN HELA, SIGNAL = 2.4; EXPRESSED IN FETAL LIVER, SIGNAL = 1.6; EXPRESSED IN LUNG, SIGNAL = 1.6; EXPRESSED IN PLACENTA, SIGNAL = 1.7; EXPRESSED IN HEART, SIGNAL = 1.7; EXPRESSED IN BRAIN, SIGNAL = 1.6; EST_HUMAN HIT: AW009264.1, EVALUE 7.70e+00
ITWGSWMVMMVWTTGARERRPRTHQSCCWIM

SEQ ID NO: 40539 - protein, 27 aa, Homo sapiens
  MAP TO AC023134.3; EXPRESSED IN FETAL LIVER, SIGNAL = 1.3; EXPRESSED IN LUNG, SIGNAL = 1.5; EXPRESSED IN PLACENTA, SIGNAL = 1.5; EXPRESSED IN ADULT LIVER, SIGNAL = 1.6; EXPRESSED IN BRAIN, SIGNAL = 1.5; EXPRESSED IN BONE MARROW, SIGNAL = 1.3; EXPRESSED IN HEART, SIGNAL = 1.6; EST_HUMAN HIT: AA447609.1, EVALUE 4.60e+00
SGVQKSEISNTRIKSRYHQGCIASKAI

SEQ ID NO: 40540 - protein, 24 aa, Homo sapiens
  MAP TO AL136976.3; EXPRESSED IN LUNG, SIGNAL = 1.5; EXPRESSED IN PLACENTA, SIGNAL = 1.1; EXPRESSED IN HEART, SIGNAL = 1.3; EXPRESSED IN FETAL LIVER, SIGNAL = 1.5; EXPRESSED IN ADULT LIVER, SIGNAL = 1.1; EXPRESSED IN BRAIN, SIGNAL = 1.5; EXPRESSED IN BONE MARROW, SIGNAL = 1.2
AAAATTTTTTTTTTTTTTTETKNN

SEQ ID NO: 40541 - protein, 63 aa, Homo sapiens
  MAP TO AC026442.1; EXPRESSED IN LUNG, SIGNAL = 1.2; EXPRESSED IN FETAL LIVER, SIGNAL = 1.2; EXPRESSED IN BRAIN, SIGNAL = 1.3; EXPRESSED IN PLACENTA, SIGNAL = 1.3; EXPRESSED IN HEART, SIGNAL = 1.5; EXPRESSED IN ADULT LIVER, SIGNAL = 1.5; EXPRESSED IN BONE MARROW, SIGNAL = 1.3; EST_HUMAN HIT: BE063509.1, EVALUE 3.00e-05; SWISSPROT HIT: P48640, EVALUE 2.00e+00
TVSEGMCTLPAILGVISSSTPVVLGTISQRGCTPSAILGVISSSFPWMYQTISQGGAHHLRYW

SEQ ID NO: 40542 - protein, 61 aa, Homo sapiens
  MAP TO AC007326.28; EXPRESSED IN PLACENTA, SIGNAL = 1.7; EXPRESSED IN FETAL LIVER, SIGNAL = 1.7; EXPRESSED IN BONE MARROW, SIGNAL = 1.2; EXPRESSED IN HEART, SIGNAL = 1.4; EXPRESSED IN BRAIN, SIGNAL = 2.2; EST_HUMAN HIT: AI905037.1, EVALUE 3.00e-09; SWISSPROT HIT: O43272, EVALUE 3.00e-10
QAGYPVYKYVPYGPVMEVLPYLSRRALENSSLMKGTHRERQLLWLELLRRLRTGNLFHRPA

SEQ ID NO: 40543 - protein, 20 aa, Homo sapiens
  MAP TO AC007326.28; EXPRESSED IN PLACENTA, SIGNAL = 1.7; EXPRESSED IN FETAL LIVER, SIGNAL = 1.7; EXPRESSED IN BONE MARROW, SIGNAL = 1.2; EXPRESSED IN HEART, SIGNAL = 1.4; EXPRESSED IN BRAIN, SIGNAL = 2.2; EST_HUMAN HIT: AV694817.1, EVALUE 1.00e-02
SAPMQARPATPCTSTCPMAP

SEQ ID NO: 40544 - protein, 47 aa, Homo sapiens
  MAP TO AL136112.9; EXPRESSED IN HELA, SIGNAL = 2.3; EXPRESSED IN LUNG, SIGNAL = 3.6; EXPRESSED IN PLACENTA, SIGNAL = 1.5; EXPRESSED IN ADULT LIVER, SIGNAL = 2.8; EXPRESSED IN BRAIN, SIGNAL = 3.7; EXPRESSED IN BONE MARROW, SIGNAL = 2.7; EXPRESSED IN FETAL LIVER, SIGNAL = 4.5; EXPRESSED IN HEART, SIGNAL = 1.3; SWISSPROT HIT: P54102, EVALUE 2.00e-19; EST_HUMAN HIT: BE206521.1, EVALUE 3.00e-18
GGRMHRERRGKNVVHQLSVTLEDLYNSATRKLALQKNAICDKCEDRG

SEQ ID NO: 40545 - protein, 19 aa, Homo sapiens
  MAP TO AL136112.9; EXPRESSED IN HELA, SIGNAL = 2.3; EXPRESSED IN LUNG, SIGNAL = 3.6; EXPRESSED IN PLACENTA, SIGNAL = 1.5; EXPRESSED IN ADULT LIVER, SIGNAL = 2.8; EXPRESSED IN BRAIN, SIGNAL = 3.7; EXPRESSED IN BONE MARROW, SIGNAL = 2.7; EXPRESSED IN FETAL LIVER, SIGNAL = 4.5; EXPRESSED IN HEART, SIGNAL = 1.3; EST_HUMAN HIT: BE206521.1, EVALUE 6.00e-03
EEEGCTEKGEVKMLYISSQ

SEQ ID NO: 40546 - protein, 25 aa, Homo sapiens
  MAP TO AC011859.4; EXPRESSED IN LUNG, SIGNAL =  10; EXPRESSED IN ADULT LIVER, SIGNAL = 9.3; EXPRESSED IN HEART, SIGNAL =  11; EXPRESSED IN BONE MARROW, SIGNAL = 9.1; EXPRESSED IN BRAIN, SIGNAL =  12; EXPRESSED IN FETAL LIVER, SIGNAL = 9.5; EXPRESSED IN HELA, SIGNAL =  11; EXPRESSED IN PLACENTA, SIGNAL = 8.8; EST_HUMAN HIT: BF108755.1, EVALUE 1.00e-05
KVFKNDTMHGAVISYDNNAFFWNTS

SEQ ID NO: 40547 - protein, 25 aa, Homo sapiens
  MAP TO AC011859.4; EXPRESSED IN LUNG, SIGNAL =  10; EXPRESSED IN ADULT LIVER, SIGNAL = 9.3; EXPRESSED IN HEART, SIGNAL =  11; EXPRESSED IN BONE MARROW, SIGNAL = 9.1; EXPRESSED IN BRAIN, SIGNAL =  12; EXPRESSED IN FETAL LIVER, SIGNAL = 9.5; EXPRESSED IN HELA, SIGNAL =  11; EXPRESSED IN PLACENTA, SIGNAL = 8.8; EST_HUMAN HIT: BF108755.1, EVALUE 1.00e-03
RSSRMIPCMELSSPMITMPSSGIPP

SEQ ID NO: 40548 - protein, 19 aa, Homo sapiens
  MAP TO AC009943.4; EXPRESSED IN ADULT LIVER, SIGNAL = 2.3; EXPRESSED IN HEART, SIGNAL = 2.6; EXPRESSED IN BONE MARROW, SIGNAL = 2.8; EXPRESSED IN LUNG, SIGNAL = 2.5; EXPRESSED IN PLACENTA, SIGNAL = 2.6; EXPRESSED IN HELA, SIGNAL = 3.1; EXPRESSED IN FETAL LIVER, SIGNAL = 2.6; EXPRESSED IN BRAIN, SIGNAL = 2.1
WCLIRRESLDKDRCRGKTM

SEQ ID NO: 40549 - protein, 43 aa, Homo sapiens
  MAP TO AL158206.3; EXPRESSED IN LUNG, SIGNAL = 1.1; EXPRESSED IN ADULT LIVER, SIGNAL = 0.83; EXPRESSED IN HEART, SIGNAL = 1.4; EXPRESSED IN BRAIN, SIGNAL =   1; EXPRESSED IN BONE MARROW, SIGNAL =   1; EXPRESSED IN PLACENTA, SIGNAL = 1.3; EXPRESSED IN FETAL LIVER, SIGNAL = 1.2; EST_HUMAN HIT: AI377293.1, EVALUE 8.10e-01; SWISSPROT HIT: P48434, EVALUE 8.20e+00
PAQISDRAATAPGLRHWWLLCKQQEAGQGPSAPPLCTHHQWTP

SEQ ID NO: 40550 - protein, 33 aa, Homo sapiens
  MAP TO AL135923.11; EXPRESSED IN BONE MARROW, SIGNAL = 5.1; EXPRESSED IN ADULT LIVER, SIGNAL = 3.9; EXPRESSED IN HEART, SIGNAL = 4.8; EXPRESSED IN BRAIN, SIGNAL = 4.4; EXPRESSED IN LUNG, SIGNAL = 5.1; EXPRESSED IN PLACENTA, SIGNAL = 4.8; EXPRESSED IN FETAL LIVER, SIGNAL = 4.9; SWISSPROT HIT: Q09446, EVALUE 9.80e-01
TVNSVSTKTVSQVHHFSINLQHNGHSVNIHLYL

SEQ ID NO: 40551 - protein, 37 aa, Homo sapiens
  MAP TO AC010160.6; EXPRESSED IN ADULT LIVER, SIGNAL = 1.9; EXPRESSED IN BRAIN, SIGNAL = 1.7; EXPRESSED IN LUNG, SIGNAL = 2.1; EXPRESSED IN PLACENTA, SIGNAL = 1.9; EXPRESSED IN BONE MARROW, SIGNAL = 1.8; EXPRESSED IN FETAL LIVER, SIGNAL = 1.7; EXPRESSED IN HEART, SIGNAL = 1.9
AEQQVEAKITFILCVRPHSQEEEKLENNPGVAHSKSQ

SEQ ID NO: 40552 - protein, 31 aa, Homo sapiens
  MAP TO AC022050.2; EXPRESSED IN PLACENTA, SIGNAL = 1.4; EXPRESSED IN FETAL LIVER, SIGNAL = 1.2; EXPRESSED IN LUNG, SIGNAL = 1.2; EXPRESSED IN ADULT LIVER, SIGNAL = 1.4; EXPRESSED IN BRAIN, SIGNAL = 1.2; EXPRESSED IN BONE MARROW, SIGNAL = 1.3; EXPRESSED IN HEART, SIGNAL = 1.2; SWISSPROT HIT: P43636, EVALUE 2.20e+00
KKMRTVSASWNFGKNYGAETYRYLSTEPDFY

SEQ ID NO: 40553 - protein, 34 aa, Homo sapiens
  MAP TO AC009695.4; EXPRESSED IN PLACENTA, SIGNAL = 1.5; EXPRESSED IN BONE MARROW, SIGNAL = 1.3; EXPRESSED IN ADULT LIVER, SIGNAL = 1.5; EXPRESSED IN HEART, SIGNAL = 1.7; EXPRESSED IN BRAIN, SIGNAL = 1.3; EXPRESSED IN LUNG, SIGNAL = 1.6; EXPRESSED IN FETAL LIVER, SIGNAL = 1.3
DPPYNLKNKEEEEEKEEEGEEKVEHNVSIQVKKQ

SEQ ID NO: 40554 - protein, 162 aa, Homo sapiens; identical to SEQ ID NO: 36398
  MAP TO AC007981.43; EXPRESSED IN LUNG, SIGNAL = 1.7; EXPRESSED IN PLACENTA, SIGNAL = 2.8; EXPRESSED IN ADULT LIVER, SIGNAL =   1; EXPRESSED IN HELA, SIGNAL = 4.6; EXPRESSED IN HEART, SIGNAL = 2.9; EXPRESSED IN FETAL LIVER, SIGNAL = 3.8; EXPRESSED IN BRAIN, SIGNAL = 2.6; EXPRESSED IN BONE MARROW, SIGNAL =   3; EST_HUMAN HIT: AI806336.1, EVALUE 4.00e-39; SWISSPROT HIT: P36268, EVALUE 3.00e-39

SEQ ID NO: 40555 - protein, 25 aa, Homo sapiens
  MAP TO AC007981.43; EXPRESSED IN LUNG, SIGNAL = 1.7; EXPRESSED IN PLACENTA, SIGNAL = 2.8; EXPRESSED IN ADULT LIVER, SIGNAL =   1; EXPRESSED IN HELA, SIGNAL = 4.6; EXPRESSED IN HEART, SIGNAL = 2.9; EXPRESSED IN FETAL LIVER, SIGNAL = 3.8; EXPRESSED IN BRAIN, SIGNAL = 2.6; EXPRESSED IN BONE MARROW, SIGNAL =   3; EST_HUMAN HIT: AI026655.1, EVALUE 3.60e-02
LPASPMSLGHPPHLPISSSQVWGGG

SEQ ID NO: 40556 - protein, 37 aa, Homo sapiens
  MAP TO AC007981.43; EXPRESSED IN LUNG, SIGNAL = 1.7; EXPRESSED IN PLACENTA, SIGNAL = 2.8; EXPRESSED IN ADULT LIVER, SIGNAL =   1; EXPRESSED IN HELA, SIGNAL = 4.6; EXPRESSED IN HEART, SIGNAL = 2.9; EXPRESSED IN FETAL LIVER, SIGNAL = 3.8; EXPRESSED IN BRAIN, SIGNAL = 2.6; EXPRESSED IN BONE MARROW, SIGNAL =   3; EST_HUMAN HIT: AI806336.1, EVALUE 9.60e+00
CPCARRSWWARTARSGWWWELLGARRSPQTLHWYVSP

SEQ ID NO: 40557 - protein, 28 aa, Homo sapiens
  MAP TO AC013291.4; EXPRESSED IN LUNG, SIGNAL =   2; EXPRESSED IN PLACENTA, SIGNAL = 2.1; EXPRESSED IN HELA, SIGNAL = 3.2; EXPRESSED IN HEART, SIGNAL = 2.6; EXPRESSED IN FETAL LIVER, SIGNAL = 2.5; EXPRESSED IN BONE MARROW, SIGNAL = 2.5; EXPRESSED IN ADULT LIVER, SIGNAL = 2.4; EXPRESSED IN BRAIN, SIGNAL = 2.3
SLSIFSSSIIRRKFLFLIKWNLSMDGTL

SEQ ID NO: 40558 - protein, 139 aa, Homo sapiens
  MAP TO AC021383.3; EXPRESSED IN LUNG, SIGNAL = 7.2; EXPRESSED IN BRAIN, SIGNAL = 8.9; EXPRESSED IN BONE MARROW, SIGNAL = 8.4; EXPRESSED IN HELA, SIGNAL = 7.1; EXPRESSED IN PLACENTA, SIGNAL = 8.1; EXPRESSED IN ADULT LIVER, SIGNAL = 9.9; EXPRESSED IN HEART, SIGNAL = 6.8; EXPRESSED IN FETAL LIVER, SIGNAL = 6.7; SWISSPROT HIT: P10230, EVALUE 2.90e+00; EST_HUMAN HIT: BE390947.1, EVALUE 6.00e-31
PVVAKQTLDMFQVAALEVENHKHLWPPHGVKPVGVQRARRNSWEAPPRFQRTYGSTRISRQKPAAGAEPSWRTSTRAVWRGNMRLEVPHRVPTRILPSGAMRIGLRFSKPQNGRSTDSLHSAPEKAAGTHCKPLRAVMG

SEQ ID NO: 40559 - protein, 50 aa, Homo sapiens; identical to SEQ ID NO: 40272
  MAP TO AF241728.1; EXPRESSED IN LUNG, SIGNAL = 1.2; EXPRESSED IN FETAL LIVER, SIGNAL =   1; EXPRESSED IN BONE MARROW, SIGNAL = 1.1; EXPRESSED IN PLACENTA, SIGNAL = 1.3; EXPRESSED IN ADULT LIVER, SIGNAL = 2.2; EXPRESSED IN HEART, SIGNAL = 1.3; EXPRESSED IN BRAIN, SIGNAL =   1

SEQ ID NO: 40560 - protein, 21 aa, Homo sapiens
  MAP TO AC009046.4; EXPRESSED IN LUNG, SIGNAL = 5.8; EXPRESSED IN PLACENTA, SIGNAL =  12; EXPRESSED IN ADULT LIVER, SIGNAL = 2.2; EXPRESSED IN HELA, SIGNAL =  17; EXPRESSED IN FETAL LIVER, SIGNAL =  11; EXPRESSED IN BRAIN, SIGNAL = 9.8; EXPRESSED IN BONE MARROW, SIGNAL =  11; EXPRESSED IN HEART, SIGNAL =  10
DDLAVTSVVLAMARVDLAEMA

SEQ ID NO: 40561 - protein, 34 aa, Homo sapiens
  MAP TO AL133260.7; EXPRESSED IN LUNG, SIGNAL = 2.5; EXPRESSED IN PLACENTA, SIGNAL = 3.5; EXPRESSED IN ADULT LIVER, SIGNAL = 5.2; EXPRESSED IN HELA, SIGNAL =  10; EXPRESSED IN FETAL LIVER, SIGNAL =  12; EXPRESSED IN BRAIN, SIGNAL = 7.2; EXPRESSED IN HEART, SIGNAL = 6.2; EXPRESSED IN BONE MARROW, SIGNAL =  12; EST_HUMAN HIT: D54045.1, EVALUE 1.00e-05
CPTLVMGATKKQSTCCPVASGSSWSTTSRSWKCC

SEQ ID NO: 40562 - protein, 98 aa, Homo sapiens; identical to SEQ ID NO: 33628
  MAP TO AP000230.2; EXPRESSED IN PLACENTA, SIGNAL = 4.3; EXPRESSED IN ADULT LIVER, SIGNAL = 4.2; EXPRESSED IN HEART, SIGNAL = 3.8; EXPRESSED IN BONE MARROW, SIGNAL = 3.8; EXPRESSED IN LUNG, SIGNAL = 3.7; EXPRESSED IN FETAL LIVER, SIGNAL = 2.9; EXPRESSED IN BRAIN, SIGNAL =   4; SWISSPROT HIT: P45604, EVALUE 5.10e+00; EST_HUMAN HIT: BE390947.1, EVALUE 4.00e-36

SEQ ID NO: 40563 - protein, 34 aa, Homo sapiens
  MAP TO AC008597.3; EXPRESSED IN BONE MARROW, SIGNAL = 6.2; EXPRESSED IN ADULT LIVER, SIGNAL = 4.2; EXPRESSED IN HELA, SIGNAL = 4.4; EXPRESSED IN HEART, SIGNAL = 7.2; EXPRESSED IN LUNG, SIGNAL =   6; EXPRESSED IN PLACENTA, SIGNAL = 5.5; EXPRESSED IN FETAL LIVER, SIGNAL = 5.5; EXPRESSED IN BRAIN, SIGNAL = 5.5; EST_HUMAN HIT: AU123968.1, EVALUE 6.00e-04
SILILRRNLYATISSLSFLLALEALVENGHQTKS

SEQ ID NO: 40564 - protein, 36 aa, Homo sapiens; identical to SEQ ID NO: 33597
  MAP TO AP001412.1; EXPRESSED IN LUNG, SIGNAL =   5; EXPRESSED IN ADULT LIVER, SIGNAL = 5.9; EXPRESSED IN HELA, SIGNAL = 6.7; EXPRESSED IN FETAL LIVER, SIGNAL = 5.6; EXPRESSED IN BRAIN, SIGNAL = 4.7; EXPRESSED IN BONE MARROW, SIGNAL =   7; EXPRESSED IN PLACENTA, SIGNAL = 4.7; EXPRESSED IN HEART, SIGNAL = 3.5; SWISSPROT HIT: P33191, EVALUE 8.40e+00; EST_HUMAN HIT: C18939.1, EVALUE 1.00e-08

SEQ ID NO: 40565 - protein, 30 aa, Homo sapiens
  MAP TO AL157396.2; EXPRESSED IN PLACENTA, SIGNAL = 2.9; EXPRESSED IN HEART, SIGNAL = 3.9; EXPRESSED IN LUNG, SIGNAL = 2.5; EXPRESSED IN ADULT LIVER, SIGNAL = 1.3; EXPRESSED IN FETAL LIVER, SIGNAL = 2.7; EXPRESSED IN BRAIN, SIGNAL = 2.7; EXPRESSED IN BONE MARROW, SIGNAL = 2.9; SWISSPROT HIT: P51160, EVALUE 2.00e-10; EST_HUMAN HIT: W28144.1, EVALUE 1.80e-01
MNKLENRKDIAQEMLMNQTKATPEEIKSIL

SEQ ID NO: 40566 - protein, 30 aa, Homo sapiens
  MAP TO AC013317.4; EXPRESSED IN PLACENTA, SIGNAL = 3.7; EXPRESSED IN ADULT LIVER, SIGNAL = 0.84; EXPRESSED IN HELA, SIGNAL = 6.5; EXPRESSED IN FETAL LIVER, SIGNAL =   4; EXPRESSED IN BRAIN, SIGNAL = 5.8; EXPRESSED IN BONE MARROW, SIGNAL = 4.8; EXPRESSED IN LUNG, SIGNAL = 2.4; EXPRESSED IN HEART, SIGNAL = 4.3; EST_HUMAN HIT: AI921003.1, EVALUE 3.00e-07
IWTMKSRLRWSQMDMRNLLGTRAKVTLVML

SEQ ID NO: 40567 - protein, 58 aa, Homo sapiens
  MAP TO AC023602.5; EXPRESSED IN LUNG, SIGNAL = 1.4; EXPRESSED IN PLACENTA, SIGNAL = 1.1; EXPRESSED IN ADULT LIVER, SIGNAL = 1.3; EXPRESSED IN HEART, SIGNAL = 1.2; EXPRESSED IN FETAL LIVER, SIGNAL = 1.1; EXPRESSED IN BRAIN, SIGNAL = 1.2; EXPRESSED IN BONE MARROW, SIGNAL = 1.1; SWISSPROT HIT: Q13740, EVALUE 6.00e-28; EST_HUMAN HIT: AA262217.1, EVALUE 2.00e-23
EKPDGSPVFIAFRSSTKKSVQYDDVPEYKDRLNLSENYTLSISNARISDEKRFVCMLV

SEQ ID NO: 40568 - protein, 39 aa, Homo sapiens
  MAP TO AC018583.3; EXPRESSED IN LUNG, SIGNAL = 1.9; EXPRESSED IN PLACENTA, SIGNAL = 1.7; EXPRESSED IN ADULT LIVER, SIGNAL = 2.2; EXPRESSED IN BRAIN, SIGNAL = 1.5; EXPRESSED IN HEART, SIGNAL = 1.6; EXPRESSED IN HELA, SIGNAL =   3; EXPRESSED IN FETAL LIVER, SIGNAL = 1.8; EXPRESSED IN BONE MARROW, SIGNAL = 1.6
MTHLKLSIPSVQSIPKGLAKGKLPKKFPSGSQYSRNYCK

SEQ ID NO: 40569 - protein, 51 aa, Homo sapiens
  MAP TO AL157396.2; EXPRESSED IN LUNG, SIGNAL = 3.4; EXPRESSED IN ADULT LIVER, SIGNAL = 3.8; EXPRESSED IN HELA, SIGNAL =   3; EXPRESSED IN FETAL LIVER, SIGNAL = 3.4; EXPRESSED IN BRAIN, SIGNAL = 3.4; EXPRESSED IN PLACENTA, SIGNAL = 2.2; EXPRESSED IN HEART, SIGNAL = 3.4; EXPRESSED IN BONE MARROW, SIGNAL = 3.3; SWISSPROT HIT: P51160, EVALUE 5.00e-23; EST_HUMAN HIT: BE255170.1, EVALUE 4.00e-08
NSHFSDFMDKQTGYVTKNLLATPIVVGKEVLAVIMAVNKVNASEFSKQDEE

SEQ ID NO: 40570 - protein, 32 aa, Homo sapiens
  MAP TO AL157396.2; EXPRESSED IN LUNG, SIGNAL = 3.4; EXPRESSED IN ADULT LIVER, SIGNAL = 3.8; EXPRESSED IN HELA, SIGNAL =   3; EXPRESSED IN FETAL LIVER, SIGNAL = 3.4; EXPRESSED IN BRAIN, SIGNAL = 3.4; EXPRESSED IN PLACENTA, SIGNAL = 2.2; EXPRESSED IN HEART, SIGNAL = 3.4; EXPRESSED IN BONE MARROW, SIGNAL = 3.3; EST_HUMAN HIT: AW082044.1, EVALUE 6.70e-01
TAIFLTSWTSKLGMSLRTCWQPRSWWARRFLL

SEQ ID NO: 40571 - protein, 81 aa, Homo sapiens
  MAP TO AL133173.13; EXPRESSED IN LUNG, SIGNAL = 1.2; EXPRESSED IN ADULT LIVER, SIGNAL = 1.2; EXPRESSED IN HEART, SIGNAL = 1.2; EXPRESSED IN BRAIN, SIGNAL = 0.99; EXPRESSED IN FETAL LIVER, SIGNAL =   1; EXPRESSED IN PLACENTA, SIGNAL = 1.5; EXPRESSED IN BONE MARROW, SIGNAL = 0.99; EST_HUMAN HIT: BE274237.1, EVALUE 5.00e-39; SWISSPROT HIT: P33897, EVALUE 6.00e-40
EYHTHLLQFDGEGGWKFEKLDSAAHLSLTEEKQRLEQQLAGIPKMQRHLQELCQILGEAVAPAHVPAPSLQGPGGLQGAST

SEQ ID NO: 40572 - protein, 25 aa, Homo sapiens
  MAP TO AL133173.13; EXPRESSED IN LUNG, SIGNAL = 1.2; EXPRESSED IN ADULT LIVER, SIGNAL = 1.2; EXPRESSED IN HEART, SIGNAL = 1.2; EXPRESSED IN BRAIN, SIGNAL = 0.99; EXPRESSED IN FETAL LIVER, SIGNAL =   1; EXPRESSED IN PLACENTA, SIGNAL = 1.5; EXPRESSED IN BONE MARROW, SIGNAL = 0.99; EST_HUMAN HIT: BE901920.1, EVALUE 2.00e-06; SWISSPROT HIT: P30974, EVALUE 8.70e+00
STTHTCYSSMGRVAGSSRSWTQLPT

SEQ ID NO: 40573 - protein, 33 aa, Homo sapiens
  MAP TO AL161788.2; EXPRESSED IN PLACENTA, SIGNAL = 2.3; EXPRESSED IN ADULT LIVER, SIGNAL = 2.2; EXPRESSED IN HEART, SIGNAL = 1.8; EXPRESSED IN FETAL LIVER, SIGNAL = 1.8; EXPRESSED IN BRAIN, SIGNAL = 1.9; EXPRESSED IN BONE MARROW, SIGNAL = 1.9; EXPRESSED IN LUNG, SIGNAL =   2; EXPRESSED IN HELA, SIGNAL = 2.7; EST_HUMAN HIT: M78293.1, EVALUE 3.00e-03
WPIWSSCFKDTSCSRRGTTRAAFSPGMFLVREP

SEQ ID NO: 40574 - protein, 77 aa, Homo sapiens
  MAP TO AL138796.2; EXPRESSED IN ADULT LIVER, SIGNAL = 0.63; EXPRESSED IN HEART, SIGNAL = 3.3; EXPRESSED IN BRAIN, SIGNAL = 0.73; EXPRESSED IN PLACENTA, SIGNAL = 0.67; EXPRESSED IN BONE MARROW, SIGNAL = 0.5; EST_HUMAN HIT: AW983553.1, EVALUE 2.00e-17; SWISSPROT HIT: Q08379, EVALUE 3.40e+00
LVKVALEKSLATVETQNPSFSPPSPMGGDSNRCLQEEMLHLRAEFHQHLEEKRKAEEELKELKAQIEEAGFSSVSHI

SEQ ID NO: 40575 - protein, 40 aa, Homo sapiens
  MAP TO AL138796.2; EXPRESSED IN ADULT LIVER, SIGNAL = 0.63; EXPRESSED IN HEART, SIGNAL = 3.3; EXPRESSED IN BRAIN, SIGNAL = 0.73; EXPRESSED IN PLACENTA, SIGNAL = 0.67; EXPRESSED IN BONE MARROW, SIGNAL = 0.5; EST_HUMAN HIT: AW983553.1, EVALUE 6.00e-12
LSRWLWRKVWQLWRPRTHLFPLLLRWEGTVTGVFRKKCST

SEQ ID NO: 40576 - protein, 28 aa, Homo sapiens
  MAP TO AL109824.21; EXPRESSED IN PLACENTA, SIGNAL =   1; EXPRESSED IN FETAL LIVER, SIGNAL = 1.1; EXPRESSED IN BONE MARROW, SIGNAL = 1.1; EXPRESSED IN LUNG, SIGNAL = 0.83; EXPRESSED IN ADULT LIVER, SIGNAL = 0.96; EXPRESSED IN HEART, SIGNAL = 1.4; EXPRESSED IN BRAIN, SIGNAL =   1
QLSFLKSKASFSIYAFDPISSDLLKNLT

SEQ ID NO: 40577 - protein, 29 aa, Homo sapiens
  MAP TO AL109824.21; EXPRESSED IN PLACENTA, SIGNAL =   1; EXPRESSED IN FETAL LIVER, SIGNAL = 1.1; EXPRESSED IN BONE MARROW, SIGNAL = 1.1; EXPRESSED IN LUNG, SIGNAL = 0.83; EXPRESSED IN ADULT LIVER, SIGNAL = 0.96; EXPRESSED IN HEART, SIGNAL = 1.4; EXPRESSED IN BRAIN, SIGNAL =   1
SSCPSSSLRPVSPSMPLIPSPLTFLRTLP

SEQ ID NO: 40578 - protein, 25 aa, Homo sapiens
  MAP TO AP001439.1; EXPRESSED IN PLACENTA, SIGNAL = 1.4; EXPRESSED IN FETAL LIVER, SIGNAL = 1.1; EXPRESSED IN BONE MARROW, SIGNAL = 1.2; EXPRESSED IN LUNG, SIGNAL = 1.3; EXPRESSED IN ADULT LIVER, SIGNAL = 1.4; EXPRESSED IN HEART, SIGNAL = 1.4; EXPRESSED IN BRAIN, SIGNAL = 1.6
EYSCTLVLAATLELLHSSNKLWKPA

SEQ ID NO: 40579 - protein, 25 aa, Homo sapiens
  MAP TO AP001439.1; EXPRESSED IN PLACENTA, SIGNAL = 1.4; EXPRESSED IN FETAL LIVER, SIGNAL = 1.1; EXPRESSED IN BONE MARROW, SIGNAL = 1.2; EXPRESSED IN LUNG, SIGNAL = 1.3; EXPRESSED IN ADULT LIVER, SIGNAL = 1.4; EXPRESSED IN HEART, SIGNAL = 1.4; EXPRESSED IN BRAIN, SIGNAL = 1.6; SWISSPROT HIT: Q9ZCM4, EVALUE 5.10e+00
QLASITCLRNVVIPRLLQGLMYRNI

SEQ ID NO: 40580 - protein, 54 aa, Homo sapiens
  MAP TO AC015842.4; EXPRESSED IN ADULT LIVER, SIGNAL = 3.2; EXPRESSED IN HELA, SIGNAL = 3.6; EXPRESSED IN FETAL LIVER, SIGNAL = 2.3; EXPRESSED IN BRAIN, SIGNAL =   2; EXPRESSED IN BONE MARROW, SIGNAL =   2; EXPRESSED IN LUNG, SIGNAL =   2; EXPRESSED IN PLACENTA, SIGNAL =   2; EXPRESSED IN HEART, SIGNAL = 3.1; EST_HUMAN HIT: AW371138.1, EVALUE 8.40e+00; SWISSPROT HIT: P45804, EVALUE 2.10e+00
IIVFLRTEGALMIIKEERGMIIFAFYDDHLIVIYDVVDKKGWDTLRSLLQQPTR

SEQ ID NO: 40581 - protein, 34 aa, Homo sapiens
  MAP TO AC015897.3; EXPRESSED IN PLACENTA, SIGNAL =  23; EXPRESSED IN ADULT LIVER, SIGNAL =  21; EXPRESSED IN HEART, SIGNAL =  19; EXPRESSED IN BRAIN, SIGNAL =  19; EXPRESSED IN BONE MARROW, SIGNAL =  23; EXPRESSED IN LUNG, SIGNAL =  24; EXPRESSED IN HELA, SIGNAL =  15; EXPRESSED IN FETAL LIVER, SIGNAL =  18
SICFHISRATGAKMSHLTCAIPSLGISSRLSCSN

SEQ ID NO: 40582 - protein, 33 aa, Homo sapiens
  MAP TO AC022638.3; EXPRESSED IN PLACENTA, SIGNAL = 2.1; EXPRESSED IN ADULT LIVER, SIGNAL = 2.3; EXPRESSED IN HEART, SIGNAL = 2.3; EXPRESSED IN FETAL LIVER, SIGNAL = 1.8; EXPRESSED IN BONE MARROW, SIGNAL = 1.9; EXPRESSED IN LUNG, SIGNAL =   2; EXPRESSED IN BRAIN, SIGNAL =   2
VTGGQTLSWKLRAKAETIPEPDTIPSQRVFTSP

SEQ ID NO: 40583 - protein, 36 aa, Homo sapiens
  MAP TO AL109614.27; EXPRESSED IN LUNG, SIGNAL = 2.7; EXPRESSED IN PLACENTA, SIGNAL = 3.2; EXPRESSED IN ADULT LIVER, SIGNAL = 4.6; EXPRESSED IN HEART, SIGNAL = 3.5; EXPRESSED IN FETAL LIVER, SIGNAL =   3; EXPRESSED IN BRAIN, SIGNAL = 3.3; EXPRESSED IN BONE MARROW, SIGNAL = 3.2; EXPRESSED IN HELA, SIGNAL = 5.1
PLVLQDHQEPLLAPFLKVLLADECQMIPVKELAANY

SEQ ID NO: 40584 - protein, 22 aa, Homo sapiens
  MAP TO AC015785.3; EXPRESSED IN PLACENTA, SIGNAL = 1.1; EXPRESSED IN ADULT LIVER, SIGNAL = 1.5; EXPRESSED IN HELA, SIGNAL = 2.8; EXPRESSED IN HEART, SIGNAL = 1.5; EXPRESSED IN FETAL LIVER, SIGNAL = 2.7; EXPRESSED IN BRAIN, SIGNAL = 2.6; EXPRESSED IN BONE MARROW, SIGNAL = 2.1; EXPRESSED IN LUNG, SIGNAL = 1.6
CPLSHGRTGWQTSNGTRASSSS

SEQ ID NO: 40585 - protein, 53 aa, Homo sapiens
  MAP TO AC015756.4; EXPRESSED IN LUNG, SIGNAL = 2.4; EXPRESSED IN ADULT LIVER, SIGNAL = 3.1; EXPRESSED IN HELA, SIGNAL = 3.6; EXPRESSED IN BRAIN, SIGNAL = 2.3; EXPRESSED IN HEART, SIGNAL = 2.2; EXPRESSED IN PLACENTA, SIGNAL = 2.5; EXPRESSED IN FETAL LIVER, SIGNAL = 2.2; EXPRESSED IN BONE MARROW, SIGNAL = 2.4; EST_HUMAN HIT: AW300383.1, EVALUE 3.00e-24; SWISSPROT HIT: O75936, EVALUE 2.00e-25
DKGQVVRINFNNATRDTIFDVPVERVQPFYAALKEFVDLMNSKESKFTFKMNP

SEQ ID NO: 40586 - protein, 33 aa, Homo sapiens
  MAP TO AC015756.4; EXPRESSED IN LUNG, SIGNAL = 2.4; EXPRESSED IN ADULT LIVER, SIGNAL = 3.1; EXPRESSED IN HELA, SIGNAL = 3.6; EXPRESSED IN BRAIN, SIGNAL = 2.3; EXPRESSED IN HEART, SIGNAL = 2.2; EXPRESSED IN PLACENTA, SIGNAL = 2.5; EXPRESSED IN FETAL LIVER, SIGNAL = 2.2; EXPRESSED IN BONE MARROW, SIGNAL = 2.4; EST_HUMAN HIT: AW300383.1, EVALUE 1.00e-11; SWISSPROT HIT: Q01555, EVALUE 3.80e+00
MIKAKWFASTSITQLGTQYLMCLLKEFSLFMLL

SEQ ID NO: 40587 - protein, 31 aa, Homo sapiens
  MAP TO AC013641.4; EXPRESSED IN LUNG, SIGNAL = 3.5; EXPRESSED IN PLACENTA, SIGNAL = 1.9; EXPRESSED IN ADULT LIVER, SIGNAL = 5.2; EXPRESSED IN HEART, SIGNAL =  14; EXPRESSED IN FETAL LIVER, SIGNAL = 7.9; EXPRESSED IN HELA, SIGNAL = 4.5; EXPRESSED IN BRAIN, SIGNAL = 9.3; EXPRESSED IN BONE MARROW, SIGNAL = 7.5; EST_HUMAN HIT: AA337001.1, EVALUE 2.00e-06; SWISSPROT HIT: P06598, EVALUE 8.50e+00
WPTCFSMIPPMASSTVPSRLRTGSLSSVEIP

SEQ ID NO: 40588 - protein, 59 aa, Homo sapiens
  MAP TO AC008528.4; EXPRESSED IN PLACENTA, SIGNAL = 4.6; EXPRESSED IN HELA, SIGNAL = 7.4; EXPRESSED IN FETAL LIVER, SIGNAL = 4.7; EXPRESSED IN BONE MARROW, SIGNAL = 4.2; EXPRESSED IN LUNG, SIGNAL = 4.1; EXPRESSED IN ADULT LIVER, SIGNAL = 6.6; EXPRESSED IN HEART, SIGNAL = 5.4; EXPRESSED IN BRAIN, SIGNAL = 5.4; EST_HUMAN HIT: AI825646.1, EVALUE 1.00e-10; SWISSPROT HIT: P79331, EVALUE 8.00e-08
WMMTEWTPCSRTCGKGMQSRQVACTQQLSNGTLIRARERDCIGPKPASAQRCEGQDCMT

SEQ ID NO: 40589 - protein, 39 aa, Homo sapiens
  MAP TO AC019278.3; EXPRESSED IN PLACENTA, SIGNAL = 0.6; EXPRESSED IN ADULT LIVER, SIGNAL = 0.63; EXPRESSED IN FETAL LIVER, SIGNAL = 0.51; EXPRESSED IN BRAIN, SIGNAL = 0.51; EXPRESSED IN BONE MARROW, SIGNAL = 0.58; EXPRESSED IN HEART, SIGNAL = 2.6; EST_HUMAN HIT: AI040235.1, EVALUE 3.00e-17; SWISSPROT HIT: Q05860, EVALUE 1.00e-16
PDHSLTEQDDRTPGRLQAVWPPPKTKDTEEKVGLKYTEA

SEQ ID NO: 40590 - protein, 58 aa, Homo sapiens
  MAP TO AC010789.7; EXPRESSED IN LUNG, SIGNAL = 4.9; EXPRESSED IN ADULT LIVER, SIGNAL = 5.3; EXPRESSED IN HEART, SIGNAL = 3.8; EXPRESSED IN BRAIN, SIGNAL = 4.4; EXPRESSED IN HELA, SIGNAL = 5.2; EXPRESSED IN BONE MARROW, SIGNAL = 4.9; EXPRESSED IN FETAL LIVER, SIGNAL = 3.8; EXPRESSED IN PLACENTA, SIGNAL = 4.4; EST_HUMAN HIT: AW995409.1, EVALUE 2.00e-28; SWISSPROT HIT: Q51933, EVALUE 3.50e+00
IEEWRSRAAKFEEMCGLVMGMFTRLSNCANRTILYDMYSYVWDIKSIMSMVKSFVQWL

SEQ ID NO: 40591 - protein, 108 aa, Homo sapiens
  MAP TO AP001538.1; EXPRESSED IN BONE MARROW, SIGNAL =  11; EXPRESSED IN LUNG, SIGNAL = 3.2; EXPRESSED IN ADULT LIVER, SIGNAL = 2.8; EXPRESSED IN HEART, SIGNAL = 3.6; EXPRESSED IN BRAIN, SIGNAL =  15; EXPRESSED IN PLACENTA, SIGNAL = 1.6; EXPRESSED IN HELA, SIGNAL =  10; EXPRESSED IN FETAL LIVER, SIGNAL =  16; EST_HUMAN HIT: BF244231.1, EVALUE 3.00e-56; SWISSPROT HIT: P05092, EVALUE 2.00e-49
KQLLGFADAAAEENRVLLAMVNPTVFFDIAVDGEPLGRVSFELFADKVPKTAENFRALSTGEKGFGYKGSCFHRIIPGFMCQGGDFTRHNGTGGKSIYGEKFEDENFI

SEQ ID NO: 40592 - protein, 17 aa, Homo sapiens
  MAP TO AC022428.3; EXPRESSED IN ADULT LIVER, SIGNAL = 1.7; EXPRESSED IN BRAIN, SIGNAL = 1.6; EXPRESSED IN BONE MARROW, SIGNAL = 1.8; EXPRESSED IN LUNG, SIGNAL = 2.1; EXPRESSED IN PLACENTA, SIGNAL = 2.2; EXPRESSED IN HEART, SIGNAL = 1.4; EXPRESSED IN FETAL LIVER, SIGNAL =   2
CIGKLLGSFQKNSNSFS

SEQ ID NO: 40593 - protein, 45 aa, Homo sapiens
  MAP TO AC019342.4; EXPRESSED IN PLACENTA, SIGNAL = 4.6; EXPRESSED IN FETAL LIVER, SIGNAL = 4.9; EXPRESSED IN HELA, SIGNAL = 7.3; EXPRESSED IN BONE MARROW, SIGNAL = 6.8; EXPRESSED IN LUNG, SIGNAL = 3.8; EXPRESSED IN ADULT LIVER, SIGNAL = 0.56; EXPRESSED IN HEART, SIGNAL = 5.2; EXPRESSED IN BRAIN, SIGNAL = 8.1; EST_HUMAN HIT: AI831462.1, EVALUE 6.00e-14
MWESLELPRDLLNGFDQNADGNKDNEVQAEVASDGDKEPFGNWIK

SEQ ID NO: 40594 - protein, 36 aa, Homo sapiens
  MAP TO AL117336.16; EXPRESSED IN LUNG, SIGNAL = 4.3; EXPRESSED IN PLACENTA, SIGNAL = 5.8; EXPRESSED IN ADULT LIVER, SIGNAL = 5.7; EXPRESSED IN HEART, SIGNAL = 5.3; EXPRESSED IN FETAL LIVER, SIGNAL = 4.8; EXPRESSED IN BRAIN, SIGNAL = 4.7; EXPRESSED IN BONE MARROW, SIGNAL =   5; EXPRESSED IN HELA, SIGNAL = 7.5
VALVYINTNNRKLTEFYMLFVPPVIRYIEGLTADHQ

SEQ ID NO: 40595 - protein, 47 aa, Homo sapiens
  MAP TO AL133417.9; EXPRESSED IN ADULT LIVER, SIGNAL = 5.2; EXPRESSED IN HEART, SIGNAL = 4.3; EXPRESSED IN BRAIN, SIGNAL = 4.4; EXPRESSED IN BONE MARROW, SIGNAL = 4.4; EXPRESSED IN HELA, SIGNAL = 4.8; EXPRESSED IN LUNG, SIGNAL = 4.9; EXPRESSED IN PLACENTA, SIGNAL = 5.1; EXPRESSED IN FETAL LIVER, SIGNAL = 4.3; EST_HUMAN HIT: BF674374.1, EVALUE 3.50e-01; SWISSPROT HIT: P21147, EVALUE 8.10e+00
MGQRVGEYPEKEKWGPELMQVPVWDGVPDPRHLRKTWKNLHKTSKVQ

SEQ ID NO: 40596 - protein, 32 aa, Homo sapiens
  MAP TO AL133417.9; EXPRESSED IN ADULT LIVER, SIGNAL = 5.2; EXPRESSED IN HEART, SIGNAL = 4.3; EXPRESSED IN BRAIN, SIGNAL = 4.4; EXPRESSED IN BONE MARROW, SIGNAL = 4.4; EXPRESSED IN HELA, SIGNAL = 4.8; EXPRESSED IN LUNG, SIGNAL = 4.9; EXPRESSED IN PLACENTA, SIGNAL = 5.1; EXPRESSED IN FETAL LIVER, SIGNAL = 4.3; EST_HUMAN HIT: BE265633.1, EVALUE 7.60e+00; SWISSPROT HIT: P01562, EVALUE 2.90e+00
WGRGLESILKRRNGGQSSCKSQCGMGCLIPDT

SEQ ID NO: 40597 - protein, 72 aa, Homo sapiens [sequence omitted]

SEQ ID NO: 40598 - protein, 69 aa, Homo sapiens
  MAP TO AC022860.3; EXPRESSED IN HEART, SIGNAL = 1.3; EXPRESSED IN BRAIN, SIGNAL = 1.3; EXPRESSED IN BONE MARROW, SIGNAL = 1.3; EXPRESSED IN LUNG, SIGNAL = 0.94; EXPRESSED IN PLACENTA, SIGNAL =   2; EXPRESSED IN FETAL LIVER, SIGNAL = 1.2; EST_HUMAN HIT: AA012849.1, EVALUE 1.00e-10; SWISSPROT HIT: P50407, EVALUE 3.40e+00
MLLIVVFLASPDLFESLYFQNDFKCKAFFCMHRVMRSLSICTTCLLSMLQAVAISPGTSWSARIKQKFK

SEQ ID NO: 40599 - protein, 18 aa, Homo sapiens
  MAP TO AC022860.3; EXPRESSED IN HEART, SIGNAL = 1.3; EXPRESSED IN BRAIN, SIGNAL = 1.3; EXPRESSED IN BONE MARROW, SIGNAL = 1.3; EXPRESSED IN LUNG, SIGNAL = 0.94; EXPRESSED IN PLACENTA, SIGNAL =   2; EXPRESSED IN FETAL LIVER, SIGNAL = 1.2; EST_HUMAN HIT: AA442630.1, EVALUE 1.90e-01
ITGLSPLTPSPVTWPLST

SEQ ID NO: 40600 - protein, 49 aa, Homo sapiens
  MAP TO AC022474.3; EXPRESSED IN LUNG, SIGNAL = 2.1; EXPRESSED IN HELA, SIGNAL = 3.4; EXPRESSED IN HEART, SIGNAL = 1.9; EXPRESSED IN BRAIN, SIGNAL = 1.7; EXPRESSED IN BONE MARROW, SIGNAL = 1.9; EXPRESSED IN PLACENTA, SIGNAL =   2; EXPRESSED IN ADULT LIVER, SIGNAL = 2.4; EXPRESSED IN FETAL LIVER, SIGNAL = 1.8; SWISSPROT HIT: P52079, EVALUE 2.70e+00; EST_HUMAN HIT: BF061995.1, EVALUE 2.30e+00
MIPIRWFNRRCLIITLPRISSNYSKVKNLSEFSKLEEELGSTETRKTLT

SEQ ID NO: 40601 - protein, 60 aa, Homo sapiens
  MAP TO AL139115.2; EXPRESSED IN PLACENTA, SIGNAL = 4.4; EXPRESSED IN ADULT LIVER, SIGNAL = 4.1; EXPRESSED IN FETAL LIVER, SIGNAL = 3.8; EXPRESSED IN BRAIN, SIGNAL = 4.9; EXPRESSED IN BONE MARROW, SIGNAL = 3.8; EXPRESSED IN LUNG, SIGNAL = 3.9; EXPRESSED IN HEART, SIGNAL = 3.9; EXPRESSED IN HELA, SIGNAL = 3.8; EST_HUMAN HIT: AL134218.1, EVALUE 9.00e-31; SWISSPROT HIT: Q99962, EVALUE 1.00e-32
VQMDQPCCRALYDFEPENEGELGFKEGDIITLTNQIDENWYEGMLHGHSGFFPINYVEIL

SEQ ID NO: 40602 - protein, 60 aa, Homo sapiens
  MAP TO AL139115.2; EXPRESSED IN PLACENTA, SIGNAL = 4.4; EXPRESSED IN ADULT LIVER, SIGNAL = 4.1; EXPRESSED IN FETAL LIVER, SIGNAL = 3.8; EXPRESSED IN BRAIN, SIGNAL = 4.9; EXPRESSED IN BONE MARROW, SIGNAL = 3.8; EXPRESSED IN LUNG, SIGNAL = 3.9; EXPRESSED IN HEART, SIGNAL = 3.9; EXPRESSED IN HELA, SIGNAL = 3.8; EST_HUMAN HIT: AL134218.1, EVALUE 1.00e-28
VSKWISPAAELCTTLNLKMKGSWDLKRAISSHSLTKLMRTGMRGCCMAIQASSPSIMWKF

SEQ ID NO: 40603 - protein, 38 aa, Homo sapiens
  MAP TO AL162261.1; EXPRESSED IN LUNG, SIGNAL = 0.97; EXPRESSED IN PLACENTA, SIGNAL = 1.2; EXPRESSED IN FETAL LIVER, SIGNAL = 0.7; EXPRESSED IN BONE MARROW, SIGNAL = 0.71; EXPRESSED IN ADULT LIVER, SIGNAL = 1.1; EXPRESSED IN HEART, SIGNAL = 1.7; EXPRESSED IN BRAIN, SIGNAL = 0.98; EST_HUMAN HIT: AI280018.1, EVALUE 9.00e-03; SWISSPROT HIT: P48722, EVALUE 1.70e+00
EPLLKQDSNKVQVDLQDSGHETCGQSKNEAEQEETTSP

SEQ ID NO: 40604 - protein, 26 aa, Homo sapiens
  MAP TO AC015954.3; EXPRESSED IN LUNG, SIGNAL = 1.7; EXPRESSED IN ADULT LIVER, SIGNAL = 1.7; EXPRESSED IN BRAIN, SIGNAL = 1.8; EXPRESSED IN BONE MARROW, SIGNAL = 1.6; EXPRESSED IN PLACENTA, SIGNAL = 1.6; EXPRESSED IN HEART, SIGNAL = 1.8; EXPRESSED IN FETAL LIVER, SIGNAL = 1.8
PVVHCRTMYHALFSICPVFQCGLKLN

SEQ ID NO: 40605 - protein, 35 aa, Homo sapiens
  MAP TO AL157997.2; EXPRESSED IN HELA, SIGNAL = 2.7; EXPRESSED IN BONE MARROW, SIGNAL = 1.9; EXPRESSED IN LUNG, SIGNAL = 2.7; EXPRESSED IN ADULT LIVER, SIGNAL = 2.3; EXPRESSED IN HEART, SIGNAL = 1.9; EXPRESSED IN BRAIN, SIGNAL = 1.7; EXPRESSED IN PLACENTA, SIGNAL =   2; EXPRESSED IN FETAL LIVER, SIGNAL =   2
WCLETQTTSSFHICIQERERKTTIIFHLPINPSTS

SEQ ID NO: 40606 - protein, 67 aa, Homo sapiens
  MAP TO AL118505.13; EXPRESSED IN ADULT LIVER, SIGNAL = 1.6; EXPRESSED IN PLACENTA, SIGNAL = 1.8; EXPRESSED IN HEART, SIGNAL = 1.9; EXPRESSED IN FETAL LIVER, SIGNAL = 1.5; EXPRESSED IN BRAIN, SIGNAL = 1.6; EXPRESSED IN BONE MARROW, SIGNAL = 1.8; EXPRESSED IN LUNG, SIGNAL = 2.5; EST_HUMAN HIT: BE389058.1, EVALUE 2.00e-10; SWISSPROT HIT: P23945, EVALUE 3.90e-01
ESGWIRDLPKLTSLYLRKMPRLTTLEGDIFKMTPNLQQLDCQDSPALASVATHIFQDTPHLQVLLFQ

SEQ ID NO: 40607 - protein, 63 aa, Homo sapiens
  MAP TO AC022470.3; EXPRESSED IN PLACENTA, SIGNAL =   1; EXPRESSED IN HEART, SIGNAL = 1.2; EXPRESSED IN FETAL LIVER, SIGNAL = 1.1; EXPRESSED IN BONE MARROW, SIGNAL = 0.92; EXPRESSED IN LUNG, SIGNAL = 1.1; EXPRESSED IN ADULT LIVER, SIGNAL = 1.1; EXPRESSED IN BRAIN, SIGNAL = 2.2; SWISSPROT HIT: Q9Y5X2, EVALUE 1.50e+00; EST_HUMAN HIT: AU140344.1, EVALUE 2.00e-22
VDPLTHAALGDASEVEIDELQNQKEAEEPGPDSENSQENPPLRSSSSTTASSSPSTVIHGANS

SEQ ID NO: 40608 - protein, 55 aa, Homo sapiens
  MAP TO AC022470.3; EXPRESSED IN PLACENTA, SIGNAL =   1; EXPRESSED IN HEART, SIGNAL = 1.2; EXPRESSED IN FETAL LIVER, SIGNAL = 1.1; EXPRESSED IN BONE MARROW, SIGNAL = 0.92; EXPRESSED IN LUNG, SIGNAL = 1.1; EXPRESSED IN ADULT LIVER, SIGNAL = 1.1; EXPRESSED IN BRAIN, SIGNAL = 2.2; EST_HUMAN HIT: AU140344.1, EVALUE 2.00e-17
HWGMPARWRLTSCRIRRKQKSLAQTVRTLRKTPHCAPALAPQPAAAPALSSTEPT

SEQ ID NO: 40609 - protein, 27 aa, Homo sapiens
  MAP TO AC019099.3; EXPRESSED IN ADULT LIVER, SIGNAL = 4.5; EXPRESSED IN HELA, SIGNAL = 6.8; EXPRESSED IN HEART, SIGNAL = 4.5; EXPRESSED IN BRAIN, SIGNAL =   4; EXPRESSED IN PLACENTA, SIGNAL = 4.1; EXPRESSED IN FETAL LIVER, SIGNAL =   4; EXPRESSED IN BONE MARROW, SIGNAL = 3.9; EXPRESSED IN LUNG, SIGNAL = 4.5; EST_HUMAN HIT: BE262153.1, EVALUE 7.00e-10
CLPFTWPAKWKSSTCGLVTSSMCPTGT

SEQ ID NO: 40610 - protein, 23 aa, Homo sapiens
  MAP TO AC020719.3; EXPRESSED IN LUNG, SIGNAL = 2.8; EXPRESSED IN PLACENTA, SIGNAL = 2.9; EXPRESSED IN ADULT LIVER, SIGNAL = 3.1; EXPRESSED IN HEART, SIGNAL = 2.3; EXPRESSED IN FETAL LIVER, SIGNAL = 3.5; EXPRESSED IN BRAIN, SIGNAL = 2.7; EXPRESSED IN HELA, SIGNAL = 3.7; EXPRESSED IN BONE MARROW, SIGNAL = 2.9
SSFSAQETCHSCAFSPLISAMQA

SEQ ID NO: 40611 - protein, 172 aa, Homo sapiens
  MAP TO AL121723.35; EXPRESSED IN HEART, SIGNAL = 1.3; EXPRESSED IN BRAIN, SIGNAL = 2.6; EXPRESSED IN LUNG, SIGNAL = 2.6; EXPRESSED IN HELA, SIGNAL = 2.2; EXPRESSED IN PLACENTA, SIGNAL = 2.1; EXPRESSED IN ADULT LIVER, SIGNAL = 2.3; EXPRESSED IN FETAL LIVER, SIGNAL = 2.8; EXPRESSED IN BONE MARROW, SIGNAL =   4; EST_HUMAN HIT: N46046.1, EVALUE 1.00e-47; SWISSPROT HIT: P95786, EVALUE 9.10e-01
ITVVEAGIQAPEGVARGPDALTLLEYTETQNQFLDELMELEIFLAQRAVELSEKADVLSVSQFQLAPVILQGQTKEKMVIMVSVLEDLIGKLTSLQLQHLFMNLASPRYVDRVTEFLQQNLKQSQLLALKKELMVQKQQEALEEQEALEPKLDLLLEKTKELQKLIEADISK

SEQ ID NO: 40612 - protein, 37 aa, Homo sapiens
  MAP TO AC006460.3; EXPRESSED IN ADULT LIVER, SIGNAL = 0.93; EXPRESSED IN HEART, SIGNAL = 1.3; EXPRESSED IN FETAL LIVER, SIGNAL = 1.2; EXPRESSED IN BRAIN, SIGNAL = 1.1; EXPRESSED IN LUNG, SIGNAL =   1; EXPRESSED IN PLACENTA, SIGNAL =   1; EXPRESSED IN BONE MARROW, SIGNAL =   1; EST_HUMAN HIT: F11652.1, EVALUE 2.00e-15; SWISSPROT HIT: O35589, EVALUE 1.00e-14
ERPLNLRMPNLQNRQPHHFVVDGELSRLYPSEAKSHS

SEQ ID NO: 40613 - protein, 43 aa, Homo sapiens
  MAP TO AC016113.4; EXPRESSED IN LUNG, SIGNAL = 2.5; EXPRESSED IN PLACENTA, SIGNAL = 1.7; EXPRESSED IN ADULT LIVER, SIGNAL =   3; EXPRESSED IN HELA, SIGNAL = 2.2; EXPRESSED IN HEART, SIGNAL = 1.6; EXPRESSED IN FETAL LIVER, SIGNAL = 3.5; EXPRESSED IN BRAIN, SIGNAL = 3.6; EXPRESSED IN BONE MARROW, SIGNAL =   4; EST_HUMAN HIT: T71480.1, EVALUE 7.10e-02
VDGCVQRVLLVTVGVLLRVILHMAATGGSSGSSWNLFLSICFM

SEQ ID NO: 40614 - protein, 37 aa, Homo sapiens
  MAP TO AC016113.4; EXPRESSED IN LUNG, SIGNAL = 2.5; EXPRESSED IN PLACENTA, SIGNAL = 1.7; EXPRESSED IN ADULT LIVER, SIGNAL =   3; EXPRESSED IN HELA, SIGNAL = 2.2; EXPRESSED IN HEART, SIGNAL = 1.6; EXPRESSED IN FETAL LIVER, SIGNAL = 3.5; EXPRESSED IN BRAIN, SIGNAL = 3.6; EXPRESSED IN BONE MARROW, SIGNAL =   4; EST_HUMAN HIT: T71480.1, EVALUE 3.00e-08
MKQMLRKRFQEDPELPPVAAMWRMTLRRTPTVTSNTR

SEQ ID NO: 40615 - protein, 27 aa, Homo sapiens
  MAP TO AC021498.4; EXPRESSED IN HELA, SIGNAL = 4.3; EXPRESSED IN BONE MARROW, SIGNAL = 3.4; EXPRESSED IN PLACENTA, SIGNAL = 4.1; EXPRESSED IN ADULT LIVER, SIGNAL = 4.6; EXPRESSED IN FETAL LIVER, SIGNAL =   3; EXPRESSED IN BRAIN, SIGNAL = 3.7; EXPRESSED IN LUNG, SIGNAL = 3.9; EXPRESSED IN HEART, SIGNAL =   4
AAPLLQVAKIEDRQLYYRLSVGEPENK

SEQ ID NO: 40616 - protein, 33 aa, Homo sapiens
  MAP TO AL158091.7; EXPRESSED IN LUNG, SIGNAL = 1.6; EXPRESSED IN PLACENTA, SIGNAL = 1.4; EXPRESSED IN FETAL LIVER, SIGNAL = 1.3; EXPRESSED IN BONE MARROW, SIGNAL = 1.4; EXPRESSED IN ADULT LIVER, SIGNAL = 1.4; EXPRESSED IN HEART, SIGNAL = 1.4; EXPRESSED IN BRAIN, SIGNAL = 1.5; EST_HUMAN HIT: AW139673.1, EVALUE 7.00e-11; SWISSPROT HIT: P57296, EVALUE 4.90e+00
MSKNSLLSLKADVLGDDGSLLFEYLPRGAHSLS

SEQ ID NO: 40617 - protein, 62 aa, Homo sapiens
  MAP TO AL158091.7; EXPRESSED IN LUNG, SIGNAL = 1.6; EXPRESSED IN PLACENTA, SIGNAL = 1.4; EXPRESSED IN FETAL LIVER, SIGNAL = 1.3; EXPRESSED IN BONE MARROW, SIGNAL = 1.4; EXPRESSED IN ADULT LIVER, SIGNAL = 1.4; EXPRESSED IN HEART, SIGNAL = 1.4; EXPRESSED IN BRAIN, SIGNAL = 1.5; EST_HUMAN HIT: AW139673.1, EVALUE 1.00e-28; SWISSPROT HIT: P10070, EVALUE 1.60e-01
MRTCPSPKPAAPTAEERGPSSMHRWRRVSWEEKPAIWALPSPQRRTTPCIRPPRWPTCARRS

SEQ ID NO: 40618 - protein, 104 aa, Homo sapiens
  MAP TO AC025324.2; EXPRESSED IN BONE MARROW, SIGNAL = 4.2; EXPRESSED IN LUNG, SIGNAL = 3.7; EXPRESSED IN PLACENTA, SIGNAL = 3.7; EXPRESSED IN ADULT LIVER, SIGNAL = 4.4; EXPRESSED IN HEART, SIGNAL = 3.7; EXPRESSED IN FETAL LIVER, SIGNAL =   4; EXPRESSED IN BRAIN, SIGNAL = 3.8; EXPRESSED IN HELA, SIGNAL = 4.9
DHTSTSHSHGHGASHSHSHRASQSHSTSHSHSHSTSYSHSASYIHSSSHSHRASQSHSHSHSASYSHSTSQDTVPVIATATVPLTATATVPATAIAPAKTQYQS

SEQ ID NO: 40619 - protein, 26 aa, Homo sapiens
  MAP TO AC025324.2; EXPRESSED IN BONE MARROW, SIGNAL = 4.2; EXPRESSED IN LUNG, SIGNAL = 3.7; EXPRESSED IN PLACENTA, SIGNAL = 3.7; EXPRESSED IN ADULT LIVER, SIGNAL = 4.4; EXPRESSED IN HEART, SIGNAL = 3.7; EXPRESSED IN FETAL LIVER, SIGNAL =   4; EXPRESSED IN BRAIN, SIGNAL = 3.8; EXPRESSED IN HELA, SIGNAL = 4.9
GTVAVAVSGTVAVAMTGTVSWLVLWL

SEQ ID NO: 40620 - protein, 33 aa, Homo sapiens
  MAP TO AC012662.5; EXPRESSED IN PLACENTA, SIGNAL = 0.84; EXPRESSED IN ADULT LIVER, SIGNAL = 0.91; EXPRESSED IN FETAL LIVER, SIGNAL = 1.2; EXPRESSED IN BRAIN, SIGNAL = 1.7; EXPRESSED IN BONE MARROW, SIGNAL = 0.83; EXPRESSED IN HEART, SIGNAL = 1.9; EXPRESSED IN LUNG, SIGNAL = 1.2
EPKRVNVFKVVKVKIGYDINFIGKQLQQAWQGR

SEQ ID NO: 40621 - protein, 57 aa, Homo sapiens
  MAP TO AL139352.8; EXPRESSED IN LUNG, SIGNAL = 1.2; EXPRESSED IN PLACENTA, SIGNAL = 1.1; EXPRESSED IN ADULT LIVER, SIGNAL = 1.6; EXPRESSED IN HEART, SIGNAL = 1.6; EXPRESSED IN FETAL LIVER, SIGNAL = 1.3; EXPRESSED IN BRAIN, SIGNAL = 1.4; EXPRESSED IN BONE MARROW, SIGNAL = 1.3; EST_HUMAN HIT: BF339300.1, EVALUE 2.00e-25; SWISSPROT HIT: Q9Y2B9, EVALUE 1.00e-22
LRSDATGMMEVESSYSDFISCDRTGRRNAVPDIQGDSEAVSVRKLAGDMGELALEGA

SEQ ID NO: 40622 - protein, 32 aa, Homo sapiens
  MAP TO AC008521.5; EXPRESSED IN ADULT LIVER, SIGNAL = 2.3; EXPRESSED IN HEART, SIGNAL = 1.8; EXPRESSED IN BRAIN, SIGNAL = 2.1; EXPRESSED IN LUNG, SIGNAL = 2.2; EXPRESSED IN HELA, SIGNAL = 3.2; EXPRESSED IN PLACENTA, SIGNAL = 2.1; EXPRESSED IN FETAL LIVER, SIGNAL =   2; EXPRESSED IN BONE MARROW, SIGNAL =   2; EST_HUMAN HIT: H85494.1, EVALUE 9.00e-03; SWISSPROT HIT: Q61085, EVALUE 7.50e-01
GCNPLAQTGRSKLQNQRAALNQQILKAVRMRT

SEQ ID NO: 40623 - protein, 19 aa, Homo sapiens
  MAP TO AC008521.5; EXPRESSED IN ADULT LIVER, SIGNAL = 2.3; EXPRESSED IN HEART, SIGNAL = 1.8; EXPRESSED IN BRAIN, SIGNAL = 2.1; EXPRESSED IN LUNG, SIGNAL = 2.2; EXPRESSED IN HELA, SIGNAL = 3.2; EXPRESSED IN PLACENTA, SIGNAL = 2.1; EXPRESSED IN FETAL LIVER, SIGNAL =   2; EXPRESSED IN BONE MARROW, SIGNAL =   2
AVIPLHKPAGVNCRIKELL

SEQ ID NO: 40624 - protein, 36 aa, Homo sapiens
  MAP TO AL049870.3; EXPRESSED IN LUNG, SIGNAL = 2.4; EXPRESSED IN PLACENTA, SIGNAL = 4.6; EXPRESSED IN ADULT LIVER, SIGNAL = 2.8; EXPRESSED IN HEART, SIGNAL = 2.2; EXPRESSED IN BONE MARROW, SIGNAL = 2.5; EXPRESSED IN BRAIN, SIGNAL = 2.3; EXPRESSED IN FETAL LIVER, SIGNAL = 2.5; SWISSPROT HIT: P03384, EVALUE 7.00e-04; EST_HUMAN HIT: T70359.1, EVALUE 2.00e-09
PLAAIILLLFFGPCIFNLLIKLVSSRIEAVKLQMAL

SEQ ID NO: 40625 - protein, 68 aa, Homo sapiens
  MAP TO AC015908.4; EXPRESSED IN FETAL LIVER, SIGNAL = 2.8; EXPRESSED IN PLACENTA, SIGNAL = 3.8; EXPRESSED IN HELA, SIGNAL = 4.8; EXPRESSED IN BONE MARROW, SIGNAL = 2.9; EXPRESSED IN LUNG, SIGNAL = 3.6; EXPRESSED IN ADULT LIVER, SIGNAL = 3.8; EXPRESSED IN HEART, SIGNAL = 3.7; EXPRESSED IN BRAIN, SIGNAL = 2.7; SWISSPROT HIT: P08548, EVALUE 4.50e-02; EST_HUMAN HIT: AA190193.1, EVALUE 2.20e-01
MKKSCETVQKATKEDVNKQRQIVFLVGSPSRSVLHKVIYKYKAIPLRTLGIFHGVFQTEEKNAPGVEN

SEQ ID NO: 40626 - protein, 29 aa, Homo sapiens
  MAP TO AC024259.5; EXPRESSED IN BONE MARROW, SIGNAL = 4.9; EXPRESSED IN LUNG, SIGNAL = 3.6; EXPRESSED IN BRAIN, SIGNAL = 4.3; EXPRESSED IN HEART, SIGNAL = 4.7; EXPRESSED IN HELA, SIGNAL =   3; EXPRESSED IN ADULT LIVER, SIGNAL = 3.7; EXPRESSED IN PLACENTA, SIGNAL = 4.3; EXPRESSED IN FETAL LIVER, SIGNAL = 4.1; EST_HUMAN HIT: AA507738.1, EVALUE 2.00e-04
WTMESRLSWSHMEMRNFWGSGAKLTVAML

SEQ ID NO: 40627 - protein, 26 aa, Homo sapiens
  MAP TO AL133354.8; EXPRESSED IN HELA, SIGNAL = 4.7; EXPRESSED IN LUNG, SIGNAL = 4.3; EXPRESSED IN PLACENTA, SIGNAL = 4.2; EXPRESSED IN ADULT LIVER, SIGNAL = 4.6; EXPRESSED IN FETAL LIVER, SIGNAL = 3.6; EXPRESSED IN BRAIN, SIGNAL = 3.4; EXPRESSED IN BONE MARROW, SIGNAL =   4; EXPRESSED IN HEART, SIGNAL = 4.1
TLELTAMCSEENEANQPKANPKHPMA

SEQ ID NO: 40628 - protein, 71 aa, Homo sapiens
  MAP TO AC018511.3; EXPRESSED IN BONE MARROW, SIGNAL =   1; EXPRESSED IN ADULT LIVER, SIGNAL = 0.56; EXPRESSED IN HEART, SIGNAL = 1.2; EXPRESSED IN BRAIN, SIGNAL =   1; EXPRESSED IN PLACENTA, SIGNAL = 0.94; EXPRESSED IN FETAL LIVER, SIGNAL = 0.89; EST_HUMAN HIT: AW748438.1, EVALUE 1.00e-36; SWISSPROT HIT: Q92794, EVALUE 4.00e-25
REGQAGSPEKPLSDLGRLSYLAYWKSVILEYLYHHHERHISIKAISRATGMCPHDIATTLQHLHMIDKRDG

SEQ ID NO: 40629 - protein, 63 aa, Homo sapiens
  MAP TO AC018511.3; EXPRESSED IN BONE MARROW, SIGNAL =   1; EXPRESSED IN ADULT LIVER, SIGNAL = 0.56; EXPRESSED IN HEART, SIGNAL = 1.2; EXPRESSED IN BRAIN, SIGNAL =   1; EXPRESSED IN PLACENTA, SIGNAL = 0.94; EXPRESSED IN FETAL LIVER, SIGNAL = 0.89; EST_HUMAN HIT: AW748438.1, EVALUE 1.00e-29; SWISSPROT HIT: P26651, EVALUE 2.60e+00
KAKQGLLKSLSPIWAVSPTWHIGRASSWSISTTTMRGTSASRQLAERRACAHMTLPPLCSTST

SEQ ID NO: 40630 - protein, 50 aa, Homo sapiens
  MAP TO AL157376.1; EXPRESSED IN PLACENTA, SIGNAL = 4.9; EXPRESSED IN ADULT LIVER, SIGNAL = 8.5; EXPRESSED IN HELA, SIGNAL = 7.2; EXPRESSED IN FETAL LIVER, SIGNAL =  10; EXPRESSED IN BRAIN, SIGNAL =  11; EXPRESSED IN BONE MARROW, SIGNAL =  11; EXPRESSED IN LUNG, SIGNAL = 6.9; EXPRESSED IN HEART, SIGNAL = 6.8; EST_HUMAN HIT: AA434554.1, EVALUE 2.00e-12
RCSQQPLPSQTQRPRREKWFPGPGLGTLCPASQLLQLWLKGANIELKLWL

SEQ ID NO: 40631 - protein, 45 aa, Homo sapiens
  MAP TO AL136172.12; EXPRESSED IN LUNG, SIGNAL = 1.4; EXPRESSED IN PLACENTA, SIGNAL = 1.3; EXPRESSED IN ADULT LIVER, SIGNAL = 1.3; EXPRESSED IN BRAIN, SIGNAL =   1; EXPRESSED IN FETAL LIVER, SIGNAL = 1.3; EXPRESSED IN HEART, SIGNAL = 1.5; EXPRESSED IN BONE MARROW, SIGNAL = 1.6; SWISSPROT HIT: P16942, EVALUE 2.80e+00; EST_HUMAN HIT: Z44162.1, EVALUE 2.00e-20
HLAEVWRMLSVELPSTTWILWRLLRKLQKCHNEPAQEKMAYVAVA

SEQ ID NO: 40632 - protein, 19 aa, Homo sapiens
  MAP TO AL118505.13; EXPRESSED IN LUNG, SIGNAL = 2.4; EXPRESSED IN PLACENTA, SIGNAL = 2.2; EXPRESSED IN ADULT LIVER, SIGNAL = 2.4; EXPRESSED IN HEART, SIGNAL = 2.4; EXPRESSED IN FETAL LIVER, SIGNAL = 2.1; EXPRESSED IN BRAIN, SIGNAL = 5.9; EXPRESSED IN BONE MARROW, SIGNAL = 2.3; EST_HUMAN HIT: BF317283.1, EVALUE 1.30e-02
VEKTSKTKRQLKMKTQSLK

SEQ ID NO: 40633 - protein, 37 aa, Homo sapiens
  MAP TO AC019162.3; EXPRESSED IN PLACENTA, SIGNAL = 2.8; EXPRESSED IN FETAL LIVER, SIGNAL = 4.6; EXPRESSED IN BONE MARROW, SIGNAL = 3.9; EXPRESSED IN ADULT LIVER, SIGNAL = 3.6; EXPRESSED IN HEART, SIGNAL = 3.5; EXPRESSED IN BRAIN, SIGNAL = 3.1; EXPRESSED IN LUNG, SIGNAL = 4.3; SWISSPROT HIT: P22532, EVALUE 1.70e+00; EST_HUMAN HIT: BE938004.1, EVALUE 2.00e-10
QRLQPSPPWHHSCPQTPCETQDCQKENQEVHPVPVRL

SEQ ID NO: 40634 - protein, 91 aa, Homo sapiens
  MAP TO AC006460.3; EXPRESSED IN LUNG, SIGNAL = 2.5; EXPRESSED IN FETAL LIVER, SIGNAL = 2.6; EXPRESSED IN PLACENTA, SIGNAL = 2.9; EXPRESSED IN ADULT LIVER, SIGNAL = 2.7; EXPRESSED IN HEART, SIGNAL = 1.8; EXPRESSED IN BRAIN, SIGNAL = 2.5; EXPRESSED IN BONE MARROW, SIGNAL =   3; EST_HUMAN HIT: BF700165.1, EVALUE 4.00e-42; SWISSPROT HIT: P13135, EVALUE 5.50e-01
FNPEASEATSPPGGTNNSRRTALRAVTLTAKVCSFTPEPARPRTHQKKETPNTSEHQKEQTPDAPTVTLTARIRGFILEVSETKNPPIPDT

SEQ ID NO: 40635 - protein, 41 aa, Homo sapiens
  MAP TO AC006460.3; EXPRESSED IN LUNG, SIGNAL = 2.5; EXPRESSED IN FETAL LIVER, SIGNAL = 2.6; EXPRESSED IN PLACENTA, SIGNAL = 2.9; EXPRESSED IN ADULT LIVER, SIGNAL = 2.7; EXPRESSED IN HEART, SIGNAL = 1.8; EXPRESSED IN BRAIN, SIGNAL = 2.5; EXPRESSED IN BONE MARROW, SIGNAL =   3; EST_HUMAN HIT: AW975312.1, EVALUE 7.00e-13; SWISSPROT HIT: P45285, EVALUE 8.30e+00
SGVKLQTFAVSVTALKAVRLELFVPPGGLVASLASGLKLQT

SEQ ID NO: 40636 - protein, 21 aa, Homo sapiens
  MAP TO AC006460.3; EXPRESSED IN LUNG, SIGNAL = 2.5; EXPRESSED IN FETAL LIVER, SIGNAL = 2.6; EXPRESSED IN PLACENTA, SIGNAL = 2.9; EXPRESSED IN ADULT LIVER, SIGNAL = 2.7; EXPRESSED IN HEART, SIGNAL = 1.8; EXPRESSED IN BRAIN, SIGNAL = 2.5; EXPRESSED IN BONE MARROW, SIGNAL =   3; EST_HUMAN HIT: AA470715.1, EVALUE 1.00e-06
QCVRNWWVLGLTDFKNEATDP

SEQ ID NO: 40637 - protein, 30 aa, Homo sapiens
  MAP TO AC024570.2; EXPRESSED IN ADULT LIVER, SIGNAL =  14; EXPRESSED IN PLACENTA, SIGNAL =  14; EXPRESSED IN HELA, SIGNAL =  16; EXPRESSED IN HEART, SIGNAL =  13; EXPRESSED IN BRAIN, SIGNAL =  11; EXPRESSED IN BONE MARROW, SIGNAL =  13; EXPRESSED IN LUNG, SIGNAL =  15; EXPRESSED IN FETAL LIVER, SIGNAL =  12
TIVILLNLILKNITLGNTNPEKDQNADNVC

SEQ ID NO: 40638 - protein, 97 aa, Homo sapiens
  MAP TO AL161422.3; EXPRESSED IN LUNG, SIGNAL = 2.8; EXPRESSED IN PLACENTA, SIGNAL = 2.6; EXPRESSED IN ADULT LIVER, SIGNAL = 2.9; EXPRESSED IN HEART, SIGNAL = 2.5; EXPRESSED IN FETAL LIVER, SIGNAL = 2.5; EXPRESSED IN BONE MARROW, SIGNAL = 2.6; EXPRESSED IN BRAIN, SIGNAL = 2.5; EXPRESSED IN HELA, SIGNAL = 3.2; EST_HUMAN HIT: BE963883.2, EVALUE 7.50e-01
MFFPTAFLFFPQCFSPPSLQTFSPSCLSPCFSASIYPLFSTIFSPPSFCNSFFCSPRHPLFPLALTTLFTPPSTPKLFPSSYHSSWLQSPLLPPTTA

SEQ ID NO: 40639 - protein, 34 aa, Homo sapiens
  MAP TO AL161422.3; EXPRESSED IN LUNG, SIGNAL = 2.8; EXPRESSED IN PLACENTA, SIGNAL = 2.6; EXPRESSED IN ADULT LIVER, SIGNAL = 2.9; EXPRESSED IN HEART, SIGNAL = 2.5; EXPRESSED IN FETAL LIVER, SIGNAL = 2.5; EXPRESSED IN BONE MARROW, SIGNAL = 2.6; EXPRESSED IN BRAIN, SIGNAL = 2.5; EXPRESSED IN HELA, SIGNAL = 3.2
WRRKNRETNRRGRRFAKMVGKNTVGRKERQWGKT

SEQ ID NO: 40640 - protein, 94 aa, Homo sapiens
  MAP TO AL121895.18; EXPRESSED IN LUNG, SIGNAL = 3.9; EXPRESSED IN PLACENTA, SIGNAL = 4.1; EXPRESSED IN ADULT LIVER, SIGNAL = 4.1; EXPRESSED IN HELA, SIGNAL = 2.9; EXPRESSED IN FETAL LIVER, SIGNAL = 4.5; EXPRESSED IN BRAIN, SIGNAL = 4.3; EXPRESSED IN HEART, SIGNAL = 4.3; EXPRESSED IN BONE MARROW, SIGNAL = 4.1; SWISSPROT HIT: O35099, EVALUE 6.80e+00; EST_HUMAN HIT: AI424960.1, EVALUE 1.50e+00
TCSRTTATFHASHLSSIFPLLLSPSMLPHTSILIPSLDIKGFSQTFLTPPGICSQKNHIRGWLWVSESGGAECFSYCFSGTRIVCSRFCMSILG

SEQ ID NO: 40641 - protein, 21 aa, Homo sapiens
  MAP TO AL121895.18; EXPRESSED IN LUNG, SIGNAL = 3.9; EXPRESSED IN PLACENTA, SIGNAL = 4.1; EXPRESSED IN ADULT LIVER, SIGNAL = 4.1; EXPRESSED IN HELA, SIGNAL = 2.9; EXPRESSED IN FETAL LIVER, SIGNAL = 4.5; EXPRESSED IN BRAIN, SIGNAL = 4.3; EXPRESSED IN HEART, SIGNAL = 4.3; EXPRESSED IN BONE MARROW, SIGNAL = 4.1
CCLTPPSSSPPWTSRASHKPS

SEQ ID NO: 40642 - protein, 34 aa, Homo sapiens
  MAP TO AL121823.12; EXPRESSED IN PLACENTA, SIGNAL = 1.6; EXPRESSED IN HEART, SIGNAL = 1.6; EXPRESSED IN FETAL LIVER, SIGNAL = 2.1; EXPRESSED IN BONE MARROW, SIGNAL = 1.5; EXPRESSED IN LUNG, SIGNAL = 1.5; EXPRESSED IN ADULT LIVER, SIGNAL = 2.1; EXPRESSED IN BRAIN, SIGNAL = 1.7; EST_HUMAN HIT: BE901994.1, EVALUE 3.00e-14
DMDGAGNTYAQQTNAGTENQEPHILTYKWELNNE

SEQ ID NO: 40643 - protein, 30 aa, Homo sapiens
  MAP TO AL121823.12; EXPRESSED IN PLACENTA, SIGNAL = 1.6; EXPRESSED IN HEART, SIGNAL = 1.6; EXPRESSED IN FETAL LIVER, SIGNAL = 2.1; EXPRESSED IN BONE MARROW, SIGNAL = 1.5; EXPRESSED IN LUNG, SIGNAL = 1.5; EXPRESSED IN ADULT LIVER, SIGNAL = 2.1; EXPRESSED IN BRAIN, SIGNAL = 1.7; EST_HUMAN HIT: BE901994.1, EVALUE 8.00e-10; SWISSPROT HIT: P11369, EVALUE 1.10e-01
TWMELETLMLSKLMQEQKTKNHIFSLISGS

SEQ ID NO: 40644 - protein, 68 aa, Homo sapiens
  MAP TO AC009466.2; EXPRESSED IN HELA, SIGNAL = 4.3; EXPRESSED IN LUNG, SIGNAL = 2.8; EXPRESSED IN PLACENTA, SIGNAL =   3; EXPRESSED IN HEART, SIGNAL = 3.4; EXPRESSED IN FETAL LIVER, SIGNAL = 4.1; EXPRESSED IN BONE MARROW, SIGNAL = 3.4; EXPRESSED IN ADULT LIVER, SIGNAL = 3.2; EXPRESSED IN BRAIN, SIGNAL = 3.8; EST_HUMAN HIT: BF341180.1, EVALUE 2.00e-23; SWISSPROT HIT: P13591, EVALUE 2.00e-24
NGSPTSGLSTGAIVGILIVIFVLLLVVVDITCYFLNKCGLFMCIAVNLCGKAGPGAKGKDMEEGKAAF

SEQ ID NO: 40645 - protein, 23 aa, Homo sapiens
  MAP TO AC013685.3; EXPRESSED IN ADULT LIVER, SIGNAL = 2.6; EXPRESSED IN HEART, SIGNAL = 2.6; EXPRESSED IN BRAIN, SIGNAL = 3.1; EXPRESSED IN LUNG, SIGNAL = 2.6; EXPRESSED IN FETAL LIVER, SIGNAL = 4.1; EXPRESSED IN PLACENTA, SIGNAL = 3.1; EXPRESSED IN HELA, SIGNAL = 3.6; EXPRESSED IN BONE MARROW, SIGNAL = 3.2; EST_HUMAN HIT: BF238781.1, EVALUE 9.40e-01
SNNYSKFWNIPLNFYGISLSFNR

SEQ ID NO: 40646 - protein, 63 aa, Homo sapiens
  MAP TO AL162171.1; EXPRESSED IN PLACENTA, SIGNAL = 1.3; EXPRESSED IN LUNG, SIGNAL = 1.2; EXPRESSED IN ADULT LIVER, SIGNAL = 1.2; EXPRESSED IN HEART, SIGNAL = 1.4; EXPRESSED IN FETAL LIVER, SIGNAL = 1.1; EXPRESSED IN BRAIN, SIGNAL = 1.1; EXPRESSED IN BONE MARROW, SIGNAL = 1.1; EST_HUMAN HIT: BF116199.1, EVALUE 3.00e-28; SWISSPROT HIT: Q62728, EVALUE 2.00e-27
KKKMPLPFGLKLKRTRRYTVSSKSCLVARIQLLNNEFVEFTLSVESTGQESLEAVAQRLELRE

SEQ ID NO: 40647 - protein, 33 aa, Homo sapiens
  MAP TO AC021468.2; EXPRESSED IN LUNG, SIGNAL = 1.3; EXPRESSED IN PLACENTA, SIGNAL = 1.2; EXPRESSED IN ADULT LIVER, SIGNAL = 1.5; EXPRESSED IN FETAL LIVER, SIGNAL = 1.2; EXPRESSED IN BRAIN, SIGNAL = 1.2; EXPRESSED IN HEART, SIGNAL = 1.3; EXPRESSED IN BONE MARROW, SIGNAL = 1.2; EST_HUMAN HIT: AA782323.1, EVALUE 4.40e+00
MGYGVTAFFIWAFSRVLSSCPASKKNELMLTAM

SEQ ID NO: 40648 - protein, 64 aa, Homo sapiens
  MAP TO AC007009.2; EXPRESSED IN LUNG, SIGNAL =   3; EXPRESSED IN ADULT LIVER, SIGNAL =   4; EXPRESSED IN HELA, SIGNAL = 2.6; EXPRESSED IN FETAL LIVER, SIGNAL = 3.9; EXPRESSED IN BRAIN, SIGNAL = 3.6; EXPRESSED IN BONE MARROW, SIGNAL = 3.3; EXPRESSED IN PLACENTA, SIGNAL = 2.8; EXPRESSED IN HEART, SIGNAL = 3.2; SWISSPROT HIT: Q05084, EVALUE 6.00e-34; EST_HUMAN HIT: BE787272.1, EVALUE 7.00e-33
LALRNPLCRFHQEVETFRHRAISDTWLTVNRMEQCRTEYRGALLWMKDVSQELDPDLYKQMEKF

SEQ ID NO: 40649 - protein, 62 aa, Homo sapiens
  MAP TO AL157879.2; EXPRESSED IN LUNG, SIGNAL =  10; EXPRESSED IN ADULT LIVER, SIGNAL =  10; EXPRESSED IN HELA, SIGNAL = 2.2; EXPRESSED IN HEART, SIGNAL = 9.8; EXPRESSED IN FETAL LIVER, SIGNAL = 9.6; EXPRESSED IN BRAIN, SIGNAL = 9.6; EXPRESSED IN PLACENTA, SIGNAL =  11; EXPRESSED IN BONE MARROW, SIGNAL =  12; SWISSPROT HIT: P08236, EVALUE 5.00e-21; EST_HUMAN HIT: W23507.1, EVALUE 3.00e-32
LVNYHISVKCSNQFKLEVCLLKSDNKVVDNQAGTQGQLKVLGANLWWPYLMHEHPAYLYSWE

SEQ ID NO: 40650 - protein, 18 aa, Homo sapiens
  MAP TO AC016205.4; EXPRESSED IN BONE MARROW, SIGNAL = 2.2; EXPRESSED IN LUNG, SIGNAL = 1.2; EXPRESSED IN PLACENTA, SIGNAL = 1.2; EXPRESSED IN HEART, SIGNAL = 1.4; EXPRESSED IN ADULT LIVER, SIGNAL = 1.3; EXPRESSED IN FETAL LIVER, SIGNAL = 1.7; EXPRESSED IN BRAIN, SIGNAL = 1.8; EST_HUMAN HIT: AI936549.1, EVALUE 1.20e+00
VWSGTPANCSSPMEDGTN

SEQ ID NO: 40651 - protein, 26 aa, Homo sapiens
  MAP TO AC018993.3; EXPRESSED IN PLACENTA, SIGNAL = 7.1; EXPRESSED IN HELA, SIGNAL = 8.3; EXPRESSED IN FETAL LIVER, SIGNAL = 6.9; EXPRESSED IN BONE MARROW, SIGNAL = 7.4; EXPRESSED IN LUNG, SIGNAL = 7.2; EXPRESSED IN ADULT LIVER, SIGNAL = 7.9; EXPRESSED IN HEART, SIGNAL = 7.4; EXPRESSED IN BRAIN, SIGNAL =   7
LKTGEVAIISYGSYTLDSYNPHNKLM

SEQ ID NO: 40652 - protein, 51 aa, Homo sapiens
  MAP TO AL121901.10; EXPRESSED IN LUNG, SIGNAL = 9.1; EXPRESSED IN HELA, SIGNAL = 4.8; EXPRESSED IN PLACENTA, SIGNAL =   5; EXPRESSED IN ADULT LIVER, SIGNAL = 5.5; EXPRESSED IN FETAL LIVER, SIGNAL = 4.4; EXPRESSED IN BRAIN, SIGNAL = 4.5; EXPRESSED IN HEART, SIGNAL = 4.7; EXPRESSED IN BONE MARROW, SIGNAL = 4.9; EST_HUMAN HIT: BF672220.1, EVALUE 1.00e-23; SWISSPROT HIT: P94177, EVALUE 2.40e-01
LASCTCCPLTPGKMAGPWTFTLLCGLLAATLIQATLSPTAVLILGPKVIKE

SEQ ID NO: 40653 - protein, 59 aa, Homo sapiens
  MAP TO AL157377.1; EXPRESSED IN PLACENTA, SIGNAL =  21; EXPRESSED IN ADULT LIVER, SIGNAL =  27; EXPRESSED IN HEART, SIGNAL =  21; EXPRESSED IN FETAL LIVER, SIGNAL =  22; EXPRESSED IN BRAIN, SIGNAL =  21; EXPRESSED IN BONE MARROW, SIGNAL =  25; EXPRESSED IN LUNG, SIGNAL =  26; EXPRESSED IN HELA, SIGNAL =  29; EST_HUMAN HIT: AU138526.1, EVALUE 4.00e-10; SWISSPROT HIT: P22413, EVALUE 3.00e-11
LLRIQPAPNNGTHGSLNHLLKVPFYEPSHAEEVSKFSVCGFANPLPTESLDCFCPHLQN

SEQ ID NO: 40654 - protein, 161 aa, Homo sapiens
  MAP TO AL136528.9; EXPRESSED IN HEART, SIGNAL = 2.8; EXPRESSED IN PLACENTA, SIGNAL = 2.5; EXPRESSED IN ADULT LIVER, SIGNAL = 2.4; EXPRESSED IN HELA, SIGNAL = 3.7; EXPRESSED IN BRAIN, SIGNAL = 2.2; EXPRESSED IN BONE MARROW, SIGNAL = 2.8; EXPRESSED IN LUNG, SIGNAL =   3; EXPRESSED IN FETAL LIVER, SIGNAL = 2.6; EST_HUMAN HIT: BF345943.1, EVALUE 9.10e-01; SWISSPROT HIT: Q09897, EVALUE 3.00e+00
GACCGASSTAYSESHLHRAMVRGAVRLLPFPWHLAGFECAGLWGGSVARSSILRVLGHGVERVLGRGMDQWPVPPVLSVLGHGLDPWPIPLTLSMLSCGVDRWPVPSVFSTLGRSVDQRPLPSLLSALGHVDPSGPFFLLLSAVEPIPRVSSAGFSSGQWK

SEQ ID NO: 40655 - protein, 32 aa, Homo sapiens
  MAP TO AC019126.3; EXPRESSED IN LUNG, SIGNAL = 1.7; EXPRESSED IN ADULT LIVER, SIGNAL = 1.3; EXPRESSED IN HEART, SIGNAL = 1.8; EXPRESSED IN BRAIN, SIGNAL = 1.7; EXPRESSED IN BONE MARROW, SIGNAL = 1.8; EXPRESSED IN PLACENTA, SIGNAL = 1.8; EXPRESSED IN FETAL LIVER, SIGNAL = 1.8; EST_HUMAN HIT: BF667297.1, EVALUE 1.00e-11; SWISSPROT HIT: P52747, EVALUE 1.00e-12
MGHQQHSHHLVTTETRPLTLVATSNGTQIAVQ

SEQ ID NO: 40656 - protein, 28 aa, Homo sapiens
  MAP TO AC019042.3; EXPRESSED IN LUNG, SIGNAL = 4.5; EXPRESSED IN ADULT LIVER, SIGNAL = 6.2; EXPRESSED IN HEART, SIGNAL = 4.3; EXPRESSED IN FETAL LIVER, SIGNAL = 4.6; EXPRESSED IN BRAIN, SIGNAL = 5.3; EXPRESSED IN PLACENTA, SIGNAL = 3.5; EXPRESSED IN BONE MARROW, SIGNAL = 5.5; EST_HUMAN HIT: BE062167.1, EVALUE 7.00e-05
MLIVIWTTKSRLRFSQMEMRNLLRTRIK

SEQ ID NO: 40657 - protein, 71 aa, Homo sapiens; identical to SEQ ID NO: 39582
  MAP TO AC013451.7; EXPRESSED IN PLACENTA, SIGNAL = 1.9; EXPRESSED IN FETAL LIVER, SIGNAL = 1.6; EXPRESSED IN LUNG, SIGNAL = 1.9; EXPRESSED IN HEART, SIGNAL = 1.3; EXPRESSED IN BONE MARROW, SIGNAL = 1.3; EXPRESSED IN ADULT LIVER, SIGNAL = 1.7; EXPRESSED IN BRAIN, SIGNAL = 2.1; SWISSPROT HIT: Q00918, EVALUE 4.90e-01; EST_HUMAN HIT: AA852962.1, EVALUE 3.00e-15

SEQ ID NO: 40658 - protein, 23 aa, Homo sapiens
  MAP TO AC013451.7; EXPRESSED IN PLACENTA, SIGNAL = 1.9; EXPRESSED IN FETAL LIVER, SIGNAL = 1.6; EXPRESSED IN LUNG, SIGNAL = 1.9; EXPRESSED IN HEART, SIGNAL = 1.3; EXPRESSED IN BONE MARROW, SIGNAL = 1.3; EXPRESSED IN ADULT LIVER, SIGNAL = 1.7; EXPRESSED IN BRAIN, SIGNAL = 2.1
RPSERSALPATATPTRAPTSACP

SEQ ID NO: 40659 - protein, 36 aa, Homo sapiens
  MAP TO AC005103.2; EXPRESSED IN LUNG, SIGNAL = 4.6; EXPRESSED IN HELA, SIGNAL = 5.2; EXPRESSED IN PLACENTA, SIGNAL = 3.8; EXPRESSED IN FETAL LIVER, SIGNAL = 3.6; EXPRESSED IN ADULT LIVER, SIGNAL = 5.3; EXPRESSED IN HEART, SIGNAL =   4; EXPRESSED IN BRAIN, SIGNAL = 3.6; EXPRESSED IN BONE MARROW, SIGNAL = 4.3; SWISSPROT HIT: P39880, EVALUE 2.00e-14; EST_HUMAN HIT: BF347603.1, EVALUE 2.00e-13
QLQLKVQRLHDIETENQKLRETLEEYNKEFAEVKNQ

SEQ ID NO: 40660 - protein, 20 aa, Homo sapiens
  MAP TO AC005103.2; EXPRESSED IN LUNG, SIGNAL = 4.6; EXPRESSED IN HELA, SIGNAL = 5.2; EXPRESSED IN PLACENTA, SIGNAL = 3.8; EXPRESSED IN FETAL LIVER, SIGNAL = 3.6; EXPRESSED IN ADULT LIVER, SIGNAL = 5.3; EXPRESSED IN HEART, SIGNAL =   4; EXPRESSED IN BRAIN, SIGNAL = 3.6; EXPRESSED IN BONE MARROW, SIGNAL = 4.3; EST_HUMAN HIT: BE265326.1, EVALUE 9.00e-04
RTSFGSRTATPAQSAAPARY

SEQ ID NO: 40661 - protein, 38 aa, Homo sapiens
  MAP TO AC013396.4; EXPRESSED IN LUNG, SIGNAL = 1.7; EXPRESSED IN PLACENTA, SIGNAL = 1.8; EXPRESSED IN ADULT LIVER, SIGNAL = 1.7; EXPRESSED IN HEART, SIGNAL = 1.9; EXPRESSED IN BRAIN, SIGNAL = 1.3; EXPRESSED IN FETAL LIVER, SIGNAL = 1.1; EXPRESSED IN BONE MARROW, SIGNAL = 1.5; EST_HUMAN HIT: BF698029.1, EVALUE 7.30e+00
SSHKLTMTLVVMVLPWPEAIEEVTFYSAWKSLKLTGKN

SEQ ID NO: 40662 - protein, 79 aa, Homo sapiens
  MAP TO AC025826.1; EXPRESSED IN BONE MARROW, SIGNAL = 1.2; EXPRESSED IN HEART, SIGNAL = 1.2; EXPRESSED IN LUNG, SIGNAL = 1.4; EXPRESSED IN PLACENTA, SIGNAL = 1.2; EXPRESSED IN ADULT LIVER, SIGNAL = 0.99; EXPRESSED IN BRAIN, SIGNAL =   2; EXPRESSED IN FETAL LIVER, SIGNAL = 1.6; SWISSPROT HIT: P10272, EVALUE 4.00e-11; EST_HUMAN HIT: BE093072.1, EVALUE 1.00e-27
TDHDTHQSQQLTWAVLLQGFMDSPHYFSQAVSRDLLSFHPSASHLIQYIDDLLLCSPSFESSQQDILLLLQHLFSKGYQ

SEQ ID NO: 40663 - protein, 28 aa, Homo sapiens
  MAP TO AL133319.21; EXPRESSED IN PLACENTA, SIGNAL = 1.9; EXPRESSED IN ADULT LIVER, SIGNAL = 2.3; EXPRESSED IN HELA, SIGNAL =   4; EXPRESSED IN HEART, SIGNAL = 2.5; EXPRESSED IN FETAL LIVER, SIGNAL = 3.3; EXPRESSED IN LUNG, SIGNAL = 2.3; EXPRESSED IN BRAIN, SIGNAL = 2.1; EXPRESSED IN BONE MARROW, SIGNAL = 3.2
MKVNSILKDMNIIKLLLLTDLMKINWQK

SEQ ID NO: 40664 - protein, 69 aa, Homo sapiens
  MAP TO AL109624.11; EXPRESSED IN BONE MARROW, SIGNAL =   1; EXPRESSED IN LUNG, SIGNAL = 1.4; EXPRESSED IN PLACENTA, SIGNAL = 1.6; EXPRESSED IN HEART, SIGNAL = 1.6; EXPRESSED IN FETAL LIVER, SIGNAL = 1.1; EXPRESSED IN ADULT LIVER, SIGNAL = 1.2; EXPRESSED IN BRAIN, SIGNAL = 1.2; EST_HUMAN HIT: AI203462.1, EVALUE 1.90e-02; SWISSPROT HIT: P52034, EVALUE 7.60e+00
MAALSLTSEFQTSKGGRGGAYIGETKAVPEIPSRFLLAFHCQTGIVIIGDVSSMRIIAPEDLPGDKMVK

SEQ ID NO: 40665 - protein, 33 aa, Homo sapiens
  MAP TO AC007000.2; EXPRESSED IN HEART, SIGNAL = 6.4; EXPRESSED IN FETAL LIVER, SIGNAL =  18; EXPRESSED IN BONE MARROW, SIGNAL =  13; EXPRESSED IN BRAIN, SIGNAL = 7.8; EXPRESSED IN HELA, SIGNAL =  10; EXPRESSED IN ADULT LIVER, SIGNAL =  12; EXPRESSED IN PLACENTA, SIGNAL = 3.7; EXPRESSED IN LUNG, SIGNAL =  11; EST_HUMAN HIT: BF315709.1, EVALUE 2.00e-06; SWISSPROT HIT: Q13105, EVALUE 6.50e+00
QDAERKGGQGEEVGSGPCFCEEAGGQESGESPV

SEQ ID NO: 40666 - protein, 17 aa, Homo sapiens
  MAP TO AC007164.3; EXPRESSED IN LUNG, SIGNAL = 2.2; EXPRESSED IN PLACENTA, SIGNAL = 3.2; EXPRESSED IN ADULT LIVER, SIGNAL = 2.2; EXPRESSED IN HEART, SIGNAL = 2.1; EXPRESSED IN FETAL LIVER, SIGNAL = 2.6; EXPRESSED IN BRAIN, SIGNAL = 2.9; EXPRESSED IN BONE MARROW, SIGNAL = 2.2
GKILQEIFRRRNYYHRR

SEQ ID NO: 40667 - protein, 35 aa, Homo sapiens
  MAP TO AL121871.8; EXPRESSED IN PLACENTA, SIGNAL = 4.4; EXPRESSED IN HELA, SIGNAL =  12; EXPRESSED IN FETAL LIVER, SIGNAL =  14; EXPRESSED IN BRAIN, SIGNAL = 8.4; EXPRESSED IN BONE MARROW, SIGNAL =  17; EXPRESSED IN ADULT LIVER, SIGNAL = 7.1; EXPRESSED IN HEART, SIGNAL = 5.7; EXPRESSED IN LUNG, SIGNAL = 7.1; EST_HUMAN HIT: AA483445.1, EVALUE 2.00e-07
SSYNLNFIILLDGHGSPVILLFQLVGKRGRQSSRE

SEQ ID NO: 40668 - protein, 19 aa, Homo sapiens
  MAP TO AL121871.8; EXPRESSED IN PLACENTA, SIGNAL = 4.4; EXPRESSED IN HELA, SIGNAL =  12; EXPRESSED IN FETAL LIVER, SIGNAL =  14; EXPRESSED IN BRAIN, SIGNAL = 8.4; EXPRESSED IN BONE MARROW, SIGNAL =  17; EXPRESSED IN ADULT LIVER, SIGNAL = 7.1; EXPRESSED IN HEART, SIGNAL = 5.7; EXPRESSED IN LUNG, SIGNAL = 7.1; EST_HUMAN HIT: AA483445.1, EVALUE 8.30e+00; SWISSPROT HIT: P47832, EVALUE 3.90e+00
FTGRLSSPLSNELKQKYNG

SEQ ID NO: 40669 - protein, 26 aa, Homo sapiens
  MAP TO AC011841.3; EXPRESSED IN LUNG, SIGNAL = 3.2; EXPRESSED IN ADULT LIVER, SIGNAL = 3.2; EXPRESSED IN FETAL LIVER, SIGNAL =   3; EXPRESSED IN BRAIN, SIGNAL = 2.6; EXPRESSED IN BONE MARROW, SIGNAL = 3.4; EXPRESSED IN PLACENTA, SIGNAL = 3.6; EXPRESSED IN HELA, SIGNAL = 3.8; EXPRESSED IN HEART, SIGNAL = 2.9; EST_HUMAN HIT: AA171406.1, EVALUE 1.00e-08
LLHMQKKNWMKFSLDYDENSQQVRNR

SEQ ID NO: 40670 - protein, 129 aa, Homo sapiens
  MAP TO AC015649.5; EXPRESSED IN PLACENTA, SIGNAL = 3.4; EXPRESSED IN HEART, SIGNAL = 3.5; EXPRESSED IN BONE MARROW, SIGNAL = 4.8; EXPRESSED IN LUNG, SIGNAL =   2; EXPRESSED IN ADULT LIVER, SIGNAL = 0.53; EXPRESSED IN HELA, SIGNAL = 5.1; EXPRESSED IN FETAL LIVER, SIGNAL = 4.7; EXPRESSED IN BRAIN, SIGNAL = 3.1; EST_HUMAN HIT: AA100825.1, EVALUE 3.00e-31; SWISSPROT HIT: P16157, EVALUE 5.00e-70
MLEMSDMQVWSAGLTPSLVTAEDSSLECSKAEDSDATGHEWKLEGALSEEPRGPELGSLELVEDDTVDSDATNGLIDLLEQEEGQRSEEKLPGSKRQDDATGAGQDSENEVSLVSGHQRGQARITHSPT

SEQ ID NO: 40671 - protein, 34 aa, Homo sapiens
  MAP TO AC015649.5; EXPRESSED IN PLACENTA, SIGNAL = 3.4; EXPRESSED IN HEART, SIGNAL = 3.5; EXPRESSED IN BONE MARROW, SIGNAL = 4.8; EXPRESSED IN LUNG, SIGNAL =   2; EXPRESSED IN ADULT LIVER, SIGNAL = 0.53; EXPRESSED IN HELA, SIGNAL = 5.1; EXPRESSED IN FETAL LIVER, SIGNAL = 4.7; EXPRESSED IN BRAIN, SIGNAL = 3.1; EST_HUMAN HIT: AA161004.1, EVALUE 5.70e+00
VTPHCRTSCCPLPPWAVHFPLRYVQTSTGMRWPS

SEQ ID NO: 40672 - protein, 29 aa, Homo sapiens
  MAP TO AC022995.2; EXPRESSED IN HELA, SIGNAL = 4.5; EXPRESSED IN HEART, SIGNAL = 3.4; EXPRESSED IN LUNG, SIGNAL = 3.9; EXPRESSED IN PLACENTA, SIGNAL = 5.4; EXPRESSED IN ADULT LIVER, SIGNAL = 3.1; EXPRESSED IN BRAIN, SIGNAL =   3; EXPRESSED IN FETAL LIVER, SIGNAL = 3.5; EXPRESSED IN BONE MARROW, SIGNAL = 3.4; EST_HUMAN HIT: AA256269.1, EVALUE 1.00e-01
SEVGKSNIKVLASGEDLCAVSARGGRLMG

SEQ ID NO: 40673 - protein, 26 aa, Homo sapiens
  MAP TO AC022995.2; EXPRESSED IN HELA, SIGNAL = 4.5; EXPRESSED IN HEART, SIGNAL = 3.4; EXPRESSED IN LUNG, SIGNAL = 3.9; EXPRESSED IN PLACENTA, SIGNAL = 5.4; EXPRESSED IN ADULT LIVER, SIGNAL = 3.1; EXPRESSED IN BRAIN, SIGNAL =   3; EXPRESSED IN FETAL LIVER, SIGNAL = 3.5; EXPRESSED IN BONE MARROW, SIGNAL = 3.4; EST_HUMAN HIT: AI752367.1, EVALUE 9.00e-03
LRLGSPISRCWHLVKTSVLCQPVVAG

SEQ ID NO: 40674 - protein, 36 aa, Homo sapiens
  MAP TO AC011218.4; EXPRESSED IN LUNG, SIGNAL = 2.8; EXPRESSED IN PLACENTA, SIGNAL = 3.8; EXPRESSED IN ADULT LIVER, SIGNAL = 4.1; EXPRESSED IN HEART, SIGNAL = 3.1; EXPRESSED IN FETAL LIVER, SIGNAL = 2.6; EXPRESSED IN BRAIN, SIGNAL = 3.3; EXPRESSED IN BONE MARROW, SIGNAL = 3.1; EST_HUMAN HIT: AL119158.1, EVALUE 1.00e-07
DLLNDFDKSADSVLNNKFQAEVFSDGDEELLVNWNK

SEQ ID NO: 40675 - protein, 50 aa, Homo sapiens
  MAP TO AC007326.28; EXPRESSED IN LUNG, SIGNAL = 2.9; EXPRESSED IN HELA, SIGNAL = 7.7; EXPRESSED IN HEART, SIGNAL = 4.7; EXPRESSED IN BRAIN, SIGNAL = 4.3; EXPRESSED IN BONE MARROW, SIGNAL = 4.2; EXPRESSED IN PLACENTA, SIGNAL = 3.8; EXPRESSED IN ADULT LIVER, SIGNAL = 0.71; EXPRESSED IN FETAL LIVER, SIGNAL = 4.8; SWISSPROT HIT: P11219, EVALUE 3.60e+00; EST_HUMAN HIT: BF087215.1, EVALUE 1.00e-16
LGWAGACADGIQACVCSCSSQRCWPSGGASFTKWLWSKGRRAWLPWTPSW

SEQ ID NO: 40676 - protein, 53 aa, Homo sapiens
  MAP TO AC015473.3; EXPRESSED IN PLACENTA, SIGNAL =   4; EXPRESSED IN ADULT LIVER, SIGNAL = 2.9; EXPRESSED IN HELA, SIGNAL = 3.6; EXPRESSED IN HEART, SIGNAL = 2.9; EXPRESSED IN FETAL LIVER, SIGNAL = 3.4; EXPRESSED IN LUNG, SIGNAL =   4; EXPRESSED IN BRAIN, SIGNAL = 3.1; EXPRESSED IN BONE MARROW, SIGNAL = 4.1; SWISSPROT HIT: O02791, EVALUE 1.00e-25; EST_HUMAN HIT: AW389879.1, EVALUE 2.00e-24
TNLTTKCDVYIETPDTGGVFIAGRVNKGGILIRSARGIFFWIFANGSYRVTGD

SEQ ID NO: 40677 - protein, 69 aa, Homo sapiens
  MAP TO AC013625.3; EXPRESSED IN LUNG, SIGNAL = 4.3; EXPRESSED IN PLACENTA, SIGNAL = 3.6; EXPRESSED IN FETAL LIVER, SIGNAL =   6; EXPRESSED IN BRAIN, SIGNAL = 6.2; EXPRESSED IN BONE MARROW, SIGNAL =   3; EXPRESSED IN ADULT LIVER, SIGNAL =   4; EXPRESSED IN HELA, SIGNAL = 5.5; EXPRESSED IN HEART, SIGNAL = 4.7; EST_HUMAN HIT: AA364529.1, EVALUE 2.00e-17
WPKSTWKSTLTNLLWRHCSRRLRWTRTTKLSKTWGCCCLKLWGSLLASPLRILRPTPIASTMNKLGLAT

SEQ ID NO: 40678 - protein, 43 aa, Homo sapiens
  MAP TO AC015823.3; EXPRESSED IN LUNG, SIGNAL =   2; EXPRESSED IN ADULT LIVER, SIGNAL = 1.3; EXPRESSED IN HELA, SIGNAL = 3.2; EXPRESSED IN HEART, SIGNAL = 2.5; EXPRESSED IN BONE MARROW, SIGNAL = 2.5; EXPRESSED IN BRAIN, SIGNAL = 2.3; EXPRESSED IN PLACENTA, SIGNAL = 2.5; EXPRESSED IN FETAL LIVER, SIGNAL = 2.2; SWISSPROT HIT: P44477, EVALUE 3.70e+00; EST_HUMAN HIT: AW083252.1, EVALUE 2.00e-15
ISILFSTAAALFYILRMAQIISFFTSMPILLISSFSIKTILRG

SEQ ID NO: 40679 - protein, 29 aa, Homo sapiens
  MAP TO AC027273.2; EXPRESSED IN PLACENTA, SIGNAL =  12; EXPRESSED IN ADULT LIVER, SIGNAL =  12; EXPRESSED IN HEART, SIGNAL = 8.3; EXPRESSED IN FETAL LIVER, SIGNAL = 7.6; EXPRESSED IN BONE MARROW, SIGNAL =  10; EXPRESSED IN LUNG, SIGNAL = 9.2; EXPRESSED IN HELA, SIGNAL = 6.6; EXPRESSED IN BRAIN, SIGNAL = 7.6; EST_HUMAN HIT: AW898344.1, EVALUE 8.00e-08
WTMKSRLRWSQMEMGNLLGTGTKVTLFMF

SEQ ID NO: 40680 - protein, 45 aa, Homo sapiens
  MAP TO AC011181.5; EXPRESSED IN LUNG, SIGNAL = 1.7; EXPRESSED IN PLACENTA, SIGNAL = 1.4; EXPRESSED IN ADULT LIVER, SIGNAL = 2.5; EXPRESSED IN HEART, SIGNAL = 1.7; EXPRESSED IN FETAL LIVER, SIGNAL = 2.4; EXPRESSED IN BONE MARROW, SIGNAL = 2.6; EXPRESSED IN BRAIN, SIGNAL = 2.5; EST_HUMAN HIT: AI311783.1, EVALUE 8.00e-07
LVEEILTAIVITTIIATIKLFIVTGCPAFLRFSSAISDSFLICPQ

SEQ ID NO: 40681 - protein, 60 aa, Homo sapiens
  MAP TO AC025747.3; EXPRESSED IN LUNG, SIGNAL = 3.9; EXPRESSED IN PLACENTA, SIGNAL = 4.1; EXPRESSED IN FETAL LIVER, SIGNAL =   3; EXPRESSED IN BRAIN, SIGNAL = 2.7; EXPRESSED IN BONE MARROW, SIGNAL = 3.6; EXPRESSED IN ADULT LIVER, SIGNAL = 4.2; EXPRESSED IN HEART, SIGNAL = 3.3; SWISSPROT HIT: P27206, EVALUE 7.80e+00; EST_HUMAN HIT: H11224.1, EVALUE 2.00e-29
SIEIFQIPNLKLICTIQQHHKLVNTISWHHEHGSQPELSYLMASGSNNAVIYVHNLKTVI

SEQ ID NO: 40682 - protein, 65 aa, Homo sapiens
  MAP TO AC022045.2; EXPRESSED IN ADULT LIVER, SIGNAL = 2.5; EXPRESSED IN HEART, SIGNAL =   2; EXPRESSED IN BONE MARROW, SIGNAL = 2.2; EXPRESSED IN LUNG, SIGNAL = 2.5; EXPRESSED IN PLACENTA, SIGNAL = 2.3; EXPRESSED IN HELA, SIGNAL = 3.2; EXPRESSED IN FETAL LIVER, SIGNAL =   2; EXPRESSED IN BRAIN, SIGNAL = 2.1; SWISSPROT HIT: Q15915, EVALUE 2.30e-01; EST_HUMAN HIT: AU127129.1, EVALUE 2.00e-03
ERGGFHFFLGPEEVSSSSSQADRGSEWQNWGWRASFGSTSSDGKTLCSPRTDRASTSSLTACESA

SEQ ID NO: 40683 - protein, 25 aa, Homo sapiens
  MAP TO AC021855.3; EXPRESSED IN LUNG, SIGNAL = 3.5; EXPRESSED IN PLACENTA, SIGNAL =   3; EXPRESSED IN ADULT LIVER, SIGNAL = 3.8; EXPRESSED IN HELA, SIGNAL =   3; EXPRESSED IN HEART, SIGNAL = 3.8; EXPRESSED IN FETAL LIVER, SIGNAL = 2.6; EXPRESSED IN BONE MARROW, SIGNAL = 2.7; EXPRESSED IN BRAIN, SIGNAL = 2.7
YDEEEGVEEKSKDSGFGNYVNGEAI

SEQ ID NO: 40684 - protein, 19 aa, Homo sapiens
  MAP TO AC021855.3; EXPRESSED IN LUNG, SIGNAL = 3.5; EXPRESSED IN PLACENTA, SIGNAL =   3; EXPRESSED IN ADULT LIVER, SIGNAL = 3.8; EXPRESSED IN HELA, SIGNAL =   3; EXPRESSED IN HEART, SIGNAL = 3.8; EXPRESSED IN FETAL LIVER, SIGNAL = 2.6; EXPRESSED IN BONE MARROW, SIGNAL = 2.7; EXPRESSED IN BRAIN, SIGNAL = 2.7
MMKKKVLRKNPRILVLETM

SEQ ID NO: 40685 - protein, 56 aa, Homo sapiens
  MAP TO AC019214.2; EXPRESSED IN PLACENTA, SIGNAL = 1.5; EXPRESSED IN FETAL LIVER, SIGNAL = 1.4; EXPRESSED IN HEART, SIGNAL = 1.3; EXPRESSED IN BONE MARROW, SIGNAL = 1.3; EXPRESSED IN LUNG, SIGNAL =   2; EXPRESSED IN ADULT LIVER, SIGNAL = 1.8; EXPRESSED IN BRAIN, SIGNAL = 1.5; SWISSPROT HIT: Q90663, EVALUE 3.50e+00; EST_HUMAN HIT: AV649878.1, EVALUE 5.00e-28
WQFGSAGGRSGLFPADIVQPAAAPDFSFSKEQRSGWHKGQLSNGEPGLARWDRASE

SEQ ID NO: 40686 - protein, 17 aa, Homo sapiens
  MAP TO AC019214.2; EXPRESSED IN PLACENTA, SIGNAL = 1.5; EXPRESSED IN FETAL LIVER, SIGNAL = 1.4; EXPRESSED IN HEART, SIGNAL = 1.3; EXPRESSED IN BONE MARROW, SIGNAL = 1.3; EXPRESSED IN LUNG, SIGNAL =   2; EXPRESSED IN ADULT LIVER, SIGNAL = 1.8; EXPRESSED IN BRAIN, SIGNAL = 1.5; EST_HUMAN HIT: AW391909.1, EVALUE 3.70e-02
AGSLALPGAVPDSFLPT

SEQ ID NO: 40687 - protein, 146 aa, Homo sapiens
  MAP TO AC019214.2; EXPRESSED IN BONE MARROW, SIGNAL = 1.2; EXPRESSED IN LUNG, SIGNAL = 1.5; EXPRESSED IN PLACENTA, SIGNAL = 1.6; EXPRESSED IN ADULT LIVER, SIGNAL = 1.5; EXPRESSED IN FETAL LIVER, SIGNAL = 1.3; EXPRESSED IN BRAIN, SIGNAL = 1.3; EXPRESSED IN HEART, SIGNAL = 1.3; SWISSPROT HIT: P16144, EVALUE 1.00e-16; EST_HUMAN HIT: AA878026.1, EVALUE 3.00e-01
RIRSNLDIRALDSPRGLRTEVTSKMFQKTRTGSFHIRRGEVVRLCGGSGVGDRHSAPHRVESFKTAVKSVAPGVRQAWVQIPGPSRSDEPRLLLCLLVSSACKRRARRLAGAVNGLVSRSPEALATVIVAMIVTALGRREFPALRE

SEQ ID NO: 40688 - protein, 61 aa, Homo sapiens
  MAP TO AC013818.3; EXPRESSED IN BONE MARROW, SIGNAL = 2.2; EXPRESSED IN LUNG, SIGNAL = 2.7; EXPRESSED IN HELA, SIGNAL = 2.6; EXPRESSED IN PLACENTA, SIGNAL = 2.7; EXPRESSED IN ADULT LIVER, SIGNAL = 2.9; EXPRESSED IN HEART, SIGNAL = 2.2; EXPRESSED IN FETAL LIVER, SIGNAL = 1.9; EXPRESSED IN BRAIN, SIGNAL = 2.3; SWISSPROT HIT: P52848, EVALUE 2.00e-25; EST_HUMAN HIT: BF091686.1, EVALUE 2.00e-24
ISIFMTHLSNYGNDRLGLYTFVNLVNFVQSWTNLKLQTLPPVQLAHQYFELFPEQKDPLWQ

SEQ ID NO: 40689 - protein, 69 aa, Homo sapiens
  MAP TO AC025749.2; EXPRESSED IN HELA, SIGNAL = 7.9; EXPRESSED IN LUNG, SIGNAL = 7.4; EXPRESSED IN ADULT LIVER, SIGNAL = 6.7; EXPRESSED IN BRAIN, SIGNAL = 6.9; EXPRESSED IN BONE MARROW, SIGNAL = 5.8; EXPRESSED IN PLACENTA, SIGNAL = 5.8; EXPRESSED IN FETAL LIVER, SIGNAL = 5.5; EXPRESSED IN HEART, SIGNAL = 6.3; SWISSPROT HIT: P25341, EVALUE 4.00e-13; EST_HUMAN HIT: BE895244.1, EVALUE 1.00e-30
AVYLVRHRDTRQRFAIKKINKQNLILRNQIQQVFVERDILTFAENPFVVSMFCSFETRRHLCMVMEYVE

SEQ ID NO: 40690 - protein, 23 aa, Homo sapiens
  MAP TO AC025749.2; EXPRESSED IN HELA, SIGNAL = 7.9; EXPRESSED IN LUNG, SIGNAL = 7.4; EXPRESSED IN ADULT LIVER, SIGNAL = 6.7; EXPRESSED IN BRAIN, SIGNAL = 6.9; EXPRESSED IN BONE MARROW, SIGNAL = 5.8; EXPRESSED IN PLACENTA, SIGNAL = 5.8; EXPRESSED IN FETAL LIVER, SIGNAL = 5.5; EXPRESSED IN HEART, SIGNAL = 6.3; EST_HUMAN HIT: BE895244.1, EVALUE 4.20e-01
PSTWCGTVTHGSALPSRRSTNRT

SEQ ID NO: 40691 - protein, 56 aa, Homo sapiens
  MAP TO AC019222.3; EXPRESSED IN LUNG, SIGNAL = 3.3; EXPRESSED IN ADULT LIVER, SIGNAL = 2.7; EXPRESSED IN HEART, SIGNAL = 3.3; EXPRESSED IN BRAIN, SIGNAL = 2.6; EXPRESSED IN BONE MARROW, SIGNAL = 2.5; EXPRESSED IN PLACENTA, SIGNAL = 2.7; EXPRESSED IN FETAL LIVER, SIGNAL = 2.6; SWISSPROT HIT: P98166, EVALUE 7.00e-29; EST_HUMAN HIT: BF688320.1, EVALUE 8.00e-28
LLVMAAVGGYLMWRNWQHKNMKSMNFDNPVYLKTTEEDLSIDIGRHSASVGHTYPA

SEQ ID NO: 40692 - protein, 33 aa, Homo sapiens
  MAP TO AL133419.11; EXPRESSED IN LUNG, SIGNAL =   3; EXPRESSED IN PLACENTA, SIGNAL = 3.2; EXPRESSED IN ADULT LIVER, SIGNAL = 3.9; EXPRESSED IN FETAL LIVER, SIGNAL =   3; EXPRESSED IN BRAIN, SIGNAL =   3; EXPRESSED IN HEART, SIGNAL = 3.1; EXPRESSED IN BONE MARROW, SIGNAL = 2.8
TKNSMMPRNTCHFLMENMKASWGKKEMMQTIQS

SEQ ID NO: 40693 - protein, 50 aa, Homo sapiens [sequence omitted]

SEQ ID NO: 40694 - protein, 50 aa, Homo sapiens
  MAP TO AL133458.11; EXPRESSED IN PLACENTA, SIGNAL = 5.6; EXPRESSED IN ADULT LIVER, SIGNAL = 5.1; EXPRESSED IN HEART, SIGNAL = 4.8; EXPRESSED IN BRAIN, SIGNAL = 4.9; EXPRESSED IN BONE MARROW, SIGNAL = 4.5; EXPRESSED IN LUNG, SIGNAL = 5.1; EXPRESSED IN FETAL LIVER, SIGNAL = 4.3; EST_HUMAN HIT: BF329911.1, EVALUE 4.00e-15
CVTCTHRSQGVHRLPNVSLCSCMGLACMFTCMQRYRASTLASKHISVFLS

SEQ ID NO: 40695 - protein, 49 aa, Homo sapiens
  MAP TO AC023340.2; EXPRESSED IN HEART, SIGNAL = 3.5; EXPRESSED IN BONE MARROW, SIGNAL = 4.1; EXPRESSED IN PLACENTA, SIGNAL = 4.2; EXPRESSED IN ADULT LIVER, SIGNAL = 4.1; EXPRESSED IN BRAIN, SIGNAL = 3.7; EXPRESSED IN LUNG, SIGNAL = 4.1; EXPRESSED IN HELA, SIGNAL = 2.5; EXPRESSED IN FETAL LIVER, SIGNAL = 3.2; SWISSPROT HIT: P25107, EVALUE 3.60e+00; EST_HUMAN HIT: AI878817.1, EVALUE 4.00e-13
AGLEEKMAAKQPPPLMKKHSQTDLVSRLKTRKILGVGGEDDDGEVHRSK

SEQ ID NO: 40696 - protein, 29 aa, Homo sapiens
  MAP TO AL157392.2; EXPRESSED IN LUNG, SIGNAL = 3.5; EXPRESSED IN HEART, SIGNAL = 2.8; EXPRESSED IN BONE MARROW, SIGNAL =   3; EXPRESSED IN FETAL LIVER, SIGNAL = 2.8; EXPRESSED IN PLACENTA, SIGNAL = 2.9; EXPRESSED IN ADULT LIVER, SIGNAL = 2.5; EXPRESSED IN BRAIN, SIGNAL = 3.6; SWISSPROT HIT: P35241, EVALUE 3.80e+00; EST_HUMAN HIT: AI590884.1, EVALUE 1.00e-08
DKQGIPWWLGLSYKGIFQYDYHDKVKPRK

SEQ ID NO: 40697 - protein, 79 aa, Homo sapiens
  MAP TO AC019214.2; EXPRESSED IN LUNG, SIGNAL =   3; EXPRESSED IN PLACENTA, SIGNAL = 3.1; EXPRESSED IN ADULT LIVER, SIGNAL = 1.9; EXPRESSED IN HEART, SIGNAL = 3.6; EXPRESSED IN BRAIN, SIGNAL = 3.3; EXPRESSED IN FETAL LIVER, SIGNAL = 3.1; EXPRESSED IN BONE MARROW, SIGNAL = 3.4; SWISSPROT HIT: P16144, EVALUE 1.00e-41; EST_HUMAN HIT: AI281189.1, EVALUE 1.00e-40
HLVNGRMDFAFPGSTNSLHRMTTTSAAAYGTHLSPHVPHRVLSTSSTLTRDYNSLTRSEHSHSTTLPRDYSTLTSVSSH

SEQ ID NO: 40698 - protein, 50 aa, Homo sapiens
  MAP TO AC010789.7; EXPRESSED IN ADULT LIVER, SIGNAL = 1.3; EXPRESSED IN LUNG, SIGNAL = 1.4; EXPRESSED IN PLACENTA, SIGNAL = 1.3; EXPRESSED IN FETAL LIVER, SIGNAL = 1.5; EXPRESSED IN BRAIN, SIGNAL = 1.4; EXPRESSED IN BONE MARROW, SIGNAL = 1.4; EXPRESSED IN HEART, SIGNAL = 1.6; EST_HUMAN HIT: AV754081.1, EVALUE 5.00e-17
HTGTLPLTGISGASFLEAQIPILWVLSGPFLPKCIVFLPIFLPTYKGLYG

SEQ ID NO: 40699 - protein, 87 aa, Homo sapiens
  MAP TO AC025249.2; EXPRESSED IN ADULT LIVER, SIGNAL = 1.7; EXPRESSED IN HELA, SIGNAL = 2.3; EXPRESSED IN HEART, SIGNAL = 1.6; EXPRESSED IN FETAL LIVER, SIGNAL = 1.4; EXPRESSED IN BONE MARROW, SIGNAL = 1.6; EXPRESSED IN LUNG, SIGNAL = 1.2; EXPRESSED IN PLACENTA, SIGNAL = 1.6; EXPRESSED IN BRAIN, SIGNAL = 1.1; SWISSPROT HIT: P14373, EVALUE 1.60e+00; EST_HUMAN HIT: AU124051.1, EVALUE 5.00e-36
IQVETRKQSIVWEFEKYQRLLEKKQPPHRQLGAEVAAALASLQREAAETMQKLELNHSELIQQSQVLWRMIAELKERSQRPVRWMLQ

SEQ ID NO: 40700 - protein, 101 aa, Homo sapiens
  MAP TO AL133279.2; EXPRESSED IN PLACENTA, SIGNAL = 1.8; EXPRESSED IN HELA, SIGNAL = 2.3; EXPRESSED IN HEART, SIGNAL =   2; EXPRESSED IN LUNG, SIGNAL = 1.6; EXPRESSED IN BRAIN, SIGNAL = 1.9; EXPRESSED IN ADULT LIVER, SIGNAL = 1.8; EXPRESSED IN FETAL LIVER, SIGNAL = 2.5; EXPRESSED IN BONE MARROW, SIGNAL = 1.8; EST_HUMAN HIT: BE408611.1, EVALUE 4.00e-22
NTFHKAVAAIHNDSSDESEQSDLNIFWKGVIIVDAIKNICDELEEVKIPTLTRVWKKLIPRLMDDFESFKTSLEDATADVLELEVECEDVTEMLHLMIKLE

SEQ ID NO: 40701 - protein, 36 aa, Homo sapiens
  MAP TO AC013751.3; EXPRESSED IN LUNG, SIGNAL =   4; EXPRESSED IN PLACENTA, SIGNAL = 4.3; EXPRESSED IN HELA, SIGNAL = 2.6; EXPRESSED IN HEART, SIGNAL = 3.4; EXPRESSED IN FETAL LIVER, SIGNAL = 3.8; EXPRESSED IN BRAIN, SIGNAL = 3.7; EXPRESSED IN ADULT LIVER, SIGNAL = 3.4; EXPRESSED IN BONE MARROW, SIGNAL = 3.8; EST_HUMAN HIT: BE253863.1, EVALUE 9.00e-03
WLSMGKEMDWTVRRRRFRSCQASRRNWRVGRPWWHF

SEQ ID NO: 40702 - protein, 54 aa, Homo sapiens
  MAP TO AC015502.3; EXPRESSED IN ADULT LIVER, SIGNAL =  10; EXPRESSED IN HEART, SIGNAL = 5.4; EXPRESSED IN BONE MARROW, SIGNAL =  10; EXPRESSED IN LUNG, SIGNAL = 5.9; EXPRESSED IN PLACENTA, SIGNAL = 8.3; EXPRESSED IN HELA, SIGNAL =  11; EXPRESSED IN FETAL LIVER, SIGNAL = 7.4; EXPRESSED IN BRAIN, SIGNAL = 7.4; SWISSPROT HIT: Q95917, EVALUE 2.10e+00; EST_HUMAN HIT: BE062167.1, EVALUE 4.00e-15
IWTMKPKLRWSQMETRNLLVNGAKRTLVLLQQRDWRHFGPILELCVTLNLREII

SEQ ID NO: 40703 - protein, 25 aa, Homo sapiens
  MAP TO AL161644.1; EXPRESSED IN ADULT LIVER, SIGNAL = 1.4; EXPRESSED IN HEART, SIGNAL = 1.8; EXPRESSED IN FETAL LIVER, SIGNAL = 1.2; EXPRESSED IN BONE MARROW, SIGNAL = 1.2; EXPRESSED IN LUNG, SIGNAL = 1.2; EXPRESSED IN PLACENTA, SIGNAL = 1.5; EXPRESSED IN BRAIN, SIGNAL = 1.1; SWISSPROT HIT: P24563, EVALUE 6.60e+00
LAAPQGQDKSDVPPDPSMGLAGHIG

SEQ ID NO: 40704 - protein, 23 aa, Homo sapiens
  MAP TO AL161644.1; EXPRESSED IN ADULT LIVER, SIGNAL = 1.4; EXPRESSED IN HEART, SIGNAL = 1.8; EXPRESSED IN FETAL LIVER, SIGNAL = 1.2; EXPRESSED IN BONE MARROW, SIGNAL = 1.2; EXPRESSED IN LUNG, SIGNAL = 1.2; EXPRESSED IN PLACENTA, SIGNAL = 1.5; EXPRESSED IN BRAIN, SIGNAL = 1.1
WQLLRVRTSLMCLQTPAWGWLAT

SEQ ID NO: 40705 - protein, 34 aa, Homo sapiens
  MAP TO AC026442.1; EXPRESSED IN PLACENTA, SIGNAL = 4.5; EXPRESSED IN ADULT LIVER, SIGNAL = 4.5; EXPRESSED IN HEART, SIGNAL = 3.1; EXPRESSED IN FETAL LIVER, SIGNAL = 2.7; EXPRESSED IN BONE MARROW, SIGNAL = 3.6; EXPRESSED IN LUNG, SIGNAL = 3.8; EXPRESSED IN HELA, SIGNAL = 2.6; EXPRESSED IN BRAIN, SIGNAL = 3.6; EST_HUMAN HIT: BE733157.1, EVALUE 6.60e-01
MLKLTRLMAKNFWSCGPTCTWGLLSQSWSWSSRD

SEQ ID NO: 40706 - protein, 25 aa, Homo sapiens
  MAP TO AC011111.3; EXPRESSED IN PLACENTA, SIGNAL = 2.5; EXPRESSED IN HELA, SIGNAL = 3.9; EXPRESSED IN HEART, SIGNAL = 2.3; EXPRESSED IN FETAL LIVER, SIGNAL = 2.2; EXPRESSED IN BONE MARROW, SIGNAL = 2.5; EXPRESSED IN LUNG, SIGNAL = 2.1; EXPRESSED IN ADULT LIVER, SIGNAL = 2.4; EXPRESSED IN BRAIN, SIGNAL = 2.9
MEKSLFPCPIDFGLAILLIVFSQWN

SEQ ID NO: 40707 - protein, 24 aa, Homo sapiens
  MAP TO AC011111.3; EXPRESSED IN PLACENTA, SIGNAL = 2.5; EXPRESSED IN HELA, SIGNAL = 3.9; EXPRESSED IN HEART, SIGNAL = 2.3; EXPRESSED IN FETAL LIVER, SIGNAL = 2.2; EXPRESSED IN BONE MARROW, SIGNAL = 2.5; EXPRESSED IN LUNG, SIGNAL = 2.1; EXPRESSED IN ADULT LIVER, SIGNAL = 2.4; EXPRESSED IN BRAIN, SIGNAL = 2.9
WKRVCFPAPLTLAWPSYLLCSASG

SEQ ID NO: 40708 - protein, 54 aa, Homo sapiens
  MAP TO AL133334.14; EXPRESSED IN PLACENTA, SIGNAL = 4.1; EXPRESSED IN ADULT LIVER, SIGNAL = 4.8; EXPRESSED IN FETAL LIVER, SIGNAL = 4.4; EXPRESSED IN HELA, SIGNAL = 4.8; EXPRESSED IN BRAIN, SIGNAL =   4; EXPRESSED IN BONE MARROW, SIGNAL =  15; EXPRESSED IN LUNG, SIGNAL = 4.9; EXPRESSED IN HEART, SIGNAL = 4.2; EST_HUMAN HIT: BE730369.1, EVALUE 7.40e-01; SWISSPROT HIT: Q61066, EVALUE 6.10e+00
CPKEDPSQQLAPLPGVCCQCGQNHAFGLLWSTKAHRPHPVYLAQGRHYGALGLR

SEQ ID NO: 40709 - protein, 54 aa, Homo sapiens
  MAP TO AL133334.14; EXPRESSED IN PLACENTA, SIGNAL = 4.1; EXPRESSED IN ADULT LIVER, SIGNAL = 4.8; EXPRESSED IN FETAL LIVER, SIGNAL = 4.4; EXPRESSED IN HELA, SIGNAL = 4.8; EXPRESSED IN BRAIN, SIGNAL =   4; EXPRESSED IN BONE MARROW, SIGNAL =  15; EXPRESSED IN LUNG, SIGNAL = 4.9; EXPRESSED IN HEART, SIGNAL = 4.2; EST_HUMAN HIT: R78602.1, EVALUE 9.70e-01
VPRRTPASSWLHCLEFAANVARIMHLACCGPPKPTGPILCTWPKAGTMVHLVSE

SEQ ID NO: 40710 - protein, 18 aa, Homo sapiens
  MAP TO AL121901.10; EXPRESSED IN ADULT LIVER, SIGNAL = 4.9; EXPRESSED IN BRAIN, SIGNAL = 4.9; EXPRESSED IN PLACENTA, SIGNAL = 7.8; EXPRESSED IN HEART, SIGNAL = 3.9; EXPRESSED IN FETAL LIVER, SIGNAL = 7.8; EXPRESSED IN BONE MARROW, SIGNAL = 3.9; EXPRESSED IN LUNG, SIGNAL = 5.5; EXPRESSED IN HELA, SIGNAL = 2.8; EST_HUMAN HIT: AI873442.1, EVALUE 1.00e-02
FLGEKATVSSSSTWASHL

SEQ ID NO: 40711 - protein, 39 aa, Homo sapiens
  MAP TO AC015805.3; EXPRESSED IN LUNG, SIGNAL = 4.4; EXPRESSED IN PLACENTA, SIGNAL = 3.8; EXPRESSED IN HELA, SIGNAL = 5.8; EXPRESSED IN HEART, SIGNAL = 3.9; EXPRESSED IN BRAIN, SIGNAL =   4; EXPRESSED IN ADULT LIVER, SIGNAL = 4.4; EXPRESSED IN FETAL LIVER, SIGNAL = 3.5; EXPRESSED IN BONE MARROW, SIGNAL = 3.7; EST_HUMAN HIT: AI694385.1, EVALUE 4.30e-02; SWISSPROT HIT: P05095, EVALUE 3.80e-02
IYTDWANHYLAKSGHKRLIRDLQQDVTDGVLLAQIIQVV

SEQ ID NO: 40712 - protein, 94 aa, Homo sapiens
  MAP TO AC013552.3; EXPRESSED IN ADULT LIVER, SIGNAL = 3.3; EXPRESSED IN LUNG, SIGNAL = 2.3; EXPRESSED IN HEART, SIGNAL = 2.2; EXPRESSED IN BRAIN, SIGNAL = 2.2; EXPRESSED IN BONE MARROW, SIGNAL = 4.7; EXPRESSED IN PLACENTA, SIGNAL = 2.3; EXPRESSED IN HELA, SIGNAL = 9.5; EXPRESSED IN FETAL LIVER, SIGNAL = 4.1; EST_HUMAN HIT: BE543083.1, EVALUE 2.00e-38; SWISSPROT HIT: Q13635, EVALUE 8.80e-01
VTGEFEWTLLIKHRIQTGTIVLLAVIEIGILTKQIQTGGLVLPQTALMTTRLEGVMIGLETSIEIVMIQTSMAVGIGMSIGMAHAGIWIDMAGG

SEQ ID NO: 40713 - protein, 37 aa, Homo sapiens
  MAP TO AC016847.3; EXPRESSED IN ADULT LIVER, SIGNAL = 6.3; EXPRESSED IN FETAL LIVER, SIGNAL = 5.2; EXPRESSED IN PLACENTA, SIGNAL = 6.1; EXPRESSED IN HELA, SIGNAL =   8; EXPRESSED IN BRAIN, SIGNAL = 4.7; EXPRESSED IN BONE MARROW, SIGNAL =   5; EXPRESSED IN LUNG, SIGNAL = 6.5; EXPRESSED IN HEART, SIGNAL = 5.7; EST_HUMAN HIT: AI247671.1, EVALUE 1.00e-16; SWISSPROT HIT: P49003, EVALUE 1.00e-17
DWIIAPEGYAAFYCDGECSFPLNAHMNATNHAIVQTL

SEQ ID NO: 40714 - protein, 61 aa, Homo sapiens
  MAP TO U82670.2; EXPRESSED IN PLACENTA, SIGNAL = 5.7; EXPRESSED IN FETAL LIVER, SIGNAL = 8.5; EXPRESSED IN BONE MARROW, SIGNAL = 1.8; EXPRESSED IN LUNG, SIGNAL = 1.7; EXPRESSED IN ADULT LIVER, SIGNAL =   2; EXPRESSED IN HEART, SIGNAL = 2.2; EXPRESSED IN BRAIN, SIGNAL = 2.1; SWISSPROT HIT: P94598, EVALUE 1.50e+00
GSQSGAHEHARKKLSDKGTPIDGEVCICRGVARYTSPKHIKNGQKKNDFNKMITAEENKVH

SEQ ID NO: 40715 - protein, 78 aa, Homo sapiens
  MAP TO AC008597.3; EXPRESSED IN PLACENTA, SIGNAL = 2.1; EXPRESSED IN FETAL LIVER, SIGNAL = 4.1; EXPRESSED IN BONE MARROW, SIGNAL = 2.9; EXPRESSED IN LUNG, SIGNAL = 2.8; EXPRESSED IN ADULT LIVER, SIGNAL = 2.8; EXPRESSED IN HEART, SIGNAL = 2.4; EXPRESSED IN BRAIN, SIGNAL = 2.4; EST_HUMAN HIT: AW956242.1, EVALUE 4.00e-39; SWISSPROT HIT: P51659, EVALUE 4.00e-40
GAIGQKLPPFSYAYTELEAIMYALGVGASIKDPKDLKFIYEGSSDFSCLPTFGVIIGQKSMMGGGLAEIPGLSINFAK

SEQ ID NO: 40716 - protein, 32 aa, Homo sapiens
  MAP TO AC011022.4; EXPRESSED IN LUNG, SIGNAL = 1.2; EXPRESSED IN HEART, SIGNAL = 1.2; EXPRESSED IN FETAL LIVER, SIGNAL = 1.6; EXPRESSED IN BONE MARROW, SIGNAL = 1.8; EXPRESSED IN ADULT LIVER, SIGNAL = 0.82; EXPRESSED IN BRAIN, SIGNAL = 1.9; EXPRESSED IN PLACENTA, SIGNAL =   1; EXPRESSED IN HELA, SIGNAL = 2.5; SWISSPROT HIT: P38757, EVALUE 1.00e-03; EST_HUMAN HIT: W31318.1, EVALUE 4.00e-10
RPHVDFFLEVVSQWYELVVFTESMEIYGFAVA

SEQ ID NO: 40717 - protein, 56 aa, Homo sapiens
  MAP TO AL133174.9; EXPRESSED IN BONE MARROW, SIGNAL =   4; EXPRESSED IN HEART, SIGNAL = 3.8; EXPRESSED IN LUNG, SIGNAL =   4; EXPRESSED IN PLACENTA, SIGNAL =   3; EXPRESSED IN ADULT LIVER, SIGNAL =   4; EXPRESSED IN HELA, SIGNAL = 3.5; EXPRESSED IN FETAL LIVER, SIGNAL = 4.2; EXPRESSED IN BRAIN, SIGNAL = 3.7; EST_HUMAN HIT: BE890046.1, EVALUE 5.00e-17
QDTLDADIHIETEDQGMYKYMSSQHLFKLLDCLQESHSFSKAFNSNYEQRTVLWRA

SEQ ID NO: 40718 - protein, 40 aa, Homo sapiens
  MAP TO AC021186.2; EXPRESSED IN LUNG, SIGNAL = 3.4; EXPRESSED IN HELA, SIGNAL = 4.8; EXPRESSED IN HEART, SIGNAL = 3.4; EXPRESSED IN FETAL LIVER, SIGNAL = 3.8; EXPRESSED IN BONE MARROW, SIGNAL =   4; EXPRESSED IN PLACENTA, SIGNAL = 3.3; EXPRESSED IN ADULT LIVER, SIGNAL =   4; EXPRESSED IN BRAIN, SIGNAL = 3.7; SWISSPROT HIT: P43253, EVALUE 2.20e+00; EST_HUMAN HIT: AU136779.1, EVALUE 2.00e-07
RGTQWCPEAWRCQKPQSPKEGGTALAQGAPALLYFLLPTV

SEQ ID NO: 40719 - protein, 49 aa, Homo sapiens
  MAP TO AC011957.2; EXPRESSED IN LUNG, SIGNAL = 3.5; EXPRESSED IN PLACENTA, SIGNAL = 3.4; EXPRESSED IN HEART, SIGNAL = 3.1; EXPRESSED IN FETAL LIVER, SIGNAL = 2.4; EXPRESSED IN ADULT LIVER, SIGNAL = 3.2; EXPRESSED IN BRAIN, SIGNAL = 3.2; EXPRESSED IN BONE MARROW, SIGNAL = 3.1; EST_HUMAN HIT: T07621.1, EVALUE 4.00e-10
SEPPKDKTIILEQLRKISLPLYSILSALTILGMIMASAFLFFNIKNRNQ

SEQ ID NO: 40720 - protein, 33 aa, Homo sapiens
  MAP TO AC011957.2; EXPRESSED IN LUNG, SIGNAL = 3.5; EXPRESSED IN PLACENTA, SIGNAL = 3.4; EXPRESSED IN HEART, SIGNAL = 3.1; EXPRESSED IN FETAL LIVER, SIGNAL = 2.4; EXPRESSED IN ADULT LIVER, SIGNAL = 3.2; EXPRESSED IN BRAIN, SIGNAL = 3.2; EXPRESSED IN BONE MARROW, SIGNAL = 3.1; EST_HUMAN HIT: AI214087.1, EVALUE 1.20e-02
DPNHQKTRPSSWSSCGRSPYLSTASSLPSPSSG

SEQ ID NO: 40721 - protein, 19 aa, Homo sapiens
  MAP TO AL157405.2; EXPRESSED IN ADULT LIVER, SIGNAL = 2.3; EXPRESSED IN FETAL LIVER, SIGNAL = 3.8; EXPRESSED IN BRAIN, SIGNAL = 1.9; EXPRESSED IN BONE MARROW, SIGNAL = 1.9; EXPRESSED IN LUNG, SIGNAL = 2.1; EXPRESSED IN PLACENTA, SIGNAL = 2.3; EXPRESSED IN HELA, SIGNAL = 2.5; EXPRESSED IN HEART, SIGNAL = 2.2; EST_HUMAN HIT: BF354030.1, EVALUE 3.70e-02
DLLPSVLPSFWLFSHSTIF

SEQ ID NO: 40722 - protein, 41 aa, Homo sapiens
  MAP TO AC013584.3; EXPRESSED IN FETAL LIVER, SIGNAL = 8.2; EXPRESSED IN HELA, SIGNAL =  13; EXPRESSED IN HEART, SIGNAL = 9.4; EXPRESSED IN BRAIN, SIGNAL = 7.4; EXPRESSED IN BONE MARROW, SIGNAL = 9.5; EXPRESSED IN ADULT LIVER, SIGNAL = 8.1; EXPRESSED IN PLACENTA, SIGNAL =   9; EXPRESSED IN LUNG, SIGNAL = 9.7
KSDAEEENEIAMAANAMANAMAANAQWQQIPWAVSSKQSDS

SEQ ID NO: 40723 - protein, 20 aa, Homo sapiens
  MAP TO AC021973.2; EXPRESSED IN LUNG, SIGNAL = 1.2; EXPRESSED IN PLACENTA, SIGNAL = 1.4; EXPRESSED IN ADULT LIVER, SIGNAL = 0.88; EXPRESSED IN HEART, SIGNAL = 1.2; EXPRESSED IN FETAL LIVER, SIGNAL = 1.6; EXPRESSED IN BRAIN, SIGNAL = 0.9; EXPRESSED IN BONE MARROW, SIGNAL = 0.93
VWKETCGRKLSLHMTTRVKA

SEQ ID NO: 40724 - protein, 51 aa, Homo sapiens
  MAP TO AC016487.4; EXPRESSED IN PLACENTA, SIGNAL = 2.8; EXPRESSED IN HELA, SIGNAL =   5; EXPRESSED IN HEART, SIGNAL = 2.6; EXPRESSED IN BONE MARROW, SIGNAL = 3.9; EXPRESSED IN LUNG, SIGNAL = 2.3; EXPRESSED IN ADULT LIVER, SIGNAL = 2.3; EXPRESSED IN FETAL LIVER, SIGNAL = 3.4; EXPRESSED IN BRAIN, SIGNAL = 3.6; EST_HUMAN HIT: AI150223.1, EVALUE 1.00e-04
WIKLTYLYGVTFWFLVFRLSSPGFLVALSFSALNWWVLGLTDFKNEAVDPR

SEQ ID NO: 40725 - protein, 93 aa, Homo sapiens
  MAP TO AL135929.2; EXPRESSED IN LUNG, SIGNAL = 1.4; EXPRESSED IN ADULT LIVER, SIGNAL = 1.7; EXPRESSED IN FETAL LIVER, SIGNAL = 1.5; EXPRESSED IN BRAIN, SIGNAL = 2.5; EXPRESSED IN BONE MARROW, SIGNAL = 1.2; EXPRESSED IN PLACENTA, SIGNAL = 1.3; EXPRESSED IN HEART, SIGNAL = 1.4; EST_HUMAN HIT: AW501528.1, EVALUE 1.00e-24; SWISSPROT HIT: Q95242, EVALUE 2.00e-05
IPVSGVLLETQPSGGQAVEGEMLVLVCSVAEGTGDTTFSWHREDMQESLGRKTQRSLRAELELPAIRQSHAGGYYCTADNSYGPVQSMVLNVT

SEQ ID NO: 40726 - protein, 57 aa, Homo sapiens
  MAP TO AL135929.2; EXPRESSED IN LUNG, SIGNAL = 1.4; EXPRESSED IN ADULT LIVER, SIGNAL = 1.7; EXPRESSED IN FETAL LIVER, SIGNAL = 1.5; EXPRESSED IN BRAIN, SIGNAL = 2.5; EXPRESSED IN BONE MARROW, SIGNAL = 1.2; EXPRESSED IN PLACENTA, SIGNAL = 1.3; EXPRESSED IN HEART, SIGNAL = 1.4; EST_HUMAN HIT: AW501528.1, EVALUE 1.00e-02; SWISSPROT HIT: Q07092, EVALUE 2.70e+00
GSLCLGCSWRPSPQGARLLKGRCWSLSAPWLKAQGIPHSPGTERTCRRVWGGKLSVP

SEQ ID NO: 40727 - protein, 29 aa, Homo sapiens
  MAP TO AC013612.3; EXPRESSED IN PLACENTA, SIGNAL =  29; EXPRESSED IN ADULT LIVER, SIGNAL =  31; EXPRESSED IN HEART, SIGNAL =  25; EXPRESSED IN FETAL LIVER, SIGNAL =  27; EXPRESSED IN BRAIN, SIGNAL =  25; EXPRESSED IN BONE MARROW, SIGNAL =  31; EXPRESSED IN LUNG, SIGNAL =  33; EXPRESSED IN HELA, SIGNAL =  39; EST_HUMAN HIT: AW963676.1, EVALUE 1.00e-10
LMKQLRDDGCFKHLDQRIQRRFLQKCPTL

SEQ ID NO: 40728 - protein, 24 aa, Homo sapiens
  MAP TO AC019159.3; EXPRESSED IN PLACENTA, SIGNAL = 3.1; EXPRESSED IN HEART, SIGNAL = 1.7; EXPRESSED IN FETAL LIVER, SIGNAL = 1.2; EXPRESSED IN BONE MARROW, SIGNAL = 1.3; EXPRESSED IN LUNG, SIGNAL =   2; EXPRESSED IN ADULT LIVER, SIGNAL = 1.6; EXPRESSED IN BRAIN, SIGNAL = 1.2; SWISSPROT HIT: P09087, EVALUE 8.70e+00
NHSSHHCLDPLNNLQQHHDLYQHP

SEQ ID NO: 40729 - protein, 42 aa, Homo sapiens
  MAP TO AC020991.3; EXPRESSED IN ADULT LIVER, SIGNAL = 0.93; EXPRESSED IN FETAL LIVER, SIGNAL = 2.4; EXPRESSED IN PLACENTA, SIGNAL =   1; EXPRESSED IN BRAIN, SIGNAL = 1.2; EXPRESSED IN BONE MARROW, SIGNAL = 1.9; EXPRESSED IN LUNG, SIGNAL = 1.2; EXPRESSED IN HEART, SIGNAL = 1.8; EST_HUMAN HIT: BF700473.1, EVALUE 7.00e-17; SWISSPROT HIT: Q64252, EVALUE 6.00e-18
YLNAIQTMCPHILRYLTTAVITNKDVRKRRQVLKDLVKVIQQ

SEQ ID NO: 40730 - protein, 65 aa, Homo sapiens
  MAP TO AL161668.1; EXPRESSED IN LUNG, SIGNAL = 1.2; EXPRESSED IN HEART, SIGNAL = 1.3; EXPRESSED IN FETAL LIVER, SIGNAL = 1.2; EXPRESSED IN BONE MARROW, SIGNAL = 1.3; EXPRESSED IN PLACENTA, SIGNAL = 1.2; EXPRESSED IN ADULT LIVER, SIGNAL = 1.2; EXPRESSED IN BRAIN, SIGNAL = 1.1; EST_HUMAN HIT: BE957575.2, EVALUE 1.10e+00
RHGRTELRGSTREMIHSSLLLPKAGGPRPSYTVSGSGRGHSPACAPLQPARAAARAAAVPAATPA

SEQ ID NO: 40731 - protein, 41 aa, Homo sapiens
  MAP TO AL161668.1; EXPRESSED IN LUNG, SIGNAL = 1.2; EXPRESSED IN HEART, SIGNAL = 1.3; EXPRESSED IN FETAL LIVER, SIGNAL = 1.2; EXPRESSED IN BONE MARROW, SIGNAL = 1.3; EXPRESSED IN PLACENTA, SIGNAL = 1.2; EXPRESSED IN ADULT LIVER, SIGNAL = 1.2; EXPRESSED IN BRAIN, SIGNAL = 1.1
WRAKAQLHCIRKWTRPFTSLCASPTCTCSSKSSGSACGDSS

SEQ ID NO: 40732 - protein, 40 aa, Homo sapiens
  MAP TO AC011831.4; EXPRESSED IN PLACENTA, SIGNAL = 6.4; EXPRESSED IN HELA, SIGNAL =  11; EXPRESSED IN HEART, SIGNAL = 6.3; EXPRESSED IN BRAIN, SIGNAL =   5; EXPRESSED IN BONE MARROW, SIGNAL = 5.9; EXPRESSED IN ADULT LIVER, SIGNAL = 7.5; EXPRESSED IN FETAL LIVER, SIGNAL = 5.4; EXPRESSED IN LUNG, SIGNAL = 7.3; SWISSPROT HIT: Q02158, EVALUE 3.70e+00; EST_HUMAN HIT: AI808009.1, EVALUE 2.00e-04
VIKQEELGKDLFDCTLYVLLKYDDFNADKHLALEEFYRAF

SEQ ID NO: 40733 - protein, 90 aa, Homo sapiens
  MAP TO AL121586.28; EXPRESSED IN LUNG, SIGNAL = 2.7; EXPRESSED IN PLACENTA, SIGNAL = 3.6; EXPRESSED IN HEART, SIGNAL = 2.2; EXPRESSED IN FETAL LIVER, SIGNAL = 2.2; EXPRESSED IN BONE MARROW, SIGNAL = 2.9; EXPRESSED IN ADULT LIVER, SIGNAL = 2.8; EXPRESSED IN BRAIN, SIGNAL = 2.3; SWISSPROT HIT: P31696, EVALUE 6.50e+00; EST_HUMAN HIT: N45480.1, EVALUE 6.00e-12
RGPELCSVQLARNGAGPRCNLFRCRRLRGWWPVVKLKEAEDVEREAQEAQAGKKKRKQRRRKGRPEDLEFTDMGGNVYILTVGARGQRPG

SEQ ID NO: 40734 - protein, 34 aa, Homo sapiens
  MAP TO AC024196.2; EXPRESSED IN LUNG, SIGNAL = 1.9; EXPRESSED IN ADULT LIVER, SIGNAL = 1.6; EXPRESSED IN HEART, SIGNAL = 1.7; EXPRESSED IN BRAIN, SIGNAL = 1.8; EXPRESSED IN BONE MARROW, SIGNAL = 1.8; EXPRESSED IN PLACENTA, SIGNAL = 1.6; EXPRESSED IN FETAL LIVER, SIGNAL = 1.5; SWISSPROT HIT: P11679, EVALUE 3.00e-03; EST_HUMAN HIT: BE875270.1, EVALUE 7.60e-02
AALQDTILEAEQKGKVAIGDAQDKLAEVEAGPAA

SEQ ID NO: 40735 - protein, 38 aa, Homo sapiens [sequence omitted]

SEQ ID NO: 40736 - protein, 59 aa, Homo sapiens
  MAP TO AL133352.10; EXPRESSED IN LUNG, SIGNAL =   2; EXPRESSED IN PLACENTA, SIGNAL = 2.2; EXPRESSED IN HEART, SIGNAL =   2; EXPRESSED IN ADULT LIVER, SIGNAL = 2.7; EXPRESSED IN FETAL LIVER, SIGNAL = 2.2; EXPRESSED IN BRAIN, SIGNAL = 2.1; EXPRESSED IN BONE MARROW, SIGNAL = 2.2; EST_HUMAN HIT: AL042769.1, EVALUE 2.00e-17
IDGLLSQALLLGELGPAVELCLKEERFADAIILAQAGGTDLLKQTQERYLAKKKTKISS

SEQ ID NO: 40737 - protein, 30 aa, Homo sapiens
  MAP TO AC013314.4; EXPRESSED IN BONE MARROW, SIGNAL = 1.9; EXPRESSED IN PLACENTA, SIGNAL = 1.9; EXPRESSED IN ADULT LIVER, SIGNAL = 1.9; EXPRESSED IN FETAL LIVER, SIGNAL = 1.6; EXPRESSED IN BRAIN, SIGNAL = 1.7; EXPRESSED IN LUNG, SIGNAL = 1.8; EXPRESSED IN HEART, SIGNAL = 1.6
RCCFTSCFIQMWNRIKPLMRPKTCRSPCSK

SEQ ID NO: 40738 - protein, 44 aa, Homo sapiens
  MAP TO AC013691.3; EXPRESSED IN LUNG, SIGNAL = 2.7; EXPRESSED IN PLACENTA, SIGNAL = 2.3; EXPRESSED IN ADULT LIVER, SIGNAL = 2.7; EXPRESSED IN HELA, SIGNAL = 3.3; EXPRESSED IN HEART, SIGNAL = 2.1; EXPRESSED IN FETAL LIVER, SIGNAL = 2.1; EXPRESSED IN BRAIN, SIGNAL =   2; EXPRESSED IN BONE MARROW, SIGNAL = 2.2; EST_HUMAN HIT: R09474.1, EVALUE 3.10e+00; SWISSPROT HIT: P47488, EVALUE 2.80e+00
RITPTLPLINYITQVLISGSAFGGTLMKTPWRRLRQWCRGEITN

SEQ ID NO: 40739 - protein, 66 aa, Homo sapiens
  MAP TO AL161662.1; EXPRESSED IN BONE MARROW, SIGNAL = 1.9; EXPRESSED IN LUNG, SIGNAL = 1.3; EXPRESSED IN ADULT LIVER, SIGNAL = 1.4; EXPRESSED IN FETAL LIVER, SIGNAL = 1.8; EXPRESSED IN BRAIN, SIGNAL = 1.7; EXPRESSED IN PLACENTA, SIGNAL = 1.3; EXPRESSED IN HEART, SIGNAL = 1.4; EST_HUMAN HIT: BF508546.1, EVALUE 2.00e-13; SWISSPROT HIT: P33459, EVALUE 1.80e-01
VLVPEGGMVPPGDTTTIPLSWKLRLPPGHFGLLLLLSQQAKKKVTVLAGVIDLDNQDEISLLLHNG

SEQ ID NO: 40740 - protein, 37 aa, Homo sapiens
  MAP TO AC015908.4; EXPRESSED IN LUNG, SIGNAL = 5.4; EXPRESSED IN PLACENTA, SIGNAL = 5.1; EXPRESSED IN ADULT LIVER, SIGNAL = 6.3; EXPRESSED IN HEART, SIGNAL = 4.7; EXPRESSED IN FETAL LIVER, SIGNAL = 4.1; EXPRESSED IN BRAIN, SIGNAL = 4.2; EXPRESSED IN BONE MARROW, SIGNAL =   5; EXPRESSED IN HELA, SIGNAL = 5.8; SWISSPROT HIT: P22182, EVALUE 6.40e+00; EST_HUMAN HIT: AU117659.1, EVALUE 4.00e-16
GGWGTWESLGARARRKPAMSFCSSPCQPEKATLTTSR

SEQ ID NO: 40741 - protein, 60 aa, Homo sapiens
  MAP TO AL139248.2; EXPRESSED IN LUNG, SIGNAL = 6.6; EXPRESSED IN HELA, SIGNAL = 4.2; EXPRESSED IN HEART, SIGNAL = 3.6; EXPRESSED IN PLACENTA, SIGNAL = 7.6; EXPRESSED IN ADULT LIVER, SIGNAL = 4.4; EXPRESSED IN FETAL LIVER, SIGNAL =   4; EXPRESSED IN BRAIN, SIGNAL = 3.3; EXPRESSED IN BONE MARROW, SIGNAL = 3.8; EST_HUMAN HIT: AL039234.1, EVALUE 3.00e-20
TNEKSNSQVPQQSHFTKTTTGPPHLVPPQPLPRRGTQPVGSLELKSACQVTAGGSSQCYR

SEQ ID NO: 40742 - protein, 42 aa, Homo sapiens
  MAP TO AL139248.2; EXPRESSED IN LUNG, SIGNAL = 6.6; EXPRESSED IN HELA, SIGNAL = 4.2; EXPRESSED IN HEART, SIGNAL = 3.6; EXPRESSED IN PLACENTA, SIGNAL = 7.6; EXPRESSED IN ADULT LIVER, SIGNAL = 4.4; EXPRESSED IN FETAL LIVER, SIGNAL =   4; EXPRESSED IN BRAIN, SIGNAL = 3.3; EXPRESSED IN BONE MARROW, SIGNAL = 3.8; EST_HUMAN HIT: AL039234.1, EVALUE 7.00e-19
ELMRRVTVKYHSRVTSPKLPLALPTWCLPNPFLVVVPNLWVL

SEQ ID NO: 40743 - protein, 49 aa, Homo sapiens
  MAP TO AC018909.3; EXPRESSED IN PLACENTA, SIGNAL = 1.2; EXPRESSED IN HELA, SIGNAL = 2.3; EXPRESSED IN HEART, SIGNAL = 1.2; EXPRESSED IN BONE MARROW, SIGNAL = 1.2; EXPRESSED IN ADULT LIVER, SIGNAL = 1.7; EXPRESSED IN FETAL LIVER, SIGNAL = 1.2; EXPRESSED IN BRAIN, SIGNAL = 1.4; EXPRESSED IN LUNG, SIGNAL = 1.2; SWISSPROT HIT: Q56981, EVALUE 8.10e+00
VTLKMLLLTVVVSMYKSFFIIVGMFLLLLCYAFAGVVLFGTVKYGENIN

SEQ ID NO: 40744 - protein, 38 aa, Homo sapiens
  MAP TO AL137026.10; EXPRESSED IN PLACENTA, SIGNAL = 3.1; EXPRESSED IN ADULT LIVER, SIGNAL =   4; EXPRESSED IN HELA, SIGNAL = 5.1; EXPRESSED IN FETAL LIVER, SIGNAL = 3.4; EXPRESSED IN LUNG, SIGNAL = 1.7; EXPRESSED IN HEART, SIGNAL = 3.9; EXPRESSED IN BRAIN, SIGNAL =   3; EXPRESSED IN BONE MARROW, SIGNAL = 4.9; SWISSPROT HIT: O62657, EVALUE 2.00e-17; EST_HUMAN HIT: AI015208.1, EVALUE 3.00e-16
KPVSLSYRCPCRFFESHVARANVKHLKILNTPNCALQI

SEQ ID NO: 40745 - protein, 38 aa, Homo sapiens
  MAP TO AC013550.4; EXPRESSED IN PLACENTA, SIGNAL = 0.62; EXPRESSED IN ADULT LIVER, SIGNAL = 0.69; EXPRESSED IN HEART, SIGNAL = 6.7; EXPRESSED IN FETAL LIVER, SIGNAL = 0.7; EXPRESSED IN BRAIN, SIGNAL = 0.66; EXPRESSED IN BONE MARROW, SIGNAL = 0.59; EST_HUMAN HIT: C03894.1, EVALUE 2.00e-15; SWISSPROT HIT: P54296, EVALUE 1.00e-16
IHRIKCDKATGIIEMVMDRFSIENEGTYTVQIHDGKAK

SEQ ID NO: 40746 - protein, 79 aa, Homo sapiens
  MAP TO AL138796.2; EXPRESSED IN ADULT LIVER, SIGNAL = 0.53; EXPRESSED IN BRAIN, SIGNAL = 0.86; EXPRESSED IN PLACENTA, SIGNAL = 0.64; EXPRESSED IN FETAL LIVER, SIGNAL = 0.54; EXPRESSED IN BONE MARROW, SIGNAL = 0.55; EXPRESSED IN HEART, SIGNAL = 2.6; EST_HUMAN HIT: H29179.1, EVALUE 2.00e-21; SWISSPROT HIT: P21179, EVALUE 3.30e+00
YSLDACHQIPLSSDLSHLVAEVRALRGQLEQSIQGNNCLRLQLQQQLESGAGKASLSPSSINQNFPASTDPGNKQLLLQ

SEQ ID NO: 40747 - protein, 91 aa, Homo sapiens
  MAP TO AC013657.3; EXPRESSED IN LUNG, SIGNAL =   6; EXPRESSED IN ADULT LIVER, SIGNAL = 6.3; EXPRESSED IN HELA, SIGNAL = 8.1; EXPRESSED IN HEART, SIGNAL = 4.4; EXPRESSED IN BONE MARROW, SIGNAL = 5.1; EXPRESSED IN PLACENTA, SIGNAL = 4.8; EXPRESSED IN FETAL LIVER, SIGNAL = 3.9; EXPRESSED IN BRAIN, SIGNAL = 4.4; SWISSPROT HIT: Q07468, EVALUE 6.90e-01; EST_HUMAN HIT: AW592233.1, EVALUE 9.00e-40
AVAAANTEDCTAPEETNILSFRDEGDVMSHFLVFPLSLRMWCQPWCLPTRRQDLLHTSAVEESRVTPSYQWRIPMGPQQLQSLPPQKKEFD

SEQ ID NO: 40748 - protein, 42 aa, Homo sapiens
  MAP TO AC013657.3; EXPRESSED IN LUNG, SIGNAL =   6; EXPRESSED IN ADULT LIVER, SIGNAL = 6.3; EXPRESSED IN HELA, SIGNAL = 8.1; EXPRESSED IN HEART, SIGNAL = 4.4; EXPRESSED IN BONE MARROW, SIGNAL = 5.1; EXPRESSED IN PLACENTA, SIGNAL = 4.8; EXPRESSED IN FETAL LIVER, SIGNAL = 3.9; EXPRESSED IN BRAIN, SIGNAL = 4.4; EST_HUMAN HIT: AW592233.1, EVALUE 5.00e-11
ASSSGFPSSWSALQGLWLQPTLKTARHLRRPTSCLSETRVMS

SEQ ID NO: 40749 - protein, 68 aa, Homo sapiens
  MAP TO AC008773.3; EXPRESSED IN HEART, SIGNAL =  14; EXPRESSED IN BRAIN, SIGNAL =  13; EXPRESSED IN BONE MARROW, SIGNAL =  15; EXPRESSED IN LUNG, SIGNAL =  14; EXPRESSED IN HELA, SIGNAL =  19; EXPRESSED IN PLACENTA, SIGNAL =  16; EXPRESSED IN ADULT LIVER, SIGNAL =  16; EXPRESSED IN FETAL LIVER, SIGNAL =  13; SWISSPROT HIT: P17301, EVALUE 7.00e-35; EST_HUMAN HIT: AU126174.1, EVALUE 2.00e-31
GILGQHQFLEGPEGIENTRFGSAIAALSDINMDGFNDVIVGSPLENQNSGAVYIYNGHQGTIRTKYSQ

SEQ ID NO: 40750 - protein, 37 aa, Homo sapiens
  MAP TO AC008773.3; EXPRESSED IN HEART, SIGNAL =  14; EXPRESSED IN BRAIN, SIGNAL =  13; EXPRESSED IN BONE MARROW, SIGNAL =  15; EXPRESSED IN LUNG, SIGNAL =  14; EXPRESSED IN HELA, SIGNAL =  19; EXPRESSED IN PLACENTA, SIGNAL =  16; EXPRESSED IN ADULT LIVER, SIGNAL =  16; EXPRESSED IN FETAL LIVER, SIGNAL =  13; EST_HUMAN HIT: AU126174.1, EVALUE 1.00e-13
AFWVSTNFLKAPRALKTLDLVQQLQLFQTSTWMALMM

SEQ ID NO: 40751 - protein, 26 aa, Homo sapiens
  MAP TO AL121911.10; EXPRESSED IN ADULT LIVER, SIGNAL = 0.98; EXPRESSED IN BRAIN, SIGNAL = 0.95; EXPRESSED IN BONE MARROW, SIGNAL = 0.8; EXPRESSED IN HEART, SIGNAL = 1.7; EXPRESSED IN FETAL LIVER, SIGNAL = 0.91; EXPRESSED IN PLACENTA, SIGNAL = 0.79
PCLSPILMPDIQPGPSPMMPPPCRVT

SEQ ID NO: 40752 - protein, 44 aa, Homo sapiens
  MAP TO AC008572.6; EXPRESSED IN PLACENTA, SIGNAL =  10; EXPRESSED IN FETAL LIVER, SIGNAL = 9.5; EXPRESSED IN ADULT LIVER, SIGNAL =  11; EXPRESSED IN BONE MARROW, SIGNAL = 9.8; EXPRESSED IN LUNG, SIGNAL =  12; EXPRESSED IN HELA, SIGNAL =  12; EXPRESSED IN HEART, SIGNAL = 8.6; EXPRESSED IN BRAIN, SIGNAL =   9
LLLCLNLYSPNTPERGAQGPKSEVCLHHNYQAIAIVSRTKVNII

SEQ ID NO: 40753 - protein, 46 aa, Homo sapiens
  MAP TO AC015805.3; EXPRESSED IN PLACENTA, SIGNAL = 1.6; EXPRESSED IN ADULT LIVER, SIGNAL = 1.8; EXPRESSED IN HEART, SIGNAL = 1.7; EXPRESSED IN FETAL LIVER, SIGNAL = 1.8; EXPRESSED IN BONE MARROW, SIGNAL = 1.5; EXPRESSED IN LUNG, SIGNAL = 1.8; EXPRESSED IN BRAIN, SIGNAL = 1.6
RIKPHESTSLDTVESSKIIRVPEYVLNKYLNELNNYKSNESYEGKT

SEQ ID NO: 40754 - protein, 29 aa, Homo sapiens
  MAP TO AC013641.4; EXPRESSED IN HEART, SIGNAL = 3.9; EST_HUMAN HIT: AW368451.1, EVALUE 1.00e-07; SWISSPROT HIT: Q92581, EVALUE 2.00e-08
IVAVLFCGVTQAHYTYNNLSSDSKIRTKQ

SEQ ID NO: 40755 - protein, 33 aa, Homo sapiens
  MAP TO AC024193.2; EXPRESSED IN LUNG, SIGNAL = 4.8; EXPRESSED IN ADULT LIVER, SIGNAL = 4.6; EXPRESSED IN HELA, SIGNAL = 2.3; EXPRESSED IN BRAIN, SIGNAL = 3.5; EXPRESSED IN BONE MARROW, SIGNAL = 4.1; EXPRESSED IN PLACENTA, SIGNAL = 4.6; EXPRESSED IN HEART, SIGNAL = 4.3; EXPRESSED IN FETAL LIVER, SIGNAL = 3.5; EST_HUMAN HIT: AL138203.1, EVALUE 4.40e+00
GPTRKRRLAFGTWQALMIPESIAWYLMCESKCA

SEQ ID NO: 40756 - protein, 59 aa, Homo sapiens
  MAP TO AC018390.3; EXPRESSED IN LUNG, SIGNAL = 1.7; EXPRESSED IN ADULT LIVER, SIGNAL = 1.8; EXPRESSED IN HEART, SIGNAL = 1.5; EXPRESSED IN BRAIN, SIGNAL = 1.2; EXPRESSED IN BONE MARROW, SIGNAL = 1.4; EXPRESSED IN PLACENTA, SIGNAL = 1.6; EXPRESSED IN FETAL LIVER, SIGNAL = 1.2; SWISSPROT HIT: P06271, EVALUE 3.50e+00; EST_HUMAN HIT: AA973294.1, EVALUE 1.00e-07
EIQKRQKEECHGKMEVEIVVMLPQSKNTCNHQKLQEAKKHSSLETLEGTWPYQSMMTYF

SEQ ID NO: 40757 - protein, 18 aa, Homo sapiens
  MAP TO AC025539.2; EXPRESSED IN LUNG, SIGNAL = 3.8; EXPRESSED IN PLACENTA, SIGNAL = 3.8; EXPRESSED IN HEART, SIGNAL = 3.4; EXPRESSED IN FETAL LIVER, SIGNAL = 3.1; EXPRESSED IN BRAIN, SIGNAL =   3; EXPRESSED IN BONE MARROW, SIGNAL = 3.7; EXPRESSED IN ADULT LIVER, SIGNAL = 3.9; EXPRESSED IN HELA, SIGNAL = 5.4
CIHLRMLEVKSILSLSLR

SEQ ID NO: 40758 - protein, 42 aa, Homo sapiens
  MAP TO AP001427.1; EXPRESSED IN LUNG, SIGNAL = 8.2; EXPRESSED IN BONE MARROW, SIGNAL = 7.2; EXPRESSED IN BRAIN, SIGNAL = 6.4; EXPRESSED IN FETAL LIVER, SIGNAL = 7.4; EXPRESSED IN HELA, SIGNAL = 7.9; EXPRESSED IN ADULT LIVER, SIGNAL = 7.8; EXPRESSED IN PLACENTA, SIGNAL = 7.4; EXPRESSED IN HEART, SIGNAL = 6.9; EST_HUMAN HIT: AW947797.1, EVALUE 6.20e-01
PVHRRMARTRPWGTRMATTKNGFSASRRGKARPGDSSLVCIL

SEQ ID NO: 40759 - protein, 65 aa, Homo sapiens
  MAP TO AL139352.8; EXPRESSED IN ADULT LIVER, SIGNAL = 1.7; EXPRESSED IN HELA, SIGNAL = 4.3; EXPRESSED IN HEART, SIGNAL = 1.5; EXPRESSED IN BONE MARROW, SIGNAL = 2.5; EXPRESSED IN LUNG, SIGNAL = 1.6; EXPRESSED IN PLACENTA, SIGNAL = 1.5; EXPRESSED IN FETAL LIVER, SIGNAL = 3.2; EXPRESSED IN BRAIN, SIGNAL = 2.8; EST_HUMAN HIT: H59570.1, EVALUE 9.00e-07
LLLLSSLPTRLNQPPTLLQPLLPHPITLLLPALPTPSLVFSFVLRLALPHLPNNFLLERWLELKA

SEQ ID NO: 40760 - protein, 54 aa, Homo sapiens
  MAP TO AC011440.5; EXPRESSED IN PLACENTA, SIGNAL = 2.9; EXPRESSED IN ADULT LIVER, SIGNAL = 2.9; EXPRESSED IN FETAL LIVER, SIGNAL = 2.6; EXPRESSED IN BRAIN, SIGNAL = 2.9; EXPRESSED IN BONE MARROW, SIGNAL = 2.7; EXPRESSED IN HEART, SIGNAL = 2.7; EXPRESSED IN LUNG, SIGNAL = 2.6; EXPRESSED IN HELA, SIGNAL = 3.4
HTEYTASFASPSTSSISSTSAMPETARLTSLFLLLNLLNMKTMMMKTFMMIHFQ

SEQ ID NO: 40761 - protein, 54 aa, Homo sapiens
  MAP TO AC013497.4; EXPRESSED IN PLACENTA, SIGNAL = 0.95; EXPRESSED IN ADULT LIVER, SIGNAL = 1.4; EXPRESSED IN FETAL LIVER, SIGNAL =   1; EXPRESSED IN BRAIN, SIGNAL = 0.97; EXPRESSED IN HEART, SIGNAL = 1.2; EXPRESSED IN BONE MARROW, SIGNAL = 0.97; SWISSPROT HIT: Q11206, EVALUE 1.00e-08; EST_HUMAN HIT: W52470.1, EVALUE 3.00e-26
HEEEVGRRTTFRLFYPESVFSDPIHNDPNTTVILTAFKPHDLRWLLELLMGDKI

SEQ ID NO: 40762 - protein, 32 aa, Homo sapiens
  MAP TO AC013497.4; EXPRESSED IN PLACENTA, SIGNAL = 0.95; EXPRESSED IN ADULT LIVER, SIGNAL = 1.4; EXPRESSED IN FETAL LIVER, SIGNAL =   1; EXPRESSED IN BRAIN, SIGNAL = 0.97; EXPRESSED IN HEART, SIGNAL = 1.2; EXPRESSED IN BONE MARROW, SIGNAL = 0.97; EST_HUMAN HIT: N40607.1, EVALUE 1.20e-02
DMKKKLGEGQPSDFFIQNLFFQILFTMTLIRQ

SEQ ID NO: 40763 - protein, 49 aa, Homo sapiens
  MAP TO AL133377.4; EXPRESSED IN ADULT LIVER, SIGNAL = 3.9; EXPRESSED IN HELA, SIGNAL =   4; EXPRESSED IN BRAIN, SIGNAL = 3.3; EXPRESSED IN LUNG, SIGNAL = 4.1; EXPRESSED IN PLACENTA, SIGNAL = 3.5; EXPRESSED IN FETAL LIVER, SIGNAL = 3.7; EXPRESSED IN BONE MARROW, SIGNAL = 3.8; EXPRESSED IN HEART, SIGNAL = 3.8; SWISSPROT HIT: Q86917, EVALUE 8.10e+00
DRSNMDLEEHVNIFKGVAINLYLNASENNYILQIIFLCHCQIQNLVLKE

SEQ ID NO: 40764 - protein, 54 aa, Homo sapiens
  MAP TO AC011294.3; EXPRESSED IN PLACENTA, SIGNAL = 4.9; EXPRESSED IN ADULT LIVER, SIGNAL = 5.3; EXPRESSED IN HELA, SIGNAL = 7.6; EXPRESSED IN HEART, SIGNAL = 4.5; EXPRESSED IN FETAL LIVER, SIGNAL = 4.6; EXPRESSED IN BONE MARROW, SIGNAL = 4.7; EXPRESSED IN LUNG, SIGNAL = 5.2; EXPRESSED IN BRAIN, SIGNAL = 4.2; SWISSPROT HIT: P17388, EVALUE 6.10e+00
ATCAIDPLAGMWSKRRNVCLLLDLLELLQDKRNSDTTFSSINFREVLQKHSRIS

SEQ ID NO: 40765 - protein, 48 aa, Homo sapiens
  MAP TO AL138914.5; EXPRESSED IN LUNG, SIGNAL = 3.1; EXPRESSED IN PLACENTA, SIGNAL =   3; EXPRESSED IN HEART, SIGNAL = 3.3; EXPRESSED IN FETAL LIVER, SIGNAL = 3.6; EXPRESSED IN BONE MARROW, SIGNAL = 3.2; EXPRESSED IN ADULT LIVER, SIGNAL = 3.1; EXPRESSED IN HELA, SIGNAL =   5; EXPRESSED IN BRAIN, SIGNAL = 3.1
SEGSIGYVGVSGVTKVRHSRVESLRDHLAEPLLTSEVGSRKMQMTAEQ

SEQ ID NO: 40766 - protein, 26 aa, Homo sapiens
  MAP TO AC022020.3; EXPRESSED IN LUNG, SIGNAL = 1.5; EXPRESSED IN PLACENTA, SIGNAL = 1.2; EXPRESSED IN FETAL LIVER, SIGNAL = 1.1; EXPRESSED IN ADULT LIVER, SIGNAL = 1.3; EXPRESSED IN HEART, SIGNAL = 3.2; EXPRESSED IN BONE MARROW, SIGNAL = 1.1; EXPRESSED IN BRAIN, SIGNAL = 1.2
FLCPMTIPGVPDRTSSYALRRKEWTG

SEQ ID NO: 40767 - protein, 70 aa, Homo sapiens
  MAP TO AL133511.5; EXPRESSED IN PLACENTA, SIGNAL = 1.1; EXPRESSED IN FETAL LIVER, SIGNAL = 1.2; EXPRESSED IN ADULT LIVER, SIGNAL = 1.3; EXPRESSED IN HEART, SIGNAL = 1.4; EXPRESSED IN BONE MARROW, SIGNAL = 1.4; EXPRESSED IN LUNG, SIGNAL = 1.5; EXPRESSED IN BRAIN, SIGNAL = 1.7; EST_HUMAN HIT: BE565507.1, EVALUE 3.00e-25; SWISSPROT HIT: Q99683, EVALUE 2.00e-26
SDTADQEDLDVEDDHEEQPSNQTVRRPQAVIEDAVATSGVSTLSSTVSHDSQSAHRSLNVQLGRMKIETN

SEQ ID NO: 40768 - protein, 38 aa, Homo sapiens
  MAP TO AC013726.3; EXPRESSED IN ADULT LIVER, SIGNAL = 3.2; EXPRESSED IN BRAIN, SIGNAL = 2.6; EXPRESSED IN LUNG, SIGNAL = 2.8; EXPRESSED IN PLACENTA, SIGNAL = 2.9; EXPRESSED IN HELA, SIGNAL = 3.6; EXPRESSED IN BONE MARROW, SIGNAL = 2.7; EXPRESSED IN HEART, SIGNAL = 2.3; EXPRESSED IN FETAL LIVER, SIGNAL =   4; EST_HUMAN HIT: W23260.1, EVALUE 5.00e-07; SWISSPROT HIT: P10523, EVALUE 1.00e-08
TLTKTLTLLPLLANNRERRGIALDGKIKHEDTNLASST

SEQ ID NO: 40769 - protein, 121 aa, Homo sapiens
  MAP TO AC013611.3; EXPRESSED IN LUNG, SIGNAL = 3.3; EXPRESSED IN ADULT LIVER, SIGNAL = 3.1; EXPRESSED IN BRAIN, SIGNAL = 2.8; EXPRESSED IN PLACENTA, SIGNAL = 3.2; EXPRESSED IN FETAL LIVER, SIGNAL = 2.6; EXPRESSED IN HEART, SIGNAL = 2.8; EXPRESSED IN BONE MARROW, SIGNAL =   3; SWISSPROT HIT: P29323, EVALUE 1.00e-67; EST_HUMAN HIT: AL040428.1, EVALUE 7.00e-65
VDLGGRVMKINTEVRSFGPVSRSGFYLAFQDYGGCMSLIAVRVFYRKCPRIIQNGAIFQETLSGAESTSLVAARGSCIANAEEVDVPIKLYCNGDGEWLVPIGRCMCKAGFEAVENGTVCR

SEQ ID NO: 40770 - protein, 19 aa, Homo sapiens
  MAP TO AC013611.3; EXPRESSED IN LUNG, SIGNAL = 3.3; EXPRESSED IN ADULT LIVER, SIGNAL = 3.1; EXPRESSED IN BRAIN, SIGNAL = 2.8; EXPRESSED IN PLACENTA, SIGNAL = 3.2; EXPRESSED IN FETAL LIVER, SIGNAL = 2.6; EXPRESSED IN HEART, SIGNAL = 2.8; EXPRESSED IN BONE MARROW, SIGNAL =   3
RLTLTRPPRPSPTGWRIHG

SEQ ID NO: 40771 - protein, 87 aa, Homo sapiens
  MAP TO AL133414.3; EXPRESSED IN PLACENTA, SIGNAL = 1.3; EXPRESSED IN FETAL LIVER, SIGNAL = 1.5; EXPRESSED IN LUNG, SIGNAL = 1.6; EXPRESSED IN ADULT LIVER, SIGNAL = 1.4; EXPRESSED IN HEART, SIGNAL = 1.2; EXPRESSED IN BRAIN, SIGNAL = 1.2; EXPRESSED IN BONE MARROW, SIGNAL = 1.3; EST_HUMAN HIT: AW951147.1, EVALUE 6.00e-36; SWISSPROT HIT: P43626, EVALUE 1.00e-42
PLVKSEETVILQCWSDVMFEHFLLHREGKFNDTLRLTGELHDGVSKANFSIGRMTQDLAGTYRCYGSVPHSPYQLSAPSDPLDIVIT

SEQ ID NO: 40772 - protein, 81 aa, Homo sapiens
  MAP TO AL133324.7; EXPRESSED IN PLACENTA, SIGNAL = 2.1; EXPRESSED IN ADULT LIVER, SIGNAL =   2; EXPRESSED IN HEART, SIGNAL =  19; EXPRESSED IN FETAL LIVER, SIGNAL = 1.7; EXPRESSED IN LUNG, SIGNAL = 2.4; EXPRESSED IN BRAIN, SIGNAL =   2; EXPRESSED IN BONE MARROW, SIGNAL = 1.9; EST_HUMAN HIT: F01167.1, EVALUE 4.00e-24; SWISSPROT HIT: P02563, EVALUE 2.00e-26
EQDNLADAEERCHLLIKSKVQLEGKVKELSERLEDEEEVNADLAARRRKLEDECTELKKDIDDLELTLAKAEKEKQATENK

SEQ ID NO: 40773 - protein, 30 aa, Homo sapiens
  MAP TO AC020704.3; EXPRESSED IN BONE MARROW, SIGNAL = 1.6; EXPRESSED IN PLACENTA, SIGNAL = 1.3; EXPRESSED IN ADULT LIVER, SIGNAL = 1.2; EXPRESSED IN BRAIN, SIGNAL = 0.96; EXPRESSED IN LUNG, SIGNAL = 1.3; EXPRESSED IN HEART, SIGNAL = 1.2; EXPRESSED IN FETAL LIVER, SIGNAL = 1.1
MQNHMNFGHELRRNETLKLKIGSYGQVPMK

SEQ ID NO: 40774 - protein, 46 aa, Homo sapiens
  MAP TO AP001538.1; EXPRESSED IN HELA, SIGNAL = 4.5; EXPRESSED IN BONE MARROW, SIGNAL = 2.8; EXPRESSED IN LUNG, SIGNAL = 2.7; EXPRESSED IN PLACENTA, SIGNAL = 2.7; EXPRESSED IN FETAL LIVER, SIGNAL = 2.7; EXPRESSED IN ADULT LIVER, SIGNAL = 3.7; EXPRESSED IN HEART, SIGNAL = 3.2; EXPRESSED IN BRAIN, SIGNAL = 2.8; EST_HUMAN HIT: AA693576.1, EVALUE 2.00e-03; SWISSPROT HIT: P25010, EVALUE 3.60e+00
SLDESLPHHEGQSALLKAHKFKCLSHLKTFIETPRQIFVYKSGSHG

SEQ ID NO: 40775 - protein, 68 aa, Homo sapiens
  MAP TO AC019214.2; EXPRESSED IN ADULT LIVER, SIGNAL = 2.5; EXPRESSED IN HELA, SIGNAL = 3.1; EXPRESSED IN BRAIN, SIGNAL = 2.1; EXPRESSED IN BONE MARROW, SIGNAL = 2.6; EXPRESSED IN LUNG, SIGNAL = 2.8; EXPRESSED IN PLACENTA, SIGNAL = 2.6; EXPRESSED IN HEART, SIGNAL = 2.2; EXPRESSED IN FETAL LIVER, SIGNAL = 2.5; SWISSPROT HIT: P16144, EVALUE 6.00e-34; EST_HUMAN HIT: BE867635.1, EVALUE 6.00e-33
ETQIDTTLRRSQMSPQGLRVRLRPGEERHFELEVFEPLESPVDLYILMDFSNSMSDDLDNLKKMGQNL

SEQ ID NO: 40776 - protein, 68 aa, Homo sapiens
  MAP TO AC019214.2; EXPRESSED IN ADULT LIVER, SIGNAL = 2.5; EXPRESSED IN HELA, SIGNAL = 3.1; EXPRESSED IN BRAIN, SIGNAL = 2.1; EXPRESSED IN BONE MARROW, SIGNAL = 2.6; EXPRESSED IN LUNG, SIGNAL = 2.8; EXPRESSED IN PLACENTA, SIGNAL = 2.6; EXPRESSED IN HEART, SIGNAL = 2.2; EXPRESSED IN FETAL LIVER, SIGNAL = 2.5; EST_HUMAN HIT: BE867635.1, EVALUE 2.00e-27
RPRLTPPCGAARCPPKACGSVCGPVRSGILSWRCLSHWRAPWTCTSSWTSPTPCPMIWTTSRRWGRTW

SEQ ID NO: 40777 - protein, 29 aa, Homo sapiens
  MAP TO AC011572.4; EXPRESSED IN LUNG, SIGNAL = 4.6; EXPRESSED IN PLACENTA, SIGNAL = 5.3; EXPRESSED IN ADULT LIVER, SIGNAL = 6.1; EXPRESSED IN HEART, SIGNAL = 5.5; EXPRESSED IN FETAL LIVER, SIGNAL = 4.9; EXPRESSED IN BRAIN, SIGNAL = 4.7; EXPRESSED IN HELA, SIGNAL = 8.1; EXPRESSED IN BONE MARROW, SIGNAL = 5.1
GISKMNVNFGEVPEFLKINKLYGNEGPAK

SEQ ID NO: 40778 - protein, 35 aa, Homo sapiens
  MAP TO AC015908.4; EXPRESSED IN LUNG, SIGNAL = 2.4; EXPRESSED IN PLACENTA, SIGNAL = 2.1; EXPRESSED IN ADULT LIVER, SIGNAL = 2.3; EXPRESSED IN BRAIN, SIGNAL = 1.6; EXPRESSED IN FETAL LIVER, SIGNAL = 1.5; EXPRESSED IN HEART, SIGNAL = 1.9; EXPRESSED IN BONE MARROW, SIGNAL = 1.8; EST_HUMAN HIT: AA961946.1, EVALUE 5.00e-14
MGVTSKETHHTLMRPNDCQGISVVPGQAHIVRGVR

SEQ ID NO: 40779 - protein, 56 aa, Homo sapiens
  MAP TO AC015908.4; EXPRESSED IN LUNG, SIGNAL = 2.4; EXPRESSED IN PLACENTA, SIGNAL = 2.1; EXPRESSED IN ADULT LIVER, SIGNAL = 2.3; EXPRESSED IN BRAIN, SIGNAL = 1.6; EXPRESSED IN FETAL LIVER, SIGNAL = 1.5; EXPRESSED IN HEART, SIGNAL = 1.9; EXPRESSED IN BONE MARROW, SIGNAL = 1.8; EST_HUMAN HIT: BF445491.1, EVALUE 1.00e-27
AIFPFTRTPLTMCAWPGTTEMPWQSFGLMSVWCVSLLVTPMMVATLRILLVYTTST

SEQ ID NO: 40780 - protein, 17 aa, Homo sapiens
  MAP TO AC015842.4; EXPRESSED IN LUNG, SIGNAL = 1.5; EXPRESSED IN PLACENTA, SIGNAL = 1.3; EXPRESSED IN ADULT LIVER, SIGNAL = 1.5; EXPRESSED IN HEART, SIGNAL = 1.3; EXPRESSED IN BRAIN, SIGNAL = 0.74; EXPRESSED IN BONE MARROW, SIGNAL =   1; EXPRESSED IN FETAL LIVER, SIGNAL = 0.91
MRTLKLMGLNILPKTQS

SEQ ID NO: 40781 - protein, 52 aa, Homo sapiens
  MAP TO AC018909.3; EXPRESSED IN ADULT LIVER, SIGNAL = 1.3; EXPRESSED IN FETAL LIVER, SIGNAL = 1.3; EXPRESSED IN BRAIN, SIGNAL = 1.3; EXPRESSED IN BONE MARROW, SIGNAL = 1.2; EXPRESSED IN LUNG, SIGNAL = 1.3; EXPRESSED IN PLACENTA, SIGNAL = 1.3; EXPRESSED IN HEART, SIGNAL = 1.5; SWISSPROT HIT: Q99150, EVALUE 8.00e+00
GVIPTFRVKFLLRLLRGRLEVDLDKDKLLFKHMCYEMERLHNGGDVTFHDVL

SEQ ID NO: 40782 - protein, 26 aa, Homo sapiens
  MAP TO AL157836.3; EXPRESSED IN PLACENTA, SIGNAL = 1.8; EXPRESSED IN ADULT LIVER, SIGNAL = 2.1; EXPRESSED IN HEART, SIGNAL = 1.9; EXPRESSED IN FETAL LIVER, SIGNAL = 1.9; EXPRESSED IN BRAIN, SIGNAL = 1.7; EXPRESSED IN LUNG, SIGNAL = 2.1; EXPRESSED IN BONE MARROW, SIGNAL = 1.9
TIVKKKGADVCEILSIGPVVQQALNK

SEQ ID NO: 40783 - protein, 120 aa, Homo sapiens
  MAP TO AL133227.7; EXPRESSED IN BONE MARROW, SIGNAL = 1.6; EXPRESSED IN LUNG, SIGNAL = 1.5; EXPRESSED IN ADULT LIVER, SIGNAL = 1.6; EXPRESSED IN HEART, SIGNAL = 1.7; EXPRESSED IN BRAIN, SIGNAL = 1.6; EXPRESSED IN PLACENTA, SIGNAL = 1.7; EXPRESSED IN FETAL LIVER, SIGNAL = 1.6; EST_HUMAN HIT: AW382931.1, EVALUE 7.00e-40; SWISSPROT HIT: P52742, EVALUE 2.00e-41
SSCKKTFVRLSDLTQHKGTHTGERPYQCTTCEKAFKYQSNFTKHQKTHSIGRPFTCNECGKTFRLNWKLNQHKKIHTGEKPYECGECGKCFNNNSNLSKHKKIHTGEKHFVCNQCGKAFS

SEQ ID NO: 40784 - protein, 53 aa, Homo sapiens
  MAP TO AC020719.3; EXPRESSED IN LUNG, SIGNAL = 3.2; EXPRESSED IN PLACENTA, SIGNAL = 4.4; EXPRESSED IN ADULT LIVER, SIGNAL = 3.8; EXPRESSED IN FETAL LIVER, SIGNAL = 3.7; EXPRESSED IN BRAIN, SIGNAL = 3.8; EXPRESSED IN HEART, SIGNAL = 4.1; EXPRESSED IN HELA, SIGNAL =   5; EXPRESSED IN BONE MARROW, SIGNAL = 3.4; EST_HUMAN HIT: AI650335.1, EVALUE 1.00e-13
GQGDLLKNAKNEAIENMKQIQLACLSCGLSKAPSSSAEAKSKRSLEAIEEKES

SEQ ID NO: 40785 - protein, 57 aa, Homo sapiens
  MAP TO AC023296.2; EXPRESSED IN ADULT LIVER, SIGNAL = 3.7; EXPRESSED IN BRAIN, SIGNAL = 2.7; EXPRESSED IN LUNG, SIGNAL = 3.7; EXPRESSED IN HEART, SIGNAL = 2.8; EXPRESSED IN PLACENTA, SIGNAL = 3.3; EXPRESSED IN FETAL LIVER, SIGNAL = 2.5; EXPRESSED IN BONE MARROW, SIGNAL = 2.5; EST_HUMAN HIT: N42227.1, EVALUE 1.00e-04; SWISSPROT HIT: Q63769, EVALUE 8.00e-06
ISCGSLSFPPNGNKIGTLTVYGATAIFTCNTGYTLVGSHVRECLANGLWSGSETRCL

SEQ ID NO: 40786 - protein, 18 aa, Homo sapiens
  MAP TO AC023296.2; EXPRESSED IN ADULT LIVER, SIGNAL = 3.7; EXPRESSED IN BRAIN, SIGNAL = 2.7; EXPRESSED IN LUNG, SIGNAL = 3.7; EXPRESSED IN HEART, SIGNAL = 2.8; EXPRESSED IN PLACENTA, SIGNAL = 3.3; EXPRESSED IN FETAL LIVER, SIGNAL = 2.5; EXPRESSED IN BONE MARROW, SIGNAL = 2.5
LSRVEAFPFPQMATRLER

SEQ ID NO: 40787 - protein, 47 aa, Homo sapiens
  MAP TO AL121712.19; EXPRESSED IN LUNG, SIGNAL = 1.5; EXPRESSED IN PLACENTA, SIGNAL = 1.3; EXPRESSED IN HEART, SIGNAL = 1.2; EXPRESSED IN FETAL LIVER, SIGNAL = 1.2; EXPRESSED IN ADULT LIVER, SIGNAL = 1.4; EXPRESSED IN BRAIN, SIGNAL = 1.2; EXPRESSED IN BONE MARROW, SIGNAL = 1.2; EST_HUMAN HIT: AA465052.1, EVALUE 2.00e-21; SWISSPROT HIT: Q06885, EVALUE 7.20e-01
VPSLTAPTCGPTSRPTQMSRSTSARRVLGPSPECPCSTSTKSPAAQD

SEQ ID NO: 40788 - protein, 35 aa, Homo sapiens
  MAP TO AC013705.3; EXPRESSED IN PLACENTA, SIGNAL = 2.1; EXPRESSED IN HEART, SIGNAL = 1.8; EXPRESSED IN FETAL LIVER, SIGNAL = 1.2; EXPRESSED IN BONE MARROW, SIGNAL = 1.3; EXPRESSED IN LUNG, SIGNAL = 2.1; EXPRESSED IN ADULT LIVER, SIGNAL = 2.4; EXPRESSED IN BRAIN, SIGNAL = 1.1; SWISSPROT HIT: P36774, EVALUE 3.80e+00
PVGVIGRTWNSGGSEVSTPTPEEMDPEVPDHSILT

SEQ ID NO: 40789 - protein, 110 aa, Homo sapiens
  MAP TO AL136528.9; EXPRESSED IN HELA, SIGNAL =   6; EXPRESSED IN LUNG, SIGNAL = 3.3; EXPRESSED IN ADULT LIVER, SIGNAL = 4.1; EXPRESSED IN BRAIN, SIGNAL =   4; EXPRESSED IN BONE MARROW, SIGNAL = 4.8; EXPRESSED IN PLACENTA, SIGNAL = 2.8; EXPRESSED IN HEART, SIGNAL =   4; EXPRESSED IN FETAL LIVER, SIGNAL = 6.2; EST_HUMAN HIT: BF589410.1, EVALUE 1.70e+00; SWISSPROT HIT: O15350, EVALUE 1.00e-61
DLGALKIPEQYRMTIWRGLQDLKQGHDYSTAQQLLRSSNAATISIGGSGELQRQRVMEAVHFRVRHTITIPNRGGPGGGPDEWADFGFDLPDCKARKQPIKEEFTEAEIH

SEQ ID NO: 40790 - protein, 33 aa, Homo sapiens
  MAP TO AL121747.19; EXPRESSED IN LUNG, SIGNAL = 1.4; EXPRESSED IN PLACENTA, SIGNAL = 1.5; EXPRESSED IN ADULT LIVER, SIGNAL = 1.4; EXPRESSED IN FETAL LIVER, SIGNAL = 1.3; EXPRESSED IN BRAIN, SIGNAL = 1.3; EXPRESSED IN HEART, SIGNAL = 1.2; EXPRESSED IN BONE MARROW, SIGNAL = 1.1; EST_HUMAN HIT: BE409340.1, EVALUE 2.00e-12
MAISEGGLLTDEIRRKVWPKLLNVNANDPPPIS

SEQ ID NO: 40791 - protein, 50 aa, Homo sapiens
  MAP TO AC009416.2; EXPRESSED IN LUNG, SIGNAL = 1.1; EXPRESSED IN PLACENTA, SIGNAL = 1.1; EXPRESSED IN ADULT LIVER, SIGNAL = 1.3; EXPRESSED IN HEART, SIGNAL = 1.2; EXPRESSED IN FETAL LIVER, SIGNAL = 0.92; EXPRESSED IN BRAIN, SIGNAL =   1; EXPRESSED IN BONE MARROW, SIGNAL = 0.98; EST_HUMAN HIT: AW451473.1, EVALUE 2.00e-06; SWISSPROT HIT: Q23356, EVALUE 2.00e-06
MMLGLESLPDPTDTWEIIETIGKGTYGKVYKVTNKRDGSLAAVKILDPVS

SEQ ID NO: 40792 - protein, 43 aa, Homo sapiens
  MAP TO AL139352.8; EXPRESSED IN LUNG, SIGNAL = 0.92; EXPRESSED IN PLACENTA, SIGNAL = 1.3; EXPRESSED IN ADULT LIVER, SIGNAL = 1.1; EXPRESSED IN FETAL LIVER, SIGNAL = 1.1; EXPRESSED IN BRAIN, SIGNAL = 1.2; EXPRESSED IN HEART, SIGNAL = 1.3; EXPRESSED IN BONE MARROW, SIGNAL = 1.1; EST_HUMAN HIT: AW602635.1, EVALUE 2.00e-18; SWISSPROT HIT: P00813, EVALUE 1.00e-19
LKNDQANYSLNTDDPLIFKSTLDTDYQMTKRDMGFTEEEFKRL

SEQ ID NO: 40793 - protein, 22 aa, Homo sapiens
  MAP TO AL139352.8; EXPRESSED IN LUNG, SIGNAL = 0.92; EXPRESSED IN PLACENTA, SIGNAL = 1.3; EXPRESSED IN ADULT LIVER, SIGNAL = 1.1; EXPRESSED IN FETAL LIVER, SIGNAL = 1.1; EXPRESSED IN BRAIN, SIGNAL = 1.2; EXPRESSED IN HEART, SIGNAL = 1.3; EXPRESSED IN BONE MARROW, SIGNAL = 1.1
LTTRSTQMTRSSSSPPWTLITR

SEQ ID NO: 40794 - protein, 60 aa, Homo sapiens
  MAP TO AL136089.8; EXPRESSED IN LUNG, SIGNAL = 0.94; EXPRESSED IN PLACENTA, SIGNAL = 0.59; EXPRESSED IN ADULT LIVER, SIGNAL = 0.72; EXPRESSED IN HEART, SIGNAL = 1.4; EXPRESSED IN FETAL LIVER, SIGNAL = 8.3; EXPRESSED IN BRAIN, SIGNAL = 2.7; EXPRESSED IN HELA, SIGNAL = 3.6; EXPRESSED IN BONE MARROW, SIGNAL = 5.3; SWISSPROT HIT: P36843, EVALUE 4.60e+00; EST_HUMAN HIT: BF204712.1, EVALUE 3.00e-20
MFLALKTCWVNSDTVSLILLASMAGERGRARHKEMEMWEGDHVDCQLVEVGIELARETEA

SEQ ID NO: 40795 - protein, 23 aa, Homo sapiens
  MAP TO AL136089.8; EXPRESSED IN LUNG, SIGNAL = 0.94; EXPRESSED IN PLACENTA, SIGNAL = 0.59; EXPRESSED IN ADULT LIVER, SIGNAL = 0.72; EXPRESSED IN HEART, SIGNAL = 1.4; EXPRESSED IN FETAL LIVER, SIGNAL = 8.3; EXPRESSED IN BRAIN, SIGNAL = 2.7; EXPRESSED IN HELA, SIGNAL = 3.6; EXPRESSED IN BONE MARROW, SIGNAL = 5.3; EST_HUMAN HIT: W51943.1, EVALUE 2.00e-03
PWKPAVSSSQCLNSPSMSSMPRT

SEQ ID NO: 40796 - protein, 29 aa, Homo sapiens
  MAP TO AL161450.2; EXPRESSED IN LUNG, SIGNAL = 1.1; EXPRESSED IN ADULT LIVER, SIGNAL = 1.3; EXPRESSED IN HEART, SIGNAL = 1.3; EXPRESSED IN BRAIN, SIGNAL = 1.2; EXPRESSED IN BONE MARROW, SIGNAL = 1.4; EXPRESSED IN PLACENTA, SIGNAL = 1.6; EXPRESSED IN FETAL LIVER, SIGNAL = 1.2; EST_HUMAN HIT: AI249919.1, EVALUE 9.00e-07
MLCQVSGSCTSLYSHCTKMSLGQKFWIRQ

SEQ ID NO: 40797 - protein, 52 aa, Homo sapiens
  MAP TO AC024259.5; EXPRESSED IN PLACENTA, SIGNAL =   3; EXPRESSED IN HELA, SIGNAL =   5; EXPRESSED IN HEART, SIGNAL = 3.4; EXPRESSED IN FETAL LIVER, SIGNAL = 3.1; EXPRESSED IN BONE MARROW, SIGNAL = 2.8; EXPRESSED IN LUNG, SIGNAL = 2.8; EXPRESSED IN ADULT LIVER, SIGNAL = 3.2; EXPRESSED IN BRAIN, SIGNAL = 2.7
SLQPWNVEFPQCYDAYTFLTSLLILFIFMMFITAAACGATRNKREPHPFQDE

SEQ ID NO: 40798 - protein, 18 aa, Homo sapiens
  MAP TO AC024259.5; EXPRESSED IN PLACENTA, SIGNAL =   3; EXPRESSED IN HELA, SIGNAL =   5; EXPRESSED IN HEART, SIGNAL = 3.4; EXPRESSED IN FETAL LIVER, SIGNAL = 3.1; EXPRESSED IN BONE MARROW, SIGNAL = 2.8; EXPRESSED IN LUNG, SIGNAL = 2.8; EXPRESSED IN ADULT LIVER, SIGNAL = 3.2; EXPRESSED IN BRAIN, SIGNAL = 2.7
HFNHGMWNFLNVMMPTLF

SEQ ID NO: 40799 - protein, 36 aa, Homo sapiens
  MAP TO AL158138.1; EXPRESSED IN HELA, SIGNAL = 3.2; EXPRESSED IN LUNG, SIGNAL = 2.9; EXPRESSED IN BONE MARROW, SIGNAL = 3.1; EXPRESSED IN PLACENTA, SIGNAL =   3; EXPRESSED IN ADULT LIVER, SIGNAL = 3.4; EXPRESSED IN HEART, SIGNAL =   3; EXPRESSED IN FETAL LIVER, SIGNAL = 3.5; EXPRESSED IN BRAIN, SIGNAL = 3.1
RRWMDGWRRKRTVKQKRKRKVMNLSGVCPIKPHLNI

SEQ ID NO: 40800 - protein, 54 aa, Homo sapiens
  MAP TO AL121889.3; EXPRESSED IN BONE MARROW, SIGNAL = 4.2; EXPRESSED IN ADULT LIVER, SIGNAL = 7.5; EXPRESSED IN HELA, SIGNAL =   7; EXPRESSED IN HEART, SIGNAL = 2.7; EXPRESSED IN BRAIN, SIGNAL = 4.3; EXPRESSED IN LUNG, SIGNAL = 5.3; EXPRESSED IN PLACENTA, SIGNAL = 5.3; EXPRESSED IN FETAL LIVER, SIGNAL = 4.1; EST_HUMAN HIT: AW504579.1, EVALUE 2.00e-22; SWISSPROT HIT: P23252, EVALUE 7.00e-01
MARTGESSSEGKAPLIGGRTSPYSSNGTSVYYTVTSGDPPLLKFKAPIEEMEEK

SEQ ID NO: 40801 - protein, 84 aa, Homo sapiens
  MAP TO AL121889.3; EXPRESSED IN BONE MARROW, SIGNAL = 4.2; EXPRESSED IN ADULT LIVER, SIGNAL = 7.5; EXPRESSED IN HELA, SIGNAL =   7; EXPRESSED IN HEART, SIGNAL = 2.7; EXPRESSED IN BRAIN, SIGNAL = 4.3; EXPRESSED IN LUNG, SIGNAL = 5.3; EXPRESSED IN PLACENTA, SIGNAL = 5.3; EXPRESSED IN FETAL LIVER, SIGNAL = 4.1; EST_HUMAN HIT: R73235.1, EVALUE 3.00e-29
TPGWRSPCYSPNFLPRSHEVNWTCLLRMASGLRSVPTSMRWPTGMSGRCMRCLTTAWPMATLAWPTPPRPGAATRNRALRRFWS

SEQ ID NO: 40802 - protein, 66 aa, Homo sapiens
  MAP TO AL158049.2; EXPRESSED IN LUNG, SIGNAL =   1; EXPRESSED IN PLACENTA, SIGNAL = 1.1; EXPRESSED IN ADULT LIVER, SIGNAL = 1.2; EXPRESSED IN HEART, SIGNAL = 1.2; EXPRESSED IN FETAL LIVER, SIGNAL = 1.5; EXPRESSED IN BRAIN, SIGNAL = 1.1; EXPRESSED IN BONE MARROW, SIGNAL = 0.93; EST_HUMAN HIT: AA036800.1, EVALUE 2.00e-27; SWISSPROT HIT: P52027, EVALUE 3.40e+00
MVVQNSADAGDMRAGVQLEPFLHQVGGHMSVMKYDEHTVCKPLVSREQRFYESLPLAMKRFTPQYK

SEQ ID NO: 40803 - protein, 42 aa, Homo sapiens
  MAP TO AC019222.3; EXPRESSED IN PLACENTA, SIGNAL = 4.6; EXPRESSED IN BONE MARROW, SIGNAL = 4.2; EXPRESSED IN ADULT LIVER, SIGNAL = 4.7; EXPRESSED IN HELA, SIGNAL =   5; EXPRESSED IN HEART, SIGNAL = 4.3; EXPRESSED IN BRAIN, SIGNAL = 3.5; EXPRESSED IN LUNG, SIGNAL = 4.9; EXPRESSED IN FETAL LIVER, SIGNAL = 4.2; EST_HUMAN HIT: AA427878.1, EVALUE 5.00e-19
LWNICSDTGITAVTRAPWSRGDRSQMMLLRRFADFKRGICEN

SEQ ID NO: 40804 - protein, 41 aa, Homo sapiens
  MAP TO AC019222.3; EXPRESSED IN PLACENTA, SIGNAL = 4.6; EXPRESSED IN BONE MARROW, SIGNAL = 4.2; EXPRESSED IN ADULT LIVER, SIGNAL = 4.7; EXPRESSED IN HELA, SIGNAL =   5; EXPRESSED IN HEART, SIGNAL = 4.3; EXPRESSED IN BRAIN, SIGNAL = 3.5; EXPRESSED IN LUNG, SIGNAL = 4.9; EXPRESSED IN FETAL LIVER, SIGNAL = 4.2; EST_HUMAN HIT: AA427878.1, EVALUE 8.00e-16; SWISSPROT HIT: P45437, EVALUE 2.10e+00
FSQMPLLKSANLLRSIIWLLSPLLQGALVTAVMPVSEQMFH

SEQ ID NO: 40805 - protein, 80 aa, Homo sapiens
  MAP TO AL162387.2; EXPRESSED IN PLACENTA, SIGNAL = 1.8; EXPRESSED IN ADULT LIVER, SIGNAL = 1.5; EXPRESSED IN FETAL LIVER, SIGNAL = 1.6; EXPRESSED IN BRAIN, SIGNAL = 1.8; EXPRESSED IN LUNG, SIGNAL = 2.1; EXPRESSED IN HEART, SIGNAL =   2; EXPRESSED IN BONE MARROW, SIGNAL = 1.7; SWISSPROT HIT: P40426, EVALUE 3.00e-30; EST_HUMAN HIT: AV660739.1, EVALUE 7.00e-29
LSIRGAQEEDPPDPQLMRLDNMLLAEGVSGPEKGGGSAAAAAAAAASGGSSDNSIEHSDYRAKLTQIRQIYHTELEKYEQ

SEQ ID NO: 40806 - protein, 36 aa, Homo sapiens
  MAP TO AL132874.14; EXPRESSED IN LUNG, SIGNAL = 1.7; EXPRESSED IN ADULT LIVER, SIGNAL = 1.9; EXPRESSED IN HEART, SIGNAL = 1.5; EXPRESSED IN BRAIN, SIGNAL =   2; EXPRESSED IN PLACENTA, SIGNAL = 1.9; EXPRESSED IN FETAL LIVER, SIGNAL = 1.4; EXPRESSED IN BONE MARROW, SIGNAL = 1.6; EST_HUMAN HIT: AA465576.1, EVALUE 2.00e-11
MEEKYLMRESKPEDIQMITELKAMLTERDQIIKKLI

SEQ ID NO: 40807 - protein, 141 aa, Homo sapiens
  MAP TO AL121579.2; EXPRESSED IN PLACENTA, SIGNAL = 1.7; EXPRESSED IN HEART, SIGNAL = 1.3; EXPRESSED IN FETAL LIVER, SIGNAL =   1; EXPRESSED IN BONE MARROW, SIGNAL = 1.1; EXPRESSED IN LUNG, SIGNAL = 1.3; EXPRESSED IN ADULT LIVER, SIGNAL = 1.7; EXPRESSED IN BRAIN, SIGNAL = 0.98; SWISSPROT HIT: P47179, EVALUE 8.30e-01; EST_HUMAN HIT: AV694317.1, EVALUE 3.00e-15
TTNPKTEKFEADTDHRTTSFPGAESTAGSEPGSLTPDKEKPSQMTADNTQAAATKQPLETSEYTLSVEPETDSLLGAPEVTVSVSTAVPAASALSDEWDDTKLESVSRIRTPKLGDNEETQVRTEMSQTAQVSHEGMEGGQ

SEQ ID NO: 40808 - protein, 40 aa, Homo sapiens
  MAP TO AL139819.2; EXPRESSED IN LUNG, SIGNAL = 3.8; EXPRESSED IN ADULT LIVER, SIGNAL = 4.1; EXPRESSED IN HELA, SIGNAL = 4.5; EXPRESSED IN HEART, SIGNAL = 3.4; EXPRESSED IN BRAIN, SIGNAL = 2.9; EXPRESSED IN BONE MARROW, SIGNAL = 3.1; EXPRESSED IN PLACENTA, SIGNAL = 3.4; EXPRESSED IN FETAL LIVER, SIGNAL = 3.4; EST_HUMAN HIT: AV738911.1, EVALUE 2.40e+00; SWISSPROT HIT: P35439, EVALUE 8.30e+00
AHYWTVCIGPNGTTTRAWAMAPTPSSTMRTCCWGFRGCGS

SEQ ID NO: 40809 - protein, 50 aa, Homo sapiens
  MAP TO AP001505.1; EXPRESSED IN BONE MARROW, SIGNAL = 1.6; EXPRESSED IN LUNG, SIGNAL = 1.8; EXPRESSED IN PLACENTA, SIGNAL = 1.6; EXPRESSED IN FETAL LIVER, SIGNAL = 1.6; EXPRESSED IN ADULT LIVER, SIGNAL = 1.8; EXPRESSED IN HEART, SIGNAL = 1.7; EXPRESSED IN BRAIN, SIGNAL = 1.5; EST_HUMAN HIT: BF589364.1, EVALUE 3.00e-03
IMTTAKWQDKDVQKASLMKAMRTLAKMIRIGFFRPLEINQRFAVRNEISV

SEQ ID NO: 40810 - protein, 29 aa, Homo sapiens
  MAP TO AL157375.1; EXPRESSED IN HELA, SIGNAL = 2.7; EXPRESSED IN LUNG, SIGNAL = 1.7; EXPRESSED IN ADULT LIVER, SIGNAL =   2; EXPRESSED IN BRAIN, SIGNAL = 2.6; EXPRESSED IN BONE MARROW, SIGNAL = 2.3; EXPRESSED IN PLACENTA, SIGNAL = 1.3; EXPRESSED IN HEART, SIGNAL = 1.6; EXPRESSED IN FETAL LIVER, SIGNAL = 2.9; EST_HUMAN HIT: AA326146.1, EVALUE 3.00e-03
LRTTMRMCISFLPKMLSKRLTKMLPMLVD

SEQ ID NO: 40811 - protein, 36 aa, Homo sapiens
  MAP TO AL157375.1; EXPRESSED IN HELA, SIGNAL = 2.7; EXPRESSED IN LUNG, SIGNAL = 1.7; EXPRESSED IN ADULT LIVER, SIGNAL =   2; EXPRESSED IN BRAIN, SIGNAL = 2.6; EXPRESSED IN BONE MARROW, SIGNAL = 2.3; EXPRESSED IN PLACENTA, SIGNAL = 1.3; EXPRESSED IN HEART, SIGNAL = 1.6; EXPRESSED IN FETAL LIVER, SIGNAL = 2.9; EST_HUMAN HIT: AA081724.1, EVALUE 2.00e-06
WGASLSTSSKAFLAKKKCTSSSWSSVLQGKQQSYIS

SEQ ID NO: 40812 - protein, 100 aa, Homo sapiens
  MAP TO AC015452.4; EXPRESSED IN PLACENTA, SIGNAL =   4; EXPRESSED IN ADULT LIVER, SIGNAL = 3.1; EXPRESSED IN HEART, SIGNAL = 3.7; EXPRESSED IN FETAL LIVER, SIGNAL = 3.2; EXPRESSED IN BRAIN, SIGNAL = 3.8; EXPRESSED IN BONE MARROW, SIGNAL = 3.7; EXPRESSED IN LUNG, SIGNAL = 3.8; EST_HUMAN HIT: BF508546.1, EVALUE 1.00e-34; SWISSPROT HIT: P33459, EVALUE 3.00e-08
GMEVEVATLIIILSDPLAKFLLPVPTALSSAGLEVLVPEGGTLPPGDTTMIPLNWKLRLPPGQFWLLLPLSQQSKKGVTVLAGVADPDYQGEISLLLYNR

SEQ ID NO: 40813 - protein, 31 aa, Homo sapiens
  MAP TO AC013726.3; EXPRESSED IN LUNG, SIGNAL = 2.1; EXPRESSED IN ADULT LIVER, SIGNAL = 2.3; EXPRESSED IN HEART, SIGNAL = 1.7; EXPRESSED IN BRAIN, SIGNAL = 1.9; EXPRESSED IN FETAL LIVER, SIGNAL =   2; EXPRESSED IN PLACENTA, SIGNAL = 1.8; EXPRESSED IN HELA, SIGNAL = 2.5; EXPRESSED IN BONE MARROW, SIGNAL = 1.9; EST_HUMAN HIT: BE568472.1, EVALUE 2.60e+00
PSQGCCEEARESSRKTIHQCHWCSRHSPAQL

SEQ ID NO: 40814 - protein, 24 aa, Homo sapiens
  MAP TO AC019214.2; EXPRESSED IN PLACENTA, SIGNAL = 1.2; EXPRESSED IN ADULT LIVER, SIGNAL = 1.4; EXPRESSED IN HEART, SIGNAL = 1.3; EXPRESSED IN BRAIN, SIGNAL = 1.2; EXPRESSED IN BONE MARROW, SIGNAL = 1.2; EXPRESSED IN LUNG, SIGNAL = 1.5; EXPRESSED IN FETAL LIVER, SIGNAL = 1.4; SWISSPROT HIT: P08111, EVALUE 5.10e+00; EST_HUMAN HIT: BE621049.1, EVALUE 6.00e-07
VRYSCIRREDVSGIASCVFTKYGQ

SEQ ID NO: 40815 - protein, 25 aa, Homo sapiens
  MAP TO AL117334.29; EXPRESSED IN LUNG, SIGNAL =   3; EXPRESSED IN ADULT LIVER, SIGNAL = 2.6; EXPRESSED IN HEART, SIGNAL = 2.8; EXPRESSED IN BRAIN, SIGNAL = 2.7; EXPRESSED IN PLACENTA, SIGNAL = 3.3; EXPRESSED IN FETAL LIVER, SIGNAL = 2.9; EXPRESSED IN BONE MARROW, SIGNAL = 2.7; EST_HUMAN HIT: AW103658.1, EVALUE 3.00e-07
LQLFPSTLPHPSSSTQLQEKCTTML

SEQ ID NO: 40816 - protein, 72 aa, Homo sapiens
  MAP TO AC019214.2; EXPRESSED IN LUNG, SIGNAL =   5; EXPRESSED IN ADULT LIVER, SIGNAL = 3.6; EXPRESSED IN HEART, SIGNAL = 5.7; EXPRESSED IN BRAIN, SIGNAL =   5; EXPRESSED IN PLACENTA, SIGNAL = 5.1; EXPRESSED IN HELA, SIGNAL = 3.2; EXPRESSED IN FETAL LIVER, SIGNAL = 5.3; EXPRESSED IN BONE MARROW, SIGNAL = 5.1; EST_HUMAN HIT: BE314216.1, EVALUE 3.00e-09
AAMPPLPSTSGMRCLPAPKAATTARTPRPCGGGWRPWSAAAAGARPASGPPRGTALTPSCMREAARATGTSA

SEQ ID NO: 40817 - protein, 111 aa, Homo sapiens
  MAP TO AL121988.10; EXPRESSED IN PLACENTA, SIGNAL = 6.7; EXPRESSED IN FETAL LIVER, SIGNAL = 5.9; EXPRESSED IN HEART, SIGNAL = 5.9; EXPRESSED IN BONE MARROW, SIGNAL = 6.1; EXPRESSED IN ADULT LIVER, SIGNAL = 6.8; EXPRESSED IN BRAIN, SIGNAL = 5.6; EXPRESSED IN LUNG, SIGNAL = 6.9; EXPRESSED IN HELA, SIGNAL = 5.8; SWISSPROT HIT: Q14028, EVALUE 8.10e-01; EST_HUMAN HIT: AW192821.1, EVALUE 2.80e-01
VPGLMRVSSGLKEGTSSQKEEAKMDVGTWAKETAQAVSNSWSGAAFPVLSADMSSPPGAAEQCTLSMPSGLTSTFRKPLPGKRGKHHELHQATQPCSPAASTARGQGQDTP

SEQ ID NO: 40818 - protein, 43 aa, Homo sapiens
  MAP TO AC019221.3; EXPRESSED IN PLACENTA, SIGNAL = 5.6; EXPRESSED IN FETAL LIVER, SIGNAL =   5; EXPRESSED IN HEART, SIGNAL = 5.4; EXPRESSED IN BONE MARROW, SIGNAL = 5.9; EXPRESSED IN LUNG, SIGNAL = 6.8; EXPRESSED IN ADULT LIVER, SIGNAL = 6.1; EXPRESSED IN HELA, SIGNAL = 5.7; EXPRESSED IN BRAIN, SIGNAL =   5; SWISSPROT HIT: Q16760, EVALUE 6.00e-21; EST_HUMAN HIT: BE888147.1, EVALUE 8.00e-20
HLWGTEEVAAWLEHLSLCEYKDIFTRHDIRGSELLHLERRDLK

SEQ ID NO: 40819 - protein, 43 aa, Homo sapiens
  MAP TO AC019221.3; EXPRESSED IN PLACENTA, SIGNAL = 5.6; EXPRESSED IN FETAL LIVER, SIGNAL =   5; EXPRESSED IN HEART, SIGNAL = 5.4; EXPRESSED IN BONE MARROW, SIGNAL = 5.9; EXPRESSED IN LUNG, SIGNAL = 6.8; EXPRESSED IN ADULT LIVER, SIGNAL = 6.1; EXPRESSED IN HELA, SIGNAL = 5.7; EXPRESSED IN BRAIN, SIGNAL =   5; EST_HUMAN HIT: BE888147.1, EVALUE 4.00e-12
FTSGGQRRLLPGWSTSVSVSIRTSSHGTTSGALSSCTWSGGTS

SEQ ID NO: 40820 - protein, 30 aa, Homo sapiens
  MAP TO AC008474.4; EXPRESSED IN ADULT LIVER, SIGNAL = 1.8; EXPRESSED IN HELA, SIGNAL = 2.3; EXPRESSED IN LUNG, SIGNAL = 1.7; EXPRESSED IN PLACENTA, SIGNAL = 1.5; EXPRESSED IN FETAL LIVER, SIGNAL = 1.8; EXPRESSED IN BONE MARROW, SIGNAL = 1.3; EXPRESSED IN HEART, SIGNAL = 1.7; EXPRESSED IN BRAIN, SIGNAL =   2; EST_HUMAN HIT: AI264865.1, EVALUE 2.00e-09; SWISSPROT HIT: O14737, EVALUE 2.00e-10
SNLALVKPEKTKAVENYLIQMARYGQLSEK

SEQ ID NO: 40821 - protein, 92 aa, Homo sapiens
  MAP TO AL121777.16; EXPRESSED IN HELA, SIGNAL = 2.9; EXPRESSED IN LUNG, SIGNAL = 1.2; EXPRESSED IN PLACENTA, SIGNAL = 0.96; EXPRESSED IN ADULT LIVER, SIGNAL = 1.4; EXPRESSED IN FETAL LIVER, SIGNAL =   2; EXPRESSED IN BONE MARROW, SIGNAL = 1.5; EXPRESSED IN HEART, SIGNAL = 1.4; EXPRESSED IN BRAIN, SIGNAL = 1.8; EST_HUMAN HIT: BE618515.1, EVALUE 9.00e-10; SWISSPROT HIT: Q64674, EVALUE 7.00e-11
MGPAESLFKEAYCQQMKVKVALAEDSILCCQGEHQWLHLHLIRRCGSSASSRGGLHLLHGPHLPLQPDWLHAVRQNMITRDRELVQHLTQQQ

SEQ ID NO: 40822 - protein, 42 aa, Homo sapiens
  MAP TO AL132866.21; EXPRESSED IN LUNG, SIGNAL = 2.7; EXPRESSED IN HELA, SIGNAL =   3; EXPRESSED IN BRAIN, SIGNAL =   2; EXPRESSED IN PLACENTA, SIGNAL = 2.3; EXPRESSED IN ADULT LIVER, SIGNAL = 2.8; EXPRESSED IN FETAL LIVER, SIGNAL = 2.2; EXPRESSED IN HEART, SIGNAL = 2.2; EXPRESSED IN BONE MARROW, SIGNAL = 2.3; EST_HUMAN HIT: BE779935.1, EVALUE 1.80e+00
FFREFVPWNNRNHLRADTCSSHLFLSLGLVVPGVMFSETIDL

SEQ ID NO: 40823 - protein, 34 aa, Homo sapiens
  MAP TO AL132866.21; EXPRESSED IN LUNG, SIGNAL = 2.7; EXPRESSED IN HELA, SIGNAL =   3; EXPRESSED IN BRAIN, SIGNAL =   2; EXPRESSED IN PLACENTA, SIGNAL = 2.3; EXPRESSED IN ADULT LIVER, SIGNAL = 2.8; EXPRESSED IN FETAL LIVER, SIGNAL = 2.2; EXPRESSED IN HEART, SIGNAL = 2.2; EXPRESSED IN BONE MARROW, SIGNAL = 2.3; EST_HUMAN HIT: BF213748.1, EVALUE 5.70e+00
YFSVNLCPGTIGTILEQTPALPTCFSPWVWLYPA

SEQ ID NO: 40824 - protein, 35 aa, Homo sapiens
  MAP TO AL121905.10; EXPRESSED IN LUNG, SIGNAL = 2.6; EXPRESSED IN PLACENTA, SIGNAL = 2.3; EXPRESSED IN HEART, SIGNAL = 2.1; EXPRESSED IN FETAL LIVER, SIGNAL = 2.4; EXPRESSED IN BRAIN, SIGNAL = 3.5; EXPRESSED IN ADULT LIVER, SIGNAL = 2.8; EXPRESSED IN HELA, SIGNAL = 2.3; EXPRESSED IN BONE MARROW, SIGNAL = 2.6; EST_HUMAN HIT: AI674319.1, EVALUE 4.00e-16; SWISSPROT HIT: O35326, EVALUE 6.40e+00
PQAPTGNTHPCPWTSWKRKLTGEWQTTISSSGRNS

SEQ ID NO: 40825 - protein, 30 aa, Homo sapiens
  MAP TO AL133419.11; EXPRESSED IN LUNG, SIGNAL =   4; EXPRESSED IN PLACENTA, SIGNAL = 4.3; EXPRESSED IN ADULT LIVER, SIGNAL = 4.3; EXPRESSED IN HELA, SIGNAL = 3.3; EXPRESSED IN FETAL LIVER, SIGNAL = 4.4; EXPRESSED IN BRAIN, SIGNAL =   4; EXPRESSED IN BONE MARROW, SIGNAL =   4; EXPRESSED IN HEART, SIGNAL = 4.1
MESLQGRFTVEKAEIHGDFQDPEKGKGGGR

SEQ ID NO: 40826 - protein, 38 aa, Homo sapiens
  MAP TO AC022262.3; EXPRESSED IN LUNG, SIGNAL = 4.8; EXPRESSED IN PLACENTA, SIGNAL = 4.2; EXPRESSED IN HEART, SIGNAL = 3.9; EXPRESSED IN FETAL LIVER, SIGNAL = 4.5; EXPRESSED IN BRAIN, SIGNAL = 4.6; EXPRESSED IN BONE MARROW, SIGNAL = 4.2; EXPRESSED IN ADULT LIVER, SIGNAL = 4.1; EXPRESSED IN HELA, SIGNAL = 3.2; EST_HUMAN HIT: BE315402.1, EVALUE 1.40e+00
VAVVPGGCGLLLPGLDADGVDPQRLNVLAIGVALARAE

SEQ ID NO: 40827 - protein, 17 aa, Homo sapiens
  MAP TO AC022262.3; EXPRESSED IN LUNG, SIGNAL = 4.8; EXPRESSED IN PLACENTA, SIGNAL = 4.2; EXPRESSED IN HEART, SIGNAL = 3.9; EXPRESSED IN FETAL LIVER, SIGNAL = 4.5; EXPRESSED IN BRAIN, SIGNAL = 4.6; EXPRESSED IN BONE MARROW, SIGNAL = 4.2; EXPRESSED IN ADULT LIVER, SIGNAL = 4.1; EXPRESSED IN HELA, SIGNAL = 3.2
VVASTTGRWWWRRRPSG

SEQ ID NO: 40828 - protein, 31 aa, Homo sapiens
  MAP TO AC017086.3; EXPRESSED IN ADULT LIVER, SIGNAL = 1.3; EXPRESSED IN PLACENTA, SIGNAL = 1.5; EXPRESSED IN FETAL LIVER, SIGNAL = 1.4; EXPRESSED IN BRAIN, SIGNAL = 1.9; EXPRESSED IN BONE MARROW, SIGNAL = 1.2; EXPRESSED IN LUNG, SIGNAL = 1.4; EXPRESSED IN HEART, SIGNAL = 1.3; EST_HUMAN HIT: BF365119.1, EVALUE 1.80e-01
TFHLVSNPDLVLAVSMTKTRNEVCGYPVIVQ

SEQ ID NO: 40829 - protein, 38 aa, Homo sapiens
  MAP TO AC017086.3; EXPRESSED IN ADULT LIVER, SIGNAL = 1.3; EXPRESSED IN PLACENTA, SIGNAL = 1.5; EXPRESSED IN FETAL LIVER, SIGNAL = 1.4; EXPRESSED IN BRAIN, SIGNAL = 1.9; EXPRESSED IN BONE MARROW, SIGNAL = 1.2; EXPRESSED IN LUNG, SIGNAL = 1.4; EXPRESSED IN HEART, SIGNAL = 1.3
ACMELRGNTVLSGTEGDLIWSCYFVMWLILFSQGPFTL

SEQ ID NO: 40830 - protein, 26 aa, Homo sapiens
  MAP TO AC008379.3; EXPRESSED IN ADULT LIVER, SIGNAL = 1.7; EXPRESSED IN HELA, SIGNAL = 2.3; EXPRESSED IN BONE MARROW, SIGNAL = 1.8; EXPRESSED IN LUNG, SIGNAL = 1.8; EXPRESSED IN PLACENTA, SIGNAL = 1.5; EXPRESSED IN HEART, SIGNAL = 1.5; EXPRESSED IN FETAL LIVER, SIGNAL = 1.6; EXPRESSED IN BRAIN, SIGNAL = 1.6; EST_HUMAN HIT: BE070261.1, EVALUE 8.10e-02
GTTTTMFKLADKVAAFKAELELWGRR

SEQ ID NO: 40831 - protein, 25 aa, Homo sapiens
  MAP TO AC008379.3; EXPRESSED IN ADULT LIVER, SIGNAL = 1.7; EXPRESSED IN HELA, SIGNAL = 2.3; EXPRESSED IN BONE MARROW, SIGNAL = 1.8; EXPRESSED IN LUNG, SIGNAL = 1.8; EXPRESSED IN PLACENTA, SIGNAL = 1.5; EXPRESSED IN HEART, SIGNAL = 1.5; EXPRESSED IN FETAL LIVER, SIGNAL = 1.6; EXPRESSED IN BRAIN, SIGNAL = 1.6; EST_HUMAN HIT: AW886252.1, EVALUE 1.00e-04
GQRPLCSSWQIKWLHSKPNWNYGGD

SEQ ID NO: 40832 - protein, 73 aa, Homo sapiens
  MAP TO AL136528.9; EXPRESSED IN HELA, SIGNAL =   4; EXPRESSED IN LUNG, SIGNAL = 3.1; EXPRESSED IN PLACENTA, SIGNAL = 2.5; EXPRESSED IN HEART, SIGNAL =   3; EXPRESSED IN FETAL LIVER, SIGNAL = 2.9; EXPRESSED IN BONE MARROW, SIGNAL = 3.2; EXPRESSED IN ADULT LIVER, SIGNAL = 3.2; EXPRESSED IN BRAIN, SIGNAL = 2.8; EST_HUMAN HIT: AW027739.1, EVALUE 7.00e-14
TPVPCPSFLRQHSQCRLGLGHSEAEAVRGARAAVPSARVSVGPAAAAAGHLHGRQQALPVVPSGLHVGAGAWG

SEQ ID NO: 40833 - protein, 37 aa, Homo sapiens
  MAP TO AL121747.19; EXPRESSED IN PLACENTA, SIGNAL = 4.9; EXPRESSED IN LUNG, SIGNAL = 5.4; EXPRESSED IN HELA, SIGNAL = 3.1; EXPRESSED IN HEART, SIGNAL = 5.3; EXPRESSED IN FETAL LIVER, SIGNAL = 5.4; EXPRESSED IN BONE MARROW, SIGNAL = 5.5; EXPRESSED IN ADULT LIVER, SIGNAL = 4.8; EXPRESSED IN BRAIN, SIGNAL = 5.4; EST_HUMAN HIT: AA622731.1, EVALUE 8.50e-01; SWISSPROT HIT: P47171, EVALUE 1.30e+00
LVMAVAAHLEWTLPSSQLQQGGTAGAAHSTELQSWGQ

SEQ ID NO: 40834 - protein, 46 aa, Homo sapiens
  MAP TO AC021878.2; EXPRESSED IN ADULT LIVER, SIGNAL = 0.84; EXPRESSED IN LUNG, SIGNAL = 0.9; EXPRESSED IN PLACENTA, SIGNAL = 0.8; EXPRESSED IN FETAL LIVER, SIGNAL = 0.83; EXPRESSED IN BONE MARROW, SIGNAL = 0.66; EXPRESSED IN HEART, SIGNAL = 2.1; EXPRESSED IN BRAIN, SIGNAL = 0.79
DVPADSRMQNELERAQSLRLEATLETFAIFHLRDDSGNNTGNREEW

SEQ ID NO: 40835 - protein, 17 aa, Homo sapiens
  MAP TO AC021878.2; EXPRESSED IN ADULT LIVER, SIGNAL = 0.84; EXPRESSED IN LUNG, SIGNAL = 0.9; EXPRESSED IN PLACENTA, SIGNAL = 0.8; EXPRESSED IN FETAL LIVER, SIGNAL = 0.83; EXPRESSED IN BONE MARROW, SIGNAL = 0.66; EXPRESSED IN HEART, SIGNAL = 2.1; EXPRESSED IN BRAIN, SIGNAL = 0.79
MFLLTVECRMNWREHRV

SEQ ID NO: 40836 - protein, 28 aa, Homo sapiens
  MAP TO AC021115.3; EXPRESSED IN LUNG, SIGNAL = 6.1; EXPRESSED IN ADULT LIVER, SIGNAL = 5.7; EXPRESSED IN HELA, SIGNAL = 2.7; EXPRESSED IN FETAL LIVER, SIGNAL = 3.9; EXPRESSED IN BRAIN, SIGNAL = 5.2; EXPRESSED IN BONE MARROW, SIGNAL = 5.5; EXPRESSED IN PLACENTA, SIGNAL = 5.8; EXPRESSED IN HEART, SIGNAL = 4.9; EST_HUMAN HIT: BE009416.1, EVALUE 1.00e-09
MGNEKEERIIGHLLYMGLIATDLCFTPQ

SEQ ID NO: 40837 - protein, 27 aa, Homo sapiens
  MAP TO AC021115.3; EXPRESSED IN LUNG, SIGNAL = 6.1; EXPRESSED IN ADULT LIVER, SIGNAL = 5.7; EXPRESSED IN HELA, SIGNAL = 2.7; EXPRESSED IN FETAL LIVER, SIGNAL = 3.9; EXPRESSED IN BRAIN, SIGNAL = 5.2; EXPRESSED IN BONE MARROW, SIGNAL = 5.5; EXPRESSED IN PLACENTA, SIGNAL = 5.8; EXPRESSED IN HEART, SIGNAL = 4.9; EST_HUMAN HIT: BE009416.1, EVALUE 6.00e-09
WEMKRKSVSLVTFCIWGLLLQICASRL

SEQ ID NO: 40838 - protein, 143 aa, Homo sapiens
  MAP TO AC011599.8; EXPRESSED IN PLACENTA, SIGNAL = 1.6; EXPRESSED IN ADULT LIVER, SIGNAL = 1.8; EXPRESSED IN FETAL LIVER, SIGNAL = 1.6; EXPRESSED IN BONE MARROW, SIGNAL = 1.8; EXPRESSED IN LUNG, SIGNAL =   2; EXPRESSED IN HEART, SIGNAL = 1.5; EXPRESSED IN BRAIN, SIGNAL = 2.1; SWISSPROT HIT: Q42510, EVALUE 3.00e-03; EST_HUMAN HIT: AI380627.1, EVALUE 1.60e-02
CVVDEMDFSTMELDEALRKFQAHIRVQGEAQKVERLIEAFRWGPGWLGLLHQGRMVSPSFRARGWTKDCIPTIPRQGQVSLNVALGVIVLAPPTFQALCRAPFSHCEVVGVEKTVPIILIVKMRKLKLKEVMIATARILAVHI

SEQ ID NO: 40839 - protein, 29 aa, Homo sapiens
  MAP TO AC011599.8; EXPRESSED IN PLACENTA, SIGNAL = 1.6; EXPRESSED IN ADULT LIVER, SIGNAL = 1.8; EXPRESSED IN FETAL LIVER, SIGNAL = 1.6; EXPRESSED IN BONE MARROW, SIGNAL = 1.8; EXPRESSED IN LUNG, SIGNAL =   2; EXPRESSED IN HEART, SIGNAL = 1.5; EXPRESSED IN BRAIN, SIGNAL = 2.1
HLQGVLMRGCLSLFQLRRGRDGLLYHGAG

SEQ ID NO: 40840 - protein, 68 aa, Homo sapiens
  MAP TO AC023340.2; EXPRESSED IN PLACENTA, SIGNAL = 2.6; EXPRESSED IN LUNG, SIGNAL = 2.6; EXPRESSED IN HELA, SIGNAL = 2.5; EXPRESSED IN HEART, SIGNAL = 2.5; EXPRESSED IN FETAL LIVER, SIGNAL = 2.2; EXPRESSED IN BONE MARROW, SIGNAL = 2.2; EXPRESSED IN ADULT LIVER, SIGNAL = 2.8; EXPRESSED IN BRAIN, SIGNAL =   3; EST_HUMAN HIT: AI913523.1, EVALUE 8.00e-04; SWISSPROT HIT: P53276, EVALUE 7.60e+00
MAGFIIAAVWGRSSFLKEKHHQSKERFWLSSGFHNKMLPTEWLKHKTFVAPSSGGSEGQDQDASDLAS

SEQ ID NO: 40841 - protein, 87 aa, Homo sapiens
  MAP TO AC021079.2; EXPRESSED IN ADULT LIVER, SIGNAL = 1.9; EXPRESSED IN BRAIN, SIGNAL = 3.7; EXPRESSED IN LUNG, SIGNAL = 1.9; EXPRESSED IN BONE MARROW, SIGNAL = 1.7; EXPRESSED IN FETAL LIVER, SIGNAL = 1.8; EXPRESSED IN HEART, SIGNAL = 1.9; EXPRESSED IN HELA, SIGNAL = 2.4; EXPRESSED IN PLACENTA, SIGNAL = 1.7; EST_HUMAN HIT: AV722519.1, EVALUE 4.00e-13; SWISSPROT HIT: P18504, EVALUE 7.00e-33
PKKVKDPLIKKNNTYAPTATSYTPNLARGDPGLATIAKSATIEPKEVKPETKPPEPKKTFNSVSKIDRLSRIAFPLLFGIFNLVYWA

SEQ ID NO: 40842 - protein, 57 aa, Homo sapiens; identical to SEQ ID NO: 34649
  MAP TO AL138807.7; EXPRESSED IN PLACENTA, SIGNAL = 2.5; EXPRESSED IN HEART, SIGNAL = 2.6; EXPRESSED IN FETAL LIVER, SIGNAL = 2.5; EXPRESSED IN BRAIN, SIGNAL = 2.8; EXPRESSED IN BONE MARROW, SIGNAL = 2.5; EXPRESSED IN LUNG, SIGNAL =   3; EXPRESSED IN ADULT LIVER, SIGNAL =   3; EXPRESSED IN HELA, SIGNAL = 3.3; EST_HUMAN HIT: AW374292.1, EVALUE 2.00e-16; SWISSPROT HIT: O75110, EVALUE 2.00e-17

SEQ ID NO: 40843 - protein, 49 aa, Homo sapiens
  MAP TO AL121747.19; EXPRESSED IN LUNG, SIGNAL =   6; EXPRESSED IN ADULT LIVER, SIGNAL = 6.5; EXPRESSED IN HELA, SIGNAL = 4.9; EXPRESSED IN BONE MARROW, SIGNAL = 5.5; EXPRESSED IN PLACENTA, SIGNAL = 4.8; EXPRESSED IN HEART, SIGNAL =   5; EXPRESSED IN FETAL LIVER, SIGNAL = 7.1; EXPRESSED IN BRAIN, SIGNAL = 5.1; EST_HUMAN HIT: BE395567.1, EVALUE 2.00e-23; SWISSPROT HIT: P19139, EVALUE 2.00e-24
HSRKRWERFVHSENQHLVSPEALDFLDKLLRYDHQSRLTAREAMEHPYF

SEQ ID NO: 40844 - protein, 49 aa, Homo sapiens
  MAP TO AL121747.19; EXPRESSED IN LUNG, SIGNAL =   6; EXPRESSED IN ADULT LIVER, SIGNAL = 6.5; EXPRESSED IN HELA, SIGNAL = 4.9; EXPRESSED IN BONE MARROW, SIGNAL = 5.5; EXPRESSED IN PLACENTA, SIGNAL = 4.8; EXPRESSED IN HEART, SIGNAL =   5; EXPRESSED IN FETAL LIVER, SIGNAL = 7.1; EXPRESSED IN BRAIN, SIGNAL = 5.1; EST_HUMAN HIT: BE395567.1, EVALUE 4.00e-23
TLESDGNALSTVKISTLSALRPWISWTNCCDMTTSHGLLQERQWSTPIS

SEQ ID NO: 40845 - protein, 75 aa, Homo sapiens
  MAP TO AC008757.4; EXPRESSED IN BONE MARROW, SIGNAL = 4.7; EXPRESSED IN LUNG, SIGNAL = 7.6; EXPRESSED IN ADULT LIVER, SIGNAL = 7.9; EXPRESSED IN HELA, SIGNAL = 9.7; EXPRESSED IN PLACENTA, SIGNAL =  10; EXPRESSED IN HEART, SIGNAL = 8.9; EXPRESSED IN FETAL LIVER, SIGNAL =   7; EXPRESSED IN BRAIN, SIGNAL = 6.4; SWISSPROT HIT: P72934, EVALUE 4.50e+00; EST_HUMAN HIT: BF347610.1, EVALUE 4.60e-01
NEQQYRRRRRRRQQQQQQQRKDQERVARAPSLPPSAQGQELLGPVVWQWGRQGSLVSSRVGKRGMETRRREAVHK

SEQ ID NO: 40846 - protein, 71 aa, Homo sapiens
  MAP TO AC018761.2; EXPRESSED IN PLACENTA, SIGNAL =   7; EXPRESSED IN FETAL LIVER, SIGNAL = 6.9; EXPRESSED IN BONE MARROW, SIGNAL = 6.8; EXPRESSED IN HEART, SIGNAL = 6.5; EXPRESSED IN ADULT LIVER, SIGNAL = 7.1; EXPRESSED IN LUNG, SIGNAL = 7.9; EXPRESSED IN HELA, SIGNAL = 8.1; EXPRESSED IN BRAIN, SIGNAL = 6.8; EST_HUMAN HIT: AU131991.1, EVALUE 6.00e-17; SWISSPROT HIT: O00754, EVALUE 6.00e-18
GRYYRTNHTVMTMGSDFQYENANMWFKNLDKLIRLVNAQVSAPTLWYPCAHVRLHPGALGYVHSSQCCLCF

SEQ ID NO: 40847 - protein, 49 aa, Homo sapiens; identical to SEQ ID NO: 33729
  MAP TO AL138811.1; EXPRESSED IN ADULT LIVER, SIGNAL = 3.5; EXPRESSED IN LUNG, SIGNAL = 3.5; EXPRESSED IN HELA, SIGNAL = 5.6; EXPRESSED IN BRAIN, SIGNAL = 3.3; EXPRESSED IN PLACENTA, SIGNAL = 2.9; EXPRESSED IN HEART, SIGNAL = 3.8; EXPRESSED IN FETAL LIVER, SIGNAL = 3.6; EXPRESSED IN BONE MARROW, SIGNAL = 3.5; EST_HUMAN HIT: BE907607.1, EVALUE 2.00e-21

SEQ ID NO: 40848 - protein, 23 aa, Homo sapiens
  MAP TO AC005297.1; EXPRESSED IN PLACENTA, SIGNAL =   2; EXPRESSED IN FETAL LIVER, SIGNAL = 1.8; EXPRESSED IN BRAIN, SIGNAL =   2; EXPRESSED IN BONE MARROW, SIGNAL =   2; EXPRESSED IN HEART, SIGNAL = 2.1; EXPRESSED IN LUNG, SIGNAL = 2.1; EXPRESSED IN ADULT LIVER, SIGNAL = 2.3; EXPRESSED IN HELA, SIGNAL = 2.9; EST_HUMAN HIT: AI954607.1, EVALUE 7.00e-06
IFLVGTVAFQEDHNQESHEETSL

SEQ ID NO: 40849 - protein, 77 aa, Homo sapiens
  MAP TO AC016549.4; EXPRESSED IN ADULT LIVER, SIGNAL = 3.4; EXPRESSED IN LUNG, SIGNAL = 3.6; EXPRESSED IN HELA, SIGNAL = 4.6; EXPRESSED IN BRAIN, SIGNAL = 2.8; EXPRESSED IN PLACENTA, SIGNAL = 3.4; EXPRESSED IN HEART, SIGNAL = 3.3; EXPRESSED IN FETAL LIVER, SIGNAL =   3; EXPRESSED IN BONE MARROW, SIGNAL = 2.9; SWISSPROT HIT: O75962, EVALUE 2.00e-37; EST_HUMAN HIT: BE773167.1, EVALUE 2.00e-34
VSQDGKSLLDKLQRPLTPGSSDSLTASANYSKAVHHVLDVIHEVLHHQRQLENIWQHRKVRLHQRLQLCVFQQDVQQ

SEQ ID NO: 40850 - protein, 40 aa, Homo sapiens
  MAP TO AC019278.3; EXPRESSED IN BONE MARROW, SIGNAL =  13; EXPRESSED IN LUNG, SIGNAL = 4.4; EXPRESSED IN ADULT LIVER, SIGNAL = 6.4; EXPRESSED IN HELA, SIGNAL =  13; EXPRESSED IN PLACENTA, SIGNAL = 4.7; EXPRESSED IN HEART, SIGNAL = 5.1; EXPRESSED IN FETAL LIVER, SIGNAL =  15; EXPRESSED IN BRAIN, SIGNAL = 5.9; SWISSPROT HIT: P20130, EVALUE 2.20e+00; EST_HUMAN HIT: AW732346.1, EVALUE 4.00e-13
LSYLHSCGHLQCGISERQSYPQSHGCQRLQRQSPFSCHCL

SEQ ID NO: 40851 - protein, 58 aa, Homo sapiens
  MAP TO AC023114.3; EXPRESSED IN ADULT LIVER, SIGNAL = 1.3; EXPRESSED IN BONE MARROW, SIGNAL = 1.4; EXPRESSED IN LUNG, SIGNAL = 1.8; EXPRESSED IN BRAIN, SIGNAL = 1.4; EXPRESSED IN PLACENTA, SIGNAL = 1.5; EXPRESSED IN HEART, SIGNAL = 1.2; EXPRESSED IN FETAL LIVER, SIGNAL = 1.3; SWISSPROT HIT: P34250, EVALUE 3.50e+00
MSLSEPGCGQRCAVITNDDSSRYTYAAVNTGDVMKSSKSLGCGEKTGLQDPEKDVSHA

SEQ ID NO: 40852 - protein, 132 aa, Homo sapiens
  MAP TO AC008468.4; EXPRESSED IN LUNG, SIGNAL = 5.3; EXPRESSED IN PLACENTA, SIGNAL = 5.7; EXPRESSED IN FETAL LIVER, SIGNAL = 4.6; EXPRESSED IN BRAIN, SIGNAL = 4.6; EXPRESSED IN HEART, SIGNAL = 4.5; EXPRESSED IN ADULT LIVER, SIGNAL = 5.3; EXPRESSED IN HELA, SIGNAL = 5.7; EXPRESSED IN BONE MARROW, SIGNAL = 4.1; EST_HUMAN HIT: BE019025.1, EVALUE 4.00e-16; SWISSPROT HIT: Q14517, EVALUE 3.00e-05
AVDADSGYNAWLSYELQPAASSPRIPFRVGLYTGEISTTRVLDEADSPRHRLLVLVKDHGEPALTATATVLVSLVESGQAPKASSRQSAGVLGPEAALVDVNVYLIIAICAVSSLLVLTLLLYTALRCSALP

SEQ ID NO: 40853 - protein, 35 aa, Homo sapiens
  MAP TO AC020919.3; EXPRESSED IN LUNG, SIGNAL =   2; EXPRESSED IN PLACENTA, SIGNAL = 1.7; EXPRESSED IN FETAL LIVER, SIGNAL = 2.1; EXPRESSED IN BRAIN, SIGNAL = 1.7; EXPRESSED IN HEART, SIGNAL = 1.9; EXPRESSED IN ADULT LIVER, SIGNAL = 1.6; EXPRESSED IN BONE MARROW, SIGNAL = 1.6
TLLRISIIYTLSISVFIITSLITIEMYPREENMFT

SEQ ID NO: 40854 - protein, 69 aa, Homo sapiens
  MAP TO AC018761.2; EXPRESSED IN ADULT LIVER, SIGNAL = 3.1; EXPRESSED IN HELA, SIGNAL = 3.6; EXPRESSED IN LUNG, SIGNAL = 3.3; EXPRESSED IN HEART, SIGNAL =   3; EXPRESSED IN BRAIN, SIGNAL = 3.1; EXPRESSED IN BONE MARROW, SIGNAL = 2.9; EXPRESSED IN PLACENTA, SIGNAL = 2.9; EXPRESSED IN FETAL LIVER, SIGNAL =   3; EST_HUMAN HIT: BF219732.1, EVALUE 4.00e-33; SWISSPROT HIT: P49366, EVALUE 3.00e-34
MEGSLEREAPAGALAAVLKHSSTLPPESTQVRGYDFNRGVNYRALLEAFGTTGFQATNFGRAVQQVNAM

SEQ ID NO: 40855 - protein, 17 aa, Homo sapiens
  MAP TO AC018761.2; EXPRESSED IN ADULT LIVER, SIGNAL = 3.1; EXPRESSED IN HELA, SIGNAL = 3.6; EXPRESSED IN LUNG, SIGNAL = 3.3; EXPRESSED IN HEART, SIGNAL =   3; EXPRESSED IN BRAIN, SIGNAL = 3.1; EXPRESSED IN BONE MARROW, SIGNAL = 2.9; EXPRESSED IN PLACENTA, SIGNAL = 2.9; EXPRESSED IN FETAL LIVER, SIGNAL =   3; EST_HUMAN HIT: BF338343.1, EVALUE 1.00e-05
WKVPWNGRRQRGRWPPC

SEQ ID NO: 40856 - protein, 70 aa, Homo sapiens
  MAP TO AC018684.2; EXPRESSED IN LUNG, SIGNAL =   8; EXPRESSED IN HEART, SIGNAL = 7.2; EXPRESSED IN BRAIN, SIGNAL =   7; EXPRESSED IN PLACENTA, SIGNAL = 6.9; EXPRESSED IN FETAL LIVER, SIGNAL = 7.2; EXPRESSED IN ADULT LIVER, SIGNAL = 7.4; EXPRESSED IN HELA, SIGNAL = 9.9; EXPRESSED IN BONE MARROW, SIGNAL = 7.1; SWISSPROT HIT: O86231, EVALUE 1.60e+00; EST_HUMAN HIT: BF206271.1, EVALUE 2.40e+00
MDEIVPKMNTISASRCFLLRLGSRVRPREGSELKNLEFRWVLSAKPPAGLEQWLWLGSIGEILLKGWKAD

SEQ ID NO: 40857 - protein, 41 aa, Homo sapiens
  MAP TO AC006054.2; EXPRESSED IN ADULT LIVER, SIGNAL = 1.2; EXPRESSED IN LUNG, SIGNAL = 1.3; EXPRESSED IN PLACENTA, SIGNAL = 1.2; EXPRESSED IN BRAIN, SIGNAL = 1.3; EXPRESSED IN BONE MARROW, SIGNAL = 1.2; EXPRESSED IN HEART, SIGNAL = 1.2; EXPRESSED IN FETAL LIVER, SIGNAL = 1.4; SWISSPROT HIT: P75563, EVALUE 6.30e+00
NEGEKSHHQDQMRSRQVEGLGNNWNIKNPLSFSTISGYGAC

SEQ ID NO: 40858 - protein, 30 aa, Homo sapiens
  MAP TO AF241728.1; EXPRESSED IN PLACENTA, SIGNAL = 2.4; EXPRESSED IN ADULT LIVER, SIGNAL = 4.3; EXPRESSED IN HELA, SIGNAL = 6.6; EXPRESSED IN FETAL LIVER, SIGNAL = 2.8; EXPRESSED IN BRAIN, SIGNAL = 1.6; EXPRESSED IN BONE MARROW, SIGNAL = 2.9; EXPRESSED IN LUNG, SIGNAL = 2.5; EXPRESSED IN HEART, SIGNAL =   2
VLSGVQNRRRLCNRSRLLCKLLCHLGHMTQ

SEQ ID NO: 40859 - protein, 35 aa, Homo sapiens
  MAP TO AC022470.3; EXPRESSED IN PLACENTA, SIGNAL = 1.9; EXPRESSED IN HELA, SIGNAL = 2.4; EXPRESSED IN LUNG, SIGNAL = 2.1; EXPRESSED IN ADULT LIVER, SIGNAL = 2.3; EXPRESSED IN FETAL LIVER, SIGNAL = 2.4; EXPRESSED IN BRAIN, SIGNAL =   2; EXPRESSED IN BONE MARROW, SIGNAL =   2; EXPRESSED IN HEART, SIGNAL = 1.8; SWISSPROT HIT: P11117, EVALUE 5.00e-15; EST_HUMAN HIT: BE747631.1, EVALUE 6.00e-14
HDTTLVALQMALDVYNGEQAPYASCHIFELYQEDS

SEQ ID NO: 40860 - protein, 18 aa, Homo sapiens
  MAP TO AC022470.3; EXPRESSED IN PLACENTA, SIGNAL = 1.9; EXPRESSED IN HELA, SIGNAL = 2.4; EXPRESSED IN LUNG, SIGNAL = 2.1; EXPRESSED IN ADULT LIVER, SIGNAL = 2.3; EXPRESSED IN FETAL LIVER, SIGNAL = 2.4; EXPRESSED IN BRAIN, SIGNAL =   2; EXPRESSED IN BONE MARROW, SIGNAL =   2; EXPRESSED IN HEART, SIGNAL = 1.8; SWISSPROT HIT: P15113, EVALUE 5.10e+00
ARSWISSLFGSCGCGEQC

SEQ ID NO: 40861 - protein, 59 aa, Homo sapiens
  MAP TO AC007957.34; EXPRESSED IN PLACENTA, SIGNAL = 2.7; EXPRESSED IN ADULT LIVER, SIGNAL = 1.6; EXPRESSED IN HELA, SIGNAL = 2.8; EXPRESSED IN BRAIN, SIGNAL = 1.4; EXPRESSED IN BONE MARROW, SIGNAL = 1.2; EXPRESSED IN LUNG, SIGNAL = 2.2; EXPRESSED IN HEART, SIGNAL = 1.5; EXPRESSED IN FETAL LIVER, SIGNAL = 2.1; SWISSPROT HIT: P35709, EVALUE 8.70e-01; EST_HUMAN HIT: AW958311.1, EVALUE 5.00e-33
WLRWRWGQSRLIGGGVLRPKGTCLLWPTSRTFRGSPSPRVPPWCSRGTPRDSHCGLQRS

SEQ ID NO: 40862 - protein, 24 aa, Homo sapiens
  MAP TO AC016575.4; EXPRESSED IN LUNG, SIGNAL = 1.9; EXPRESSED IN PLACENTA, SIGNAL = 1.5; EXPRESSED IN HEART, SIGNAL = 1.7; EXPRESSED IN BRAIN, SIGNAL = 1.5; EXPRESSED IN FETAL LIVER, SIGNAL = 1.7; EXPRESSED IN ADULT LIVER, SIGNAL = 1.6; EXPRESSED IN BONE MARROW, SIGNAL = 1.5; EST_HUMAN HIT: AA084416.1, EVALUE 8.10e+00
WRSWRPLSPTFTPRFMCIWQKQTQ

SEQ ID NO: 40863 - protein, 58 aa, Homo sapiens
  MAP TO AL132866.21; EXPRESSED IN LUNG, SIGNAL =   3; EXPRESSED IN PLACENTA, SIGNAL = 2.6; EXPRESSED IN HELA, SIGNAL = 2.5; EXPRESSED IN HEART, SIGNAL = 2.5; EXPRESSED IN BRAIN, SIGNAL = 2.9; EXPRESSED IN FETAL LIVER, SIGNAL = 2.5; EXPRESSED IN ADULT LIVER, SIGNAL = 2.6; EXPRESSED IN BONE MARROW, SIGNAL = 3.1; EST_HUMAN HIT: BF675939.1, EVALUE 4.10e-01; SWISSPROT HIT: P33600, EVALUE 9.10e-01
TQHGETALRRALSVTWGEAGPTGRSTKRIIQEQGARSYVERMGPGFHKHDGSLWAEPV

SEQ ID NO: 40864 - protein, 26 aa, Homo sapiens
  MAP TO AC022392.3; EXPRESSED IN PLACENTA, SIGNAL =   1; EXPRESSED IN ADULT LIVER, SIGNAL = 1.2; EXPRESSED IN BONE MARROW, SIGNAL = 1.1; EXPRESSED IN LUNG, SIGNAL = 1.3; EXPRESSED IN HEART, SIGNAL = 1.2; EXPRESSED IN FETAL LIVER, SIGNAL = 1.1; EXPRESSED IN BRAIN, SIGNAL =   1; EST_HUMAN HIT: BF673213.1, EVALUE 6.10e+00
IYPMELIRNMGTNIYMKIPITVLYIT

SEQ ID NO: 40865 - protein, 63 aa, Homo sapiens
  MAP TO AC016549.4; EXPRESSED IN ADULT LIVER, SIGNAL = 3.5; EXPRESSED IN HELA, SIGNAL = 3.8; EXPRESSED IN LUNG, SIGNAL = 3.6; EXPRESSED IN PLACENTA, SIGNAL = 3.2; EXPRESSED IN BRAIN, SIGNAL = 2.9; EXPRESSED IN BONE MARROW, SIGNAL = 2.9; EXPRESSED IN HEART, SIGNAL = 3.1; EXPRESSED IN FETAL LIVER, SIGNAL = 2.8; EST_HUMAN HIT: AI829175.1, EVALUE 7.00e-30; SWISSPROT HIT: O75962, EVALUE 7.00e-31
FDENIESQGELILQESFQVWDPKTLIRKGRERHLFLFEMSLVFSKEVKDSSGRSKYLYKSKLF

SEQ ID NO: 40866 - protein, 25 aa, Homo sapiens
  MAP TO AC016549.4; EXPRESSED IN ADULT LIVER, SIGNAL = 3.5; EXPRESSED IN HELA, SIGNAL = 3.8; EXPRESSED IN LUNG, SIGNAL = 3.6; EXPRESSED IN PLACENTA, SIGNAL = 3.2; EXPRESSED IN BRAIN, SIGNAL = 2.9; EXPRESSED IN BONE MARROW, SIGNAL = 2.9; EXPRESSED IN HEART, SIGNAL = 3.1; EXPRESSED IN FETAL LIVER, SIGNAL = 2.8; EST_HUMAN HIT: AW503007.1, EVALUE 1.00e-07
GLMKTLSLRENSSYRNPSKCGTQKP

SEQ ID NO: 40867 - protein, 39 aa, Homo sapiens
  MAP TO AL121828.6; EXPRESSED IN BONE MARROW, SIGNAL = 2.8; EXPRESSED IN PLACENTA, SIGNAL = 2.5; EXPRESSED IN ADULT LIVER, SIGNAL = 2.5; EXPRESSED IN HEART, SIGNAL = 2.1; EXPRESSED IN FETAL LIVER, SIGNAL = 2.4; EXPRESSED IN LUNG, SIGNAL = 2.7; EXPRESSED IN HELA, SIGNAL =   3; EXPRESSED IN BRAIN, SIGNAL = 2.9; EST_HUMAN HIT: BE465820.1, EVALUE 2.50e+00
ELPHSLQPSATITLISQQRRRRRRRRSRRRRRREEEEEN

SEQ ID NO: 40868 - protein, 63 aa, Homo sapiens
  MAP TO AL138934.2; EXPRESSED IN PLACENTA, SIGNAL = 1.3; EXPRESSED IN ADULT LIVER, SIGNAL =   3; EXPRESSED IN BRAIN, SIGNAL = 2.5; EXPRESSED IN BONE MARROW, SIGNAL = 4.7; EXPRESSED IN LUNG, SIGNAL = 2.9; EXPRESSED IN HEART, SIGNAL = 1.5; EXPRESSED IN FETAL LIVER, SIGNAL = 2.8; SWISSPROT HIT: P04027, EVALUE 9.00e-18; EST_HUMAN HIT: AW851794.1, EVALUE 4.00e-29
AQVDSLAAVVLQNRRGLDLLNAEKGGLCIFLNEECCFYLNQSGLVYDNIKKLKDRAQKLANQA

SEQ ID NO: 40869 - protein, 33 aa, Homo sapiens
  MAP TO AL162263.1; EXPRESSED IN LUNG, SIGNAL = 1.8; EXPRESSED IN PLACENTA, SIGNAL =   2; EXPRESSED IN HEART, SIGNAL = 1.7; EXPRESSED IN FETAL LIVER, SIGNAL = 1.8; EXPRESSED IN BRAIN, SIGNAL = 1.5; EXPRESSED IN BONE MARROW, SIGNAL = 1.4; EXPRESSED IN ADULT LIVER, SIGNAL = 2.6; EXPRESSED IN HELA, SIGNAL = 2.2; EST_HUMAN HIT: BE873882.1, EVALUE 2.00e+00
EAPKPQRDLQGPPRSGPASCHGPVSHSSDTCSR

SEQ ID NO: 40870 - protein, 59 aa, Homo sapiens
  MAP TO AP001442.1; EXPRESSED IN PLACENTA, SIGNAL = 1.8; EXPRESSED IN FETAL LIVER, SIGNAL =   2; EXPRESSED IN ADULT LIVER, SIGNAL = 4.3; EXPRESSED IN BRAIN, SIGNAL = 6.3; EXPRESSED IN BONE MARROW, SIGNAL =   2; EXPRESSED IN LUNG, SIGNAL = 3.3; EXPRESSED IN HEART, SIGNAL = 2.8; SWISSPROT HIT: Q95241, EVALUE 3.00e-29; EST_HUMAN HIT: BE167331.1, EVALUE 3.00e-28
ELLQKEQNYSDDVLANMISEPRISYGNDALMPSLTETKTTVELLPVNGEFSLDDLQPWH

SEQ ID NO: 40871 - protein, 57 aa, Homo sapiens
  MAP TO AL138796.2; EXPRESSED IN LUNG, SIGNAL =  12; EXPRESSED IN BONE MARROW, SIGNAL =  13; EXPRESSED IN HEART, SIGNAL = 4.3; EXPRESSED IN ADULT LIVER, SIGNAL = 8.8; EXPRESSED IN PLACENTA, SIGNAL = 4.2; EXPRESSED IN HELA, SIGNAL =  12; EXPRESSED IN FETAL LIVER, SIGNAL = 9.6; EXPRESSED IN BRAIN, SIGNAL = 6.8; SWISSPROT HIT: P12112, EVALUE 4.60e+00; EST_HUMAN HIT: AA503391.1, EVALUE 6.00e-24
LSRELLDEKEPEVLQDSLGRWYSTPSGYLELPDLGQPYSSAVYSLEEQYLGLALDLD

SEQ ID NO: 40872 - protein, 33 aa, Homo sapiens
  MAP TO AL138796.2; EXPRESSED IN LUNG, SIGNAL =  12; EXPRESSED IN BONE MARROW, SIGNAL =  13; EXPRESSED IN HEART, SIGNAL = 4.3; EXPRESSED IN ADULT LIVER, SIGNAL = 8.8; EXPRESSED IN PLACENTA, SIGNAL = 4.2; EXPRESSED IN HELA, SIGNAL =  12; EXPRESSED IN FETAL LIVER, SIGNAL = 9.6; EXPRESSED IN BRAIN, SIGNAL = 6.8; EST_HUMAN HIT: AL041585.1, EVALUE 3.00e-12
SAGSCWMRKSLKSCRTHWVDGIRLLQVILNCLT

SEQ ID NO: 40873 - protein, 44 aa, Homo sapiens [sequence omitted]

SEQ ID NO: 40874 - protein, 32 aa, Homo sapiens
  MAP TO AC022658.3; EXPRESSED IN HELA, SIGNAL =   3; EXPRESSED IN HEART, SIGNAL = 4.3; EXPRESSED IN FETAL LIVER, SIGNAL = 3.4; EXPRESSED IN BRAIN, SIGNAL = 3.7; EXPRESSED IN PLACENTA, SIGNAL = 3.9; EXPRESSED IN ADULT LIVER, SIGNAL = 3.1; EXPRESSED IN BONE MARROW, SIGNAL = 3.7; EXPRESSED IN LUNG, SIGNAL = 3.4
RSIRNRKMNTCVLSTQFGQILTFCSTASYSTK

SEQ ID NO: 40875 - protein, 31 aa, Homo sapiens
  MAP TO AL121772.12; EXPRESSED IN LUNG, SIGNAL = 4.6; EXPRESSED IN ADULT LIVER, SIGNAL = 4.7; EXPRESSED IN BRAIN, SIGNAL = 5.1; EXPRESSED IN BONE MARROW, SIGNAL = 4.8; EXPRESSED IN PLACENTA, SIGNAL = 3.9; EXPRESSED IN HELA, SIGNAL = 4.3; EXPRESSED IN HEART, SIGNAL = 5.2; EXPRESSED IN FETAL LIVER, SIGNAL = 4.1; SWISSPROT HIT: P53534, EVALUE 7.00e-12; EST_HUMAN HIT: BE893016.1, EVALUE 1.00e-10
VAIQLNDTHPALSIPELMRILVDVEKVDWDK

SEQ ID NO: 40876 - protein, 31 aa, Homo sapiens
  MAP TO AL109976.21; EXPRESSED IN LUNG, SIGNAL = 1.9; EXPRESSED IN HEART, SIGNAL = 1.5; EXPRESSED IN PLACENTA, SIGNAL = 1.6; EXPRESSED IN FETAL LIVER, SIGNAL = 2.2; EXPRESSED IN BONE MARROW, SIGNAL = 1.9; EXPRESSED IN ADULT LIVER, SIGNAL = 1.8; EXPRESSED IN BRAIN, SIGNAL = 2.1; EST_HUMAN HIT: AW341547.1, EVALUE 3.00e-12
TQRCLRRRRTLSPIASGPCWSCRSTLAVWQL

SEQ ID NO: 40877 - protein, 32 aa, Homo sapiens
  MAP TO AL158175.6; EXPRESSED IN ADULT LIVER, SIGNAL = 1.9; EXPRESSED IN LUNG, SIGNAL = 1.7; EXPRESSED IN PLACENTA, SIGNAL = 1.7; EXPRESSED IN HEART, SIGNAL = 1.8; EXPRESSED IN FETAL LIVER, SIGNAL = 1.8; EXPRESSED IN BRAIN, SIGNAL = 1.6; EXPRESSED IN BONE MARROW, SIGNAL = 2.1
DPRLQRKPINLIKFLLKPTTKKTMTKELPTIL

SEQ ID NO: 40878 - protein, 56 aa, Homo sapiens
  MAP TO AF241726.1; EXPRESSED IN ADULT LIVER, SIGNAL = 0.84; EXPRESSED IN BRAIN, SIGNAL =   1; EXPRESSED IN PLACENTA, SIGNAL = 1.1; EXPRESSED IN FETAL LIVER, SIGNAL = 0.92; EXPRESSED IN BONE MARROW, SIGNAL = 1.3; EXPRESSED IN LUNG, SIGNAL = 1.2; EXPRESSED IN HEART, SIGNAL = 1.4
KSEEKDSKDEEEEEEDDETSDSSDGGDSSKSSIEDEIKDRDKNKEDDKDKDDEEDG

SEQ ID NO: 40879 - protein, 56 aa, Homo sapiens
  MAP TO AC009416.2; EXPRESSED IN ADULT LIVER, SIGNAL = 1.6; EXPRESSED IN BRAIN, SIGNAL = 1.5; EXPRESSED IN LUNG, SIGNAL = 1.6; EXPRESSED IN PLACENTA, SIGNAL = 1.3; EXPRESSED IN FETAL LIVER, SIGNAL = 1.9; EXPRESSED IN BONE MARROW, SIGNAL = 2.2; EXPRESSED IN HEART, SIGNAL = 1.4; EST_HUMAN HIT: AA720575.1, EVALUE 2.10e+00
QRVSRATLPLKTLSKNPSLPLPASGGSSFSLACGSMIPISGFVFTWPPFPRLWVFF

SEQ ID NO: 40880 - protein, 99 aa, Homo sapiens
  MAP TO AC022470.3; EXPRESSED IN BONE MARROW, SIGNAL = 1.5; EXPRESSED IN LUNG, SIGNAL = 1.2; EXPRESSED IN HEART, SIGNAL = 6.9; EXPRESSED IN PLACENTA, SIGNAL =   1; EXPRESSED IN ADULT LIVER, SIGNAL = 1.3; EXPRESSED IN FETAL LIVER, SIGNAL = 1.2; EXPRESSED IN BRAIN, SIGNAL = 1.8; EST_HUMAN HIT: AL041084.2, EVALUE 2.00e-23; SWISSPROT HIT: P27964, EVALUE 6.00e-01
MWRIFTGSLLVEEKSSALLHDLREIEAWIYRLLRSPVPVSGQKRVDIEVLPQELQPALTFALPDPSRFTLVDFPLHLPLELLGVDACLQVLTCILLEHK

SEQ ID NO: 40881 - protein, 64 aa, Homo sapiens
  MAP TO AC026156.2; EXPRESSED IN BONE MARROW, SIGNAL = 2.5; EXPRESSED IN ADULT LIVER, SIGNAL = 2.9; EXPRESSED IN BRAIN, SIGNAL = 3.3; EXPRESSED IN LUNG, SIGNAL = 2.7; EXPRESSED IN HELA, SIGNAL = 2.4; EXPRESSED IN HEART, SIGNAL = 1.9; EXPRESSED IN PLACENTA, SIGNAL = 2.3; EXPRESSED IN FETAL LIVER, SIGNAL =   2; EST_HUMAN HIT: AI983274.1, EVALUE 4.00e-32; SWISSPROT HIT: O75787, EVALUE 4.00e-33
KNPASPYNLAYKYNFEYSVVFNMVLWIMIALALAVIITSYNIWNMDPGYDSIIYRMTNQKIRMD

SEQ ID NO: 40882 - protein, 26 aa, Homo sapiens
  MAP TO AC026156.2; EXPRESSED IN BONE MARROW, SIGNAL = 2.5; EXPRESSED IN ADULT LIVER, SIGNAL = 2.9; EXPRESSED IN BRAIN, SIGNAL = 3.3; EXPRESSED IN LUNG, SIGNAL = 2.7; EXPRESSED IN HELA, SIGNAL = 2.4; EXPRESSED IN HEART, SIGNAL = 1.9; EXPRESSED IN PLACENTA, SIGNAL = 2.3; EXPRESSED IN FETAL LIVER, SIGNAL =   2; EST_HUMAN HIT: AI200275.1, EVALUE 4.00e-09
RTQQVPITLHISIILNIPWFSTWYFG

SEQ ID NO: 40883 - protein, 67 aa, Homo sapiens
  MAP TO AL133395.14; EXPRESSED IN BONE MARROW, SIGNAL = 2.4; EXPRESSED IN PLACENTA, SIGNAL = 2.4; EXPRESSED IN HELA, SIGNAL =   4; EXPRESSED IN HEART, SIGNAL = 2.1; EXPRESSED IN LUNG, SIGNAL = 1.6; EXPRESSED IN ADULT LIVER, SIGNAL = 1.8; EXPRESSED IN FETAL LIVER, SIGNAL = 2.2; EXPRESSED IN BRAIN, SIGNAL = 2.2; EST_HUMAN HIT: W72540.1, EVALUE 9.70e+00; SWISSPROT HIT: O60479, EVALUE 1.90e+00
GNARDTPEGHFLFGCNFEAYGVYTERPGSVLLVDPDVLEEHPKDITSNEDCATCGRVKLCDEFLTKG

SEQ ID NO: 40884 - protein, 32 aa, Homo sapiens
  MAP TO AL133395.14; EXPRESSED IN BONE MARROW, SIGNAL = 2.4; EXPRESSED IN PLACENTA, SIGNAL = 2.4; EXPRESSED IN HELA, SIGNAL =   4; EXPRESSED IN HEART, SIGNAL = 2.1; EXPRESSED IN LUNG, SIGNAL = 1.6; EXPRESSED IN ADULT LIVER, SIGNAL = 1.8; EXPRESSED IN FETAL LIVER, SIGNAL = 2.2; EXPRESSED IN BRAIN, SIGNAL = 2.2
GMLETLLKDISFLAVTLKHMECTQRDLAQFSW

SEQ ID NO: 40885 - protein, 44 aa, Homo sapiens
  MAP TO AL162387.2; EXPRESSED IN LUNG, SIGNAL = 4.6; EXPRESSED IN PLACENTA, SIGNAL = 5.6; EXPRESSED IN HEART, SIGNAL = 3.7; EXPRESSED IN FETAL LIVER, SIGNAL =   4; EXPRESSED IN ADULT LIVER, SIGNAL = 4.1; EXPRESSED IN BRAIN, SIGNAL = 3.8; EXPRESSED IN BONE MARROW, SIGNAL = 2.8; SWISSPROT HIT: P40426, EVALUE 1.30e-02; EST_HUMAN HIT: AU124432.1, EVALUE 1.60e-01
YKKNIGKFQEEANLYAAKTAVTAAHAVAAAVQNNQTNSPTTPNS

SEQ ID NO: 40886 - protein, 20 aa, Homo sapiens
  MAP TO AL162387.2; EXPRESSED IN LUNG, SIGNAL = 4.6; EXPRESSED IN PLACENTA, SIGNAL = 5.6; EXPRESSED IN HEART, SIGNAL = 3.7; EXPRESSED IN FETAL LIVER, SIGNAL =   4; EXPRESSED IN ADULT LIVER, SIGNAL = 4.1; EXPRESSED IN BRAIN, SIGNAL = 3.8; EXPRESSED IN BONE MARROW, SIGNAL = 2.8; EST_HUMAN HIT: T99152.1, EVALUE 9.00e-04
TRRTLASFRKKPTSMLQRRP

SEQ ID NO: 40887 - protein, 27 aa, Homo sapiens
  MAP TO AC022882.3; EXPRESSED IN ADULT LIVER, SIGNAL = 2.4; EXPRESSED IN BRAIN, SIGNAL =   2; EXPRESSED IN LUNG, SIGNAL = 2.6; EXPRESSED IN PLACENTA, SIGNAL = 2.1; EXPRESSED IN HELA, SIGNAL = 2.8; EXPRESSED IN FETAL LIVER, SIGNAL = 2.5; EXPRESSED IN HEART, SIGNAL = 2.4; EXPRESSED IN BONE MARROW, SIGNAL = 2.2
WQRGPRKPKAALLGTTRVEGATSPSLP

SEQ ID NO: 40888 - protein, 56 aa, Homo sapiens
  MAP TO AL162171.1; EXPRESSED IN BONE MARROW, SIGNAL = 3.4; EXPRESSED IN LUNG, SIGNAL = 3.7; EXPRESSED IN PLACENTA, SIGNAL = 3.2; EXPRESSED IN HEART, SIGNAL =   4; EXPRESSED IN ADULT LIVER, SIGNAL =   3; EXPRESSED IN FETAL LIVER, SIGNAL = 4.2; EXPRESSED IN BRAIN, SIGNAL = 3.8; EST_HUMAN HIT: BF087115.1, EVALUE 2.00e-27; SWISSPROT HIT: Q16825, EVALUE 2.00e-28
VTYFSLWYYNKQNQRRWVDLEKPLKKQLDKYALEPTVYFGVVFYVPSVSQLQQEIT

SEQ ID NO: 40889 - protein, 64 aa, Homo sapiens
  MAP TO AL162171.1; EXPRESSED IN BONE MARROW, SIGNAL = 3.4; EXPRESSED IN LUNG, SIGNAL = 3.7; EXPRESSED IN PLACENTA, SIGNAL = 3.2; EXPRESSED IN HEART, SIGNAL =   4; EXPRESSED IN ADULT LIVER, SIGNAL =   3; EXPRESSED IN FETAL LIVER, SIGNAL = 4.2; EXPRESSED IN BRAIN, SIGNAL = 3.8; EST_HUMAN HIT: BF087115.1, EVALUE 4.50e-02
FCCCSSLRRKAIRDCCHLVTGQGLVRLKSLKSFCMLLPPSMTFCLSRSLTSASGTTTSKISAGG

SEQ ID NO: 40890 - protein, 45 aa, Homo sapiens
  MAP TO AL133229.19; EXPRESSED IN FETAL LIVER, SIGNAL = 2.3; EXPRESSED IN PLACENTA, SIGNAL = 2.8; EXPRESSED IN ADULT LIVER, SIGNAL = 4.4; EXPRESSED IN HELA, SIGNAL = 4.2; EXPRESSED IN HEART, SIGNAL = 2.5; EXPRESSED IN BONE MARROW, SIGNAL = 2.1; EXPRESSED IN LUNG, SIGNAL = 2.6; EXPRESSED IN BRAIN, SIGNAL =   2; EST_HUMAN HIT: AI207491.1, EVALUE 3.10e+00; SWISSPROT HIT: P03361, EVALUE 8.20e+00
FQWRPCGDPVFLLLLSKQYQEVPYLWCQQKLSRNLNVHLQLAIMR

SEQ ID NO: 40891 - protein, 63 aa, Homo sapiens
  MAP TO AL161644.1; EXPRESSED IN PLACENTA, SIGNAL = 2.4; EXPRESSED IN HEART, SIGNAL = 2.2; EXPRESSED IN FETAL LIVER, SIGNAL = 2.6; EXPRESSED IN BONE MARROW, SIGNAL = 3.6; EXPRESSED IN LUNG, SIGNAL = 2.7; EXPRESSED IN ADULT LIVER, SIGNAL = 2.7; EXPRESSED IN BRAIN, SIGNAL = 5.2; EST_HUMAN HIT: AW373594.1, EVALUE 9.00e-35; SWISSPROT HIT: O36041, EVALUE 1.20e+00
DVLAPVLFLLSKTNKPDSGACPLPGGCSWPHSPHHPTETFVSCPGRHPNSLYIDMPFSFLPPL

SEQ ID NO: 40892 - protein, 49 aa, Homo sapiens
  MAP TO AC007009.2; EXPRESSED IN LUNG, SIGNAL = 1.5; EXPRESSED IN HEART, SIGNAL = 1.8; EXPRESSED IN FETAL LIVER, SIGNAL = 1.8; EXPRESSED IN ADULT LIVER, SIGNAL = 1.7; EXPRESSED IN BRAIN, SIGNAL = 1.8; EXPRESSED IN PLACENTA, SIGNAL = 1.7; EXPRESSED IN BONE MARROW, SIGNAL =   2; SWISSPROT HIT: Q46635, EVALUE 3.60e+00
ESKKEIETQVVMQPRAGASHPNRRKGRETLRCFMEEIALELSLKQPVGI

SEQ ID NO: 40893 - protein, 100 aa, Homo sapiens
  MAP TO AC009234.3; EXPRESSED IN LUNG, SIGNAL = 1.6; EXPRESSED IN FETAL LIVER, SIGNAL = 0.83; EXPRESSED IN BONE MARROW, SIGNAL = 1.3; EXPRESSED IN HEART, SIGNAL = 1.4; EXPRESSED IN PLACENTA, SIGNAL = 1.6; EXPRESSED IN ADULT LIVER, SIGNAL = 1.5; EXPRESSED IN BRAIN, SIGNAL = 1.1; EST_HUMAN HIT: BE348399.1, EVALUE 3.00e-23; SWISSPROT HIT: Q21313, EVALUE 9.00e-10
KEEYIATFKGSEYFCYDLSQNPIQSSSDEITLSFKTLQRNGLMLHTGKSADYVNLALKNGAVSLVINLGSGAFEALVEPVNGKFNDNAWHDVKVTRNLRQ

SEQ ID NO: 40894 - protein, 56 aa, Homo sapiens
  MAP TO AC021880.2; EXPRESSED IN BRAIN, SIGNAL = 7.7; EXPRESSED IN BONE MARROW, SIGNAL = 4.9; EXPRESSED IN LUNG, SIGNAL = 5.1; EXPRESSED IN HELA, SIGNAL = 3.1; EXPRESSED IN PLACENTA, SIGNAL = 3.4; EXPRESSED IN ADULT LIVER, SIGNAL = 4.6; EXPRESSED IN HEART, SIGNAL = 2.6; EXPRESSED IN FETAL LIVER, SIGNAL = 7.2; EST_HUMAN HIT: D54395.1, EVALUE 2.10e+00
NMATLQTPAPSGNLFYQPWSTPLCSLTSLSTASPWAASPSSCLQTSFQRQQKTFTL

SEQ ID NO: 40895 - protein, 49 aa, Homo sapiens
  MAP TO AL162458.1; EXPRESSED IN LUNG, SIGNAL = 3.1; EXPRESSED IN HEART, SIGNAL = 2.6; EXPRESSED IN FETAL LIVER, SIGNAL = 2.4; EXPRESSED IN PLACENTA, SIGNAL = 2.8; EXPRESSED IN ADULT LIVER, SIGNAL = 2.9; EXPRESSED IN BRAIN, SIGNAL = 3.5; EXPRESSED IN BONE MARROW, SIGNAL = 3.1; EST_HUMAN HIT: BF338749.1, EVALUE 2.00e-10; SWISSPROT HIT: Q04747, EVALUE 4.20e-01
LSSWRVGPQHLPRHARPPHQQVQYIISQDGVQHLLPQEYVVVPEGHHIQ

SEQ ID NO: 40896 - protein, 27 aa, Homo sapiens
  MAP TO AL162458.1; EXPRESSED IN LUNG, SIGNAL = 3.1; EXPRESSED IN HEART, SIGNAL = 2.6; EXPRESSED IN FETAL LIVER, SIGNAL = 2.4; EXPRESSED IN PLACENTA, SIGNAL = 2.8; EXPRESSED IN ADULT LIVER, SIGNAL = 2.9; EXPRESSED IN BRAIN, SIGNAL = 3.5; EXPRESSED IN BONE MARROW, SIGNAL = 3.1; EST_HUMAN HIT: BE905908.1, EVALUE 2.00e-08
CSISSPRMVSSTCSPRNMLWSLKAITS

SEQ ID NO: 40897 - protein, 45 aa, Homo sapiens
  MAP TO AC024736.2; EXPRESSED IN ADULT LIVER, SIGNAL = 0.81; EXPRESSED IN HEART, SIGNAL = 1.2; EXPRESSED IN BRAIN, SIGNAL = 0.77; EXPRESSED IN PLACENTA, SIGNAL = 0.78; EXPRESSED IN FETAL LIVER, SIGNAL = 0.63; EXPRESSED IN BONE MARROW, SIGNAL = 0.66; SWISSPROT HIT: P54670, EVALUE 3.60e+00
CDILDNITVKTLLISFDFVKISKEYMQRAVSCYEAEVYKSEDCKA

SEQ ID NO: 40898 - protein, 18 aa, Homo sapiens
  MAP TO AC022860.3; EXPRESSED IN HELA, SIGNAL = 2.7; EXPRESSED IN LUNG, SIGNAL = 2.5; EXPRESSED IN PLACENTA, SIGNAL = 2.2; EXPRESSED IN ADULT LIVER, SIGNAL = 2.7; EXPRESSED IN FETAL LIVER, SIGNAL = 2.4; EXPRESSED IN BRAIN, SIGNAL =   2; EXPRESSED IN BONE MARROW, SIGNAL = 2.1; EXPRESSED IN HEART, SIGNAL = 2.3
CTLWPSCAPSLGRAPCWT

SEQ ID NO: 40899 - protein, 43 aa, Homo sapiens
  MAP TO AC015599.3; EXPRESSED IN PLACENTA, SIGNAL = 3.2; EXPRESSED IN ADULT LIVER, SIGNAL = 2.8; EXPRESSED IN HEART, SIGNAL = 2.4; EXPRESSED IN BRAIN, SIGNAL = 3.1; EXPRESSED IN BONE MARROW, SIGNAL = 2.8; EXPRESSED IN LUNG, SIGNAL = 3.6; EXPRESSED IN FETAL LIVER, SIGNAL = 2.9; EST_HUMAN HIT: BE252356.1, EVALUE 2.00e-16
DRLDPTAVNILQQIIELGAETHDATALASVVAMAPGTVTVVKQ

SEQ ID NO: 40900 - protein, 68 aa, Homo sapiens
  MAP TO AC018938.3; EXPRESSED IN ADULT LIVER, SIGNAL = 8.1; EXPRESSED IN HELA, SIGNAL = 6.6; EXPRESSED IN BRAIN, SIGNAL =   7; EXPRESSED IN LUNG, SIGNAL = 7.7; EXPRESSED IN PLACENTA, SIGNAL =   7; EXPRESSED IN FETAL LIVER, SIGNAL = 7.2; EXPRESSED IN BONE MARROW, SIGNAL = 7.2; EXPRESSED IN HEART, SIGNAL = 8.3; SWISSPROT HIT: P03374, EVALUE 5.80e+00; EST_HUMAN HIT: BE513059.1, EVALUE 5.60e+00
VGEDMQPKDPAALGSSRSSPHRAAGHSSHKRKLSGPPLQLQPTPPLQLRWDRDEGPPPAKLPCLSPEA

SEQ ID NO: 40901 - protein, 36 aa, Homo sapiens
  MAP TO AC008572.6; EXPRESSED IN BRAIN, SIGNAL = 1.3; EXPRESSED IN LUNG, SIGNAL = 1.6; EXPRESSED IN PLACENTA, SIGNAL = 1.3; EXPRESSED IN ADULT LIVER, SIGNAL = 1.6; EXPRESSED IN HEART, SIGNAL = 1.3; EXPRESSED IN FETAL LIVER, SIGNAL = 1.3; EXPRESSED IN BONE MARROW, SIGNAL = 1.2; EST_HUMAN HIT: AA889581.1, EVALUE 1.00e-13; SWISSPROT HIT: P32468, EVALUE 4.90e+00
LVGLVLTYDFTNCDFEKIKAAYLSTISKDLITYMSG

SEQ ID NO: 40902 - protein, 106 aa, Homo sapiens
  MAP TO AL162458.1; EXPRESSED IN PLACENTA, SIGNAL = 1.2; EXPRESSED IN BONE MARROW, SIGNAL = 1.4; EXPRESSED IN ADULT LIVER, SIGNAL = 1.2; EXPRESSED IN HEART, SIGNAL = 1.2; EXPRESSED IN BRAIN, SIGNAL = 1.3; EXPRESSED IN LUNG, SIGNAL = 1.3; EXPRESSED IN FETAL LIVER, SIGNAL = 1.2; EST_HUMAN HIT: BE883843.1, EVALUE 1.00e-41; SWISSPROT HIT: P50030, EVALUE 4.60e+00
HRNMPQADAMVLVARNYERYKNECREKEREEIARQAAKMADEAILQERERGGPEEGVRGGHPPAIQSLINLLADNRYLTAEETDKIINYLRERKERLMRSSTDSLP

SEQ ID NO: 40903 - protein, 97 aa, Homo sapiens
  MAP TO AL162458.1; EXPRESSED IN PLACENTA, SIGNAL = 1.2; EXPRESSED IN BONE MARROW, SIGNAL = 1.4; EXPRESSED IN ADULT LIVER, SIGNAL = 1.2; EXPRESSED IN HEART, SIGNAL = 1.2; EXPRESSED IN BRAIN, SIGNAL = 1.3; EXPRESSED IN LUNG, SIGNAL = 1.3; EXPRESSED IN FETAL LIVER, SIGNAL = 1.2; EST_HUMAN HIT: BE883843.1, EVALUE 2.00e-54; SWISSPROT HIT: P03186, EVALUE 3.80e+00
SIATCPKQMPWCWWPEIMSVTRMSAGRRNVRRLPDRQPRWPMKPSCRKEREEALRRECVGATLQPSRASSTCWQTTGTSLLKRLTRSSTTCESGRSG

SEQ ID NO: 40904 - protein, 46 aa, Homo sapiens
  MAP TO AL121941.13; EXPRESSED IN BONE MARROW, SIGNAL = 1.2; EXPRESSED IN PLACENTA, SIGNAL = 1.1; EXPRESSED IN ADULT LIVER, SIGNAL = 1.2; EXPRESSED IN FETAL LIVER, SIGNAL = 1.1; EXPRESSED IN BRAIN, SIGNAL =   1; EXPRESSED IN LUNG, SIGNAL = 1.1; EXPRESSED IN HEART, SIGNAL = 1.2; SWISSPROT HIT: O53743, EVALUE 8.20e+00
WKWPAGCGIWTREGNSAERGRKQLGNRVPHSSSPTLALTTRTASST

SEQ ID NO: 40905 - protein, 32 aa, Homo sapiens
  MAP TO AC022796.3; EXPRESSED IN LUNG, SIGNAL =  10; EXPRESSED IN PLACENTA, SIGNAL = 8.5; EXPRESSED IN FETAL LIVER, SIGNAL = 8.5; EXPRESSED IN HEART, SIGNAL = 8.1; EXPRESSED IN ADULT LIVER, SIGNAL = 8.8; EXPRESSED IN HELA, SIGNAL = 9.3; EXPRESSED IN BRAIN, SIGNAL = 8.8; EXPRESSED IN BONE MARROW, SIGNAL = 9.2; EST_HUMAN HIT: BE964904.2, EVALUE 7.60e+00
TRLWLCFGCLLPWSRSPRNHKVTGTQCACLPF

SEQ ID NO: 40906 - protein, 36 aa, Homo sapiens
  MAP TO AL139352.8; EXPRESSED IN PLACENTA, SIGNAL = 2.7; EXPRESSED IN ADULT LIVER, SIGNAL = 1.5; EXPRESSED IN HELA, SIGNAL = 8.6; EXPRESSED IN FETAL LIVER, SIGNAL = 5.3; EXPRESSED IN BONE MARROW, SIGNAL = 7.6; EXPRESSED IN LUNG, SIGNAL = 0.89; EXPRESSED IN HEART, SIGNAL = 2.9; EXPRESSED IN BRAIN, SIGNAL = 8.6; EST_HUMAN HIT: BE179907.1, EVALUE 2.00e-04
MERTNGLFKTHLTKLSLQLKKEDSVKDTAQKLNNQA

SEQ ID NO: 40907 - protein, 36 aa, Homo sapiens
  MAP TO AL139352.8; EXPRESSED IN PLACENTA, SIGNAL = 2.7; EXPRESSED IN ADULT LIVER, SIGNAL = 1.5; EXPRESSED IN HELA, SIGNAL = 8.6; EXPRESSED IN FETAL LIVER, SIGNAL = 5.3; EXPRESSED IN BONE MARROW, SIGNAL = 7.6; EXPRESSED IN LUNG, SIGNAL = 0.89; EXPRESSED IN HEART, SIGNAL = 2.9; EXPRESSED IN BRAIN, SIGNAL = 8.6; EST_HUMAN HIT: BE179907.1, EVALUE 2.00e-06
WNGLMVFSRHTSPSSASNLKRRTLSRIQPKNSTTKQ

SEQ ID NO: 40908 - protein, 50 aa, Homo sapiens
  MAP TO AL161450.2; EXPRESSED IN LUNG, SIGNAL = 1.2; EXPRESSED IN PLACENTA, SIGNAL = 1.2; EXPRESSED IN FETAL LIVER, SIGNAL = 1.3; EXPRESSED IN BONE MARROW, SIGNAL = 1.1; EXPRESSED IN HEART, SIGNAL = 1.4; EXPRESSED IN ADULT LIVER, SIGNAL = 1.5; EXPRESSED IN BRAIN, SIGNAL = 1.2; SWISSPROT HIT: Q04301, EVALUE 1.60e+00
NTAAKARNLVTKNLLLSSTISWITAETITPKIINSPLYVTMCKNSTKTLY

SEQ ID NO: 40909 - protein, 37 aa, Homo sapiens
  MAP TO AC011292.2; EXPRESSED IN ADULT LIVER, SIGNAL = 3.1; EXPRESSED IN PLACENTA, SIGNAL = 3.8; EXPRESSED IN HELA, SIGNAL = 5.9; EXPRESSED IN FETAL LIVER, SIGNAL = 3.7; EXPRESSED IN BRAIN, SIGNAL = 4.6; EXPRESSED IN BONE MARROW, SIGNAL = 3.5; EXPRESSED IN LUNG, SIGNAL = 1.7; EXPRESSED IN HEART, SIGNAL = 3.4
LSPPHHHYHQHHHHHSHHHPHHHQQHHHITMTIITSP

SEQ ID NO: 40910 - protein, 58 aa, Homo sapiens
  MAP TO AC021498.4; EXPRESSED IN ADULT LIVER, SIGNAL = 1.5; EXPRESSED IN HELA, SIGNAL = 3.1; EXPRESSED IN BRAIN, SIGNAL =   1; EXPRESSED IN LUNG, SIGNAL = 1.5; EXPRESSED IN PLACENTA, SIGNAL = 1.1; EXPRESSED IN FETAL LIVER, SIGNAL =   2; EXPRESSED IN BONE MARROW, SIGNAL = 1.4; EXPRESSED IN HEART, SIGNAL = 1.4; SWISSPROT HIT: Q07662, EVALUE 3.50e+00; EST_HUMAN HIT: AV661106.1, EVALUE 5.40e-01
YYQENLSHSNSGFCISTITCLLSKTSDPPSMNLSSFVRSCGGSHILWPLHFSSEASVE

SEQ ID NO: 40911 - protein, 154 aa, Homo sapiens
  MAP TO AL158049.2; EXPRESSED IN LUNG, SIGNAL = 1.7; EXPRESSED IN PLACENTA, SIGNAL = 1.4; EXPRESSED IN HEART, SIGNAL = 1.6; EXPRESSED IN FETAL LIVER, SIGNAL = 1.6; EXPRESSED IN BRAIN, SIGNAL = 1.4; EXPRESSED IN ADULT LIVER, SIGNAL = 1.9; EXPRESSED IN BONE MARROW, SIGNAL = 3.5; EST_HUMAN HIT: AA344601.1, EVALUE 2.00e-44; SWISSPROT HIT: P77391, EVALUE 6.00e+00
YQTDKKYFLCKDKYYGRKLSVEGFRQALYQFLHNGSHLRRELLEPILHQLRALLSVIRSQSSYRFYSSSLLVIYDGQEPPERAPGSPHPHEAPQAAHGSSPGGLTKVDIRMIDFAHTTYKGYWNEHTTYDGPDPGYIFGLENLIRILQDIQEGE

SEQ ID NO: 40912 - protein, 107 aa, Homo sapiens
  MAP TO AL158049.2; EXPRESSED IN LUNG, SIGNAL = 1.7; EXPRESSED IN PLACENTA, SIGNAL = 1.4; EXPRESSED IN HEART, SIGNAL = 1.6; EXPRESSED IN FETAL LIVER, SIGNAL = 1.6; EXPRESSED IN BRAIN, SIGNAL = 1.4; EXPRESSED IN ADULT LIVER, SIGNAL = 1.9; EXPRESSED IN BONE MARROW, SIGNAL = 3.5; EST_HUMAN HIT: AA344601.1, EVALUE 7.00e-24
IRSTFSAKTSTMEENSQWRGSDKPSISSYIMEATSGGSSWSPSCTSSGPSSLSLGARVHTASIPALSLSSMMGRNHQKEPQAARILTRLPRQPTVALPVVSPRLTSA

SEQ ID NO: 40913 - protein, 24 aa, Homo sapiens
  MAP TO AL160492.1; EXPRESSED IN LUNG, SIGNAL = 3.5; EXPRESSED IN ADULT LIVER, SIGNAL = 3.5; EXPRESSED IN FETAL LIVER, SIGNAL = 3.7; EXPRESSED IN BRAIN, SIGNAL = 3.6; EXPRESSED IN HEART, SIGNAL =   4; EXPRESSED IN PLACENTA, SIGNAL = 3.5; EXPRESSED IN HELA, SIGNAL = 4.7; EXPRESSED IN BONE MARROW, SIGNAL = 4.1; EST_HUMAN HIT: BE745789.1, EVALUE 3.00e-07
KMGGKHWCGTSPLMSPLKAPTPTA

SEQ ID NO: 40914 - protein, 21 aa, Homo sapiens
  MAP TO AC010135.3; EXPRESSED IN LUNG, SIGNAL = 1.7; EXPRESSED IN ADULT LIVER, SIGNAL = 1.7; EXPRESSED IN FETAL LIVER, SIGNAL = 1.4; EXPRESSED IN BRAIN, SIGNAL = 1.5; EXPRESSED IN HEART, SIGNAL = 1.7; EXPRESSED IN PLACENTA, SIGNAL = 1.6; EXPRESSED IN BONE MARROW, SIGNAL = 1.4; EST_HUMAN HIT: AW937471.1, EVALUE 1.90e-01
HDGLDPGGNKFDTEVKNARPK

SEQ ID NO: 40915 - protein, 21 aa, Homo sapiens
  MAP TO AC010135.3; EXPRESSED IN LUNG, SIGNAL = 1.7; EXPRESSED IN ADULT LIVER, SIGNAL = 1.7; EXPRESSED IN FETAL LIVER, SIGNAL = 1.4; EXPRESSED IN BRAIN, SIGNAL = 1.5; EXPRESSED IN HEART, SIGNAL = 1.7; EXPRESSED IN PLACENTA, SIGNAL = 1.6; EXPRESSED IN BONE MARROW, SIGNAL = 1.4; EST_HUMAN HIT: AW937471.1, EVALUE 6.40e-02
AIMLQMVVQMEPQISSNHSFY

SEQ ID NO: 40916 - protein, 42 aa, Homo sapiens [sequence omitted]

SEQ ID NO: 40917 - protein, 60 aa, Homo sapiens
  MAP TO AC015638.4; EXPRESSED IN LUNG, SIGNAL = 1.7; EXPRESSED IN PLACENTA, SIGNAL = 1.6; EXPRESSED IN ADULT LIVER, SIGNAL = 1.8; EXPRESSED IN HEART, SIGNAL = 1.5; EXPRESSED IN FETAL LIVER, SIGNAL = 1.6; EXPRESSED IN BRAIN, SIGNAL = 1.4; EXPRESSED IN BONE MARROW, SIGNAL = 1.3; SWISSPROT HIT: P52538, EVALUE 3.50e+00; EST_HUMAN HIT: BE259693.1, EVALUE 1.20e+00
MERLHNGGDVTFHDVLRYKAGFRRAEWGPETTAVSLQGLCSTINKCVSNPKCHICCGREV

SEQ ID NO: 40918 - protein, 63 aa, Homo sapiens
  MAP TO AC021880.2; EXPRESSED IN HELA, SIGNAL = 5.5; EXPRESSED IN LUNG, SIGNAL = 4.1; EXPRESSED IN BRAIN, SIGNAL = 4.4; EXPRESSED IN BONE MARROW, SIGNAL = 4.4; EXPRESSED IN PLACENTA, SIGNAL = 4.1; EXPRESSED IN ADULT LIVER, SIGNAL = 4.3; EXPRESSED IN HEART, SIGNAL = 3.9; EXPRESSED IN FETAL LIVER, SIGNAL = 3.9; SWISSPROT HIT: P26013, EVALUE 3.70e-01; EST_HUMAN HIT: BF243985.1, EVALUE 6.00e-02
FSSAMLICATLQPFEEAMYKSLLCMAHVVSPHCSSPWVCISGCCLLTAYISAPPPPGTLHPMA

SEQ ID NO: 40919 - protein, 64 aa, Homo sapiens
  MAP TO AC021880.2; EXPRESSED IN HELA, SIGNAL = 5.5; EXPRESSED IN LUNG, SIGNAL = 4.1; EXPRESSED IN BRAIN, SIGNAL = 4.4; EXPRESSED IN BONE MARROW, SIGNAL = 4.4; EXPRESSED IN PLACENTA, SIGNAL = 4.1; EXPRESSED IN ADULT LIVER, SIGNAL = 4.3; EXPRESSED IN HEART, SIGNAL = 3.9; EXPRESSED IN FETAL LIVER, SIGNAL = 3.9; SWISSPROT HIT: P03400, EVALUE 2.70e+00; EST_HUMAN HIT: AW504116.1, EVALUE 5.30e-02
VSPLQCSSVPHCSLLKKPCTSHSFAWPMWCLPTALVPGFAFQGAACSPPTSLLHLLQGPCTPWQ

SEQ ID NO: 40920 - protein, 78 aa, Homo sapiens
  MAP TO AL132654.12; EXPRESSED IN LUNG, SIGNAL = 1.8; EXPRESSED IN PLACENTA, SIGNAL = 1.8; EXPRESSED IN HEART, SIGNAL = 1.6; EXPRESSED IN FETAL LIVER, SIGNAL =   2; EXPRESSED IN BRAIN, SIGNAL = 1.6; EXPRESSED IN BONE MARROW, SIGNAL = 1.7; EXPRESSED IN ADULT LIVER, SIGNAL = 1.6; EXPRESSED IN HELA, SIGNAL = 2.4; EST_HUMAN HIT: AW998520.1, EVALUE 6.60e+00
SASTPKIGAISSLQGALGMDLSGILQAGLIHPVTGQIVNGSLRRDDAATRRRRGRRKHVEGGMDLIFLKEQTLQAGIL

SEQ ID NO: 40921 - protein, 36 aa, Homo sapiens
  MAP TO AC008739.5; EXPRESSED IN HEART, SIGNAL = 1.6; EXPRESSED IN BONE MARROW, SIGNAL = 2.2; EXPRESSED IN LUNG, SIGNAL = 1.6; EXPRESSED IN PLACENTA, SIGNAL = 1.7; EXPRESSED IN ADULT LIVER, SIGNAL = 1.7; EXPRESSED IN FETAL LIVER, SIGNAL = 1.9; EXPRESSED IN BRAIN, SIGNAL = 2.2; EST_HUMAN HIT: AU139909.1, EVALUE 1.00e-14; SWISSPROT HIT: Q03923, EVALUE 1.00e-13
GPLTFRDVAIEFSLEEWQCLDTAQQDLYRKVMLENY

SEQ ID NO: 40922 - protein, 77 aa, Homo sapiens
  MAP TO AC020906.3; EXPRESSED IN LUNG, SIGNAL = 4.7; EXPRESSED IN PLACENTA, SIGNAL = 4.4; EXPRESSED IN ADULT LIVER, SIGNAL = 3.9; EXPRESSED IN HELA, SIGNAL = 4.1; EXPRESSED IN FETAL LIVER, SIGNAL = 4.6; EXPRESSED IN BRAIN, SIGNAL = 4.3; EXPRESSED IN BONE MARROW, SIGNAL = 4.4; EXPRESSED IN HEART, SIGNAL = 4.6; SWISSPROT HIT: P39191, EVALUE 2.40e+00; EST_HUMAN HIT: AA347237.1, EVALUE 1.70e-01
SSRFPLTVAFETACPWAPAPAIPWPVLTWACSPTASANQWPLPALGTSRDSKVPAEGAKRSGIHCVGTHACNPSTLG

SEQ ID NO: 40923 - protein, 60 aa, Homo sapiens
  MAP TO AC019281.4; EXPRESSED IN LUNG, SIGNAL = 1.3; EXPRESSED IN PLACENTA, SIGNAL = 1.1; EXPRESSED IN ADULT LIVER, SIGNAL = 5.7; EXPRESSED IN FETAL LIVER, SIGNAL = 1.9; EXPRESSED IN BRAIN, SIGNAL = 1.5; EXPRESSED IN BONE MARROW, SIGNAL = 1.4; EXPRESSED IN HEART, SIGNAL = 2.4; SWISSPROT HIT: P38806, EVALUE 4.60e+00; EST_HUMAN HIT: BF220156.1, EVALUE 1.00e-16
PKNRQEQRLLSFMFLRLLLLLPLMKLLRQKFPWLCVSLKEFPSRTWYESSTNCCARKRQG

SEQ ID NO: 40924 - protein, 50 aa, Homo sapiens
  MAP TO AC015914.3; EXPRESSED IN BONE MARROW, SIGNAL = 3.8; EXPRESSED IN PLACENTA, SIGNAL = 3.4; EXPRESSED IN ADULT LIVER, SIGNAL = 3.2; EXPRESSED IN HELA, SIGNAL = 3.6; EXPRESSED IN HEART, SIGNAL = 5.6; EXPRESSED IN BRAIN, SIGNAL = 6.1; EXPRESSED IN LUNG, SIGNAL = 4.3; EXPRESSED IN FETAL LIVER, SIGNAL = 4.8; SWISSPROT HIT: P53355, EVALUE 5.00e-17; EST_HUMAN HIT: AW603538.1, EVALUE 4.00e-21
LSGASPFLGDTKQETLANITAVSYDFDEEFFSQTSELAKDFIRKLLVKET

SEQ ID NO: 40925 - protein, 30 aa, Homo sapiens; identical to SEQ ID NO: 40396
  MAP TO AC013726.3; EXPRESSED IN BONE MARROW, SIGNAL = 7.9; EXPRESSED IN LUNG, SIGNAL = 7.9; EXPRESSED IN ADULT LIVER, SIGNAL = 8.7; EXPRESSED IN HEART, SIGNAL = 7.4; EXPRESSED IN FETAL LIVER, SIGNAL = 6.9; EXPRESSED IN BRAIN, SIGNAL = 6.9; EXPRESSED IN PLACENTA, SIGNAL = 7.7; EXPRESSED IN HELA, SIGNAL =  13; EST_HUMAN HIT: AW502172.1, EVALUE 3.50e+00

SEQ ID NO: 40926 - protein, 61 aa, Homo sapiens
  MAP TO AC015599.3; EXPRESSED IN ADULT LIVER, SIGNAL = 3.5; EXPRESSED IN HEART, SIGNAL = 3.2; EXPRESSED IN BRAIN, SIGNAL = 3.5; EXPRESSED IN BONE MARROW, SIGNAL = 3.3; EXPRESSED IN HELA, SIGNAL = 2.5; EXPRESSED IN LUNG, SIGNAL = 3.1; EXPRESSED IN PLACENTA, SIGNAL = 3.9; EXPRESSED IN FETAL LIVER, SIGNAL = 3.4; SWISSPROT HIT: P42846, EVALUE 1.20e-02; EST_HUMAN HIT: BE733922.1, EVALUE 6.00e-07
NESDLELEKKCKEDDREKASKRPRSQKTEKVQKISGKEARQLSGAKKPIISVVLTAHEAIP

SEQ ID NO: 40927 - protein, 35 aa, Homo sapiens
  MAP TO AC021115.3; EXPRESSED IN LUNG, SIGNAL = 1.6; EXPRESSED IN ADULT LIVER, SIGNAL = 1.4; EXPRESSED IN FETAL LIVER, SIGNAL =   1; EXPRESSED IN BRAIN, SIGNAL = 1.3; EXPRESSED IN PLACENTA, SIGNAL = 1.5; EXPRESSED IN HEART, SIGNAL = 1.3; EXPRESSED IN BONE MARROW, SIGNAL = 1.3
KEKHVNAGKALRQDPIHGKRYRNASPDDHEDFRDV

SEQ ID NO: 40928 - protein, 39 aa, Homo sapiens
  MAP TO AC025812.4; EXPRESSED IN BONE MARROW, SIGNAL = 1.4; EXPRESSED IN LUNG, SIGNAL = 1.7; EXPRESSED IN PLACENTA, SIGNAL = 1.7; EXPRESSED IN ADULT LIVER, SIGNAL = 1.9; EXPRESSED IN HEART, SIGNAL = 1.5; EXPRESSED IN FETAL LIVER, SIGNAL = 1.2; EXPRESSED IN BRAIN, SIGNAL = 1.3; SWISSPROT HIT: P37194, EVALUE 6.40e+00; EST_HUMAN HIT: BE733875.1, EVALUE 9.50e+00
SEHFHVTNAQIQKYSITNTSESTCRSLPGTLKGNQQPDF

SEQ ID NO: 40929 - protein, 51 aa, Homo sapiens
  MAP TO AL121772.12; EXPRESSED IN LUNG, SIGNAL = 1.6; EXPRESSED IN PLACENTA, SIGNAL = 1.2; EXPRESSED IN FETAL LIVER, SIGNAL = 1.2; EXPRESSED IN BRAIN, SIGNAL = 1.4; EXPRESSED IN BONE MARROW, SIGNAL = 1.2; EXPRESSED IN ADULT LIVER, SIGNAL = 1.5; EXPRESSED IN HEART, SIGNAL = 1.3; SWISSPROT HIT: Q10155, EVALUE 4.70e+00; EST_HUMAN HIT: AA360017.1, EVALUE 4.00e-23
GSHLEREGTCLIPSVSDPGDTAAEQPLLMHGPHLRQPATPGVRLSQEQSAE

SEQ ID NO: 40930 - protein, 99 aa, Homo sapiens
  MAP TO AL162458.1; EXPRESSED IN LUNG, SIGNAL = 1.6; EXPRESSED IN PLACENTA, SIGNAL = 1.7; EXPRESSED IN ADULT LIVER, SIGNAL = 1.3; EXPRESSED IN HEART, SIGNAL =   2; EXPRESSED IN FETAL LIVER, SIGNAL = 1.8; EXPRESSED IN BRAIN, SIGNAL = 1.9; EXPRESSED IN BONE MARROW, SIGNAL = 1.8; SWISSPROT HIT: Q09573, EVALUE 3.00e-05; EST_HUMAN HIT: H84860.1, EVALUE 5.00e-23
IMAGSNRSGDLRDAQKSIPTGTILAIATTSAVCILHSCAGTTLGGGQEGGQLNLLPYLLVQEGWGGGGLNRGDSPLSSAADISSVVLFGACIEGVVLRD

SEQ ID NO: 40931 - protein, 37 aa, Homo sapiens
  MAP TO AC019058.3; EXPRESSED IN PLACENTA, SIGNAL = 2.9; EXPRESSED IN LUNG, SIGNAL = 2.7; EXPRESSED IN HEART, SIGNAL = 3.3; EXPRESSED IN FETAL LIVER, SIGNAL =   3; EXPRESSED IN BONE MARROW, SIGNAL = 3.1; EXPRESSED IN ADULT LIVER, SIGNAL =   3; EXPRESSED IN BRAIN, SIGNAL = 2.9; SWISSPROT HIT: P27222, EVALUE 2.20e+00; EST_HUMAN HIT: AA526681.1, EVALUE 1.50e+00
EHGWSWKSSSLANTQEQKTNVKSLYGSTALPSLKMQT

SEQ ID NO: 40932 - protein, 71 aa, Homo sapiens
  MAP TO AC013627.3; EXPRESSED IN HEART, SIGNAL = 5.7; EXPRESSED IN FETAL LIVER, SIGNAL =   6; EXPRESSED IN BRAIN, SIGNAL = 6.4; EXPRESSED IN LUNG, SIGNAL = 8.2; EXPRESSED IN HELA, SIGNAL = 6.8; EXPRESSED IN PLACENTA, SIGNAL = 6.8; EXPRESSED IN ADULT LIVER, SIGNAL = 7.1; EXPRESSED IN BONE MARROW, SIGNAL = 7.1; SWISSPROT HIT: P13654, EVALUE 1.00e-01; EST_HUMAN HIT: AW160820.1, EVALUE 4.00e-27
QYKALVHSQAKELTQLREKLREGRDASRWLNKHLKTLLTPDDPDKSQGQDLREQLAEGHRLAEHLVHKLSP

SEQ ID NO: 40933 - protein, 27 aa, Homo sapiens
  MAP TO AC021079.2; EXPRESSED IN LUNG, SIGNAL =   2; EXPRESSED IN HEART, SIGNAL = 1.8; EXPRESSED IN PLACENTA, SIGNAL = 1.9; EXPRESSED IN FETAL LIVER, SIGNAL =   2; EXPRESSED IN BONE MARROW, SIGNAL = 2.1; EXPRESSED IN ADULT LIVER, SIGNAL = 1.8; EXPRESSED IN BRAIN, SIGNAL = 2.4
IQIQVLNESIATERKVFRNDNSSGRKP

SEQ ID NO: 40934 - protein, 35 aa, Homo sapiens; identical to SEQ ID NO: 38276
  MAP TO AL050342.42; EXPRESSED IN LUNG, SIGNAL = 0.94; EXPRESSED IN ADULT LIVER, SIGNAL = 0.8; EXPRESSED IN FETAL LIVER, SIGNAL = 1.1; EXPRESSED IN BRAIN, SIGNAL = 1.2; EXPRESSED IN HEART, SIGNAL = 1.2; EXPRESSED IN PLACENTA, SIGNAL = 1.3; EXPRESSED IN BONE MARROW, SIGNAL = 1.2; SWISSPROT HIT: P35258, EVALUE 2.20e+00; EST_HUMAN HIT: BF204009.1, EVALUE 9.80e+00

SEQ ID NO: 40935 - protein, 68 aa, Homo sapiens
  MAP TO AL050342.42; EXPRESSED IN LUNG, SIGNAL = 0.94; EXPRESSED IN ADULT LIVER, SIGNAL = 0.8; EXPRESSED IN FETAL LIVER, SIGNAL = 1.1; EXPRESSED IN BRAIN, SIGNAL = 1.2; EXPRESSED IN HEART, SIGNAL = 1.2; EXPRESSED IN PLACENTA, SIGNAL = 1.3; EXPRESSED IN BONE MARROW, SIGNAL = 1.2; EST_HUMAN HIT: BF344409.1, EVALUE 6.40e-01; SWISSPROT HIT: P39941, EVALUE 1.20e+00
WEVEQSVVSPTRPAPKVPLQCEDRTEKDVAQTWPSVSQELSPRSHPSRSAGGNGQGAKAAGPPTIRPI

SEQ ID NO: 40936 - protein, 81 aa, Homo sapiens
  MAP TO AC007000.2; EXPRESSED IN PLACENTA, SIGNAL = 1.8; EXPRESSED IN ADULT LIVER, SIGNAL = 0.99; EXPRESSED IN FETAL LIVER, SIGNAL = 1.3; EXPRESSED IN BRAIN, SIGNAL = 3.2; EXPRESSED IN LUNG, SIGNAL = 1.2; EXPRESSED IN HELA, SIGNAL = 2.6; EXPRESSED IN BONE MARROW, SIGNAL = 2.7; EXPRESSED IN HEART, SIGNAL = 1.3; EST_HUMAN HIT: AI760820.1, EVALUE 4.00e-30
YLANDMEEDDEDPKQNIFYFLYGKTRSRIPLVRNRRFQLCRCLNPRARKNRSQIALFQKLRFQFFCSMSGRAWVSREELEE

SEQ ID NO: 40937 - protein, 62 aa, Homo sapiens
  MAP TO AL121903.13; EXPRESSED IN PLACENTA, SIGNAL = 1.8; EXPRESSED IN ADULT LIVER, SIGNAL = 2.3; EXPRESSED IN HELA, SIGNAL = 2.3; EXPRESSED IN HEART, SIGNAL = 1.7; EXPRESSED IN FETAL LIVER, SIGNAL = 1.8; EXPRESSED IN LUNG, SIGNAL = 1.7; EXPRESSED IN BRAIN, SIGNAL = 1.9; EXPRESSED IN BONE MARROW, SIGNAL = 1.7; EST_HUMAN HIT: BF338413.1, EVALUE 9.00e-18
QDTLDADIHIETEDQGMYKYMSSQHLFKLLDCLQESHSFSKAFNSNYEQRTVLWRAGKATQQ

SEQ ID NO: 40938 - protein, 55 aa, Homo sapiens
  MAP TO AC011226.3; EXPRESSED IN BRAIN, SIGNAL = 1.2; EXPRESSED IN PLACENTA, SIGNAL = 1.7; EXPRESSED IN ADULT LIVER, SIGNAL = 1.4; EXPRESSED IN FETAL LIVER, SIGNAL = 1.1; EXPRESSED IN LUNG, SIGNAL = 1.4; EXPRESSED IN HEART, SIGNAL = 1.4; EXPRESSED IN BONE MARROW, SIGNAL = 1.2; EST_HUMAN HIT: W57973.1, EVALUE 6.30e+00; SWISSPROT HIT: P41001, EVALUE 1.20e+00
MYSTKVEKFCFRCLKKFENLCFRKKLSLETFKQEINMVDPFSLFPLAILNTAVET

SEQ ID NO: 40939 - protein, 45 aa, Homo sapiens
  MAP TO AC018730.3; EXPRESSED IN HELA, SIGNAL = 5.3; EXPRESSED IN LUNG, SIGNAL = 6.9; EXPRESSED IN PLACENTA, SIGNAL = 6.8; EXPRESSED IN HEART, SIGNAL = 6.3; EXPRESSED IN ADULT LIVER, SIGNAL = 7.4; EXPRESSED IN FETAL LIVER, SIGNAL = 6.3; EXPRESSED IN BRAIN, SIGNAL = 6.8; EXPRESSED IN BONE MARROW, SIGNAL = 6.5; EST_HUMAN HIT: AI695189.1, EVALUE 9.00e-07; SWISSPROT HIT: Q02805, EVALUE 2.80e+00
CKVQDANAEASAFLIEINVKPTVRILHPGGHMGELQALRPAALRS

SEQ ID NO: 40940 - protein, 46 aa, Homo sapiens
  MAP TO AC022609.2; EXPRESSED IN PLACENTA, SIGNAL = 1.7; EXPRESSED IN ADULT LIVER, SIGNAL = 2.1; EXPRESSED IN FETAL LIVER, SIGNAL = 1.4; EXPRESSED IN BONE MARROW, SIGNAL = 1.6; EXPRESSED IN LUNG, SIGNAL = 1.7; EXPRESSED IN HEART, SIGNAL = 1.5; EXPRESSED IN BRAIN, SIGNAL = 1.4; EST_HUMAN HIT: AA846545.1, EVALUE 2.30e+00; SWISSPROT HIT: P29617, EVALUE 6.20e+00
VAGAKMSRAGSGKSADRSSDGRRKHQCQRENTVSGHQALRGLPRHG

SEQ ID NO: 40941 - protein, 38 aa, Homo sapiens
  MAP TO AL139819.2; EXPRESSED IN LUNG, SIGNAL = 3.9; EXPRESSED IN ADULT LIVER, SIGNAL = 4.3; EXPRESSED IN HEART, SIGNAL = 2.6; EXPRESSED IN FETAL LIVER, SIGNAL = 4.7; EXPRESSED IN BRAIN, SIGNAL = 4.8; EXPRESSED IN PLACENTA, SIGNAL = 4.7; EXPRESSED IN BONE MARROW, SIGNAL = 4.5; EXPRESSED IN HELA, SIGNAL =   5; EST_HUMAN HIT: AA308744.1, EVALUE 9.70e-02
WSKRLLRRLGSISFQPLSREHLGRSQRVLGQSSSSSGS

SEQ ID NO: 40942 - protein, 73 aa, Homo sapiens
  MAP TO AL139258.2; EXPRESSED IN PLACENTA, SIGNAL = 5.2; EXPRESSED IN ADULT LIVER, SIGNAL = 3.8; EXPRESSED IN HELA, SIGNAL = 7.5; EXPRESSED IN BRAIN, SIGNAL =   5; EXPRESSED IN BONE MARROW, SIGNAL = 5.2; EXPRESSED IN LUNG, SIGNAL = 3.7; EXPRESSED IN HEART, SIGNAL = 7.5; EXPRESSED IN FETAL LIVER, SIGNAL = 3.3; SWISSPROT HIT: Q9WWR2, EVALUE 6.40e+00
LVQRTEGTLIFHVASQQALVCPVPIAAEDISFPDICQITFYLVPDIYSVKMGHSHDPRDQTDPHRQDRLGKAQ

SEQ ID NO: 40943 - protein, 42 aa, Homo sapiens
  MAP TO AL139258.2; EXPRESSED IN PLACENTA, SIGNAL = 5.2; EXPRESSED IN ADULT LIVER, SIGNAL = 3.8; EXPRESSED IN HELA, SIGNAL = 7.5; EXPRESSED IN BRAIN, SIGNAL =   5; EXPRESSED IN BONE MARROW, SIGNAL = 5.2; EXPRESSED IN LUNG, SIGNAL = 3.7; EXPRESSED IN HEART, SIGNAL = 7.5; EXPRESSED IN FETAL LIVER, SIGNAL = 3.3; SWISSPROT HIT: P43365, EVALUE 6.30e+00; EST_HUMAN HIT: BF330567.1, EVALUE 2.40e+00
VLCRGQRGPSSFMSLPSKPLCVLCQLQLKIFHFLIFAKSPFT

SEQ ID NO: 40944 - protein, 29 aa, Homo sapiens
  MAP TO AL137248.4; EXPRESSED IN PLACENTA, SIGNAL = 0.81; EXPRESSED IN ADULT LIVER, SIGNAL = 1.1; EXPRESSED IN HEART, SIGNAL = 1.3; EXPRESSED IN BRAIN, SIGNAL = 1.1; EXPRESSED IN BONE MARROW, SIGNAL = 1.1; EXPRESSED IN FETAL LIVER, SIGNAL = 1.1; EST_HUMAN HIT: AW875651.1, EVALUE 2.10e-02
RFVVIKHLLIMKQWRNSLLILPGSSLIKI

SEQ ID NO: 40945 - protein, 50 aa, Homo sapiens
  MAP TO AC008812.4; EXPRESSED IN PLACENTA, SIGNAL = 1.2; EXPRESSED IN ADULT LIVER, SIGNAL = 1.1; EXPRESSED IN HEART, SIGNAL = 1.2; EXPRESSED IN FETAL LIVER, SIGNAL = 1.8; EXPRESSED IN BONE MARROW, SIGNAL = 1.3; EXPRESSED IN LUNG, SIGNAL = 1.3; EXPRESSED IN BRAIN, SIGNAL = 1.2; SWISSPROT HIT: P26717, EVALUE 6.00e-07; EST_HUMAN HIT: H90968.1, EVALUE 2.00e-25
RLCRHCPKDWTFFQGNCYFMSNSQRNWHDSVTACQEVRAQLVVIKTAEEQ

SEQ ID NO: 40946 - protein, 37 aa, Homo sapiens
  MAP TO AC008812.4; EXPRESSED IN PLACENTA, SIGNAL = 1.2; EXPRESSED IN ADULT LIVER, SIGNAL = 1.1; EXPRESSED IN HEART, SIGNAL = 1.2; EXPRESSED IN FETAL LIVER, SIGNAL = 1.8; EXPRESSED IN BONE MARROW, SIGNAL = 1.3; EXPRESSED IN LUNG, SIGNAL = 1.3; EXPRESSED IN BRAIN, SIGNAL = 1.2; EST_HUMAN HIT: R98113.1, EVALUE 3.00e-06
NACAATVPRTGHSSKETVTSCLTPSGTGTTPSPPARK

SEQ ID NO: 40947 - protein, 65 aa, Homo sapiens
  MAP TO AL138796.2; EXPRESSED IN LUNG, SIGNAL = 1.1; EXPRESSED IN PLACENTA, SIGNAL = 0.77; EXPRESSED IN HEART, SIGNAL = 2.8; EXPRESSED IN FETAL LIVER, SIGNAL =   2; EXPRESSED IN BRAIN, SIGNAL = 1.3; EXPRESSED IN ADULT LIVER, SIGNAL = 1.1; EXPRESSED IN BONE MARROW, SIGNAL = 1.6; SWISSPROT HIT: P49574, EVALUE 3.00e-01; EST_HUMAN HIT: AI750447.1, EVALUE 7.00e-30
DLSATLLCKLGPGQSEIAEELCQRLQRKERMLQDLLSDRNKQVLEHEMEIQGLLQSVSTREQESQ

SEQ ID NO: 40948 - protein, 57 aa, Homo sapiens
  MAP TO AC011207.3; EXPRESSED IN PLACENTA, SIGNAL =  12; EXPRESSED IN ADULT LIVER, SIGNAL =  13; EXPRESSED IN HELA, SIGNAL =  16; EXPRESSED IN BRAIN, SIGNAL =  12; EXPRESSED IN BONE MARROW, SIGNAL =  14; EXPRESSED IN LUNG, SIGNAL =  12; EXPRESSED IN HEART, SIGNAL =  12; EXPRESSED IN FETAL LIVER, SIGNAL =  14
LLYYQCLMMLTMLKKKKEEELEEEEENIQSIQFILVKLLTRKRMPSEVYFIMLFGSK

SEQ ID NO: 40949 - protein, 25 aa, Homo sapiens
  MAP TO AC016535.3; EXPRESSED IN PLACENTA, SIGNAL = 1.4; EXPRESSED IN BRAIN, SIGNAL = 1.4; EXPRESSED IN BONE MARROW, SIGNAL = 1.3; EXPRESSED IN LUNG, SIGNAL = 1.8; EXPRESSED IN ADULT LIVER, SIGNAL = 1.5; EXPRESSED IN HEART, SIGNAL = 1.4; EXPRESSED IN FETAL LIVER, SIGNAL = 1.2
TPDTHPLIFYDSDLRAMTAELLQIL

SEQ ID NO: 40950 - protein, 28 aa, Homo sapiens
  MAP TO AL136438.8; EXPRESSED IN LUNG, SIGNAL = 1.3; EXPRESSED IN PLACENTA, SIGNAL = 1.1; EXPRESSED IN FETAL LIVER, SIGNAL = 1.1; EXPRESSED IN BONE MARROW, SIGNAL = 1.2; EXPRESSED IN ADULT LIVER, SIGNAL = 1.3; EXPRESSED IN HEART, SIGNAL = 1.3; EXPRESSED IN BRAIN, SIGNAL = 1.2
PSRKTGLEMVISGHGLSILMGREWRRGK

SEQ ID NO: 40951 - protein, 59 aa, Homo sapiens
  MAP TO AC025738.1; EXPRESSED IN PLACENTA, SIGNAL = 1.6; EXPRESSED IN ADULT LIVER, SIGNAL = 1.6; EXPRESSED IN FETAL LIVER, SIGNAL = 1.5; EXPRESSED IN BRAIN, SIGNAL = 1.6; EXPRESSED IN BONE MARROW, SIGNAL = 1.5; EXPRESSED IN LUNG, SIGNAL = 1.5; EXPRESSED IN HEART, SIGNAL = 1.4; SWISSPROT HIT: P22146, EVALUE 1.60e+00
STDESEVDKTHCLNNSVSSGTYSDYSPSQASSGSSNTRVKVGSLQTTAKDAVHNSLWGN

SEQ ID NO: 40952 - protein, 78 aa, Homo sapiens
  MAP TO AL109824.21; EXPRESSED IN LUNG, SIGNAL =  13; EXPRESSED IN HELA, SIGNAL = 6.5; EXPRESSED IN BRAIN, SIGNAL =  16; EXPRESSED IN PLACENTA, SIGNAL = 8.4; EXPRESSED IN ADULT LIVER, SIGNAL =  13; EXPRESSED IN HEART, SIGNAL =  12; EXPRESSED IN FETAL LIVER, SIGNAL =  14; EXPRESSED IN BONE MARROW, SIGNAL =  16; EST_HUMAN HIT: BE694952.1, EVALUE 1.00e-05
AAAAATTTTAAAAAAAATTATAATTVAGKTPTATSAATATGNSTPVYCPNSGACSSRLEPAAFWSPSTSSSPGFSGHN

SEQ ID NO: 40953 - protein, 46 aa, Homo sapiens
  MAP TO AP001435.1; EXPRESSED IN ADULT LIVER, SIGNAL = 0.86; EXPRESSED IN BONE MARROW, SIGNAL = 0.97; EXPRESSED IN PLACENTA, SIGNAL = 0.72; EXPRESSED IN HEART, SIGNAL = 1.2; EXPRESSED IN FETAL LIVER, SIGNAL = 1.4; EXPRESSED IN BRAIN, SIGNAL =   1; EST_HUMAN HIT: BE960738.1, EVALUE 8.00e-10; SWISSPROT HIT: P00520, EVALUE 1.10e-01
VSGFGAFHKGSSPGSDRQPVAAISPAPRSPAGSAWRASAPPESASS

SEQ ID NO: 40954 - protein, 185 aa, Homo sapiens
  MAP TO AL117381.9; EXPRESSED IN PLACENTA, SIGNAL = 0.99; EXPRESSED IN FETAL LIVER, SIGNAL = 3.5; EXPRESSED IN LUNG, SIGNAL =   2; EXPRESSED IN BRAIN, SIGNAL = 1.6; EXPRESSED IN BONE MARROW, SIGNAL = 4.7; EXPRESSED IN ADULT LIVER, SIGNAL = 1.7; EXPRESSED IN HEART, SIGNAL = 1.4; EST_HUMAN HIT: BE207063.1, EVALUE 9.00e-98; SWISSPROT HIT: Q07817, EVALUE 1.00e-106
SNRELVVDFLSYKLSQKGYSWSQFSDVEENRTEAPEGTESEMETPSAINGNPSWHLADSPAVNGATGHSSSLDAREVIPMAAVKQALREAGDEFELRYRRAFSDLTSQLHITPGTAYQSFEQVVNELFRDGVNWGRIVAFFSFGGALCVESVDKEMQVLVSRIAAWMATYLNDHLEPWIQENGGW

SEQ ID NO: 40955 - protein, 61 aa, Homo sapiens
  MAP TO AL117381.9; EXPRESSED IN PLACENTA, SIGNAL = 0.99; EXPRESSED IN FETAL LIVER, SIGNAL = 3.5; EXPRESSED IN LUNG, SIGNAL =   2; EXPRESSED IN BRAIN, SIGNAL = 1.6; EXPRESSED IN BONE MARROW, SIGNAL = 4.7; EXPRESSED IN ADULT LIVER, SIGNAL = 1.7; EXPRESSED IN HEART, SIGNAL = 1.4; SWISSPROT HIT: P25919, EVALUE 7.80e+00; EST_HUMAN HIT: BE909419.1, EVALUE 7.00e-33
ATGSWWLTFSPTSFPRKDTAGVSLVMWKRTGLRPQKGLNRRWRPPVPSMATHPGTWQTAPR

SEQ ID NO: 40956 - protein, 70 aa, Homo sapiens
  MAP TO AC019222.3; EXPRESSED IN LUNG, SIGNAL = 1.4; EXPRESSED IN PLACENTA, SIGNAL = 1.7; EXPRESSED IN FETAL LIVER, SIGNAL = 1.7; EXPRESSED IN BONE MARROW, SIGNAL = 1.6; EXPRESSED IN ADULT LIVER, SIGNAL = 1.5; EXPRESSED IN HEART, SIGNAL = 2.3; EXPRESSED IN BRAIN, SIGNAL = 2.2; SWISSPROT HIT: P98155, EVALUE 1.00e-35; EST_HUMAN HIT: BE746631.1, EVALUE 1.00e-34
ASIDDKVGRHVKMIDNVYNPAAIAVDWVYKTIYWTDAASKTISVATLDGTKRKFLFNSDLREPASIAVDP

SEQ ID NO: 40957 - protein, 33 aa, Homo sapiens
  MAP TO AC008166.2; EXPRESSED IN ADULT LIVER, SIGNAL = 1.4; EXPRESSED IN PLACENTA, SIGNAL = 1.2; EXPRESSED IN HELA, SIGNAL = 2.6; EXPRESSED IN HEART, SIGNAL = 1.6; EXPRESSED IN BRAIN, SIGNAL = 1.7; EXPRESSED IN BONE MARROW, SIGNAL =   2; EXPRESSED IN LUNG, SIGNAL = 1.2; EXPRESSED IN FETAL LIVER, SIGNAL = 1.9; EST_HUMAN HIT: H11838.1, EVALUE 5.00e-09
LQAEEQGEPIQVPKLKNSESDVQGQEASSMGEK

SEQ ID NO: 40958 - protein, 48 aa, Homo sapiens
  MAP TO AC010458.2; EXPRESSED IN HEART, SIGNAL =  26; EXPRESSED IN BONE MARROW, SIGNAL = 0.99; EXPRESSED IN ADULT LIVER, SIGNAL =   1; EXPRESSED IN BRAIN, SIGNAL = 1.1; EXPRESSED IN LUNG, SIGNAL = 1.7; EXPRESSED IN PLACENTA, SIGNAL = 0.93; EXPRESSED IN FETAL LIVER, SIGNAL =   1; SWISSPROT HIT: P55202, EVALUE 4.20e-01
MDSGNLEMDEEELHLDWMWRVRRIRDDIKGSSFCNLVDGGVFSGEENK

SEQ ID NO: 40959 - protein, 20 aa, Homo sapiens
  MAP TO AC010458.2; EXPRESSED IN HEART, SIGNAL =  26; EXPRESSED IN BONE MARROW, SIGNAL = 0.99; EXPRESSED IN ADULT LIVER, SIGNAL =   1; EXPRESSED IN BRAIN, SIGNAL = 1.1; EXPRESSED IN LUNG, SIGNAL = 1.7; EXPRESSED IN PLACENTA, SIGNAL = 0.93; EXPRESSED IN FETAL LIVER, SIGNAL =   1
WTLETWRWMKKNYTWIGCGE

SEQ ID NO: 40960 - protein, 46 aa, Homo sapiens
  MAP TO AL121890.13; EXPRESSED IN ADULT LIVER, SIGNAL = 2.8; EXPRESSED IN LUNG, SIGNAL = 2.4; EXPRESSED IN PLACENTA, SIGNAL = 1.5; EXPRESSED IN FETAL LIVER, SIGNAL = 2.5; EXPRESSED IN BRAIN, SIGNAL = 2.8; EXPRESSED IN BONE MARROW, SIGNAL = 2.3; EXPRESSED IN HEART, SIGNAL =   2; SWISSPROT HIT: P48569, EVALUE 6.20e+00; EST_HUMAN HIT: AV762094.1, EVALUE 4.00e-21
GADRAVPVLIIGILVFLPGFYHLRIAYYASKGYRGYSYDDIPDFDD

SEQ ID NO: 40961 - protein, 60 aa, Homo sapiens
  MAP TO AL162390.2; EXPRESSED IN ADULT LIVER, SIGNAL = 1.2; EXPRESSED IN PLACENTA, SIGNAL = 1.1; EXPRESSED IN HEART, SIGNAL = 1.2; EXPRESSED IN BRAIN, SIGNAL = 1.2; EXPRESSED IN BONE MARROW, SIGNAL = 1.4; EXPRESSED IN LUNG, SIGNAL = 1.2; EXPRESSED IN FETAL LIVER, SIGNAL = 1.2; EST_HUMAN HIT: BE081553.1, EVALUE 3.10e-01; SWISSPROT HIT: O13710, EVALUE 7.00e-14
EDYDKYGIRIRVKFRSSTQLHELTPHHQSGGERSVSTMLYLMALQELNRCPFRVVDEINQ

SEQ ID NO: 40962 - protein, 22 aa, Homo sapiens
  MAP TO AL162390.2; EXPRESSED IN ADULT LIVER, SIGNAL = 1.2; EXPRESSED IN PLACENTA, SIGNAL = 1.1; EXPRESSED IN HEART, SIGNAL = 1.2; EXPRESSED IN BRAIN, SIGNAL = 1.2; EXPRESSED IN BONE MARROW, SIGNAL = 1.4; EXPRESSED IN LUNG, SIGNAL = 1.2; EXPRESSED IN FETAL LIVER, SIGNAL = 1.2
KIMINMEFELESNFEVVLNCMN

SEQ ID NO: 40963 - protein, 51 aa, Homo sapiens
  MAP TO AL133258.13; EXPRESSED IN LUNG, SIGNAL = 2.9; EXPRESSED IN PLACENTA, SIGNAL = 3.7; EXPRESSED IN HELA, SIGNAL = 4.4; EXPRESSED IN HEART, SIGNAL = 3.6; EXPRESSED IN FETAL LIVER, SIGNAL = 2.7; EXPRESSED IN BRAIN, SIGNAL =   3; EXPRESSED IN BONE MARROW, SIGNAL = 2.7; EXPRESSED IN ADULT LIVER, SIGNAL = 3.7; EST_HUMAN HIT: AA706427.1, EVALUE 1.00e-07; SWISSPROT HIT: P21414, EVALUE 1.00e-12
ELGYRVSAKKVQLCLPTVSYLGYDISQGKRALTSARKEAILRIPTPTTKRQ

SEQ ID NO: 40964 - protein, 20 aa, Homo sapiens
  MAP TO AL133258.13; EXPRESSED IN LUNG, SIGNAL = 2.9; EXPRESSED IN PLACENTA, SIGNAL = 3.7; EXPRESSED IN HELA, SIGNAL = 4.4; EXPRESSED IN HEART, SIGNAL = 3.6; EXPRESSED IN FETAL LIVER, SIGNAL = 2.7; EXPRESSED IN BRAIN, SIGNAL =   3; EXPRESSED IN BONE MARROW, SIGNAL = 2.7; EXPRESSED IN ADULT LIVER, SIGNAL = 3.7
SSGIESQPRRSSFVFPQCPT

SEQ ID NO: 40965 - protein, 63 aa, Homo sapiens
  MAP TO AC019042.3; EXPRESSED IN ADULT LIVER, SIGNAL = 1.7; EXPRESSED IN FETAL LIVER, SIGNAL = 1.1; EXPRESSED IN BRAIN, SIGNAL = 1.2; EXPRESSED IN LUNG, SIGNAL = 1.4; EXPRESSED IN HEART, SIGNAL = 1.4; EXPRESSED IN PLACENTA, SIGNAL = 1.6; EXPRESSED IN BONE MARROW, SIGNAL = 1.1; EST_HUMAN HIT: BF369877.1, EVALUE 7.00e-09; SWISSPROT HIT: P08607, EVALUE 7.00e-05
FELSHCEDPGIPQFGYKISDQGHFAGSTIIYGCNPGYTLHGSSLLKCMTGERRAWDYPLPSCI

SEQ ID NO: 40966 - protein, 48 aa, Homo sapiens
  MAP TO AC019042.3; EXPRESSED IN ADULT LIVER, SIGNAL = 1.7; EXPRESSED IN FETAL LIVER, SIGNAL = 1.1; EXPRESSED IN BRAIN, SIGNAL = 1.2; EXPRESSED IN LUNG, SIGNAL = 1.4; EXPRESSED IN HEART, SIGNAL = 1.4; EXPRESSED IN PLACENTA, SIGNAL = 1.6; EXPRESSED IN BONE MARROW, SIGNAL = 1.1
VLNSHTVKILAFHNLDTRSVTKATLLVAPSFMDAIQATLSTEVAFSSA

SEQ ID NO: 40967 - protein, 62 aa, Homo sapiens
  MAP TO AL161781.2; EXPRESSED IN PLACENTA, SIGNAL = 2.2; EXPRESSED IN ADULT LIVER, SIGNAL = 2.3; EXPRESSED IN BONE MARROW, SIGNAL = 2.6; EXPRESSED IN LUNG, SIGNAL = 2.3; EXPRESSED IN HEART, SIGNAL = 1.9; EXPRESSED IN FETAL LIVER, SIGNAL = 2.3; EXPRESSED IN BRAIN, SIGNAL = 2.8; EST_HUMAN HIT: AI124846.1, EVALUE 4.00e-01; SWISSPROT HIT: P95656, EVALUE 2.00e+00
VFRSLRCRTATRFRAETSSGSRCGETCSHSSSWRCWTACLRGSTTQTSSPPQSPSSPSRYAS

SEQ ID NO: 40968 - protein, 56 aa, Homo sapiens
  MAP TO AC027341.1; EXPRESSED IN LUNG, SIGNAL = 1.6; EXPRESSED IN ADULT LIVER, SIGNAL = 1.9; EXPRESSED IN HELA, SIGNAL = 2.5; EXPRESSED IN BRAIN, SIGNAL = 0.98; EXPRESSED IN PLACENTA, SIGNAL = 1.4; EXPRESSED IN FETAL LIVER, SIGNAL = 1.1; EXPRESSED IN BONE MARROW, SIGNAL = 1.2; EXPRESSED IN HEART, SIGNAL = 1.5; EST_HUMAN HIT: AW340578.1, EVALUE 4.80e+00
VNLLSSKANLTFYIFCEVFSAPQSNKWAPPSLKFLSSLARAYPFSHIQPAGLQTPQ

SEQ ID NO: 40969 - protein, 34 aa, Homo sapiens
  MAP TO AL161781.2; EXPRESSED IN HEART, SIGNAL = 7.5; EXPRESSED IN FETAL LIVER, SIGNAL =  16; EXPRESSED IN BRAIN, SIGNAL = 8.8; EXPRESSED IN BONE MARROW, SIGNAL =  15; EXPRESSED IN ADULT LIVER, SIGNAL =  11; EXPRESSED IN HELA, SIGNAL = 8.8; EXPRESSED IN LUNG, SIGNAL =  13; EXPRESSED IN PLACENTA, SIGNAL =   5; EST_HUMAN HIT: AA428342.1, EVALUE 4.00e-06
CPTLVMGATKRQSTCCPVAYRSSWSTTSRSWKCC

SEQ ID NO: 40970 - protein, 53 aa, Homo sapiens
  MAP TO AC016549.4; EXPRESSED IN BONE MARROW, SIGNAL = 4.6; EXPRESSED IN PLACENTA, SIGNAL =   5; EXPRESSED IN ADULT LIVER, SIGNAL = 5.4; EXPRESSED IN FETAL LIVER, SIGNAL = 4.7; EXPRESSED IN BRAIN, SIGNAL = 4.3; EXPRESSED IN LUNG, SIGNAL = 5.4; EXPRESSED IN HELA, SIGNAL = 7.2; EXPRESSED IN HEART, SIGNAL = 4.7; EST_HUMAN HIT: BF335195.1, EVALUE 9.00e-21; SWISSPROT HIT: O75962, EVALUE 6.00e-25
NTYTNADKLLEAAEQLAQTGECDPEEIYQAAHQLEDRIQDFVRRVEQRKILLD

SEQ ID NO: 40971 - protein, 61 aa, Homo sapiens
  MAP TO AC016549.4; EXPRESSED IN BONE MARROW, SIGNAL = 4.6; EXPRESSED IN PLACENTA, SIGNAL =   5; EXPRESSED IN ADULT LIVER, SIGNAL = 5.4; EXPRESSED IN FETAL LIVER, SIGNAL = 4.7; EXPRESSED IN BRAIN, SIGNAL = 4.3; EXPRESSED IN LUNG, SIGNAL = 5.4; EXPRESSED IN HELA, SIGNAL = 7.2; EXPRESSED IN HEART, SIGNAL = 4.7; EST_HUMAN HIT: BF335195.1, EVALUE 1.00e-22; SWISSPROT HIT: P97333, EVALUE 5.20e+00
THTPMRINYWKQQNSWLRLGNVTPKRFIRLPISWKTGFKISFGVLSSERSYWTCQCPFTPM

SEQ ID NO: 40972 - protein, 56 aa, Homo sapiens
  MAP TO AL133227.7; EXPRESSED IN HELA, SIGNAL = 2.4; EXPRESSED IN BONE MARROW, SIGNAL = 1.4; EXPRESSED IN LUNG, SIGNAL = 1.3; EXPRESSED IN PLACENTA, SIGNAL = 1.4; EXPRESSED IN ADULT LIVER, SIGNAL = 1.6; EXPRESSED IN FETAL LIVER, SIGNAL = 1.3; EXPRESSED IN HEART, SIGNAL = 1.7; EXPRESSED IN BRAIN, SIGNAL = 1.5; EST_HUMAN HIT: AI459770.1, EVALUE 1.00e-16; SWISSPROT HIT: Q03697, EVALUE 2.10e+00
RAALVLVVLLIAGGLFMFTYKSTQFNVEGFALVLGASFIGGIRWTLTQMLLQKAEL

SEQ ID NO: 40973 - protein, 56 aa, Homo sapiens
  MAP TO AL133227.7; EXPRESSED IN HELA, SIGNAL = 2.4; EXPRESSED IN BONE MARROW, SIGNAL = 1.4; EXPRESSED IN LUNG, SIGNAL = 1.3; EXPRESSED IN PLACENTA, SIGNAL = 1.4; EXPRESSED IN ADULT LIVER, SIGNAL = 1.6; EXPRESSED IN FETAL LIVER, SIGNAL = 1.3; EXPRESSED IN HEART, SIGNAL = 1.7; EXPRESSED IN BRAIN, SIGNAL = 1.5; EST_HUMAN HIT: AI459770.1, EVALUE 2.00e-13; SWISSPROT HIT: P27732, EVALUE 7.90e+00
ARHWSWWSSSSPGVSSCSPTSPHSSTWRASPWCWGPRSSVAFAGPSPRCSCRRLNS

SEQ ID NO: 40974 - protein, 54 aa, Homo sapiens
  MAP TO AL121903.13; EXPRESSED IN BONE MARROW, SIGNAL = 2.1; EXPRESSED IN LUNG, SIGNAL = 1.9; EXPRESSED IN PLACENTA, SIGNAL =   2; EXPRESSED IN ADULT LIVER, SIGNAL = 1.7; EXPRESSED IN HEART, SIGNAL =   2; EXPRESSED IN FETAL LIVER, SIGNAL = 2.1; EXPRESSED IN BRAIN, SIGNAL = 1.9; EST_HUMAN HIT: AU124937.1, EVALUE 2.00e-25; SWISSPROT HIT: P55060, EVALUE 1.00e-26
GLCKFFEGPVTGIFSGYVNSMLQEYAKNPSVNWKHKDAAIYLVTSLASKAQTQK

SEQ ID NO: 40975 - protein, 23 aa, Homo sapiens
  MAP TO AL121881.25; EXPRESSED IN BONE MARROW, SIGNAL = 1.2; EXPRESSED IN LUNG, SIGNAL = 1.4; EXPRESSED IN PLACENTA, SIGNAL = 1.4; EXPRESSED IN ADULT LIVER, SIGNAL = 1.7; EXPRESSED IN FETAL LIVER, SIGNAL = 1.3; EXPRESSED IN BRAIN, SIGNAL = 1.2; EXPRESSED IN HEART, SIGNAL = 1.3
QWQYGVKSISGSWTSKSRAVVGR

SEQ ID NO: 40976 - protein, 168 aa, Homo sapiens
  MAP TO AC011815.2; EXPRESSED IN LUNG, SIGNAL = 1.8; EXPRESSED IN PLACENTA, SIGNAL =   2; EXPRESSED IN FETAL LIVER, SIGNAL = 2.1; EXPRESSED IN BRAIN, SIGNAL = 2.3; EXPRESSED IN HEART, SIGNAL = 1.5; EXPRESSED IN ADULT LIVER, SIGNAL = 2.2; EXPRESSED IN HELA, SIGNAL = 2.7; EXPRESSED IN BONE MARROW, SIGNAL = 2.1; EST_HUMAN HIT: T70393.1, EVALUE 5.00e-17; SWISSPROT HIT: P31794, EVALUE 2.10e-01
ECRDIQVGPQPQPGWLQLHKGGGGCRKGSCLLQHSCLLWHSCLLPASKNTVCSKDLGGCSCTQESRAPACSWSPRTQGGSASSHDLGSCSYAWGAPTRQLGRSWAPACPRSLWLCEAHSMGRASWLQPASWQWPLQMVQMAHCCHQQHSSLGNRVRDSISKKEKKEKE

SEQ ID NO: 40977 - protein, 53 aa, Homo sapiens
  MAP TO AC011815.2; EXPRESSED IN LUNG, SIGNAL = 1.8; EXPRESSED IN PLACENTA, SIGNAL =   2; EXPRESSED IN FETAL LIVER, SIGNAL = 2.1; EXPRESSED IN BRAIN, SIGNAL = 2.3; EXPRESSED IN HEART, SIGNAL = 1.5; EXPRESSED IN ADULT LIVER, SIGNAL = 2.2; EXPRESSED IN HELA, SIGNAL = 2.7; EXPRESSED IN BONE MARROW, SIGNAL = 2.1; SWISSPROT HIT: P14378, EVALUE 2.10e+00; EST_HUMAN HIT: T70393.1, EVALUE 5.00e-17
AGVLLMATVGHLDHLEWPLPRCWLQPGGSAHAVSFTEPEGAGTSRSPAPSKLA

SEQ ID NO: 40978 - protein, 83 aa, Homo sapiens
  MAP TO AC019221.3; EXPRESSED IN LUNG, SIGNAL =   1; EXPRESSED IN ADULT LIVER, SIGNAL = 1.2; EXPRESSED IN HEART, SIGNAL = 1.2; EXPRESSED IN BRAIN, SIGNAL = 1.2; EXPRESSED IN PLACENTA, SIGNAL = 1.3; EXPRESSED IN FETAL LIVER, SIGNAL = 1.2; EXPRESSED IN BONE MARROW, SIGNAL = 1.2; EST_HUMAN HIT: AA043738.1, EVALUE 2.00e-12; SWISSPROT HIT: P22276, EVALUE 1.60e+00
TSSDGEKCCQVIESPHVFPANAEVGTVLTALAIPAGVIFINSAGCPGGEGWTAIPKEDMRKTFREQGLRNGSSILIQDSHDDN

SEQ ID NO: 40979 - protein, 40 aa, Homo sapiens
  MAP TO AL133324.7; EXPRESSED IN PLACENTA, SIGNAL = 7.4; EXPRESSED IN ADULT LIVER, SIGNAL = 8.5; EXPRESSED IN FETAL LIVER, SIGNAL = 8.2; EXPRESSED IN HEART, SIGNAL = 7.8; EXPRESSED IN BRAIN, SIGNAL = 6.8; EXPRESSED IN HELA, SIGNAL = 8.5; EXPRESSED IN LUNG, SIGNAL = 8.3; EXPRESSED IN BONE MARROW, SIGNAL = 7.1; EST_HUMAN HIT: AW603565.1, EVALUE 4.00e-16; SWISSPROT HIT: O68040, EVALUE 2.00e-06
KIMRRVLRKIAQNDHDLGDMSTVADPSVISHLFSHRCLTI

SEQ ID NO: 40980 - protein, 32 aa, Homo sapiens
  MAP TO AC009416.2; EXPRESSED IN LUNG, SIGNAL = 1.1; EXPRESSED IN PLACENTA, SIGNAL = 1.2; EXPRESSED IN ADULT LIVER, SIGNAL = 1.3; EXPRESSED IN FETAL LIVER, SIGNAL = 0.94; EXPRESSED IN BONE MARROW, SIGNAL = 0.78; EXPRESSED IN HEART, SIGNAL = 1.5; EXPRESSED IN BRAIN, SIGNAL =   1; SWISSPROT HIT: P55149, EVALUE 5.00e+00
MNTHTNIKQQKDNLWSKRGRVEVVVRGTLKTE

SEQ ID NO: 40981 - protein, 45 aa, Homo sapiens
  MAP TO AL121673.27; EXPRESSED IN LUNG, SIGNAL =  11; EXPRESSED IN PLACENTA, SIGNAL =  11; EXPRESSED IN ADULT LIVER, SIGNAL = 9.8; EXPRESSED IN HEART, SIGNAL =  10; EXPRESSED IN FETAL LIVER, SIGNAL = 9.9; EXPRESSED IN BRAIN, SIGNAL =  10; EXPRESSED IN BONE MARROW, SIGNAL =  11; EXPRESSED IN HELA, SIGNAL = 3.3
MQTPPSPLLELENKQTTHSLPDSGSNICLRKGRGGGTQKLLGGKG

SEQ ID NO: 40982 - protein, 28 aa, Homo sapiens
  MAP TO AL121673.27; EXPRESSED IN LUNG, SIGNAL =  11; EXPRESSED IN PLACENTA, SIGNAL =  11; EXPRESSED IN ADULT LIVER, SIGNAL = 9.8; EXPRESSED IN HEART, SIGNAL =  10; EXPRESSED IN FETAL LIVER, SIGNAL = 9.9; EXPRESSED IN BRAIN, SIGNAL =  10; EXPRESSED IN BONE MARROW, SIGNAL =  11; EXPRESSED IN HELA, SIGNAL = 3.3; EST_HUMAN HIT: BE069049.1, EVALUE 2.40e-01
CRPHHPLCWSWRTSRPPTVSLTRAPTSA

SEQ ID NO: 40983 - protein, 40 aa, Homo sapiens
  MAP TO AC018742.2; EXPRESSED IN LUNG, SIGNAL = 2.8; EXPRESSED IN ADULT LIVER, SIGNAL = 2.7; EXPRESSED IN HELA, SIGNAL = 3.9; EXPRESSED IN FETAL LIVER, SIGNAL = 2.3; EXPRESSED IN BRAIN, SIGNAL = 2.3; EXPRESSED IN PLACENTA, SIGNAL = 2.8; EXPRESSED IN HEART, SIGNAL = 2.5; EXPRESSED IN BONE MARROW, SIGNAL = 2.2; SWISSPROT HIT: P22297, EVALUE 2.20e+00; EST_HUMAN HIT: AI220244.1, EVALUE 6.00e-03
TSERSQEDIARRQPAICRPGRDQPENNQTGTLISEFRFQN

SEQ ID NO: 40984 - protein, 29 aa, Homo sapiens
  MAP TO AC011790.4; EXPRESSED IN PLACENTA, SIGNAL = 1.6; EXPRESSED IN BONE MARROW, SIGNAL = 1.1; EXPRESSED IN LUNG, SIGNAL = 1.6; EXPRESSED IN ADULT LIVER, SIGNAL = 1.2; EXPRESSED IN HEART, SIGNAL = 1.7; EXPRESSED IN FETAL LIVER, SIGNAL = 1.1; EXPRESSED IN BRAIN, SIGNAL = 1.2
FAISVLAANGMRMDLVVCVVADNLQAVNK

SEQ ID NO: 40985 - protein, 127 aa, Homo sapiens
  MAP TO AL121988.10; EXPRESSED IN HELA, SIGNAL = 2.6; EXPRESSED IN LUNG, SIGNAL = 3.4; EXPRESSED IN PLACENTA, SIGNAL = 3.1; EXPRESSED IN ADULT LIVER, SIGNAL = 3.2; EXPRESSED IN FETAL LIVER, SIGNAL = 2.8; EXPRESSED IN BRAIN, SIGNAL = 2.8; EXPRESSED IN HEART, SIGNAL =   3; EXPRESSED IN BONE MARROW, SIGNAL = 2.9; SWISSPROT HIT: P34092, EVALUE 3.80e-02; EST_HUMAN HIT: BE712705.1, EVALUE 4.00e-75
YPGDMPLTARGHARGLPGGSGEEAPRSPWGEQWAPLPEPRQEAGWALVDICLQPSVQGERGHRLSLCVPLILPQIYPPSCGQVPRRSMSQYSGLLHLQALREEHFHPLHGGHSCHLHPAQPRGAHLP

SEQ ID NO: 40986 - protein, 37 aa, Homo sapiens
  MAP TO AL121894.14; EXPRESSED IN LUNG, SIGNAL = 1.5; EXPRESSED IN ADULT LIVER, SIGNAL = 1.4; EXPRESSED IN HEART, SIGNAL = 1.5; EXPRESSED IN BRAIN, SIGNAL = 1.5; EXPRESSED IN PLACENTA, SIGNAL = 1.5; EXPRESSED IN FETAL LIVER, SIGNAL = 1.7; EXPRESSED IN BONE MARROW, SIGNAL = 1.5; EST_HUMAN HIT: AW665128.1, EVALUE 1.10e-02; SWISSPROT HIT: O88969, EVALUE 1.00e-04
VTDSLEYYIEVKIARTICKKISEDENCAFQEDPKMQK

SEQ ID NO: 40987 - protein, 33 aa, Homo sapiens
  MAP TO AC010477.4; EXPRESSED IN LUNG, SIGNAL = 9.9; EXPRESSED IN PLACENTA, SIGNAL = 4.4; EXPRESSED IN ADULT LIVER, SIGNAL = 4.5; EXPRESSED IN HEART, SIGNAL =  16; EXPRESSED IN FETAL LIVER, SIGNAL = 5.4; EXPRESSED IN BRAIN, SIGNAL = 6.2; EXPRESSED IN BONE MARROW, SIGNAL = 7.2; EST_HUMAN HIT: AV708948.1, EVALUE 8.80e-01
WRHSLTMALACAKLALLGELFSPPSSGAPGTST

SEQ ID NO: 40988 - protein, 43 aa, Homo sapiens
  MAP TO AC021973.2; EXPRESSED IN LUNG, SIGNAL = 3.5; EXPRESSED IN PLACENTA, SIGNAL = 3.7; EXPRESSED IN ADULT LIVER, SIGNAL = 3.5; EXPRESSED IN HEART, SIGNAL = 2.8; EXPRESSED IN FETAL LIVER, SIGNAL = 3.9; EXPRESSED IN BRAIN, SIGNAL = 3.3; EXPRESSED IN HELA, SIGNAL = 2.5; EXPRESSED IN BONE MARROW, SIGNAL =   4; SWISSPROT HIT: P07566, EVALUE 6.30e+00; EST_HUMAN HIT: R93909.1, EVALUE 5.00e-20
VYPTAPKRQRPSRTGHDDDGGFVEKKRGKCGEKQERSDCYCVC

SEQ ID NO: 40989 - protein, 75 aa, Homo sapiens
  MAP TO AC018672.2; EXPRESSED IN LUNG, SIGNAL = 1.1; EXPRESSED IN PLACENTA, SIGNAL = 1.6; EXPRESSED IN ADULT LIVER, SIGNAL = 1.3; EXPRESSED IN FETAL LIVER, SIGNAL = 1.5; EXPRESSED IN HEART, SIGNAL = 1.6; EXPRESSED IN BRAIN, SIGNAL = 1.5; EXPRESSED IN HELA, SIGNAL = 2.7; EXPRESSED IN BONE MARROW, SIGNAL = 1.4; SWISSPROT HIT: O30409, EVALUE 8.70e+00
YVSHMQSEKANIGSEDLNLTIVSCIQQHHAISDGIPPGLVLKSKTLGLVVKSILVWLKELCLHCDKDFLFDQNLV

SEQ ID NO: 40990 - protein, 20 aa, Homo sapiens
  MAP TO AC018672.2; EXPRESSED IN LUNG, SIGNAL = 1.1; EXPRESSED IN PLACENTA, SIGNAL = 1.6; EXPRESSED IN ADULT LIVER, SIGNAL = 1.3; EXPRESSED IN FETAL LIVER, SIGNAL = 1.5; EXPRESSED IN HEART, SIGNAL = 1.6; EXPRESSED IN BRAIN, SIGNAL = 1.5; EXPRESSED IN HELA, SIGNAL = 2.7; EXPRESSED IN BONE MARROW, SIGNAL = 1.4
MSHTCSQKRQILDQKILTLL

SEQ ID NO: 40991 - protein, 71 aa, Homo sapiens
  MAP TO AL158198.3; EXPRESSED IN LUNG, SIGNAL = 4.1; EXPRESSED IN PLACENTA, SIGNAL = 3.8; EXPRESSED IN ADULT LIVER, SIGNAL = 4.7; EXPRESSED IN HEART, SIGNAL = 4.1; EXPRESSED IN FETAL LIVER, SIGNAL = 3.8; EXPRESSED IN BRAIN, SIGNAL = 4.3; EXPRESSED IN HELA, SIGNAL = 2.4; EXPRESSED IN BONE MARROW, SIGNAL = 4.1; SWISSPROT HIT: P17408, EVALUE 7.40e+00; EST_HUMAN HIT: AW859898.1, EVALUE 7.00e-12
VLAFPFLHKLSKHLLSFIFLIIVILTHVRCCLIVVLMCMFLMIRDVEHFCTYLLAICMSSFEKGLFRSFAH

SEQ ID NO: 40992 - protein, 111 aa, Homo sapiens
  MAP TO AL139819.2; EXPRESSED IN HELA, SIGNAL = 4.7; EXPRESSED IN LUNG, SIGNAL =   3; EXPRESSED IN BONE MARROW, SIGNAL = 3.4; EXPRESSED IN PLACENTA, SIGNAL =   4; EXPRESSED IN ADULT LIVER, SIGNAL = 4.3; EXPRESSED IN HEART, SIGNAL = 3.9; EXPRESSED IN FETAL LIVER, SIGNAL = 3.8; EXPRESSED IN BRAIN, SIGNAL = 3.1; EST_HUMAN HIT: BE838852.1, EVALUE 4.00e-16; SWISSPROT HIT: Q13563, EVALUE 4.00e-21
IFKYISFNKTMTQLSSTLARCAKDILGFAVMFFIVFFAYAQLGYLLFGTQVENFSTFIKCMCVSCPLHSSLAPHPPAPRVYVSLGKMGTCVSACLCSKHLCEGLQKPWCVC

SEQ ID NO: 40993 - protein, 39 aa, Homo sapiens
  MAP TO AC010397.3; EXPRESSED IN LUNG, SIGNAL = 1.5; EXPRESSED IN PLACENTA, SIGNAL = 0.78; EXPRESSED IN FETAL LIVER, SIGNAL = 0.98; EXPRESSED IN BONE MARROW, SIGNAL = 1.2; EXPRESSED IN ADULT LIVER, SIGNAL = 0.85; EXPRESSED IN HEART, SIGNAL = 1.7; EXPRESSED IN BRAIN, SIGNAL = 0.96; EST_HUMAN HIT: AU131130.1, EVALUE 4.00e-17
DLSSEERFHVELHFSPGAKGCEEDKNLPSGYGYRPASRE

SEQ ID NO: 40994 - protein, 38 aa, Homo sapiens
  MAP TO AC010397.3; EXPRESSED IN LUNG, SIGNAL = 1.5; EXPRESSED IN PLACENTA, SIGNAL = 0.78; EXPRESSED IN FETAL LIVER, SIGNAL = 0.98; EXPRESSED IN BONE MARROW, SIGNAL = 1.2; EXPRESSED IN ADULT LIVER, SIGNAL = 0.85; EXPRESSED IN HEART, SIGNAL = 1.7; EXPRESSED IN BRAIN, SIGNAL = 0.96; EST_HUMAN HIT: AU131130.1, EVALUE 2.00e-15
IFPQKNAFMLNYTLVREPKVVKKTKICHLAMDIDQLPE

SEQ ID NO: 40995 - protein, 26 aa, Homo sapiens
  MAP TO AC024196.2; EXPRESSED IN LUNG, SIGNAL = 4.3; EXPRESSED IN PLACENTA, SIGNAL = 4.2; EXPRESSED IN FETAL LIVER, SIGNAL = 5.1; EXPRESSED IN ADULT LIVER, SIGNAL = 4.3; EXPRESSED IN HEART, SIGNAL = 4.5; EXPRESSED IN BRAIN, SIGNAL = 3.7; EXPRESSED IN BONE MARROW, SIGNAL = 3.9
CTLSRFQGKRGSRERAVLSGMRWEPH

SEQ ID NO: 40996 - protein, 63 aa, Homo sapiens; identical to SEQ ID NO: 36425
  MAP TO AC007325.51; EXPRESSED IN LUNG, SIGNAL =  21; EXPRESSED IN ADULT LIVER, SIGNAL =  21; EXPRESSED IN BRAIN, SIGNAL =  17; EXPRESSED IN HEART, SIGNAL =  18; EXPRESSED IN HELA, SIGNAL =  17; EXPRESSED IN PLACENTA, SIGNAL =  19; EXPRESSED IN FETAL LIVER, SIGNAL =  16; EXPRESSED IN BONE MARROW, SIGNAL =  18; SWISSPROT HIT: P19440, EVALUE 9.00e-31; EST_HUMAN HIT: AI906419.1, EVALUE 1.00e-23

SEQ ID NO: 40997 - protein, 42 aa, Homo sapiens
  MAP TO AC025588.1; EXPRESSED IN HELA, SIGNAL = 7.4; EXPRESSED IN BONE MARROW, SIGNAL = 5.5; EXPRESSED IN PLACENTA, SIGNAL = 5.5; EXPRESSED IN ADULT LIVER, SIGNAL = 6.6; EXPRESSED IN FETAL LIVER, SIGNAL = 5.1; EXPRESSED IN BRAIN, SIGNAL = 5.1; EXPRESSED IN LUNG, SIGNAL = 6.4; EXPRESSED IN HEART, SIGNAL =   6; EST_HUMAN HIT: AI191716.1, EVALUE 4.00e-17; SWISSPROT HIT: Q02975, EVALUE 4.00e-10
VSVTFDDVAVTFTKEEWGQLDLAQRTLYQEVMLENCGLLVSL

SEQ ID NO: 40998 - protein, 47 aa, Homo sapiens
  MAP TO AC018742.2; EXPRESSED IN ADULT LIVER, SIGNAL = 3.1; EXPRESSED IN HEART, SIGNAL = 2.9; EXPRESSED IN BONE MARROW, SIGNAL = 3.1; EXPRESSED IN LUNG, SIGNAL = 3.3; EXPRESSED IN PLACENTA, SIGNAL = 3.3; EXPRESSED IN FETAL LIVER, SIGNAL = 2.8; EXPRESSED IN BRAIN, SIGNAL = 2.8; EST_HUMAN HIT: R31169.1, EVALUE 2.30e-02; SWISSPROT HIT: O46409, EVALUE 1.00e-02
CVTIQKKLVPFLMELNMYLTQQLEMLMKEIQWLPEEELQAWLLPRPI

SEQ ID NO: 40999 - protein, 46 aa, Homo sapiens
  MAP TO AL136365.3; EXPRESSED IN PLACENTA, SIGNAL = 1.4; EXPRESSED IN ADULT LIVER, SIGNAL = 0.9; EXPRESSED IN BRAIN, SIGNAL = 1.1; EXPRESSED IN BONE MARROW, SIGNAL = 1.2; EXPRESSED IN FETAL LIVER, SIGNAL = 1.2; EXPRESSED IN HEART, SIGNAL = 1.5; SWISSPROT HIT: P30516, EVALUE 4.80e+00; EST_HUMAN HIT: BE250573.1, EVALUE 4.00e+00
VVLLWNALHFPPRGRKEPRQAETGTCEDSAFVRDSRKGQEDPSTCV

SEQ ID NO: 41000 - protein, 31 aa, Homo sapiens
  MAP TO AL136365.3; EXPRESSED IN PLACENTA, SIGNAL = 1.4; EXPRESSED IN ADULT LIVER, SIGNAL = 0.9; EXPRESSED IN BRAIN, SIGNAL = 1.1; EXPRESSED IN BONE MARROW, SIGNAL = 1.2; EXPRESSED IN FETAL LIVER, SIGNAL = 1.2; EXPRESSED IN HEART, SIGNAL = 1.5
WSCYGMPSTSLLEGGKNRGRQRQALVRTQPL

SEQ ID NO: 41001 - protein, 78 aa, Homo sapiens
  MAP TO AC011260.4; EXPRESSED IN HELA, SIGNAL = 3.4; EXPRESSED IN HEART, SIGNAL = 2.1; EXPRESSED IN BONE MARROW, SIGNAL = 1.8; EXPRESSED IN LUNG, SIGNAL = 2.2; EXPRESSED IN PLACENTA, SIGNAL = 2.2; EXPRESSED IN ADULT LIVER, SIGNAL = 2.5; EXPRESSED IN FETAL LIVER, SIGNAL = 1.9; EXPRESSED IN BRAIN, SIGNAL = 1.7; EST_HUMAN HIT: AA889743.1, EVALUE 2.70e+00; SWISSPROT HIT: Q9Z8U7, EVALUE 2.50e+00
NVKVFSVEEKFYCGQMYGKTFNGTSQAVIPLLTTCSFPVGTVLGINLPPGKSAKLSPSKSYYKPMACCVLSSGCRGGG

SEQ ID NO: 41002 - protein, 77 aa, Homo sapiens
  MAP TO AC011260.4; EXPRESSED IN HELA, SIGNAL = 3.4; EXPRESSED IN HEART, SIGNAL = 2.1; EXPRESSED IN BONE MARROW, SIGNAL = 1.8; EXPRESSED IN LUNG, SIGNAL = 2.2; EXPRESSED IN PLACENTA, SIGNAL = 2.2; EXPRESSED IN ADULT LIVER, SIGNAL = 2.5; EXPRESSED IN FETAL LIVER, SIGNAL = 1.9; EXPRESSED IN BRAIN, SIGNAL = 1.7; SWISSPROT HIT: P96142, EVALUE 2.50e+00; EST_HUMAN HIT: AV701621.1, EVALUE 3.00e-01
MSKCFLWKKNSTVGKCMGRHLMVLLKLLSPYSQLAASQWAPSWASTYLLVNQPSSAPPNLIINPWPAVSFPLAVEEV

SEQ ID NO: 41003 - protein, 60 aa, Homo sapiens
  MAP TO AL162387.2; EXPRESSED IN LUNG, SIGNAL = 2.4; EXPRESSED IN PLACENTA, SIGNAL = 6.3; EXPRESSED IN ADULT LIVER, SIGNAL = 8.2; EXPRESSED IN HELA, SIGNAL = 7.9; EXPRESSED IN HEART, SIGNAL = 4.7; EXPRESSED IN FETAL LIVER, SIGNAL = 4.3; EXPRESSED IN BRAIN, SIGNAL = 4.2; EXPRESSED IN BONE MARROW, SIGNAL = 4.2; SWISSPROT HIT: P27977, EVALUE 4.20e+00; EST_HUMAN HIT: AI690504.1, EVALUE 8.00e-02
MGGRRKKLPQDTVHVCAWLCSWAGLCHTFRHTHVAWMPAFGHMRKTGSLFVAEGLYLGLQ

SEQ ID NO: 41004 - protein, 60 aa, Homo sapiens
  MAP TO AL162387.2; EXPRESSED IN LUNG, SIGNAL = 2.4; EXPRESSED IN PLACENTA, SIGNAL = 6.3; EXPRESSED IN ADULT LIVER, SIGNAL = 8.2; EXPRESSED IN HELA, SIGNAL = 7.9; EXPRESSED IN HEART, SIGNAL = 4.7; EXPRESSED IN FETAL LIVER, SIGNAL = 4.3; EXPRESSED IN BRAIN, SIGNAL = 4.2; EXPRESSED IN BONE MARROW, SIGNAL = 4.2; SWISSPROT HIT: P37926, EVALUE 7.20e-01; EST_HUMAN HIT: AV646950.1, EVALUE 3.20e-02
WGAGGRSYPRTLSMCVPGCAPGQACATHSGTHMWPGCLHLATCARQGLCLWLRVCTWACR

SEQ ID NO: 41005 - protein, 31 aa, Homo sapiens
  MAP TO AL136968.3; EXPRESSED IN BRAIN, SIGNAL = 8.4; EXPRESSED IN LUNG, SIGNAL =  11; EXPRESSED IN PLACENTA, SIGNAL = 3.1; EXPRESSED IN ADULT LIVER, SIGNAL = 9.8; EXPRESSED IN HELA, SIGNAL = 6.4; EXPRESSED IN FETAL LIVER, SIGNAL =  17; EXPRESSED IN HEART, SIGNAL = 6.7; EXPRESSED IN BONE MARROW, SIGNAL =  20; SWISSPROT HIT: P27727, EVALUE 6.50e+00; EST_HUMAN HIT: AA729739.1, EVALUE 2.00e-10
PCMCLQHFHNNFLLLDKESALDPVTDTFSTH

SEQ ID NO: 41006 - protein, 22 aa, Homo sapiens
  MAP TO AL136968.3; EXPRESSED IN BRAIN, SIGNAL = 8.4; EXPRESSED IN LUNG, SIGNAL =  11; EXPRESSED IN PLACENTA, SIGNAL = 3.1; EXPRESSED IN ADULT LIVER, SIGNAL = 9.8; EXPRESSED IN HELA, SIGNAL = 6.4; EXPRESSED IN FETAL LIVER, SIGNAL =  17; EXPRESSED IN HEART, SIGNAL = 6.7; EXPRESSED IN BONE MARROW, SIGNAL =  20
CVLNVSVTGSRALSLSRSRKLL

SEQ ID NO: 41007 - protein, 160 aa, Homo sapiens
  MAP TO AC008103.27; EXPRESSED IN BONE MARROW, SIGNAL = 2.5; EXPRESSED IN LUNG, SIGNAL = 1.3; EXPRESSED IN PLACENTA, SIGNAL = 0.85; EXPRESSED IN ADULT LIVER, SIGNAL = 1.3; EXPRESSED IN BRAIN, SIGNAL = 1.5; EXPRESSED IN HEART, SIGNAL =  12; EXPRESSED IN FETAL LIVER, SIGNAL =   2; EST_HUMAN HIT: AL042278.1, EVALUE 2.00e-62; SWISSPROT HIT: P52591, EVALUE 6.00e-07
MDSLWGPGAGSHPFGVHNTRLSPDLCPGKIVLRALKESGAGMPEQDKDPRVQENPGDQRRVPEVTGDAPSAFRPLRDNRGLSPFVPGPGPLQTDLHAQRSEIRYNQTSQTSWTSSCTNRNAISSSYSSTGGLPGLKRRRGPASSHCQLTLSSSKTVSEDR

SEQ ID NO: 41008 - protein, 32 aa, Homo sapiens
  MAP TO AC011930.3; EXPRESSED IN PLACENTA, SIGNAL = 3.8; EXPRESSED IN LUNG, SIGNAL = 2.7; EXPRESSED IN ADULT LIVER, SIGNAL = 3.1; EXPRESSED IN FETAL LIVER, SIGNAL = 2.9; EXPRESSED IN BRAIN, SIGNAL = 3.8; EXPRESSED IN BONE MARROW, SIGNAL = 3.6; EXPRESSED IN HELA, SIGNAL = 2.6; EXPRESSED IN HEART, SIGNAL = 3.1; EST_HUMAN HIT: BE733157.1, EVALUE 1.30e-01; SWISSPROT HIT: Q37600, EVALUE 2.90e+00
VSTMWMLPRFITYTLQSGGPSCTWAHLTTAGS

SEQ ID NO: 41009 - protein, 36 aa, Homo sapiens
  MAP TO AL121935.12; EXPRESSED IN PLACENTA, SIGNAL = 1.7; EXPRESSED IN LUNG, SIGNAL = 2.4; EXPRESSED IN BONE MARROW, SIGNAL = 2.2; EXPRESSED IN BRAIN, SIGNAL = 2.3; EXPRESSED IN FETAL LIVER, SIGNAL = 2.5; EXPRESSED IN HEART, SIGNAL = 2.1; EXPRESSED IN HELA, SIGNAL =   3; EXPRESSED IN ADULT LIVER, SIGNAL = 2.3
PILWPLLKCHFSSFSLSFCFVNMSPTSQQFHRRLWV

SEQ ID NO: 41010 - protein, 50 aa, Homo sapiens
  MAP TO AC016549.4; EXPRESSED IN PLACENTA, SIGNAL = 2.2; EXPRESSED IN BONE MARROW, SIGNAL = 1.1; EXPRESSED IN LUNG, SIGNAL = 1.6; EXPRESSED IN ADULT LIVER, SIGNAL = 1.4; EXPRESSED IN HEART, SIGNAL = 1.2; EXPRESSED IN BRAIN, SIGNAL = 1.1; EXPRESSED IN FETAL LIVER, SIGNAL = 1.1; EST_HUMAN HIT: AW860431.1, EVALUE 1.00e-19; SWISSPROT HIT: O75962, EVALUE 9.00e-25
VCSVLESLEQEYKREEDWCGGADKLGPNSETDHVTPMISKHLEQKEAFLK

SEQ ID NO: 41011 - protein, 33 aa, Homo sapiens
  MAP TO AC016549.4; EXPRESSED IN PLACENTA, SIGNAL = 2.2; EXPRESSED IN BONE MARROW, SIGNAL = 1.1; EXPRESSED IN LUNG, SIGNAL = 1.6; EXPRESSED IN ADULT LIVER, SIGNAL = 1.4; EXPRESSED IN HEART, SIGNAL = 1.2; EXPRESSED IN BRAIN, SIGNAL = 1.1; EXPRESSED IN FETAL LIVER, SIGNAL = 1.1; EST_HUMAN HIT: BE814001.1, EVALUE 4.00e-11
SAASSRAWNRSTREKKTGVAGRISWAQTLRRTT

SEQ ID NO: 41012 - protein, 37 aa, Homo sapiens
  MAP TO AC012207.5; EXPRESSED IN LUNG, SIGNAL = 1.2; EXPRESSED IN PLACENTA, SIGNAL = 1.2; EXPRESSED IN HEART, SIGNAL = 1.3; EXPRESSED IN BRAIN, SIGNAL = 1.2; EXPRESSED IN BONE MARROW, SIGNAL = 1.2; EXPRESSED IN ADULT LIVER, SIGNAL = 1.6; EXPRESSED IN FETAL LIVER, SIGNAL = 1.1; EST_HUMAN HIT: AW379465.1, EVALUE 1.50e-02
DCERTKGESKKINWETPEIILTMPEGGLDQSRSSEDN

SEQ ID NO: 41013 - protein, 19 aa, Homo sapiens
  MAP TO AC012207.5; EXPRESSED IN LUNG, SIGNAL = 1.2; EXPRESSED IN PLACENTA, SIGNAL = 1.2; EXPRESSED IN HEART, SIGNAL = 1.3; EXPRESSED IN BRAIN, SIGNAL = 1.2; EXPRESSED IN BONE MARROW, SIGNAL = 1.2; EXPRESSED IN ADULT LIVER, SIGNAL = 1.6; EXPRESSED IN FETAL LIVER, SIGNAL = 1.1; EST_HUMAN HIT: AW379465.1, EVALUE 2.20e-02
PTVRGPRVKAKRSTGRLLK

SEQ ID NO: 41014 - protein, 36 aa, Homo sapiens
  MAP TO AL133293.14; EXPRESSED IN PLACENTA, SIGNAL =   2; EXPRESSED IN HELA, SIGNAL = 3.1; EXPRESSED IN HEART, SIGNAL = 1.8; EXPRESSED IN BONE MARROW, SIGNAL =   2; EXPRESSED IN LUNG, SIGNAL = 1.8; EXPRESSED IN ADULT LIVER, SIGNAL = 1.9; EXPRESSED IN FETAL LIVER, SIGNAL =   2; EXPRESSED IN BRAIN, SIGNAL = 1.7
LETPALAFTLSTWRLAFILAAAEFTFSDMKCKCLKC

SEQ ID NO: 41015 - protein, 28 aa, Homo sapiens
  MAP TO AL133293.14; EXPRESSED IN PLACENTA, SIGNAL =   2; EXPRESSED IN HELA, SIGNAL = 3.1; EXPRESSED IN HEART, SIGNAL = 1.8; EXPRESSED IN BONE MARROW, SIGNAL =   2; EXPRESSED IN LUNG, SIGNAL = 1.8; EXPRESSED IN ADULT LIVER, SIGNAL = 1.9; EXPRESSED IN FETAL LIVER, SIGNAL =   2; EXPRESSED IN BRAIN, SIGNAL = 1.7; SWISSPROT HIT: P07207, EVALUE 5.00e+00; EST_HUMAN HIT: BE700392.1, EVALUE 1.60e+00
WRHRPSPSPSAPGDWHSSWRLLNSHFLT

SEQ ID NO: 41016 - protein, 77 aa, Homo sapiens
  MAP TO AC015473.3; EXPRESSED IN PLACENTA, SIGNAL = 4.2; EXPRESSED IN FETAL LIVER, SIGNAL = 3.6; EXPRESSED IN BONE MARROW, SIGNAL = 3.7; EXPRESSED IN LUNG, SIGNAL = 4.8; EXPRESSED IN ADULT LIVER, SIGNAL = 4.7; EXPRESSED IN HELA, SIGNAL = 3.6; EXPRESSED IN HEART, SIGNAL = 3.3; EXPRESSED IN BRAIN, SIGNAL =   4; SWISSPROT HIT: P16522, EVALUE 8.30e+00; EST_HUMAN HIT: H94215.1, EVALUE 2.00e-16
ISMFLVKEMKFFWLLVYKEGRGQNEDFYLPKLFLLETTCHQHRTKPQLWEMKLKPCMLHPSPFNGFGANVLSDQRFC

SEQ ID NO: 41017 - protein, 45 aa, Homo sapiens
  MAP TO AC008928.5; EXPRESSED IN HEART, SIGNAL = 6.2; EXPRESSED IN PLACENTA, SIGNAL = 6.3; EXPRESSED IN ADULT LIVER, SIGNAL = 6.2; EXPRESSED IN HELA, SIGNAL =   9; EXPRESSED IN BRAIN, SIGNAL = 5.1; EXPRESSED IN BONE MARROW, SIGNAL = 6.3; EXPRESSED IN LUNG, SIGNAL = 6.7; EXPRESSED IN FETAL LIVER, SIGNAL = 6.3; SWISSPROT HIT: Q16960, EVALUE 2.10e+00; EST_HUMAN HIT: AW452089.1, EVALUE 1.00e-08
SGSSISLSSTSTSCPTGRSSGTTTRMELSSPVITMPSSGYLLKDL

SEQ ID NO: 41018 - protein, 62 aa, Homo sapiens
  MAP TO AC007687.16; EXPRESSED IN HEART, SIGNAL = 3.6; EXPRESSED IN PLACENTA, SIGNAL = 3.1; EXPRESSED IN ADULT LIVER, SIGNAL = 3.6; EXPRESSED IN FETAL LIVER, SIGNAL = 3.3; EXPRESSED IN BRAIN, SIGNAL = 3.8; EXPRESSED IN BONE MARROW, SIGNAL = 3.9; EXPRESSED IN LUNG, SIGNAL = 3.5; EXPRESSED IN HELA, SIGNAL = 3.9; SWISSPROT HIT: Q92995, EVALUE 2.00e-31; EST_HUMAN HIT: AU124629.1, EVALUE 2.00e-30
TENGLQDNDIKLRVSEWEVIQESGTKLKPMYGPGYTGLKNLGNSCYLSSVMQAIFSIPEFQR

SEQ ID NO: 41019 - protein, 43 aa, Homo sapiens
  MAP TO AL161445.2; EXPRESSED IN BRAIN, SIGNAL =   1; EXPRESSED IN BONE MARROW, SIGNAL = 1.6; EXPRESSED IN LUNG, SIGNAL = 2.3; EXPRESSED IN PLACENTA, SIGNAL = 1.7; EXPRESSED IN ADULT LIVER, SIGNAL = 1.5; EXPRESSED IN HEART, SIGNAL = 1.5; EXPRESSED IN FETAL LIVER, SIGNAL = 1.8; SWISSPROT HIT: P15291, EVALUE 4.00e-19; EST_HUMAN HIT: AW362033.1, EVALUE 5.00e-18
FDRIAHTKETMLSDGLNSLTYQVLDVQRYPLYTQITVDIGTPS

SEQ ID NO: 41020 - protein, 25 aa, Homo sapiens
  MAP TO AC019184.2; EXPRESSED IN LUNG, SIGNAL =  24; EXPRESSED IN ADULT LIVER, SIGNAL =  24; EXPRESSED IN HEART, SIGNAL =  19; EXPRESSED IN BONE MARROW, SIGNAL =  23; EXPRESSED IN BRAIN, SIGNAL =  19; EXPRESSED IN PLACENTA, SIGNAL =  20; EXPRESSED IN HELA, SIGNAL =  26; EXPRESSED IN FETAL LIVER, SIGNAL =  19
FQCLVISFMGESGRYDGSFLIPKSQ

SEQ ID NO: 41021 - protein, 20 aa, Homo sapiens
  MAP TO AC019184.2; EXPRESSED IN LUNG, SIGNAL =  24; EXPRESSED IN ADULT LIVER, SIGNAL =  24; EXPRESSED IN HEART, SIGNAL =  19; EXPRESSED IN BONE MARROW, SIGNAL =  23; EXPRESSED IN BRAIN, SIGNAL =  19; EXPRESSED IN PLACENTA, SIGNAL =  20; EXPRESSED IN HELA, SIGNAL =  26; EXPRESSED IN FETAL LIVER, SIGNAL =  19
HSSVWSLASWVKVEGTMAAS

SEQ ID NO: 41022 - protein, 40 aa, Homo sapiens
  MAP TO AC022943.4; EXPRESSED IN LUNG, SIGNAL = 1.6; EXPRESSED IN HEART, SIGNAL = 1.8; EXPRESSED IN FETAL LIVER, SIGNAL = 1.8; EXPRESSED IN BONE MARROW, SIGNAL = 1.7; EXPRESSED IN PLACENTA, SIGNAL = 1.6; EXPRESSED IN ADULT LIVER, SIGNAL = 1.7; EXPRESSED IN BRAIN, SIGNAL = 1.7; EST_HUMAN HIT: AI217868.1, EVALUE 7.00e-11; SWISSPROT HIT: Q09274, EVALUE 2.20e+00
RVTAVVAASGSLIDSIMESYWPDTPYLSWHQSTCLGISQM

SEQ ID NO: 41023 - protein, 25 aa, Homo sapiens
  MAP TO AC018389.3; EXPRESSED IN LUNG, SIGNAL = 3.3; EXPRESSED IN PLACENTA, SIGNAL = 3.1; EXPRESSED IN HELA, SIGNAL = 4.5; EXPRESSED IN HEART, SIGNAL = 2.7; EXPRESSED IN FETAL LIVER, SIGNAL = 2.9; EXPRESSED IN BRAIN, SIGNAL = 2.4; EXPRESSED IN ADULT LIVER, SIGNAL = 3.7; EXPRESSED IN BONE MARROW, SIGNAL = 2.9
IILHMVGATEGLGAQECHQAGSISP

SEQ ID NO: 41024 - protein, 21 aa, Homo sapiens
  MAP TO AC018389.3; EXPRESSED IN LUNG, SIGNAL = 3.3; EXPRESSED IN PLACENTA, SIGNAL = 3.1; EXPRESSED IN HELA, SIGNAL = 4.5; EXPRESSED IN HEART, SIGNAL = 2.7; EXPRESSED IN FETAL LIVER, SIGNAL = 2.9; EXPRESSED IN BRAIN, SIGNAL = 2.4; EXPRESSED IN ADULT LIVER, SIGNAL = 3.7; EXPRESSED IN BONE MARROW, SIGNAL = 2.9; SWISSPROT HIT: P13846, EVALUE 8.80e+00
HHPTHGGSHRRIGSTGVPSSR

SEQ ID NO: 41025 - protein, 80 aa, Homo sapiens
  MAP TO AC018367.3; EXPRESSED IN PLACENTA, SIGNAL = 1.1; EXPRESSED IN FETAL LIVER, SIGNAL = 1.2; EXPRESSED IN ADULT LIVER, SIGNAL = 1.8; EXPRESSED IN HEART, SIGNAL = 1.3; EXPRESSED IN BRAIN, SIGNAL = 1.5; EXPRESSED IN BONE MARROW, SIGNAL = 1.5; SWISSPROT HIT: P32542, EVALUE 1.60e+00; EST_HUMAN HIT: AA504795.1, EVALUE 1.00e-27
IHGSRNQGVEVEVTPLTITPSDPLAKFLLLVPMTLHSAGLEVLVPEGGMLPRGDSTTIPSNWMLRLPPGHFVLFLHLSQQ

SEQ ID NO: 41026 - protein, 53 aa, Homo sapiens
  MAP TO AC018367.3; EXPRESSED IN PLACENTA, SIGNAL = 1.1; EXPRESSED IN FETAL LIVER, SIGNAL = 1.2; EXPRESSED IN ADULT LIVER, SIGNAL = 1.8; EXPRESSED IN HEART, SIGNAL = 1.3; EXPRESSED IN BRAIN, SIGNAL = 1.5; EXPRESSED IN BONE MARROW, SIGNAL = 1.5; EST_HUMAN HIT: AW665795.1, EVALUE 3.00e-03
RARSVQVAILTSSLMGLLLSLLVAAFLPLELRPLGQQNVMSWEQEAKILLEDH

SEQ ID NO: 41027 - protein, 51 aa, Homo sapiens
  MAP TO AC007326.28; EXPRESSED IN BONE MARROW, SIGNAL =   4; EXPRESSED IN ADULT LIVER, SIGNAL = 3.9; EXPRESSED IN HELA, SIGNAL = 5.1; EXPRESSED IN BRAIN, SIGNAL = 3.7; EXPRESSED IN LUNG, SIGNAL = 4.5; EXPRESSED IN PLACENTA, SIGNAL =   4; EXPRESSED IN HEART, SIGNAL = 3.7; EXPRESSED IN FETAL LIVER, SIGNAL = 4.1; SWISSPROT HIT: O57854, EVALUE 2.10e+00; EST_HUMAN HIT: BF313645.1, EVALUE 6.00e-22
LAVDIFDKFNFTGARVPWFDAIHEEFPRELESSISFPANFFKPPEEKGRTA

SEQ ID NO: 41028 - protein, 47 aa, Homo sapiens
  MAP TO AC007326.28; EXPRESSED IN BONE MARROW, SIGNAL =   4; EXPRESSED IN ADULT LIVER, SIGNAL = 3.9; EXPRESSED IN HELA, SIGNAL = 5.1; EXPRESSED IN BRAIN, SIGNAL = 3.7; EXPRESSED IN LUNG, SIGNAL = 4.5; EXPRESSED IN PLACENTA, SIGNAL =   4; EXPRESSED IN HEART, SIGNAL = 3.7; EXPRESSED IN FETAL LIVER, SIGNAL = 4.1; EST_HUMAN HIT: BF313645.1, EVALUE 2.00e-07
SLTSSTSREPESHGSTPFMKNSPGSWSPPSPSQPTSSNHLKKKVEPL

SEQ ID NO: 41029 - protein, 45 aa, Homo sapiens
  MAP TO AL158091.7; EXPRESSED IN PLACENTA, SIGNAL = 1.9; EXPRESSED IN FETAL LIVER, SIGNAL = 1.5; EXPRESSED IN ADULT LIVER, SIGNAL =   2; EXPRESSED IN HEART, SIGNAL = 1.9; EXPRESSED IN BONE MARROW, SIGNAL = 1.8; EXPRESSED IN BRAIN, SIGNAL = 1.8; EXPRESSED IN LUNG, SIGNAL = 1.7; SWISSPROT HIT: O24697, EVALUE 1.60e+00; EST_HUMAN HIT: AW299790.1, EVALUE 5.00e-18
HSVASAQLQEKLAGAQRQLGQLRAQEAGLQQEQRKADTHKKMTEF

SEQ ID NO: 41030 - protein, 26 aa, Homo sapiens
  MAP TO AL158091.7; EXPRESSED IN PLACENTA, SIGNAL = 1.9; EXPRESSED IN FETAL LIVER, SIGNAL = 1.5; EXPRESSED IN ADULT LIVER, SIGNAL =   2; EXPRESSED IN HEART, SIGNAL = 1.9; EXPRESSED IN BONE MARROW, SIGNAL = 1.8; EXPRESSED IN BRAIN, SIGNAL = 1.8; EXPRESSED IN LUNG, SIGNAL = 1.7; EST_HUMAN HIT: BF574172.1, EVALUE 3.60e+00
CWRTGSGHTGSGYGRLGLVAWPRTPR

SEQ ID NO: 41031 - protein, 114 aa, Homo sapiens [sequence omitted]

SEQ ID NO: 41032 - protein, 34 aa, Homo sapiens
  MAP TO AL122008.9; EXPRESSED IN PLACENTA, SIGNAL = 2.8; EXPRESSED IN ADULT LIVER, SIGNAL = 2.5; EXPRESSED IN HELA, SIGNAL = 3.2; EXPRESSED IN BRAIN, SIGNAL = 2.8; EXPRESSED IN BONE MARROW, SIGNAL = 2.6; EXPRESSED IN LUNG, SIGNAL = 2.8; EXPRESSED IN HEART, SIGNAL = 2.8; EXPRESSED IN FETAL LIVER, SIGNAL = 2.9; SWISSPROT HIT: Q47623, EVALUE 8.50e+00
LCADDPLLNVVRFLSFNVPIGWLTSLDSMKNHME

SEQ ID NO: 41033 - protein, 27 aa, Homo sapiens
  MAP TO AL162471.1; EXPRESSED IN PLACENTA, SIGNAL = 3.6; EXPRESSED IN HELA, SIGNAL = 5.6; EXPRESSED IN HEART, SIGNAL =   3; EXPRESSED IN BONE MARROW, SIGNAL = 3.3; EXPRESSED IN LUNG, SIGNAL = 3.1; EXPRESSED IN ADULT LIVER, SIGNAL = 4.7; EXPRESSED IN FETAL LIVER, SIGNAL = 3.7; EXPRESSED IN BRAIN, SIGNAL =   3; EST_HUMAN HIT: AL046234.1, EVALUE 7.90e+00
PVISFNLKYLFKGPVSTKTQSHSGVLK

SEQ ID NO: 41034 - protein, 53 aa, Homo sapiens
  MAP TO AC008269.3; EXPRESSED IN PLACENTA, SIGNAL =   7; EXPRESSED IN ADULT LIVER, SIGNAL = 9.1; EXPRESSED IN HELA, SIGNAL =  10; EXPRESSED IN BONE MARROW, SIGNAL = 8.6; EXPRESSED IN LUNG, SIGNAL = 7.1; EXPRESSED IN HEART, SIGNAL = 8.2; EXPRESSED IN FETAL LIVER, SIGNAL = 8.5; EXPRESSED IN BRAIN, SIGNAL = 7.3; EST_HUMAN HIT: T55842.1, EVALUE 3.80e+00; SWISSPROT HIT: Q53245, EVALUE 2.80e-02
WVKREFVAILKNLTTTGRQFGGILAAHSIATTLKYWYHGSPPGEIVSLGILSE

SEQ ID NO: 41035 - protein, 40 aa, Homo sapiens
  MAP TO AC024575.1; EXPRESSED IN PLACENTA, SIGNAL =   3; EXPRESSED IN ADULT LIVER, SIGNAL = 3.4; EXPRESSED IN FETAL LIVER, SIGNAL =   3; EXPRESSED IN BRAIN, SIGNAL = 3.5; EXPRESSED IN BONE MARROW, SIGNAL = 3.4; EXPRESSED IN LUNG, SIGNAL = 2.6; EXPRESSED IN HELA, SIGNAL = 3.5; EXPRESSED IN HEART, SIGNAL = 2.8; EST_HUMAN HIT: AI797830.1, EVALUE 2.00e-17
ILTKMKQQGHETAACPETEEIPQGASGCWKDDLQKELSDI

SEQ ID NO: 41036 - protein, 107 aa, Homo sapiens
  MAP TO AL121673.27; EXPRESSED IN LUNG, SIGNAL = 3.9; EXPRESSED IN ADULT LIVER, SIGNAL = 3.5; EXPRESSED IN BRAIN, SIGNAL = 3.5; EXPRESSED IN BONE MARROW, SIGNAL = 3.3; EXPRESSED IN PLACENTA, SIGNAL = 3.3; EXPRESSED IN HELA, SIGNAL = 3.2; EXPRESSED IN HEART, SIGNAL = 3.1; EXPRESSED IN FETAL LIVER, SIGNAL = 2.6; EST_HUMAN HIT: BE304967.1, EVALUE 3.00e-05; SWISSPROT HIT: Q28905, EVALUE 1.80e+00
KAHARCVLLHCWAVSTARRSLHCWAVSAACRSLHCWAVSTARRLLHCWAVSTARRSLHCWGVSAACRSLHCWAVSAARRSLHCWAVSTARWTLLHSWMLRLLPVGRD

SEQ ID NO: 41037 - protein, 87 aa, Homo sapiens
  MAP TO AL121897.15; EXPRESSED IN PLACENTA, SIGNAL = 1.9; EXPRESSED IN ADULT LIVER, SIGNAL = 1.9; EXPRESSED IN BRAIN, SIGNAL = 1.4; EXPRESSED IN BONE MARROW, SIGNAL = 1.5; EXPRESSED IN LUNG, SIGNAL = 1.4; EXPRESSED IN HELA, SIGNAL = 2.5; EXPRESSED IN HEART, SIGNAL = 1.5; EXPRESSED IN FETAL LIVER, SIGNAL = 1.9; EST_HUMAN HIT: BE900549.1, EVALUE 5.00e-14
SYLPDKLPKVEVDSFLAELPGSLSLSSAEPQPASPQPAAAAALLDEALLAKSPANLSEALCAANVDFSHLLGFLPLNLPPCNPPGAT

SEQ ID NO: 41038 - protein, 30 aa, Homo sapiens
  MAP TO AC019223.2; EXPRESSED IN PLACENTA, SIGNAL = 3.2; EXPRESSED IN ADULT LIVER, SIGNAL = 3.6; EXPRESSED IN HELA, SIGNAL = 2.8; EXPRESSED IN BRAIN, SIGNAL = 3.7; EXPRESSED IN BONE MARROW, SIGNAL = 3.1; EXPRESSED IN LUNG, SIGNAL = 4.6; EXPRESSED IN HEART, SIGNAL = 3.5; EXPRESSED IN FETAL LIVER, SIGNAL = 4.6; EST_HUMAN HIT: AW205139.1, EVALUE 5.00e-04
MNPNQYEIFEMPDKEFKMLIMKPLKELQEK

SEQ ID NO: 41039 - protein, 26 aa, Homo sapiens
  MAP TO AC013635.3; EXPRESSED IN PLACENTA, SIGNAL = 8.4; EXPRESSED IN ADULT LIVER, SIGNAL = 6.7; EXPRESSED IN HEART, SIGNAL = 5.7; EXPRESSED IN BRAIN, SIGNAL =   7; EXPRESSED IN BONE MARROW, SIGNAL = 7.6; EXPRESSED IN LUNG, SIGNAL = 7.9; EXPRESSED IN HELA, SIGNAL =   6; EXPRESSED IN FETAL LIVER, SIGNAL = 6.8
GGGHFHHSDGQTETQVGKGLSETTEL

SEQ ID NO: 41040 - protein, 22 aa, Homo sapiens
  MAP TO AC013726.3; EXPRESSED IN ADULT LIVER, SIGNAL = 1.4; EXPRESSED IN HEART, SIGNAL = 1.2; EXPRESSED IN FETAL LIVER, SIGNAL = 1.4; EXPRESSED IN BRAIN, SIGNAL = 1.2; EXPRESSED IN BONE MARROW, SIGNAL = 1.3; EXPRESSED IN LUNG, SIGNAL = 1.4; EXPRESSED IN PLACENTA, SIGNAL = 1.2
LTSGRALARSLLQATPFVTPVT

SEQ ID NO: 41041 - protein, 33 aa, Homo sapiens
  MAP TO AC009301.3; EXPRESSED IN PLACENTA, SIGNAL = 0.9; EXPRESSED IN HEART, SIGNAL = 1.3; EXPRESSED IN BRAIN, SIGNAL = 1.1; EXPRESSED IN LUNG, SIGNAL = 1.2; EXPRESSED IN FETAL LIVER, SIGNAL = 1.1; EXPRESSED IN ADULT LIVER, SIGNAL = 1.1; EXPRESSED IN BONE MARROW, SIGNAL = 1.2
VPSAVLGAPDTSNYVPGTILYVTCVHSVTPHIP

SEQ ID NO: 41042 - protein, 29 aa, Homo sapiens
  MAP TO AC024575.1; EXPRESSED IN ADULT LIVER, SIGNAL = 4.5; EXPRESSED IN BRAIN, SIGNAL = 4.4; EXPRESSED IN LUNG, SIGNAL = 3.8; EXPRESSED IN HELA, SIGNAL =   5; EXPRESSED IN HEART, SIGNAL = 4.5; EXPRESSED IN PLACENTA, SIGNAL = 4.1; EXPRESSED IN FETAL LIVER, SIGNAL = 3.7; EXPRESSED IN BONE MARROW, SIGNAL = 4.2; EST_HUMAN HIT: AA465288.1, EVALUE 2.00e-08
KTIVMIPDSQKLLRCELESLKSQLQAQTK

SEQ ID NO: 41043 - protein, 53 aa, Homo sapiens
  MAP TO AL121897.15; EXPRESSED IN PLACENTA, SIGNAL =   2; EXPRESSED IN HELA, SIGNAL = 2.6; EXPRESSED IN BONE MARROW, SIGNAL =   2; EXPRESSED IN HEART, SIGNAL = 1.7; EXPRESSED IN FETAL LIVER, SIGNAL = 1.9; EXPRESSED IN LUNG, SIGNAL =   2; EXPRESSED IN ADULT LIVER, SIGNAL = 2.2; EXPRESSED IN BRAIN, SIGNAL =   2; EST_HUMAN HIT: BE866833.1, EVALUE 4.00e-27; SWISSPROT HIT: P32802, EVALUE 5.00e-04
MVALLCMWFGISLPLVYLGYYFGFRKQPYDNPVRTNQIPRQIPEQRWYMNRFV

SEQ ID NO: 41044 - protein, 53 aa, Homo sapiens
  MAP TO AL121897.15; EXPRESSED IN PLACENTA, SIGNAL =   2; EXPRESSED IN HELA, SIGNAL = 2.6; EXPRESSED IN BONE MARROW, SIGNAL =   2; EXPRESSED IN HEART, SIGNAL = 1.7; EXPRESSED IN FETAL LIVER, SIGNAL = 1.9; EXPRESSED IN LUNG, SIGNAL =   2; EXPRESSED IN ADULT LIVER, SIGNAL = 2.2; EXPRESSED IN BRAIN, SIGNAL =   2; EST_HUMAN HIT: AW372227.1, EVALUE 2.00e-11
CPFPPWWLCCACGSGSPCPSSTWATTSASESSHMTTLCAPTRFPGRSPSSGGT

SEQ ID NO: 41045 - protein, 74 aa, Homo sapiens
  MAP TO AL138796.2; EXPRESSED IN BONE MARROW, SIGNAL =   2; EXPRESSED IN PLACENTA, SIGNAL = 2.1; EXPRESSED IN ADULT LIVER, SIGNAL = 1.5; EXPRESSED IN HELA, SIGNAL = 3.5; EXPRESSED IN BRAIN, SIGNAL = 2.4; EXPRESSED IN LUNG, SIGNAL = 1.6; EXPRESSED IN HEART, SIGNAL = 4.1; EXPRESSED IN FETAL LIVER, SIGNAL =   2; EST_HUMAN HIT: BE933024.1, EVALUE 3.00e-10; SWISSPROT HIT: P53156, EVALUE 5.70e+00
LSRELQEKEKVIEVLQAKLDARSLTPSSSHALSDSHRSPSSTSFLSDELEACSDMDIVSEYTHYEEKKASPSHS

SEQ ID NO: 41046 - protein, 44 aa, Homo sapiens
  MAP TO AC024038.3; EXPRESSED IN BRAIN, SIGNAL = 1.5; EXPRESSED IN BONE MARROW, SIGNAL = 1.4; EXPRESSED IN LUNG, SIGNAL = 1.2; EXPRESSED IN PLACENTA, SIGNAL = 1.1; EXPRESSED IN ADULT LIVER, SIGNAL = 1.5; EXPRESSED IN HEART, SIGNAL = 1.3; EXPRESSED IN FETAL LIVER, SIGNAL = 1.2; EST_HUMAN HIT: BF585469.1, EVALUE 1.10e-02
LSRKRSTFLPSTSRITQDSWIVMTISTIAARERNSSLISPAGPF

SEQ ID NO: 41047 - protein, 71 aa, Homo sapiens
  MAP TO AC022262.3; EXPRESSED IN ADULT LIVER, SIGNAL = 2.3; EXPRESSED IN HEART, SIGNAL = 2.4; EXPRESSED IN BONE MARROW, SIGNAL = 2.6; EXPRESSED IN BRAIN, SIGNAL =   3; EXPRESSED IN LUNG, SIGNAL = 2.4; EXPRESSED IN PLACENTA, SIGNAL = 2.3; EXPRESSED IN FETAL LIVER, SIGNAL = 2.5; EST_HUMAN HIT: M78984.1, EVALUE 1.00e-19; SWISSPROT HIT: Q36082, EVALUE 3.60e-02
SGTCSMMPWKMLLKVTSTLLALPYGSSVPAAGPPLFSCSPLLASVATSWALATLLLFSPCLLGTSPAHPLS

SEQ ID NO: 41048 - protein, 47 aa, Homo sapiens
  MAP TO AL118520.12; EXPRESSED IN PLACENTA, SIGNAL = 1.1; EXPRESSED IN FETAL LIVER, SIGNAL = 1.4; EXPRESSED IN BRAIN, SIGNAL = 1.5; EXPRESSED IN BONE MARROW, SIGNAL = 1.4; EXPRESSED IN LUNG, SIGNAL = 1.2; EXPRESSED IN ADULT LIVER, SIGNAL = 1.2; EXPRESSED IN HEART, SIGNAL = 1.2; EST_HUMAN HIT: BF690254.1, EVALUE 1.00e-21; SWISSPROT HIT: P41733, EVALUE 3.00e-05
LRNIFVLTCIIIVCSLLFPVLWHLWIYAGSANSNFFYAITLTFNVGQ

SEQ ID NO: 41049 - protein, 29 aa, Homo sapiens
  MAP TO AC021288.3; EXPRESSED IN HEART, SIGNAL = 1.2; EXPRESSED IN FETAL LIVER, SIGNAL = 1.4; EXPRESSED IN BONE MARROW, SIGNAL = 1.4; EXPRESSED IN LUNG, SIGNAL = 1.6; EXPRESSED IN PLACENTA, SIGNAL = 1.5; EXPRESSED IN ADULT LIVER, SIGNAL = 1.8; EXPRESSED IN BRAIN, SIGNAL = 1.2
LFAVNLAEVRLHVKNLDHGTKSSQFHLLH

SEQ ID NO: 41050 - protein, 34 aa, Homo sapiens
  MAP TO AL158150.2; EXPRESSED IN LUNG, SIGNAL = 4.9; EXPRESSED IN PLACENTA, SIGNAL = 4.3; EXPRESSED IN ADULT LIVER, SIGNAL = 4.2; EXPRESSED IN HEART, SIGNAL =   4; EXPRESSED IN BRAIN, SIGNAL = 3.9; EXPRESSED IN FETAL LIVER, SIGNAL = 3.7; EXPRESSED IN BONE MARROW, SIGNAL = 4.4; SWISSPROT HIT: P23615, EVALUE 1.70e+00
VVMEPQDEKIHQDDKDGSQLEIRAGDTDFGNLSY

SEQ ID NO: 41051 - protein, 74 aa, Homo sapiens
  MAP TO AL139008.3; EXPRESSED IN LUNG, SIGNAL = 6.1; EXPRESSED IN PLACENTA, SIGNAL = 5.3; EXPRESSED IN ADULT LIVER, SIGNAL = 6.1; EXPRESSED IN FETAL LIVER, SIGNAL = 7.8; EXPRESSED IN BRAIN, SIGNAL = 6.1; EXPRESSED IN BONE MARROW, SIGNAL = 8.1; EXPRESSED IN HELA, SIGNAL =  12; EXPRESSED IN HEART, SIGNAL = 6.5; EST_HUMAN HIT: AA923470.1, EVALUE 6.00e-13; SWISSPROT HIT: P06484, EVALUE 1.90e+00
SDKKIAVISTKLFMEKERMEYFLSTLPMRPDPELPCVENLNSIELNRKYIPKMAIRIPTSNPQTSNNCKNSLTE

SEQ ID NO: 41052 - protein, 47 aa, Homo sapiens
  MAP TO U82670.2; EXPRESSED IN PLACENTA, SIGNAL = 0.88; EXPRESSED IN HEART, SIGNAL = 1.2; EXPRESSED IN BONE MARROW, SIGNAL = 0.85; EXPRESSED IN LUNG, SIGNAL =   1; EXPRESSED IN ADULT LIVER, SIGNAL = 0.83; EXPRESSED IN FETAL LIVER, SIGNAL = 1.2; EXPRESSED IN BRAIN, SIGNAL = 0.86; EST_HUMAN HIT: BF356055.1, EVALUE 2.00e-04; SWISSPROT HIT: P51786, EVALUE 3.00e-04
GKTDEPWEFFQDLVTFDDVAWYLTTREWFKLDPEQRALEYYGNVTSV

SEQ ID NO: 41053 - protein, 36 aa, Homo sapiens
  MAP TO AL121908.7; EXPRESSED IN BONE MARROW, SIGNAL = 1.3; EXPRESSED IN LUNG, SIGNAL = 1.4; EXPRESSED IN PLACENTA, SIGNAL = 1.2; EXPRESSED IN ADULT LIVER, SIGNAL = 1.3; EXPRESSED IN FETAL LIVER, SIGNAL = 1.1; EXPRESSED IN HEART, SIGNAL = 1.2; EXPRESSED IN BRAIN, SIGNAL = 1.6; SWISSPROT HIT: P35568, EVALUE 2.90e+00
PDGNDGLGSRMPHDPGSVSATQQPGEELVALGTVWQ

SEQ ID NO: 41054 - protein, 38 aa, Homo sapiens
  MAP TO AL137248.4; EXPRESSED IN LUNG, SIGNAL = 1.6; EXPRESSED IN PLACENTA, SIGNAL = 1.6; EXPRESSED IN ADULT LIVER, SIGNAL = 1.4; EXPRESSED IN FETAL LIVER, SIGNAL = 1.3; EXPRESSED IN BRAIN, SIGNAL = 1.7; EXPRESSED IN BONE MARROW, SIGNAL = 1.2; EXPRESSED IN HEART, SIGNAL = 1.3
QICNPQQSDNHSASLTFVNYGADSLHSGSMIPLVSGRK

SEQ ID NO: 41055 - protein, 18 aa, Homo sapiens
  MAP TO AL137248.4; EXPRESSED IN LUNG, SIGNAL = 1.6; EXPRESSED IN PLACENTA, SIGNAL = 1.6; EXPRESSED IN ADULT LIVER, SIGNAL = 1.4; EXPRESSED IN FETAL LIVER, SIGNAL = 1.3; EXPRESSED IN BRAIN, SIGNAL = 1.7; EXPRESSED IN BONE MARROW, SIGNAL = 1.2; EXPRESSED IN HEART, SIGNAL = 1.3
PRFATHSKATITVPLSHL

SEQ ID NO: 41056 - protein, 90 aa, Homo sapiens
  MAP TO AC013726.3; EXPRESSED IN LUNG, SIGNAL = 1.4; EXPRESSED IN PLACENTA, SIGNAL = 1.4; EXPRESSED IN ADULT LIVER, SIGNAL = 1.1; EXPRESSED IN FETAL LIVER, SIGNAL = 3.6; EXPRESSED IN BRAIN, SIGNAL = 2.6; EXPRESSED IN BONE MARROW, SIGNAL = 2.5; EXPRESSED IN HEART, SIGNAL = 1.4; EST_HUMAN HIT: F06604.1, EVALUE 1.00e-36; SWISSPROT HIT: P10272, EVALUE 7.00e-16
EAELIALIRALTLAKGLHVNIYTDPISCTTMMFYGLKSFLTTQGSSIINASLIKTLLKAALLPKEAGVIHCKGHQKASDPIAQDNAYADK

SEQ ID NO: 41057 - protein, 50 aa, Homo sapiens
  MAP TO AL139248.2; EXPRESSED IN PLACENTA, SIGNAL = 1.4; EXPRESSED IN HEART, SIGNAL = 1.4; EXPRESSED IN FETAL LIVER, SIGNAL = 1.4; EXPRESSED IN BONE MARROW, SIGNAL = 1.4; EXPRESSED IN LUNG, SIGNAL = 1.4; EXPRESSED IN ADULT LIVER, SIGNAL = 1.7; EXPRESSED IN BRAIN, SIGNAL = 1.1; EST_HUMAN HIT: BE781382.1, EVALUE 3.00e-24; SWISSPROT HIT: O14308, EVALUE 4.70e+00
DPDSKEHSVSNKSQHASETFHHSSNWLRNPFKVLDKNQEPALWKQLIKGE

SEQ ID NO: 41058 - protein, 26 aa, Homo sapiens
  MAP TO AL139248.2; EXPRESSED IN PLACENTA, SIGNAL = 1.4; EXPRESSED IN HEART, SIGNAL = 1.4; EXPRESSED IN FETAL LIVER, SIGNAL = 1.4; EXPRESSED IN BONE MARROW, SIGNAL = 1.4; EXPRESSED IN LUNG, SIGNAL = 1.4; EXPRESSED IN ADULT LIVER, SIGNAL = 1.7; EXPRESSED IN BRAIN, SIGNAL = 1.1; EST_HUMAN HIT: BE781382.1, EVALUE 8.00e-08
ILIPKNILYPISLSMHLRHFIILPTG

SEQ ID NO: 41059 - protein, 69 aa, Homo sapiens
  MAP TO AL133293.14; EXPRESSED IN PLACENTA, SIGNAL = 5.5; EXPRESSED IN HEART, SIGNAL = 7.2; EXPRESSED IN FETAL LIVER, SIGNAL =  30; EXPRESSED IN BONE MARROW, SIGNAL =  31; EXPRESSED IN LUNG, SIGNAL =  15; EXPRESSED IN ADULT LIVER, SIGNAL =  15; EXPRESSED IN BRAIN, SIGNAL =  13; EXPRESSED IN HELA, SIGNAL =  25; EST_HUMAN HIT: AW392040.1, EVALUE 1.00e-13
FLLGLGQEPLLLLLLCLWSVLVGQLKQLSSSLAVQGLGELVNCRRHFQPFIEEGSLMLQLDIAGPFHKT

SEQ ID NO: 41060 - protein, 38 aa, Homo sapiens
  MAP TO AL162390.2; EXPRESSED IN HELA, SIGNAL = 2.6; EXPRESSED IN BRAIN, SIGNAL = 2.3; EXPRESSED IN LUNG, SIGNAL = 4.5; EXPRESSED IN PLACENTA, SIGNAL = 1.7; EXPRESSED IN ADULT LIVER, SIGNAL = 2.8; EXPRESSED IN FETAL LIVER, SIGNAL = 2.5; EXPRESSED IN HEART, SIGNAL = 2.4; EXPRESSED IN BONE MARROW, SIGNAL = 1.8; EST_HUMAN HIT: BF115817.1, EVALUE 2.00e-18; SWISSPROT HIT: O35739, EVALUE 1.00e-19
ERPFPCTWPDCLKKFSRSDELTRHYRTHTGEKQFRCPL

SEQ ID NO: 41061 - protein, 21 aa, Homo sapiens
  MAP TO AL162390.2; EXPRESSED IN HELA, SIGNAL = 2.6; EXPRESSED IN BRAIN, SIGNAL = 2.3; EXPRESSED IN LUNG, SIGNAL = 4.5; EXPRESSED IN PLACENTA, SIGNAL = 1.7; EXPRESSED IN ADULT LIVER, SIGNAL = 2.8; EXPRESSED IN FETAL LIVER, SIGNAL = 2.5; EXPRESSED IN HEART, SIGNAL = 2.4; EXPRESSED IN BONE MARROW, SIGNAL = 1.8; EST_HUMAN HIT: BF115817.1, EVALUE 1.00e-04
VNGPFPARGQTALKSSPAQTS

SEQ ID NO: 41062 - protein, 46 aa, Homo sapiens
  MAP TO AL136112.9; EXPRESSED IN PLACENTA, SIGNAL = 1.2; EXPRESSED IN HEART, SIGNAL = 1.4; EXPRESSED IN BONE MARROW, SIGNAL = 1.5; EXPRESSED IN LUNG, SIGNAL = 1.2; EXPRESSED IN ADULT LIVER, SIGNAL = 1.6; EXPRESSED IN FETAL LIVER, SIGNAL = 1.4; EXPRESSED IN BRAIN, SIGNAL = 1.4; SWISSPROT HIT: P14732, EVALUE 8.20e+00; EST_HUMAN HIT: AI147427.1, EVALUE 1.00e-15
MDSENMKTENMESQNVDFESVSSVTALEALSKLLNPEEEDDSDYGQ

SEQ ID NO: 41063 - protein, 72 aa, Homo sapiens
  MAP TO AC022392.3; EXPRESSED IN PLACENTA, SIGNAL = 4.7; EXPRESSED IN ADULT LIVER, SIGNAL = 4.8; EXPRESSED IN HELA, SIGNAL =   6; EXPRESSED IN BRAIN, SIGNAL = 5.3; EXPRESSED IN BONE MARROW, SIGNAL = 4.1; EXPRESSED IN LUNG, SIGNAL =   5; EXPRESSED IN HEART, SIGNAL = 4.5; EXPRESSED IN FETAL LIVER, SIGNAL = 4.6; EST_HUMAN HIT: BE379134.1, EVALUE 7.00e-39; SWISSPROT HIT: P24054, EVALUE 4.00e-05
LDKSLGASCKDSIGWMFSKLDTSADLFLDQTELAAINLDKYEVCIRPFFNSCDTYKDGRVSTAEWCFCFWRE

SEQ ID NO: 41064 - protein, 73 aa, Homo sapiens
  MAP TO AC022392.3; EXPRESSED IN PLACENTA, SIGNAL = 4.7; EXPRESSED IN ADULT LIVER, SIGNAL = 4.8; EXPRESSED IN HELA, SIGNAL =   6; EXPRESSED IN BRAIN, SIGNAL = 5.3; EXPRESSED IN BONE MARROW, SIGNAL = 4.1; EXPRESSED IN LUNG, SIGNAL =   5; EXPRESSED IN HEART, SIGNAL = 4.5; EXPRESSED IN FETAL LIVER, SIGNAL = 4.6; EST_HUMAN HIT: BE379134.1, EVALUE 2.00e-09; SWISSPROT HIT: P13608, EVALUE 4.90e+00
GWTRAWGPAARTPLAGCSPSWTPVLTSSWTRRSWPPSTWTSTRSASVPSSTPVTPTRMAGSLLLSGASASGGR

SEQ ID NO: 41065 - protein, 36 aa, Homo sapiens
  MAP TO AC012200.5; EXPRESSED IN HELA, SIGNAL =  31; EXPRESSED IN LUNG, SIGNAL =  37; EXPRESSED IN BONE MARROW, SIGNAL =  32; EXPRESSED IN BRAIN, SIGNAL =  15; EXPRESSED IN FETAL LIVER, SIGNAL =  40; EXPRESSED IN HEART, SIGNAL =  12; EXPRESSED IN ADULT LIVER, SIGNAL =  42; EXPRESSED IN PLACENTA, SIGNAL =  17; SWISSPROT HIT: Q90835, EVALUE 5.00e-13; EST_HUMAN HIT: AA305852.1, EVALUE 3.00e-11
MGFNIKNVSVKDVRCGNVVGDSKNDPPMEAAGFTAQ

SEQ ID NO: 41066 - protein, 40 aa, Homo sapiens
  MAP TO AC026437.1; EXPRESSED IN LUNG, SIGNAL = 1.7; EXPRESSED IN PLACENTA, SIGNAL = 1.7; EXPRESSED IN ADULT LIVER, SIGNAL = 1.7; EXPRESSED IN FETAL LIVER, SIGNAL =   2; EXPRESSED IN BRAIN, SIGNAL = 2.1; EXPRESSED IN BONE MARROW, SIGNAL = 1.8; EXPRESSED IN HEART, SIGNAL = 2.1; EST_HUMAN HIT: AA486037.1, EVALUE 9.00e-15
TVRAHLTGWLMTLKKTFVLAPSSVLRIIVLIASLVVLPYL

SEQ ID NO: 41067 - protein, 34 aa, Homo sapiens
  MAP TO AL121920.7; EXPRESSED IN LUNG, SIGNAL = 2.6; EXPRESSED IN PLACENTA, SIGNAL = 2.8; EXPRESSED IN ADULT LIVER, SIGNAL = 3.7; EXPRESSED IN BRAIN, SIGNAL = 3.6; EXPRESSED IN BONE MARROW, SIGNAL = 3.5; EXPRESSED IN FETAL LIVER, SIGNAL = 3.7; EXPRESSED IN HELA, SIGNAL = 4.3; EXPRESSED IN HEART, SIGNAL = 2.9; EST_HUMAN HIT: AI682253.1, EVALUE 3.00e-09
MLPALGHRTPGSSVLELRLAFLAPQPADGLLWDL

SEQ ID NO: 41068 - protein, 33 aa, Homo sapiens
  MAP TO AL121920.7; EXPRESSED IN LUNG, SIGNAL = 2.6; EXPRESSED IN PLACENTA, SIGNAL = 2.8; EXPRESSED IN ADULT LIVER, SIGNAL = 3.7; EXPRESSED IN BRAIN, SIGNAL = 3.6; EXPRESSED IN BONE MARROW, SIGNAL = 3.5; EXPRESSED IN FETAL LIVER, SIGNAL = 3.7; EXPRESSED IN HELA, SIGNAL = 4.3; EXPRESSED IN HEART, SIGNAL = 2.9; EST_HUMAN HIT: BE891814.1, EVALUE 9.00e-11
ASCPWTSDSRFFSFGTQTGFPCSAACRWPIVGP

SEQ ID NO: 41069 - protein, 22 aa, Homo sapiens
  MAP TO AC008688.4; EXPRESSED IN LUNG, SIGNAL = 3.7; EXPRESSED IN ADULT LIVER, SIGNAL = 3.4; EXPRESSED IN FETAL LIVER, SIGNAL =   3; EXPRESSED IN BRAIN, SIGNAL =   3; EXPRESSED IN BONE MARROW, SIGNAL = 3.1; EXPRESSED IN PLACENTA, SIGNAL = 3.4; EXPRESSED IN HEART, SIGNAL = 2.9; EST_HUMAN HIT: BE263191.1, EVALUE 1.00e-06
VASLGTIQWPRKRRVAPLWPIC

SEQ ID NO: 41070 - protein, 17 aa, Homo sapiens
  MAP TO AC012611.4; EXPRESSED IN ADULT LIVER, SIGNAL = 3.1; EXPRESSED IN PLACENTA, SIGNAL = 2.9; EXPRESSED IN HELA, SIGNAL = 3.8; EXPRESSED IN FETAL LIVER, SIGNAL = 3.2; EXPRESSED IN BRAIN, SIGNAL = 2.6; EXPRESSED IN BONE MARROW, SIGNAL = 2.8; EXPRESSED IN LUNG, SIGNAL = 3.2; EXPRESSED IN HEART, SIGNAL = 3.3
CSTRAKAARSSGNSCEE

SEQ ID NO: 41071 - protein, 48 aa, Homo sapiens
  MAP TO AL121585.13; EXPRESSED IN LUNG, SIGNAL = 2.8; EXPRESSED IN PLACENTA, SIGNAL = 2.6; EXPRESSED IN ADULT LIVER, SIGNAL = 3.7; EXPRESSED IN HEART, SIGNAL = 2.6; EXPRESSED IN BRAIN, SIGNAL = 2.5; EXPRESSED IN BONE MARROW, SIGNAL =   3; EXPRESSED IN FETAL LIVER, SIGNAL = 3.5; EXPRESSED IN HELA, SIGNAL = 4.1; SWISSPROT HIT: Q9Y5X3, EVALUE 1.00e-21; EST_HUMAN HIT: AA282655.1, EVALUE 2.00e-20
RTKALIDYENSNKALDKARLKSKDVKLAEAHQQECCQKFEQLSESAKE

SEQ ID NO: 41072 - protein, 19 aa, Homo sapiens
  MAP TO AL121585.13; EXPRESSED IN LUNG, SIGNAL = 2.8; EXPRESSED IN PLACENTA, SIGNAL = 2.6; EXPRESSED IN ADULT LIVER, SIGNAL = 3.7; EXPRESSED IN HEART, SIGNAL = 2.6; EXPRESSED IN BRAIN, SIGNAL = 2.5; EXPRESSED IN BONE MARROW, SIGNAL =   3; EXPRESSED IN FETAL LIVER, SIGNAL = 3.5; EXPRESSED IN HELA, SIGNAL = 4.1; EST_HUMAN HIT: AI719171.1, EVALUE 4.00e-04
APKPSLTMRTQTKLWIRPG

SEQ ID NO: 41073 - protein, 37 aa, Homo sapiens
  MAP TO AL162263.1; EXPRESSED IN HEART, SIGNAL = 2.1; EXPRESSED IN BRAIN, SIGNAL = 1.5; EXPRESSED IN LUNG, SIGNAL = 1.7; EXPRESSED IN PLACENTA, SIGNAL = 1.6; EXPRESSED IN ADULT LIVER, SIGNAL = 1.4; EXPRESSED IN FETAL LIVER, SIGNAL = 1.6; EXPRESSED IN BONE MARROW, SIGNAL = 1.6
FLNGSCIHHSFLSSFLSQCQQALFIEIRYSYQCSLVQ

SEQ ID NO: 41074 - protein, 44 aa, Homo sapiens
  MAP TO AL121946.11; EXPRESSED IN HELA, SIGNAL =   4; EXPRESSED IN HEART, SIGNAL = 1.5; EXPRESSED IN BONE MARROW, SIGNAL = 1.7; EXPRESSED IN LUNG, SIGNAL = 1.9; EXPRESSED IN PLACENTA, SIGNAL = 1.3; EXPRESSED IN ADULT LIVER, SIGNAL = 2.2; EXPRESSED IN BRAIN, SIGNAL = 2.9; EXPRESSED IN FETAL LIVER, SIGNAL = 2.7
SLPEVIVTCLRATAHALDTVLALEDAVDWNPGDEVVIISGTGVK

SEQ ID NO: 41075 - protein, 38 aa, Homo sapiens
  MAP TO AC008431.2; EXPRESSED IN HEART, SIGNAL =   2; EXPRESSED IN BONE MARROW, SIGNAL =   2; EXPRESSED IN LUNG, SIGNAL =   2; EXPRESSED IN PLACENTA, SIGNAL = 2.4; EXPRESSED IN ADULT LIVER, SIGNAL = 1.6; EXPRESSED IN FETAL LIVER, SIGNAL = 2.1; EXPRESSED IN BRAIN, SIGNAL = 2.1; SWISSPROT HIT: P43238, EVALUE 2.20e+00
DAEAAAYSSRRLEEQWPWGPASLREQERLKERRPRQAL

SEQ ID NO: 41076 - protein, 23 aa, Homo sapiens
  MAP TO AC008431.2; EXPRESSED IN HEART, SIGNAL =   2; EXPRESSED IN BONE MARROW, SIGNAL =   2; EXPRESSED IN LUNG, SIGNAL =   2; EXPRESSED IN PLACENTA, SIGNAL = 2.4; EXPRESSED IN ADULT LIVER, SIGNAL = 1.6; EXPRESSED IN FETAL LIVER, SIGNAL = 2.1; EXPRESSED IN BRAIN, SIGNAL = 2.1
GCRSCSLFQPPSGRTMALGASKP

SEQ ID NO: 41077 - protein, 20 aa, Homo sapiens
  MAP TO AC022392.3; EXPRESSED IN ADULT LIVER, SIGNAL = 4.4; EXPRESSED IN BRAIN, SIGNAL = 2.9; EXPRESSED IN LUNG, SIGNAL = 4.4; EXPRESSED IN HEART, SIGNAL =   3; EXPRESSED IN BONE MARROW, SIGNAL = 4.5; EXPRESSED IN PLACENTA, SIGNAL = 3.5; EXPRESSED IN HELA, SIGNAL = 3.1; EXPRESSED IN FETAL LIVER, SIGNAL = 3.7
KLRETRKLQKIWKLLALVGS

SEQ ID NO: 41078 - protein, 118 aa, Homo sapiens
  MAP TO AL161781.2; EXPRESSED IN LUNG, SIGNAL =  14; EXPRESSED IN ADULT LIVER, SIGNAL =  17; EXPRESSED IN HEART, SIGNAL =  13; EXPRESSED IN FETAL LIVER, SIGNAL =  14; EXPRESSED IN BRAIN, SIGNAL =  13; EXPRESSED IN BONE MARROW, SIGNAL =  16; EXPRESSED IN PLACENTA, SIGNAL =  15; EXPRESSED IN HELA, SIGNAL =  23; SWISSPROT HIT: P48634, EVALUE 2.10e-01; EST_HUMAN HIT: AI613492.1, EVALUE 6.90e-01
APGETHGNARGSAAWHCGVPEAQGQLGHGPSASLRESLPDGALHPDGALLRESLPDGALHPDRALLRESLPDGALHPDGALLRESLPDGALQSFLRAVPLGGGICVHLGVENSKLNTF

SEQ ID NO: 41079 - protein, 131 aa, Homo sapiens
  MAP TO AL139389.3; EXPRESSED IN ADULT LIVER, SIGNAL = 1.9; EXPRESSED IN FETAL LIVER, SIGNAL = 2.4; EXPRESSED IN BRAIN, SIGNAL = 1.6; EXPRESSED IN LUNG, SIGNAL = 1.8; EXPRESSED IN PLACENTA, SIGNAL = 1.9; EXPRESSED IN HEART, SIGNAL = 2.7; EXPRESSED IN BONE MARROW, SIGNAL = 1.8; SWISSPROT HIT: P02857, EVALUE 3.00e+00; EST_HUMAN HIT: BF348013.1, EVALUE 3.00e-66
SKSNDYLTLNAGSQQERDQAKLTCPSEVSGTILQEREFEANKLQGMQQSDLFKAEYVLIVDSEGEDEAASRKVEQGPPGGIGTAAVRPKSLAISSSLVSDVVRPKTQGTDLKTSSHPEMLHGMAPQQKHGQ

SEQ ID NO: 41080 - protein, 34 aa, Homo sapiens
  MAP TO AC021677.3; EXPRESSED IN PLACENTA, SIGNAL = 1.8; EXPRESSED IN FETAL LIVER, SIGNAL = 1.5; EXPRESSED IN BONE MARROW, SIGNAL = 1.4; EXPRESSED IN HEART, SIGNAL = 1.7; EXPRESSED IN HELA, SIGNAL = 2.7; EXPRESSED IN LUNG, SIGNAL = 1.8; EXPRESSED IN ADULT LIVER, SIGNAL = 2.1; EXPRESSED IN BRAIN, SIGNAL = 1.5; SWISSPROT HIT: Q91044, EVALUE 6.60e-02; EST_HUMAN HIT: R24814.1, EVALUE 8.70e-01
VSIAVGLAAFACVLLVVLFVMINKYGRRSKFGMK

SEQ ID NO: 41081 - protein, 32 aa, Homo sapiens
  MAP TO AC021677.3; EXPRESSED IN ADULT LIVER, SIGNAL = 2.9; EXPRESSED IN BRAIN, SIGNAL = 2.3; EXPRESSED IN LUNG, SIGNAL = 2.8; EXPRESSED IN PLACENTA, SIGNAL = 2.7; EXPRESSED IN HELA, SIGNAL = 4.7; EXPRESSED IN BONE MARROW, SIGNAL = 2.8; EXPRESSED IN HEART, SIGNAL = 2.4; EXPRESSED IN FETAL LIVER, SIGNAL =   3
LNSLKHHQNEGVRDQTEFGFPYLEGPSACEVS

SEQ ID NO: 41082 - protein, 37 aa, Homo sapiens
  MAP TO AC013626.3; EXPRESSED IN ADULT LIVER, SIGNAL =  23; EXPRESSED IN HELA, SIGNAL =  30; EXPRESSED IN BRAIN, SIGNAL =  16; EXPRESSED IN LUNG, SIGNAL =  19; EXPRESSED IN PLACENTA, SIGNAL =  17; EXPRESSED IN FETAL LIVER, SIGNAL =  16; EXPRESSED IN HEART, SIGNAL =  16; EXPRESSED IN BONE MARROW, SIGNAL =  16
VRKNTASAGDGKRTLGRTRCLMSKQQGSSEELQASEA

SEQ ID NO: 41083 - protein, 38 aa, Homo sapiens
  MAP TO AC013626.3; EXPRESSED IN ADULT LIVER, SIGNAL =  23; EXPRESSED IN HELA, SIGNAL =  30; EXPRESSED IN BRAIN, SIGNAL =  16; EXPRESSED IN LUNG, SIGNAL =  19; EXPRESSED IN PLACENTA, SIGNAL =  17; EXPRESSED IN FETAL LIVER, SIGNAL =  16; EXPRESSED IN HEART, SIGNAL =  16; EXPRESSED IN BONE MARROW, SIGNAL =  16
VCGKTRLLLEMEKGLWGGQDASCQSNKVPVKSCRPQRQ

SEQ ID NO: 41084 - protein, 39 aa, Homo sapiens
  MAP TO AC018761.2; EXPRESSED IN ADULT LIVER, SIGNAL = 6.7; EXPRESSED IN BRAIN, SIGNAL = 6.4; EXPRESSED IN BONE MARROW, SIGNAL = 8.1; EXPRESSED IN LUNG, SIGNAL = 7.7; EXPRESSED IN HELA, SIGNAL = 4.8; EXPRESSED IN PLACENTA, SIGNAL =  13; EXPRESSED IN HEART, SIGNAL = 6.2; EXPRESSED IN FETAL LIVER, SIGNAL = 5.8; SWISSPROT HIT: P25387, EVALUE 1.00e-03; EST_HUMAN HIT: BE392693.1, EVALUE 1.00e-17
DGNYCLTCGSDKTLKLWNPLRGTLLRTYSGHGYEVLDAA

SEQ ID NO: 41085 - protein, 27 aa, Homo sapiens
  MAP TO AL157381.7; EXPRESSED IN HELA, SIGNAL = 2.6; EXPRESSED IN LUNG, SIGNAL = 1.5; EXPRESSED IN ADULT LIVER, SIGNAL = 1.7; EXPRESSED IN FETAL LIVER, SIGNAL = 1.8; EXPRESSED IN BRAIN, SIGNAL = 1.7; EXPRESSED IN BONE MARROW, SIGNAL =   2; EXPRESSED IN PLACENTA, SIGNAL = 1.7; EXPRESSED IN HEART, SIGNAL = 1.7; SWISSPROT HIT: O41033, EVALUE 2.20e+00; EST_HUMAN HIT: AI935086.1, EVALUE 2.00e-05
AKKAVTVLARVIDPDYQDEISLLLHNG

SEQ ID NO: 41086 - protein, 77 aa, Homo sapiens
  MAP TO AC009410.3; EXPRESSED IN ADULT LIVER, SIGNAL = 0.69; EXPRESSED IN BRAIN, SIGNAL = 0.85; EXPRESSED IN LUNG, SIGNAL = 1.2; EXPRESSED IN HEART, SIGNAL = 1.3; EXPRESSED IN PLACENTA, SIGNAL = 1.8; EXPRESSED IN FETAL LIVER, SIGNAL = 1.1; EXPRESSED IN BONE MARROW, SIGNAL = 1.1; SWISSPROT HIT: Q49460, EVALUE 1.30e+00; EST_HUMAN HIT: T94149.1, EVALUE 3.00e-05
LFHYINDNILTSESLTDLETVLRIVLDSLKDKEWKVNLKKKQGPSIEIKFLRVSWLRCKTYSELSLIRQHSSPFPRQ

SEQ ID NO: 41087 - protein, 31 aa, Homo sapiens
  MAP TO AC022562.3; EXPRESSED IN ADULT LIVER, SIGNAL = 0.99; EXPRESSED IN BONE MARROW, SIGNAL =   1; EXPRESSED IN HEART, SIGNAL = 1.3; EXPRESSED IN LUNG, SIGNAL = 1.1; EXPRESSED IN PLACENTA, SIGNAL = 0.99; EXPRESSED IN FETAL LIVER, SIGNAL = 0.96; EXPRESSED IN BRAIN, SIGNAL = 1.2
MEEVEMMVESLLDVLLQTLLTIMSKSHAQEA

SEQ ID NO: 41088 - protein, 49 aa, Homo sapiens
  MAP TO AC010910.6; EXPRESSED IN HEART, SIGNAL = 2.3; EXPRESSED IN FETAL LIVER, SIGNAL = 2.1; EXPRESSED IN BRAIN, SIGNAL = 2.6; EXPRESSED IN LUNG, SIGNAL = 2.7; EXPRESSED IN HELA, SIGNAL = 2.2; EXPRESSED IN PLACENTA, SIGNAL = 2.5; EXPRESSED IN ADULT LIVER, SIGNAL = 2.7; EXPRESSED IN BONE MARROW, SIGNAL = 2.2
LFLYLDIIIQNILEANKHIVDINMQSILEKESRFSYGVLKSSGSNSASE

SEQ ID NO: 41089 - protein, 39 aa, Homo sapiens
  MAP TO AC010910.6; EXPRESSED IN HEART, SIGNAL = 2.3; EXPRESSED IN FETAL LIVER, SIGNAL = 2.1; EXPRESSED IN BRAIN, SIGNAL = 2.6; EXPRESSED IN LUNG, SIGNAL = 2.7; EXPRESSED IN HELA, SIGNAL = 2.2; EXPRESSED IN PLACENTA, SIGNAL = 2.5; EXPRESSED IN ADULT LIVER, SIGNAL = 2.7; EXPRESSED IN BONE MARROW, SIGNAL = 2.2; EST_HUMAN HIT: AI056885.1, EVALUE 7.20e+00; SWISSPROT HIT: P11531, EVALUE 8.30e+00
FYFSIWTSSSKTYLRQINTSWTSTCNPYLRKKAVFHMVS

SEQ ID NO: 41090 - protein, 92 aa, Homo sapiens
  MAP TO AC019233.3; EXPRESSED IN LUNG, SIGNAL = 5.5; EXPRESSED IN PLACENTA, SIGNAL = 4.5; EXPRESSED IN HEART, SIGNAL =   4; EXPRESSED IN FETAL LIVER, SIGNAL = 4.5; EXPRESSED IN BONE MARROW, SIGNAL = 4.1; EXPRESSED IN ADULT LIVER, SIGNAL = 5.1; EXPRESSED IN HELA, SIGNAL = 6.7; EXPRESSED IN BRAIN, SIGNAL = 4.3; SWISSPROT HIT: P76273, EVALUE 4.00e-04; EST_HUMAN HIT: C06158.1, EVALUE 3.00e-49
SAIKALRPGGILVYSTCTLSKAENQDVISEILNSHGNIMPMDIKGIARTCSHDFTFAPTGQECGLLVIPDKGKAWGPMYVAKLKKSWSTGKW

SEQ ID NO: 41091 - protein, 26 aa, Homo sapiens
  MAP TO AC019233.3; EXPRESSED IN LUNG, SIGNAL = 5.5; EXPRESSED IN PLACENTA, SIGNAL = 4.5; EXPRESSED IN HEART, SIGNAL =   4; EXPRESSED IN FETAL LIVER, SIGNAL = 4.5; EXPRESSED IN BONE MARROW, SIGNAL = 4.1; EXPRESSED IN ADULT LIVER, SIGNAL = 5.1; EXPRESSED IN HELA, SIGNAL = 6.7; EXPRESSED IN BRAIN, SIGNAL = 4.3; EST_HUMAN HIT: AA429938.1, EVALUE 4.00e-08
LQLRPYVLEGYLYTLHARFPRQKIKM

SEQ ID NO: 41092 - protein, 43 aa, Homo sapiens
  MAP TO AC024575.1; EXPRESSED IN LUNG, SIGNAL = 6.3; EXPRESSED IN HELA, SIGNAL = 4.1; EXPRESSED IN HEART, SIGNAL =   5; EXPRESSED IN PLACENTA, SIGNAL = 5.7; EXPRESSED IN FETAL LIVER, SIGNAL = 4.6; EXPRESSED IN ADULT LIVER, SIGNAL =   6; EXPRESSED IN BRAIN, SIGNAL =   5; EXPRESSED IN BONE MARROW, SIGNAL = 5.6; SWISSPROT HIT: P14314, EVALUE 2.00e-09; EST_HUMAN HIT: BE870108.1, EVALUE 2.00e-08
KKLIELQAGKKSLEDQVEMLRTVKEEAEKPEREAKEQHQKLWE

SEQ ID NO: 41093 - protein, 22 aa, Homo sapiens
  MAP TO AC024575.1; EXPRESSED IN LUNG, SIGNAL = 6.3; EXPRESSED IN HELA, SIGNAL = 4.1; EXPRESSED IN HEART, SIGNAL =   5; EXPRESSED IN PLACENTA, SIGNAL = 5.7; EXPRESSED IN FETAL LIVER, SIGNAL = 4.6; EXPRESSED IN ADULT LIVER, SIGNAL =   6; EXPRESSED IN BRAIN, SIGNAL =   5; EXPRESSED IN BONE MARROW, SIGNAL = 5.6; EST_HUMAN HIT: AU122113.1, EVALUE 6.00e-07
KSSLSYRLGRSLWKTRWRCCGQ

SEQ ID NO: 41094 - protein, 136 aa, Homo sapiens
  MAP TO AL139248.2; EXPRESSED IN LUNG, SIGNAL = 2.4; EXPRESSED IN ADULT LIVER, SIGNAL = 2.8; EXPRESSED IN FETAL LIVER, SIGNAL = 2.7; EXPRESSED IN BRAIN, SIGNAL = 2.6; EXPRESSED IN HEART, SIGNAL = 3.2; EXPRESSED IN PLACENTA, SIGNAL = 3.4; EXPRESSED IN HELA, SIGNAL = 5.3; EXPRESSED IN BONE MARROW, SIGNAL = 2.9; SWISSPROT HIT: Q62786, EVALUE 1.00e-05; EST_HUMAN HIT: BE746215.1, EVALUE 3.00e-52
SKLKVNSRSQVQELSINSNTDIECSILSRSNGNLQLAIIWYFSPVSTNASWLKILEMDQTNVIKTGDEFHTPQRKQKFHTEKVSQDLFQLHILNVEDSDRGKYHCAVEEWLLSTNGTWHKLGEKKSGLTELKLKPT

SEQ ID NO: 41095 - protein, 31 aa, Homo sapiens
  MAP TO AL096863.10; EXPRESSED IN PLACENTA, SIGNAL = 1.3; EXPRESSED IN FETAL LIVER, SIGNAL = 1.5; EXPRESSED IN BRAIN, SIGNAL = 0.87; EXPRESSED IN ADULT LIVER, SIGNAL = 1.2; EXPRESSED IN HEART, SIGNAL = 1.2; EXPRESSED IN LUNG, SIGNAL =   2; EXPRESSED IN BONE MARROW, SIGNAL = 1.9
VLSVSFLSVVYEKTLVYFLQSNIVSSNCPEF

SEQ ID NO: 41096 - protein, 44 aa, Homo sapiens
  MAP TO AC011666.18; EXPRESSED IN PLACENTA, SIGNAL = 3.1; EXPRESSED IN ADULT LIVER, SIGNAL = 3.9; EXPRESSED IN HELA, SIGNAL = 3.6; EXPRESSED IN FETAL LIVER, SIGNAL = 8.9; EXPRESSED IN BRAIN, SIGNAL =   2; EXPRESSED IN LUNG, SIGNAL = 2.6; EXPRESSED IN HEART, SIGNAL = 2.2; EXPRESSED IN BONE MARROW, SIGNAL =  59; EST_HUMAN HIT: AI952029.1, EVALUE 5.00e-19; SWISSPROT HIT: P06702, EVALUE 4.00e-20
QLERNIETIINTFHQYSVKLGHPDTLNQGEFKELVRKDLQNFLK

SEQ ID NO: 41097 - protein, 24 aa, Homo sapiens
  MAP TO AC013746.4; EXPRESSED IN PLACENTA, SIGNAL = 3.8; EXPRESSED IN ADULT LIVER, SIGNAL =   5; EXPRESSED IN BRAIN, SIGNAL = 2.7; EXPRESSED IN BONE MARROW, SIGNAL = 5.6; EXPRESSED IN LUNG, SIGNAL = 5.7; EXPRESSED IN HELA, SIGNAL = 5.8; EXPRESSED IN HEART, SIGNAL = 3.6; EXPRESSED IN FETAL LIVER, SIGNAL = 4.8
EEEEEEKKKKKKKKKKKKRKMKAS

SEQ ID NO: 41098 - protein, 74 aa, Homo sapiens
  MAP TO AC021308.3; EXPRESSED IN PLACENTA, SIGNAL = 2.2; EXPRESSED IN ADULT LIVER, SIGNAL = 2.2; EXPRESSED IN FETAL LIVER, SIGNAL = 1.7; EXPRESSED IN BONE MARROW, SIGNAL =   2; EXPRESSED IN HEART, SIGNAL = 1.8; EXPRESSED IN BRAIN, SIGNAL = 1.9; EXPRESSED IN LUNG, SIGNAL = 2.1; EST_HUMAN HIT: BE273893.1, EVALUE 1.00e-23; SWISSPROT HIT: P34678, EVALUE 6.00e-10
NLKRVAETWMDEFAEYIYQRRPEYRHLSTGDISAQKELRKQLKCKDFKWFMAAVAWDVPKYYPPVEPPPAAWGE

SEQ ID NO: 41099 - protein, 68 aa, Homo sapiens
  MAP TO AC021308.3; EXPRESSED IN PLACENTA, SIGNAL = 2.2; EXPRESSED IN ADULT LIVER, SIGNAL = 2.2; EXPRESSED IN FETAL LIVER, SIGNAL = 1.7; EXPRESSED IN BONE MARROW, SIGNAL =   2; EXPRESSED IN HEART, SIGNAL = 1.8; EXPRESSED IN BRAIN, SIGNAL = 1.9; EXPRESSED IN LUNG, SIGNAL = 2.1; EST_HUMAN HIT: BE273893.1, EVALUE 1.00e-05
LRPGWMNLPSTFTSGGRSTGISPRGTSLPRRSCASSSSARTSNGSWLLWPGTCLNTTLQWSPRLLPGG

SEQ ID NO: 41100 - protein, 57 aa, Homo sapiens
  MAP TO AL121575.24; EXPRESSED IN LUNG, SIGNAL = 2.2; EXPRESSED IN ADULT LIVER, SIGNAL = 1.5; EXPRESSED IN FETAL LIVER, SIGNAL = 3.9; EXPRESSED IN BRAIN, SIGNAL = 1.5; EXPRESSED IN BONE MARROW, SIGNAL = 2.7; EXPRESSED IN PLACENTA, SIGNAL = 1.6; EXPRESSED IN HEART, SIGNAL = 1.5; EST_HUMAN HIT: AV693152.1, EVALUE 4.00e-27; SWISSPROT HIT: P05089, EVALUE 7.00e-28
CDVKDYGDLPFADIPNDSPFQIVKNPRSVGKASEQLAGKVAEVKKNGRISLVLGGDH

SEQ ID NO: 41101 - protein, 34 aa, Homo sapiens
  MAP TO AL133293.14; EXPRESSED IN PLACENTA, SIGNAL = 1.1; EXPRESSED IN ADULT LIVER, SIGNAL = 1.3; EXPRESSED IN HEART, SIGNAL = 1.4; EXPRESSED IN BRAIN, SIGNAL = 1.4; EXPRESSED IN BONE MARROW, SIGNAL = 1.6; EXPRESSED IN LUNG, SIGNAL = 1.4; EXPRESSED IN FETAL LIVER, SIGNAL = 1.5; EST_HUMAN HIT: AW268557.1, EVALUE 3.40e+00; SWISSPROT HIT: O62732, EVALUE 3.80e+00
CHEAPTGSPACLSLGGFQHQPQPSGTTAGGPRHD

SEQ ID NO: 41102 - protein, 118 aa, Homo sapiens
  MAP TO AC022045.2; EXPRESSED IN PLACENTA, SIGNAL =   2; EXPRESSED IN ADULT LIVER, SIGNAL = 2.2; EXPRESSED IN FETAL LIVER, SIGNAL = 2.9; EXPRESSED IN BRAIN, SIGNAL = 2.1; EXPRESSED IN LUNG, SIGNAL = 2.6; EXPRESSED IN HEART, SIGNAL = 1.9; EXPRESSED IN BONE MARROW, SIGNAL = 1.8; EST_HUMAN HIT: BE739886.1, EVALUE 5.00e-06; SWISSPROT HIT: O94956, EVALUE 3.00e-31
FPRVLLQTLRHPIFLLVVLSQVCLSSMAAGMATFLPKFLERQFSITASYANLLIGCLSFPSVIVGIVVGGVLVKRLHLGPVGCGALCLLGMLLCLFFSLPLFFIGCSSHQIAGITHQT

SEQ ID NO: 41103 - protein, 63 aa, Homo sapiens
  MAP TO AC022045.2; EXPRESSED IN PLACENTA, SIGNAL =   2; EXPRESSED IN ADULT LIVER, SIGNAL = 2.2; EXPRESSED IN FETAL LIVER, SIGNAL = 2.9; EXPRESSED IN BRAIN, SIGNAL = 2.1; EXPRESSED IN LUNG, SIGNAL = 2.6; EXPRESSED IN HEART, SIGNAL = 1.9; EXPRESSED IN BONE MARROW, SIGNAL = 1.8; EST_HUMAN HIT: BE008547.1, EVALUE 6.00e-15
CCCRPYATPSSCWWSCPRYACHPWLRAWPPSCPSSWSASFPSQPPTPTCSSAASPSLRSSWAS

SEQ ID NO: 41104 - protein, 28 aa, Homo sapiens
  MAP TO AC022045.2; EXPRESSED IN PLACENTA, SIGNAL =   2; EXPRESSED IN ADULT LIVER, SIGNAL = 2.2; EXPRESSED IN FETAL LIVER, SIGNAL = 2.9; EXPRESSED IN BRAIN, SIGNAL = 2.1; EXPRESSED IN LUNG, SIGNAL = 2.6; EXPRESSED IN HEART, SIGNAL = 1.9; EXPRESSED IN BONE MARROW, SIGNAL = 1.8
CCCASSSACRSSLSAAPATRLRASHTRP

SEQ ID NO: 41105 - protein, 33 aa, Homo sapiens
  MAP TO AC013291.4; EXPRESSED IN HELA, SIGNAL = 2.2; EXPRESSED IN LUNG, SIGNAL =   2; EXPRESSED IN BRAIN, SIGNAL = 1.7; EXPRESSED IN BONE MARROW, SIGNAL = 1.8; EXPRESSED IN PLACENTA, SIGNAL = 1.9; EXPRESSED IN ADULT LIVER, SIGNAL = 1.9; EXPRESSED IN FETAL LIVER, SIGNAL = 1.7; EXPRESSED IN HEART, SIGNAL = 1.9; EST_HUMAN HIT: AU135853.1, EVALUE 3.00e-07
ITFDNKAHSGRIKISLDNDISIRECKDWHVSGS

SEQ ID NO: 41106 - protein, 44 aa, Homo sapiens
  MAP TO AL139245.2; EXPRESSED IN PLACENTA, SIGNAL = 2.5; EXPRESSED IN HELA, SIGNAL = 3.9; EXPRESSED IN HEART, SIGNAL =   2; EXPRESSED IN FETAL LIVER, SIGNAL = 3.3; EXPRESSED IN BONE MARROW, SIGNAL = 3.2; EXPRESSED IN LUNG, SIGNAL = 1.9; EXPRESSED IN ADULT LIVER, SIGNAL = 1.9; EXPRESSED IN BRAIN, SIGNAL = 2.2; EST_HUMAN HIT: AU158595.1, EVALUE 6.00e-14; SWISSPROT HIT: P18080, EVALUE 2.10e+00
ENPVERLADDRSNCFLLNWGIVGVMQLRFPQEGCLQCHQHQSMG

SEQ ID NO: 41107 - protein, 21 aa, Homo sapiens
  MAP TO AL139245.2; EXPRESSED IN PLACENTA, SIGNAL = 2.5; EXPRESSED IN HELA, SIGNAL = 3.9; EXPRESSED IN HEART, SIGNAL =   2; EXPRESSED IN FETAL LIVER, SIGNAL = 3.3; EXPRESSED IN BONE MARROW, SIGNAL = 3.2; EXPRESSED IN LUNG, SIGNAL = 1.9; EXPRESSED IN ADULT LIVER, SIGNAL = 1.9; EXPRESSED IN BRAIN, SIGNAL = 2.2; EST_HUMAN HIT: R27388.1, EVALUE 1.30e-02
LAHALMLMTLKAPLLRKSQLH

SEQ ID NO: 41108 - protein, 20 aa, Homo sapiens
  MAP TO AC026236.4; EXPRESSED IN PLACENTA, SIGNAL = 1.5; EXPRESSED IN ADULT LIVER, SIGNAL = 2.2; EXPRESSED IN HEART, SIGNAL = 1.5; EXPRESSED IN FETAL LIVER, SIGNAL = 1.3; EXPRESSED IN BRAIN, SIGNAL = 1.3; EXPRESSED IN BONE MARROW, SIGNAL = 1.3; EXPRESSED IN LUNG, SIGNAL = 0.86
CGHPPHGLPNTVPRPNTAIL

SEQ ID NO: 41109 - protein, 18 aa, Homo sapiens
  MAP TO AC008474.4; EXPRESSED IN LUNG, SIGNAL = 1.6; EXPRESSED IN PLACENTA, SIGNAL = 1.6; EXPRESSED IN ADULT LIVER, SIGNAL = 1.7; EXPRESSED IN HEART, SIGNAL = 1.4; EXPRESSED IN FETAL LIVER, SIGNAL = 1.4; EXPRESSED IN BONE MARROW, SIGNAL = 1.8; EXPRESSED IN BRAIN, SIGNAL = 1.5
EPLQTLIMWLELTRMSPM

SEQ ID NO: 41110 - protein, 26 aa, Homo sapiens
  MAP TO AC008928.5; EXPRESSED IN PLACENTA, SIGNAL = 3.2; EXPRESSED IN HELA, SIGNAL = 4.6; EXPRESSED IN LUNG, SIGNAL = 4.7; EXPRESSED IN ADULT LIVER, SIGNAL = 4.4; EXPRESSED IN HEART, SIGNAL = 4.8; EXPRESSED IN BRAIN, SIGNAL =   4; EXPRESSED IN BONE MARROW, SIGNAL = 4.3; EXPRESSED IN FETAL LIVER, SIGNAL = 4.6
SILLSSAKNTKLQQRMDIFFNWTRMY

SEQ ID NO: 41111 - protein, 67 aa, Homo sapiens
  MAP TO AC022470.3; EXPRESSED IN HELA, SIGNAL = 3.8; EXPRESSED IN HEART, SIGNAL = 2.9; EXPRESSED IN LUNG, SIGNAL = 3.1; EXPRESSED IN PLACENTA, SIGNAL = 2.5; EXPRESSED IN ADULT LIVER, SIGNAL = 2.9; EXPRESSED IN BRAIN, SIGNAL = 2.4; EXPRESSED IN FETAL LIVER, SIGNAL = 2.9; EXPRESSED IN BONE MARROW, SIGNAL = 3.3; EST_HUMAN HIT: AW838394.1, EVALUE 1.00e-35; SWISSPROT HIT: P34653, EVALUE 5.60e+00
PDGARLLTTDQKSEIRVYSASQWDCPLGLIPHPHRHFQHLTPIKVSGGGKELAEGGCDHEAGAGLPT

SEQ ID NO: 41112 - protein, 54 aa, Homo sapiens; identical to SEQ ID NO: 37803
  MAP TO AC007325.51; EXPRESSED IN PLACENTA, SIGNAL = 2.8; EXPRESSED IN HELA, SIGNAL = 2.9; EXPRESSED IN ADULT LIVER, SIGNAL = 3.1; EXPRESSED IN FETAL LIVER, SIGNAL = 3.1; EXPRESSED IN BRAIN, SIGNAL =   3; EXPRESSED IN BONE MARROW, SIGNAL = 2.7; EXPRESSED IN LUNG, SIGNAL = 2.9; EXPRESSED IN HEART, SIGNAL = 2.9; SWISSPROT HIT: P11274, EVALUE 2.00e-24; EST_HUMAN HIT: AL043314.2, EVALUE 2.00e-24

SEQ ID NO: 41113 - protein, 17 aa, Homo sapiens
  MAP TO AF241726.1; EXPRESSED IN LUNG, SIGNAL = 6.2; EXPRESSED IN ADULT LIVER, SIGNAL = 9.6; EXPRESSED IN HELA, SIGNAL = 3.7; EXPRESSED IN HEART, SIGNAL = 2.9; EXPRESSED IN FETAL LIVER, SIGNAL =  15; EXPRESSED IN BRAIN, SIGNAL = 3.7; EXPRESSED IN BONE MARROW, SIGNAL = 4.7; EXPRESSED IN PLACENTA, SIGNAL = 2.6; EST_HUMAN HIT: BF128549.1, EVALUE 3.70e+00
WPAARPGWWSISSEGSR

SEQ ID NO: 41114 - protein, 34 aa, Homo sapiens
  MAP TO AC024248.3; EXPRESSED IN PLACENTA, SIGNAL = 4.7; EXPRESSED IN HEART, SIGNAL = 4.5; EXPRESSED IN FETAL LIVER, SIGNAL = 3.9; EXPRESSED IN BONE MARROW, SIGNAL = 4.5; EXPRESSED IN LUNG, SIGNAL = 3.9; EXPRESSED IN ADULT LIVER, SIGNAL = 4.7; EXPRESSED IN BRAIN, SIGNAL = 5.3; EST_HUMAN HIT: AA169111.1, EVALUE 4.00e-07
KRFWRAQKTTGKCGKVWNFLETYGMALTKMLTVM

SEQ ID NO: 41115 - protein, 61 aa, Homo sapiens
  MAP TO AL139250.2; EXPRESSED IN HELA, SIGNAL = 2.6; EXPRESSED IN HEART, SIGNAL = 1.7; EXPRESSED IN LUNG, SIGNAL = 2.3; EXPRESSED IN PLACENTA, SIGNAL = 2.2; EXPRESSED IN ADULT LIVER, SIGNAL = 2.4; EXPRESSED IN BRAIN, SIGNAL = 2.1; EXPRESSED IN FETAL LIVER, SIGNAL = 2.8; EXPRESSED IN BONE MARROW, SIGNAL = 2.3; EST_HUMAN HIT: AW854568.1, EVALUE 3.50e-02
DQLVPGVPGPSSEAEDDPGEAFEFDDSDDEEDTSAALGVPSLAPERDTDPPLIHLDSIPVT

SEQ ID NO: 41116 - protein, 52 aa, Homo sapiens
  MAP TO AL139250.2; EXPRESSED IN HELA, SIGNAL = 2.6; EXPRESSED IN HEART, SIGNAL = 1.7; EXPRESSED IN LUNG, SIGNAL = 2.3; EXPRESSED IN PLACENTA, SIGNAL = 2.2; EXPRESSED IN ADULT LIVER, SIGNAL = 2.4; EXPRESSED IN BRAIN, SIGNAL = 2.1; EXPRESSED IN FETAL LIVER, SIGNAL = 2.8; EXPRESSED IN BONE MARROW, SIGNAL = 2.3; EST_HUMAN HIT: AW515671.1, EVALUE 1.70e+00
EISWFQESQAPPLRQRTTQERRLSLMTVMMKRTPAQPWASPALLLRGTQTPH

SEQ ID NO: 41117 - protein, 53 aa, Homo sapiens; identical to SEQ ID NO: 33586
  MAP TO AP001442.1; EXPRESSED IN ADULT LIVER, SIGNAL = 4.9; EXPRESSED IN HELA, SIGNAL = 4.7; EXPRESSED IN LUNG, SIGNAL = 5.4; EXPRESSED IN PLACENTA, SIGNAL = 3.9; EXPRESSED IN HEART, SIGNAL = 4.5; EXPRESSED IN FETAL LIVER, SIGNAL = 4.3; EXPRESSED IN BRAIN, SIGNAL = 8.3; EXPRESSED IN BONE MARROW, SIGNAL = 4.1; EST_HUMAN HIT: AW815546.1, EVALUE 5.00e-23; SWISSPROT HIT: Q95241, EVALUE 4.00e-24

SEQ ID NO: 41118 - protein, 35 aa, Homo sapiens; identical to SEQ ID NO: 40258
  MAP TO AP001442.1; EXPRESSED IN ADULT LIVER, SIGNAL = 4.9; EXPRESSED IN HELA, SIGNAL = 4.7; EXPRESSED IN LUNG, SIGNAL = 5.4; EXPRESSED IN PLACENTA, SIGNAL = 3.9; EXPRESSED IN HEART, SIGNAL = 4.5; EXPRESSED IN FETAL LIVER, SIGNAL = 4.3; EXPRESSED IN BRAIN, SIGNAL = 8.3; EXPRESSED IN BONE MARROW, SIGNAL = 4.1; EST_HUMAN HIT: BF357709.1, EVALUE 2.00e-12; SWISSPROT HIT: P48837, EVALUE 8.40e+00

SEQ ID NO: 41119 - protein, 82 aa, Homo sapiens
  MAP TO AC024196.2; EXPRESSED IN BRAIN, SIGNAL = 2.6; EXPRESSED IN LUNG, SIGNAL = 2.9; EXPRESSED IN ADULT LIVER, SIGNAL = 2.7; EXPRESSED IN HELA, SIGNAL = 3.1; EXPRESSED IN PLACENTA, SIGNAL = 2.5; EXPRESSED IN HEART, SIGNAL = 2.6; EXPRESSED IN FETAL LIVER, SIGNAL = 2.4; EXPRESSED IN BONE MARROW, SIGNAL = 2.6; EST_HUMAN HIT: BE272256.1, EVALUE 5.00e-17; SWISSPROT HIT: P35908, EVALUE 2.00e-24
EISQIHQSVTDTNVILSMDNSRNLDLDSIIAEVKAQYEEIAQRSKEEAEALYHSKASRGNVGRATAPCHELGCTPSWKVYSK

SEQ ID NO: 41120 - protein, 59 aa, Homo sapiens
  MAP TO AC024196.2; EXPRESSED IN BRAIN, SIGNAL = 2.6; EXPRESSED IN LUNG, SIGNAL = 2.9; EXPRESSED IN ADULT LIVER, SIGNAL = 2.7; EXPRESSED IN HELA, SIGNAL = 3.1; EXPRESSED IN PLACENTA, SIGNAL = 2.5; EXPRESSED IN HEART, SIGNAL = 2.6; EXPRESSED IN FETAL LIVER, SIGNAL = 2.4; EXPRESSED IN BONE MARROW, SIGNAL = 2.6
RYPRYIRVSLTPTSSSPWTTAATWTWIASSPRSRPSMRRSPRGARKKRRPCTTARQVEG

SEQ ID NO: 41121 - protein, 27 aa, Homo sapiens
  MAP TO AC027273.2; EXPRESSED IN HEART, SIGNAL = 7.4; EXPRESSED IN BRAIN, SIGNAL = 7.9; EXPRESSED IN BONE MARROW, SIGNAL = 8.2; EXPRESSED IN FETAL LIVER, SIGNAL = 7.7; EXPRESSED IN HELA, SIGNAL =  11; EXPRESSED IN ADULT LIVER, SIGNAL =  11; EXPRESSED IN PLACENTA, SIGNAL =   9; EXPRESSED IN LUNG, SIGNAL =  10
KIKSKSENRHQVENLPESNVNIKESKN

SEQ ID NO: 41122 - protein, 21 aa, Homo sapiens
  MAP TO AC025011.2; EXPRESSED IN BRAIN, SIGNAL =  10; EXPRESSED IN BONE MARROW, SIGNAL = 7.8; EXPRESSED IN LUNG, SIGNAL =   7; EXPRESSED IN PLACENTA, SIGNAL = 7.4; EXPRESSED IN ADULT LIVER, SIGNAL = 9.3; EXPRESSED IN HELA, SIGNAL = 9.4; EXPRESSED IN FETAL LIVER, SIGNAL = 7.2; EXPRESSED IN HEART, SIGNAL = 6.1; EST_HUMAN HIT: BE878498.1, EVALUE 9.50e-01
MEKSPSTGRSQRWRVPVSPAE

SEQ ID NO: 41123 - protein, 71 aa, Homo sapiens
  MAP TO AC025011.2; EXPRESSED IN BRAIN, SIGNAL =  10; EXPRESSED IN BONE MARROW, SIGNAL = 7.8; EXPRESSED IN LUNG, SIGNAL =   7; EXPRESSED IN PLACENTA, SIGNAL = 7.4; EXPRESSED IN ADULT LIVER, SIGNAL = 9.3; EXPRESSED IN HELA, SIGNAL = 9.4; EXPRESSED IN FETAL LIVER, SIGNAL = 7.2; EXPRESSED IN HEART, SIGNAL = 6.1; EST_HUMAN HIT: AI921598.1, EVALUE 4.00e-27; SWISSPROT HIT: P41242, EVALUE 2.10e-01
AQQVKLALAIFVICLCLATSPSTWPCGTGGPLSPTPRRSHTSPRTLSRGFSCWCPAPTTPTRWGPGSVLPS

SEQ ID NO: 41124 - protein, 58 aa, Homo sapiens
  MAP TO AC013626.3; EXPRESSED IN PLACENTA, SIGNAL = 7.3; EXPRESSED IN FETAL LIVER, SIGNAL = 7.2; EXPRESSED IN HEART, SIGNAL = 4.4; EXPRESSED IN BRAIN, SIGNAL = 5.2; EXPRESSED IN BONE MARROW, SIGNAL = 4.4; EXPRESSED IN HELA, SIGNAL =   4; EXPRESSED IN ADULT LIVER, SIGNAL = 5.1; EXPRESSED IN LUNG, SIGNAL = 5.1; EST_HUMAN HIT: BF448617.1, EVALUE 2.00e-27; SWISSPROT HIT: P46976, EVALUE 1.00e-28
KVLETVFDEVIMVDVLDSGDSAHLTLMKRPELGVTLTKLHCWSLTQYSKCVFMDADTL

SEQ ID NO: 41125 - protein, 35 aa, Homo sapiens
  MAP TO AC019233.3; EXPRESSED IN BONE MARROW, SIGNAL = 1.2; EXPRESSED IN LUNG, SIGNAL = 1.3; EXPRESSED IN HEART, SIGNAL = 1.2; EXPRESSED IN PLACENTA, SIGNAL = 1.3; EXPRESSED IN ADULT LIVER, SIGNAL = 1.6; EXPRESSED IN HELA, SIGNAL = 2.2; EXPRESSED IN FETAL LIVER, SIGNAL = 1.3; EXPRESSED IN BRAIN, SIGNAL = 1.2
VGKKQSPGDLLQDEEHQVIVVALRMKMSLLFIPIV

SEQ ID NO: 41126 - protein, 48 aa, Homo sapiens
  MAP TO AC021855.3; EXPRESSED IN PLACENTA, SIGNAL = 4.9; EXPRESSED IN FETAL LIVER, SIGNAL =   5; EXPRESSED IN HEART, SIGNAL = 5.3; EXPRESSED IN BONE MARROW, SIGNAL = 5.4; EXPRESSED IN BRAIN, SIGNAL = 5.4; EXPRESSED IN HELA, SIGNAL = 8.4; EXPRESSED IN ADULT LIVER, SIGNAL = 6.2; EXPRESSED IN LUNG, SIGNAL = 5.3; EST_HUMAN HIT: BF439434.1, EVALUE 6.70e+00; SWISSPROT HIT: P14417, EVALUE 2.10e+00
GPVIPMAINEPMSVTTSPTIIPVLYRTPTTELPSGAVAPLRSEFLMTL

SEQ ID NO: 41127 - protein, 66 aa, Homo sapiens
  MAP TO AC016706.2; EXPRESSED IN PLACENTA, SIGNAL = 2.1; EXPRESSED IN ADULT LIVER, SIGNAL = 2.9; EXPRESSED IN HELA, SIGNAL = 3.1; EXPRESSED IN FETAL LIVER, SIGNAL = 1.8; EXPRESSED IN BRAIN, SIGNAL =   2; EXPRESSED IN LUNG, SIGNAL = 2.2; EXPRESSED IN HEART, SIGNAL = 1.9; EXPRESSED IN BONE MARROW, SIGNAL = 1.9; EST_HUMAN HIT: AA626411.1, EVALUE 2.00e-06
KFLISIGNLIILAFTVHISYQLSWLQPCNQSLQSSKLSLIFFSSSEPTKFFKLLPTTQFQSHFYIF

SEQ ID NO: 41128 - protein, 19 aa, Homo sapiens
  MAP TO AC018583.3; EXPRESSED IN ADULT LIVER, SIGNAL = 7.1; EXPRESSED IN HELA, SIGNAL = 8.5; EXPRESSED IN BRAIN, SIGNAL = 5.7; EXPRESSED IN LUNG, SIGNAL = 5.9; EXPRESSED IN HEART, SIGNAL = 5.2; EXPRESSED IN PLACENTA, SIGNAL = 4.9; EXPRESSED IN FETAL LIVER, SIGNAL = 5.2; EXPRESSED IN BONE MARROW, SIGNAL = 5.8; EST_HUMAN HIT: BE165980.1, EVALUE 2.10e+00
DFEWFKTSVEGVAADVVEI

SEQ ID NO: 41129 - protein, 23 aa, Homo sapiens
  MAP TO AC022038.2; EXPRESSED IN LUNG, SIGNAL =   2; EXPRESSED IN HELA, SIGNAL = 2.5; EXPRESSED IN PLACENTA, SIGNAL = 2.1; EXPRESSED IN ADULT LIVER, SIGNAL = 1.9; EXPRESSED IN HEART, SIGNAL = 1.8; EXPRESSED IN FETAL LIVER, SIGNAL = 1.9; EXPRESSED IN BRAIN, SIGNAL = 1.8; EXPRESSED IN BONE MARROW, SIGNAL = 1.7
RGKRRLITRIIKVMMHLMKACIL

SEQ ID NO: 41130 - protein, 40 aa, Homo sapiens
  MAP TO AC023032.2; EXPRESSED IN LUNG, SIGNAL = 1.9; EXPRESSED IN ADULT LIVER, SIGNAL =   2; EXPRESSED IN HELA, SIGNAL = 2.5; EXPRESSED IN HEART, SIGNAL = 1.9; EXPRESSED IN BRAIN, SIGNAL = 1.7; EXPRESSED IN PLACENTA, SIGNAL = 2.1; EXPRESSED IN FETAL LIVER, SIGNAL =   2; EXPRESSED IN BONE MARROW, SIGNAL = 1.8; EST_HUMAN HIT: N27748.1, EVALUE 5.00e-05; SWISSPROT HIT: P54569, EVALUE 6.30e+00
TKKAKKNLLQSDYFSLWEVHINKLEVKLDEKMLEFNQKQE

SEQ ID NO: 41131 - protein, 21 aa, Homo sapiens
  MAP TO AC023032.2; EXPRESSED IN LUNG, SIGNAL = 1.9; EXPRESSED IN ADULT LIVER, SIGNAL =   2; EXPRESSED IN HELA, SIGNAL = 2.5; EXPRESSED IN HEART, SIGNAL = 1.9; EXPRESSED IN BRAIN, SIGNAL = 1.7; EXPRESSED IN PLACENTA, SIGNAL = 2.1; EXPRESSED IN FETAL LIVER, SIGNAL =   2; EXPRESSED IN BONE MARROW, SIGNAL = 1.8
LPKRQRKTFFRVTTSLYGKSI

SEQ ID NO: 41132 - protein, 76 aa, Homo sapiens
  MAP TO AC011929.3; EXPRESSED IN LUNG, SIGNAL = 8.4; EXPRESSED IN PLACENTA, SIGNAL = 7.8; EXPRESSED IN ADULT LIVER, SIGNAL = 7.4; EXPRESSED IN HELA, SIGNAL = 9.5; EXPRESSED IN HEART, SIGNAL = 7.8; EXPRESSED IN FETAL LIVER, SIGNAL = 8.2; EXPRESSED IN BRAIN, SIGNAL = 7.6; EXPRESSED IN BONE MARROW, SIGNAL = 8.1; EST_HUMAN HIT: AI767133.1, EVALUE 5.00e-36; SWISSPROT HIT: Q07343, EVALUE 2.00e-06
ASEETLHSSNEEEDPFRGMEPYLVRRLSCRNIQLPPLAFRQLEQADLKSESENIQRPTSLPLKILPLIAITSAESS

SEQ ID NO: 41133 - protein, 46 aa, Homo sapiens
  MAP TO AC011929.3; EXPRESSED IN LUNG, SIGNAL = 8.4; EXPRESSED IN PLACENTA, SIGNAL = 7.8; EXPRESSED IN ADULT LIVER, SIGNAL = 7.4; EXPRESSED IN HELA, SIGNAL = 9.5; EXPRESSED IN HEART, SIGNAL = 7.8; EXPRESSED IN FETAL LIVER, SIGNAL = 8.2; EXPRESSED IN BRAIN, SIGNAL = 7.6; EXPRESSED IN BONE MARROW, SIGNAL = 8.1; EST_HUMAN HIT: AI767133.1, EVALUE 2.00e-21
PLRKHYIPVMKRKTLSAEWNPILSGDFHVAIFSFPLSPSDSWNKLT

SEQ ID NO: 41134 - protein, 49 aa, Homo sapiens
  MAP TO AC022943.4; EXPRESSED IN PLACENTA, SIGNAL = 4.8; EXPRESSED IN HEART, SIGNAL = 4.7; EXPRESSED IN FETAL LIVER, SIGNAL = 4.4; EXPRESSED IN BONE MARROW, SIGNAL = 4.5; EXPRESSED IN LUNG, SIGNAL = 4.8; EXPRESSED IN ADULT LIVER, SIGNAL = 4.4; EXPRESSED IN HELA, SIGNAL = 5.6; EXPRESSED IN BRAIN, SIGNAL = 4.1; EST_HUMAN HIT: AA448298.1, EVALUE 2.30e+00; SWISSPROT HIT: P04025, EVALUE 2.10e+00
RPRSTAFTWAATAAPGAAVCSCLPLAPWNMQPWPRPLAAWGKGSRSSLC

SEQ ID NO: 41135 - protein, 28 aa, Homo sapiens
  MAP TO AC011859.4; EXPRESSED IN LUNG, SIGNAL = 2.2; EXPRESSED IN ADULT LIVER, SIGNAL = 1.9; EXPRESSED IN HELA, SIGNAL = 2.2; EXPRESSED IN HEART, SIGNAL =   2; EXPRESSED IN BRAIN, SIGNAL = 1.8; EXPRESSED IN PLACENTA, SIGNAL = 1.8; EXPRESSED IN FETAL LIVER, SIGNAL = 2.1; EXPRESSED IN BONE MARROW, SIGNAL = 1.9
FMENADEEHSMTLYFSDCKNNADTVSRK

SEQ ID NO: 41136 - protein, 29 aa, Homo sapiens [sequence omitted]

SEQ ID NO: 41137 - protein, 38 aa, Homo sapiens
  MAP TO AC018535.3; EXPRESSED IN LUNG, SIGNAL = 1.4; EXPRESSED IN ADULT LIVER, SIGNAL = 1.3; EXPRESSED IN BRAIN, SIGNAL = 1.4; EXPRESSED IN PLACENTA, SIGNAL = 1.3; EXPRESSED IN HEART, SIGNAL = 1.2; EXPRESSED IN FETAL LIVER, SIGNAL = 1.3; EXPRESSED IN BONE MARROW, SIGNAL = 1.2
QPNISIPVATTLALATITSEVIFAVTLTVLLSFKLALV

SEQ ID NO: 41138 - protein, 20 aa, Homo sapiens
  MAP TO AC018535.3; EXPRESSED IN LUNG, SIGNAL = 1.4; EXPRESSED IN ADULT LIVER, SIGNAL = 1.3; EXPRESSED IN BRAIN, SIGNAL = 1.4; EXPRESSED IN PLACENTA, SIGNAL = 1.3; EXPRESSED IN HEART, SIGNAL = 1.2; EXPRESSED IN FETAL LIVER, SIGNAL = 1.3; EXPRESSED IN BONE MARROW, SIGNAL = 1.2
NLTFPFLWLQPWLWPPSRLK

SEQ ID NO: 41139 - protein, 33 aa, Homo sapiens
  MAP TO AC018530.4; EXPRESSED IN LUNG, SIGNAL = 1.2; EXPRESSED IN PLACENTA, SIGNAL =   1; EXPRESSED IN ADULT LIVER, SIGNAL = 0.97; EXPRESSED IN HEART, SIGNAL = 1.2; EXPRESSED IN FETAL LIVER, SIGNAL = 1.6; EXPRESSED IN BRAIN, SIGNAL = 1.1; EXPRESSED IN BONE MARROW, SIGNAL = 1.3
MKFWSSQTFKDWKDEGDPAKDTEKKQQVRKGKP

SEQ ID NO: 41140 - protein, 79 aa, Homo sapiens
  MAP TO AC013751.3; EXPRESSED IN HEART, SIGNAL = 1.5; EXPRESSED IN LUNG, SIGNAL = 1.3; EXPRESSED IN ADULT LIVER, SIGNAL = 1.2; EXPRESSED IN BRAIN, SIGNAL = 0.94; EXPRESSED IN PLACENTA, SIGNAL = 1.1; EXPRESSED IN FETAL LIVER, SIGNAL = 1.3; EXPRESSED IN BONE MARROW, SIGNAL = 1.9; EST_HUMAN HIT: BE082977.1, EVALUE 4.00e-38; SWISSPROT HIT: O75131, EVALUE 5.00e-39
QYFVLLIITDGVITDLDETRQAIVNASRLPMSIIIVGVGGADFSAMEFLDGDGGSLRSPLGEVAIRDIVQFVPFRQFQN

SEQ ID NO: 41141 - protein, 56 aa, Homo sapiens
  MAP TO AL133352.10; EXPRESSED IN ADULT LIVER, SIGNAL = 2.3; EXPRESSED IN BRAIN, SIGNAL = 2.2; EXPRESSED IN BONE MARROW, SIGNAL = 2.1; EXPRESSED IN LUNG, SIGNAL = 2.3; EXPRESSED IN HELA, SIGNAL = 2.2; EXPRESSED IN PLACENTA, SIGNAL =   2; EXPRESSED IN HEART, SIGNAL = 2.1; EXPRESSED IN FETAL LIVER, SIGNAL = 2.3; EST_HUMAN HIT: AI023677.1, EVALUE 2.00e-08; SWISSPROT HIT: O51238, EVALUE 4.60e+00
HVVAGLHEVARCVDAGSFEQGLAVHAQVAGCSSFSEVSSFMPILKAVLIIAHKLLV

SEQ ID NO: 41142 - protein, 83 aa, Homo sapiens
  MAP TO AC015807.3; EXPRESSED IN LUNG, SIGNAL = 1.5; EXPRESSED IN PLACENTA, SIGNAL = 1.5; EXPRESSED IN FETAL LIVER, SIGNAL = 1.3; EXPRESSED IN HEART, SIGNAL = 2.2; EXPRESSED IN ADULT LIVER, SIGNAL = 1.6; EXPRESSED IN BRAIN, SIGNAL = 1.4; EXPRESSED IN BONE MARROW, SIGNAL = 1.3; EST_HUMAN HIT: AI935120.1, EVALUE 1.30e+00; SWISSPROT HIT: P35573, EVALUE 4.70e-01
ETNERVHFAVSSPLFDGFGSTQRPESTWIAFEFALASTELSRLLSLPQEKKNVLTMNNKLLHEVTLKKVDWKIKTELNKNVII

SEQ ID NO: 41143 - protein, 55 aa, Homo sapiens
  MAP TO AC015807.3; EXPRESSED IN LUNG, SIGNAL = 1.5; EXPRESSED IN PLACENTA, SIGNAL = 1.5; EXPRESSED IN FETAL LIVER, SIGNAL = 1.3; EXPRESSED IN HEART, SIGNAL = 2.2; EXPRESSED IN ADULT LIVER, SIGNAL = 1.6; EXPRESSED IN BRAIN, SIGNAL = 1.4; EXPRESSED IN BONE MARROW, SIGNAL = 1.3
KLMKEYILLSHLLCLMDLALHRGQSLLGLLLNLPLHQLNSLDYSLCHRKKKMFLL

SEQ ID NO: 41144 - protein, 33 aa, Homo sapiens
  MAP TO AC016429.4; EXPRESSED IN HELA, SIGNAL =   4; EXPRESSED IN HEART, SIGNAL = 2.9; EXPRESSED IN LUNG, SIGNAL = 3.3; EXPRESSED IN PLACENTA, SIGNAL =   3; EXPRESSED IN ADULT LIVER, SIGNAL = 3.5; EXPRESSED IN BRAIN, SIGNAL = 2.9; EXPRESSED IN FETAL LIVER, SIGNAL = 3.3; EXPRESSED IN BONE MARROW, SIGNAL = 2.8; EST_HUMAN HIT: AI890268.1, EVALUE 2.00e-03
DLKINTIELMDTVEGWLPEVGKGSDGQRVSGGE

SEQ ID NO: 41145 - protein, 35 aa, Homo sapiens
  MAP TO AC011938.3; EXPRESSED IN ADULT LIVER, SIGNAL =   4; EXPRESSED IN HEART, SIGNAL = 3.6; EXPRESSED IN FETAL LIVER, SIGNAL = 3.3; EXPRESSED IN BRAIN, SIGNAL = 4.1; EXPRESSED IN BONE MARROW, SIGNAL =   4; EXPRESSED IN LUNG, SIGNAL = 4.2; EXPRESSED IN PLACENTA, SIGNAL =   4; EXPRESSED IN HELA, SIGNAL =   4; EST_HUMAN HIT: AW298006.1, EVALUE 1.90e+00
TFLQISASAILCWNSPYLSEPCRKCLPTQVKMAAK

SEQ ID NO: 41146 - protein, 49 aa, Homo sapiens
  MAP TO AC012207.5; EXPRESSED IN BONE MARROW, SIGNAL = 2.6; EXPRESSED IN ADULT LIVER, SIGNAL = 2.3; EXPRESSED IN HEART, SIGNAL = 1.8; EXPRESSED IN FETAL LIVER, SIGNAL = 2.4; EXPRESSED IN BRAIN, SIGNAL = 2.6; EXPRESSED IN LUNG, SIGNAL = 2.5; EXPRESSED IN PLACENTA, SIGNAL = 2.5
FQDHVNDTISRQIPENKSAFLINLPRIKSVTFLDLLKKKLFTTLVKDAK

SEQ ID NO: 41147 - protein, 20 aa, Homo sapiens
  MAP TO AC012207.5; EXPRESSED IN BONE MARROW, SIGNAL = 2.6; EXPRESSED IN ADULT LIVER, SIGNAL = 2.3; EXPRESSED IN HEART, SIGNAL = 1.8; EXPRESSED IN FETAL LIVER, SIGNAL = 2.4; EXPRESSED IN BRAIN, SIGNAL = 2.6; EXPRESSED IN LUNG, SIGNAL = 2.5; EXPRESSED IN PLACENTA, SIGNAL = 2.5
FKIMLMTPFQGRYLKINLPF

SEQ ID NO: 41148 - protein, 27 aa, Homo sapiens
  MAP TO AC015474.3; EXPRESSED IN LUNG, SIGNAL = 4.6; EXPRESSED IN ADULT LIVER, SIGNAL = 3.2; EXPRESSED IN HELA, SIGNAL = 2.8; EXPRESSED IN HEART, SIGNAL = 2.8; EXPRESSED IN BRAIN, SIGNAL = 2.9; EXPRESSED IN PLACENTA, SIGNAL = 2.9; EXPRESSED IN FETAL LIVER, SIGNAL = 3.7; EXPRESSED IN BONE MARROW, SIGNAL = 6.7; EST_HUMAN HIT: BF036296.1, EVALUE 3.00e-06; SWISSPROT HIT: Q99439, EVALUE 8.80e-02
KRHLCDPKNHILPPHGPLDHWPPDGYK

SEQ ID NO: 41149 - protein, 18 aa, Homo sapiens
  MAP TO AC015474.3; EXPRESSED IN LUNG, SIGNAL = 4.6; EXPRESSED IN ADULT LIVER, SIGNAL = 3.2; EXPRESSED IN HELA, SIGNAL = 2.8; EXPRESSED IN HEART, SIGNAL = 2.8; EXPRESSED IN BRAIN, SIGNAL = 2.9; EXPRESSED IN PLACENTA, SIGNAL = 2.9; EXPRESSED IN FETAL LIVER, SIGNAL = 3.7; EXPRESSED IN BONE MARROW, SIGNAL = 6.7; EST_HUMAN HIT: BE818183.1, EVALUE 4.80e+00
WTTRSLASRWVQITVPAR

SEQ ID NO: 41150 - protein, 28 aa, Homo sapiens
  MAP TO AC010769.3; EXPRESSED IN HELA, SIGNAL = 3.2; EXPRESSED IN LUNG, SIGNAL = 1.8; EXPRESSED IN PLACENTA, SIGNAL = 1.1; EXPRESSED IN ADULT LIVER, SIGNAL = 1.7; EXPRESSED IN HEART, SIGNAL = 1.5; EXPRESSED IN BRAIN, SIGNAL = 1.5; EXPRESSED IN FETAL LIVER, SIGNAL = 2.1; EXPRESSED IN BONE MARROW, SIGNAL = 1.7
GEGEPMNRDISRTHLKEEVEFPGYLRYQ

SEQ ID NO: 41151 - protein, 29 aa, Homo sapiens
  MAP TO AL158091.7; EXPRESSED IN ADULT LIVER, SIGNAL = 2.5; EXPRESSED IN HELA, SIGNAL = 3.6; EXPRESSED IN BRAIN, SIGNAL = 2.5; EXPRESSED IN LUNG, SIGNAL = 2.7; EXPRESSED IN BONE MARROW, SIGNAL = 2.6; EXPRESSED IN PLACENTA, SIGNAL = 2.5; EXPRESSED IN HEART, SIGNAL = 2.5; EXPRESSED IN FETAL LIVER, SIGNAL = 2.7; EST_HUMAN HIT: BF696200.1, EVALUE 3.50e+00
WQGQRGWRQWLSPQRPCPALQRAPCSVPQ

SEQ ID NO: 41152 - protein, 77 aa, Homo sapiens
  MAP TO AL133352.10; EXPRESSED IN PLACENTA, SIGNAL = 3.7; EXPRESSED IN ADULT LIVER, SIGNAL = 4.3; EXPRESSED IN HELA, SIGNAL = 4.4; EXPRESSED IN BRAIN, SIGNAL = 4.2; EXPRESSED IN BONE MARROW, SIGNAL = 4.6; EXPRESSED IN LUNG, SIGNAL = 4.4; EXPRESSED IN HEART, SIGNAL =   5; EXPRESSED IN FETAL LIVER, SIGNAL =   5; EST_HUMAN HIT: AL042769.1, EVALUE 3.00e-12; SWISSPROT HIT: Q10272, EVALUE 5.00e+00
FGGKLVTFGLPSTPAHLVPQPCPRLVFISQVTTESEFLMRSAELQEALGSGNLLNYCQNKSQQALLQSEKMLWQFLK

SEQ ID NO: 41153 - protein, 24 aa, Homo sapiens
  MAP TO AL133352.10; EXPRESSED IN PLACENTA, SIGNAL = 3.7; EXPRESSED IN ADULT LIVER, SIGNAL = 4.3; EXPRESSED IN HELA, SIGNAL = 4.4; EXPRESSED IN BRAIN, SIGNAL = 4.2; EXPRESSED IN BONE MARROW, SIGNAL = 4.6; EXPRESSED IN LUNG, SIGNAL = 4.4; EXPRESSED IN HEART, SIGNAL =   5; EXPRESSED IN FETAL LIVER, SIGNAL =   5
LEGSWLLLASPAPLPIWCHSLAPA

SEQ ID NO: 41154 - protein, 104 aa, Homo sapiens
  MAP TO AC019276.3; EXPRESSED IN BONE MARROW, SIGNAL = 2.7; EXPRESSED IN PLACENTA, SIGNAL = 1.7; EXPRESSED IN ADULT LIVER, SIGNAL = 2.1; EXPRESSED IN HEART, SIGNAL = 1.8; EXPRESSED IN FETAL LIVER, SIGNAL = 1.9; EXPRESSED IN BRAIN, SIGNAL = 1.7; EXPRESSED IN LUNG, SIGNAL = 2.4; EST_HUMAN HIT: AW503221.1, EVALUE 3.00e-53; SWISSPROT HIT: Q03376, EVALUE 1.20e-02
RRLLTPTFLSLRTHGWERLRERPLERLASSGVEAGVLLAEGGQYSTKENCSCEQERDRCRSSRPPPTGCRSGLQVSPACPHGAEPGTPWQGCPPNRWWSPAWSQ

SEQ ID NO: 41155 - protein, 49 aa, Homo sapiens
  MAP TO AC019276.3; EXPRESSED IN BONE MARROW, SIGNAL = 2.7; EXPRESSED IN PLACENTA, SIGNAL = 1.7; EXPRESSED IN ADULT LIVER, SIGNAL = 2.1; EXPRESSED IN HEART, SIGNAL = 1.8; EXPRESSED IN FETAL LIVER, SIGNAL = 1.9; EXPRESSED IN BRAIN, SIGNAL = 1.7; EXPRESSED IN LUNG, SIGNAL = 2.4; EST_HUMAN HIT: AI953716.1, EVALUE 3.00e-15
PTAHLPQHQSWRDAPAAFPAAAPSRVSLTTRRSVLKGGALKKCKSRGLL

SEQ ID NO: 41156 - protein, 73 aa, Homo sapiens
  MAP TO AC015999.3; EXPRESSED IN ADULT LIVER, SIGNAL = 1.6; EXPRESSED IN LUNG, SIGNAL = 1.6; EXPRESSED IN PLACENTA, SIGNAL = 1.1; EXPRESSED IN HEART, SIGNAL = 1.8; EXPRESSED IN FETAL LIVER, SIGNAL = 2.2; EXPRESSED IN BRAIN, SIGNAL = 1.9; EXPRESSED IN BONE MARROW, SIGNAL = 1.9; EST_HUMAN HIT: AV715070.1, EVALUE 2.00e-21; SWISSPROT HIT: P98061, EVALUE 3.90e+00
ILGTETSNKYEIKNSLGQRIYFAVEESICFNRTFCSTLRSCTLRITDNSGREVITVNRPLRCNSCWCPCYLQE

SEQ ID NO: 41157 - protein, 120 aa, Homo sapiens
  MAP TO AL139008.3; EXPRESSED IN LUNG, SIGNAL = 1.6; EXPRESSED IN HEART, SIGNAL = 1.2; EXPRESSED IN PLACENTA, SIGNAL = 1.9; EXPRESSED IN FETAL LIVER, SIGNAL = 1.7; EXPRESSED IN ADULT LIVER, SIGNAL = 1.5; EXPRESSED IN BRAIN, SIGNAL = 1.5; EXPRESSED IN BONE MARROW, SIGNAL = 1.4; EST_HUMAN HIT: AA310801.1, EVALUE 2.00e-10; SWISSPROT HIT: P01734, EVALUE 8.00e-33
CFHAKVTQTPGYLVKGKGRKTKMYCTPKNGHTFVCWYQQNQNKEFMFLISFQNEQVLQEMEMHKKRFSSQCPKNPPCSLAILSSEPGDTALYLCATSPSTALKCQFLLAHKLATDPAQEA

SEQ ID NO: 41158 - protein, 48 aa, Homo sapiens
  MAP TO AL139008.3; EXPRESSED IN LUNG, SIGNAL = 1.6; EXPRESSED IN HEART, SIGNAL = 1.2; EXPRESSED IN PLACENTA, SIGNAL = 1.9; EXPRESSED IN FETAL LIVER, SIGNAL = 1.7; EXPRESSED IN ADULT LIVER, SIGNAL = 1.5; EXPRESSED IN BRAIN, SIGNAL = 1.5; EXPRESSED IN BONE MARROW, SIGNAL = 1.4; SWISSPROT HIT: Q48459, EVALUE 8.10e+00
AVFMPKSHRLQDIWSKEKEGKQRCIVPPKTDILLFVGISRIRIKSLCF

SEQ ID NO: 41159 - protein, 26 aa, Homo sapiens
  MAP TO AL139340.3; EXPRESSED IN PLACENTA, SIGNAL =   2; EXPRESSED IN HELA, SIGNAL = 3.1; EXPRESSED IN HEART, SIGNAL = 1.9; EXPRESSED IN FETAL LIVER, SIGNAL = 1.9; EXPRESSED IN ADULT LIVER, SIGNAL = 2.2; EXPRESSED IN BRAIN, SIGNAL = 1.7; EXPRESSED IN BONE MARROW, SIGNAL =   2; EXPRESSED IN LUNG, SIGNAL = 2.2
TIVKKKGADVCEILSIGPVVQQALNK

SEQ ID NO: 41160 - protein, 34 aa, Homo sapiens
  MAP TO AC011111.3; EXPRESSED IN PLACENTA, SIGNAL = 0.76; EXPRESSED IN HEART, SIGNAL = 1.3; EXPRESSED IN BRAIN, SIGNAL = 0.6; EXPRESSED IN ADULT LIVER, SIGNAL = 0.61; EXPRESSED IN FETAL LIVER, SIGNAL = 0.61; EXPRESSED IN BONE MARROW, SIGNAL = 0.63
MLHVLESKEKSNSQQIFFSFYDKSVFLMVEVIGK

SEQ ID NO: 41161 - protein, 33 aa, Homo sapiens
  MAP TO AC011111.3; EXPRESSED IN PLACENTA, SIGNAL = 0.76; EXPRESSED IN HEART, SIGNAL = 1.3; EXPRESSED IN BRAIN, SIGNAL = 0.6; EXPRESSED IN ADULT LIVER, SIGNAL = 0.61; EXPRESSED IN FETAL LIVER, SIGNAL = 0.61; EXPRESSED IN BONE MARROW, SIGNAL = 0.63; SWISSPROT HIT: Q22021, EVALUE 1.70e+00
CCTFWRAKRKATPSKFFSHFMTNQFFSWSKSLA

SEQ ID NO: 41162 - protein, 27 aa, Homo sapiens
  MAP TO AC022904.3; EXPRESSED IN PLACENTA, SIGNAL = 2.8; EXPRESSED IN ADULT LIVER, SIGNAL = 2.9; EXPRESSED IN HELA, SIGNAL = 2.9; EXPRESSED IN HEART, SIGNAL =   3; EXPRESSED IN BRAIN, SIGNAL = 2.8; EXPRESSED IN BONE MARROW, SIGNAL = 3.1; EXPRESSED IN LUNG, SIGNAL = 3.5; EXPRESSED IN FETAL LIVER, SIGNAL =   3
ELFICSSSNLKSTQNTLDNKDGAITRT

SEQ ID NO: 41163 - protein, 44 aa, Homo sapiens
  MAP TO AC009924.4; EXPRESSED IN ADULT LIVER, SIGNAL = 2.1; EXPRESSED IN FETAL LIVER, SIGNAL = 2.2; EXPRESSED IN PLACENTA, SIGNAL = 2.1; EXPRESSED IN BRAIN, SIGNAL = 2.5; EXPRESSED IN BONE MARROW, SIGNAL = 2.3; EXPRESSED IN LUNG, SIGNAL = 1.9; EXPRESSED IN HEART, SIGNAL = 1.9; EST_HUMAN HIT: BF342809.1, EVALUE 4.10e+00
AAGYRYKKYVSEGNDPGTRWKKPRFLSHYSKTWNNPRLQYEREK

SEQ ID NO: 41164 - protein, 26 aa, Homo sapiens
  MAP TO AC009924.4; EXPRESSED IN ADULT LIVER, SIGNAL = 2.1; EXPRESSED IN FETAL LIVER, SIGNAL = 2.2; EXPRESSED IN PLACENTA, SIGNAL = 2.1; EXPRESSED IN BRAIN, SIGNAL = 2.5; EXPRESSED IN BONE MARROW, SIGNAL = 2.3; EXPRESSED IN LUNG, SIGNAL = 1.9; EXPRESSED IN HEART, SIGNAL = 1.9
LQPATGIKSTSLKEMTQEQGGRNPGS

SEQ ID NO: 41165 - protein, 39 aa, Homo sapiens
  MAP TO AC021237.3; EXPRESSED IN BRAIN, SIGNAL = 0.47; EXPRESSED IN BONE MARROW, SIGNAL = 0.42; EXPRESSED IN HEART, SIGNAL = 3.8; EST_HUMAN HIT: AA223392.1, EVALUE 4.00e-16
MEVAANCSLRVKRPLLDPRFEGYKLSLEPLPCYQLELDA

SEQ ID NO: 41166 - protein, 26 aa, Homo sapiens
  MAP TO AC022174.2; EXPRESSED IN ADULT LIVER, SIGNAL = 2.4; EXPRESSED IN BRAIN, SIGNAL =   4; EXPRESSED IN LUNG, SIGNAL = 2.4; EXPRESSED IN PLACENTA, SIGNAL = 2.5; EXPRESSED IN BONE MARROW, SIGNAL =   3; EXPRESSED IN HEART, SIGNAL = 2.4; EXPRESSED IN FETAL LIVER, SIGNAL = 3.4
MLLQLCLQFTVPSAIPVLRTLPLLGL

SEQ ID NO: 41167 - protein, 62 aa, Homo sapiens
  MAP TO AL121910.19; EXPRESSED IN FETAL LIVER, SIGNAL = 1.6; EXPRESSED IN BONE MARROW, SIGNAL = 1.6; EXPRESSED IN HEART, SIGNAL = 1.5; EXPRESSED IN LUNG, SIGNAL = 1.8; EXPRESSED IN PLACENTA, SIGNAL = 1.7; EXPRESSED IN ADULT LIVER, SIGNAL = 1.9; EXPRESSED IN HELA, SIGNAL = 2.4; EXPRESSED IN BRAIN, SIGNAL = 1.6; EST_HUMAN HIT: AI907842.1, EVALUE 4.00e-01; SWISSPROT HIT: O00754, EVALUE 1.50e+00
VHLLDLLHWGPQVCLHRGTHLSSVGVHLLDLLHWGPQVCLHRGTHLSSAGVHLLDLLHWGLQ

SEQ ID NO: 41168 - protein, 29 aa, Homo sapiens
  MAP TO AC013685.3; EXPRESSED IN LUNG, SIGNAL = 1.4; EXPRESSED IN ADULT LIVER, SIGNAL = 1.4; EXPRESSED IN HEART, SIGNAL = 1.2; EXPRESSED IN BRAIN, SIGNAL = 1.4; EXPRESSED IN BONE MARROW, SIGNAL = 1.3; EXPRESSED IN PLACENTA, SIGNAL = 1.2; EXPRESSED IN FETAL LIVER, SIGNAL = 1.7
DVGALFIVAKGMTKAIEKEDTQETGSVRK

SEQ ID NO: 41169 - protein, 95 aa, Homo sapiens
  MAP TO AC021049.12; EXPRESSED IN HEART, SIGNAL = 2.3; EXPRESSED IN BRAIN, SIGNAL = 2.5; EXPRESSED IN LUNG, SIGNAL =   2; EXPRESSED IN PLACENTA, SIGNAL = 2.3; EXPRESSED IN ADULT LIVER, SIGNAL = 1.6; EXPRESSED IN FETAL LIVER, SIGNAL = 2.3; EXPRESSED IN BONE MARROW, SIGNAL = 2.4
SPLIICTDYITFHYIAIHNCTSLLSWDIEGILIAIANILLDIIPTSLLLNTVICFRMVAILFLGKNKIKWNDECRVGENTLVVGTEITQIGCDVR

SEQ ID NO: 41170 - protein, 70 aa, Homo sapiens
  MAP TO AC022216.3; EXPRESSED IN PLACENTA, SIGNAL = 1.7; EXPRESSED IN ADULT LIVER, SIGNAL = 1.5; EXPRESSED IN BRAIN, SIGNAL = 1.5; EXPRESSED IN BONE MARROW, SIGNAL = 1.5; EXPRESSED IN LUNG, SIGNAL = 1.6; EXPRESSED IN HEART, SIGNAL = 1.8; EXPRESSED IN FETAL LIVER, SIGNAL = 1.4; SWISSPROT HIT: P24043, EVALUE 3.00e-35
GNDLSISTAQDEVYLHPSEEHTNVLLLKEESFTIHGTHFPVRRKEFMTVLANLKRVLLQITYSFGMDAIF

SEQ ID NO: 41171 - protein, 60 aa, Homo sapiens
  MAP TO AL121901.10; EXPRESSED IN ADULT LIVER, SIGNAL = 3.2; EXPRESSED IN BRAIN, SIGNAL = 2.7; EXPRESSED IN LUNG, SIGNAL = 4.9; EXPRESSED IN PLACENTA, SIGNAL = 3.1; EXPRESSED IN HELA, SIGNAL = 3.4; EXPRESSED IN BONE MARROW, SIGNAL = 2.6; EXPRESSED IN HEART, SIGNAL = 2.8; EXPRESSED IN FETAL LIVER, SIGNAL = 2.7; EST_HUMAN HIT: BF154920.1, EVALUE 3.00e-26; SWISSPROT HIT: P49754, EVALUE 2.70e+00
AKLLDSQGKVTKWFNNSAASLTMPTLDNIPFSLIVSQDVVKAAVAAVLSPEEFMVLLDSV

SEQ ID NO: 41172 - protein, 51 aa, Homo sapiens
  MAP TO AC013550.4; EXPRESSED IN LUNG, SIGNAL = 2.7; EXPRESSED IN PLACENTA, SIGNAL = 3.5; EXPRESSED IN FETAL LIVER, SIGNAL =   4; EXPRESSED IN HEART, SIGNAL = 6.8; EXPRESSED IN ADULT LIVER, SIGNAL = 3.1; EXPRESSED IN HELA, SIGNAL = 3.8; EXPRESSED IN BRAIN, SIGNAL = 2.8; EXPRESSED IN BONE MARROW, SIGNAL = 2.5; SWISSPROT HIT: P54296, EVALUE 6.00e-09
RASTQASSQKSLSQRSSSQRASSQTSLGGTICRVCAKRVSTQEDEEQENRS

SEQ ID NO: 41173 - protein, 120 aa, Homo sapiens
  MAP TO AC019276.3; EXPRESSED IN LUNG, SIGNAL = 2.8; EXPRESSED IN PLACENTA, SIGNAL =   3; EXPRESSED IN HEART, SIGNAL = 2.4; EXPRESSED IN BONE MARROW, SIGNAL = 2.7; EXPRESSED IN ADULT LIVER, SIGNAL = 2.3; EXPRESSED IN FETAL LIVER, SIGNAL = 2.7; EXPRESSED IN BRAIN, SIGNAL = 3.6; SWISSPROT HIT: Q14153, EVALUE 3.00e-69; EST_HUMAN HIT: AW500526.1, EVALUE 5.00e-53
NCQTFSSLSCLSAGTEDCGPQSPFARHVSNTRAWTALLSASGPGGRTPAGTPVPEPLPPSFDDHLACQEDLSCEESDSCALDEDCGRRAEPAAAWRDRGAPGNSLCSLDGELDIEQIEKN

SEQ ID NO: 41174 - protein, 22 aa, Homo sapiens
  MAP TO AL157377.1; EXPRESSED IN LUNG, SIGNAL = 1.3; EXPRESSED IN FETAL LIVER, SIGNAL = 1.2; EXPRESSED IN BONE MARROW, SIGNAL = 1.1; EXPRESSED IN HEART, SIGNAL = 1.2; EXPRESSED IN PLACENTA, SIGNAL = 1.2; EXPRESSED IN ADULT LIVER, SIGNAL = 1.6; EXPRESSED IN BRAIN, SIGNAL = 1.1; EST_HUMAN HIT: AA884920.1, EVALUE 7.00e-05
KVNQKLFGLKKDLQLTLPGSVM

SEQ ID NO: 41175 - protein, 37 aa, Homo sapiens
  MAP TO AC019221.3; EXPRESSED IN LUNG, SIGNAL = 3.6; EXPRESSED IN PLACENTA, SIGNAL = 3.5; EXPRESSED IN HEART, SIGNAL = 3.7; EXPRESSED IN BONE MARROW, SIGNAL =   4; EXPRESSED IN HELA, SIGNAL = 2.6; EXPRESSED IN FETAL LIVER, SIGNAL = 3.3; EXPRESSED IN ADULT LIVER, SIGNAL = 3.3; EXPRESSED IN BRAIN, SIGNAL = 4.3; EST_HUMAN HIT: AA778178.1, EVALUE 5.00e-03
GEDTEEGRKGHVETEADLEAMQPQARECLELPGAGKS

SEQ ID NO: 41176 - protein, 18 aa, Homo sapiens
  MAP TO AC019221.3; EXPRESSED IN LUNG, SIGNAL = 3.6; EXPRESSED IN PLACENTA, SIGNAL = 3.5; EXPRESSED IN HEART, SIGNAL = 3.7; EXPRESSED IN BONE MARROW, SIGNAL =   4; EXPRESSED IN HELA, SIGNAL = 2.6; EXPRESSED IN FETAL LIVER, SIGNAL = 3.3; EXPRESSED IN ADULT LIVER, SIGNAL = 3.3; EXPRESSED IN BRAIN, SIGNAL = 4.3
RRRHRRRKKRPCGDRGRS

SEQ ID NO: 41177 - protein, 33 aa, Homo sapiens
  MAP TO AL160492.1; EXPRESSED IN PLACENTA, SIGNAL =   2; EXPRESSED IN ADULT LIVER, SIGNAL = 1.7; EXPRESSED IN HEART, SIGNAL = 2.3; EXPRESSED IN FETAL LIVER, SIGNAL = 1.8; EXPRESSED IN BONE MARROW, SIGNAL =   2; EXPRESSED IN LUNG, SIGNAL = 1.9; EXPRESSED IN BRAIN, SIGNAL = 2.2; EST_HUMAN HIT: AI129142.1, EVALUE 6.00e-12
TRVRSQGFVTLLFNVVTKDMRKLGYDTGPSDTQ

SEQ ID NO: 41178 - protein, 70 aa, Homo sapiens
  MAP TO AL121895.18; EXPRESSED IN ADULT LIVER, SIGNAL = 4.8; EXPRESSED IN BRAIN, SIGNAL = 4.3; EXPRESSED IN LUNG, SIGNAL = 5.1; EXPRESSED IN PLACENTA, SIGNAL = 4.7; EXPRESSED IN HELA, SIGNAL = 6.5; EXPRESSED IN FETAL LIVER, SIGNAL = 4.6; EXPRESSED IN BONE MARROW, SIGNAL = 4.3; EXPRESSED IN HEART, SIGNAL = 4.5; SWISSPROT HIT: P42684, EVALUE 1.10e+00; EST_HUMAN HIT: AA134636.1, EVALUE 1.40e+00
KSVSQENPRWPSRAVSLPTLPLWGYSVPVPRKLALLGRLSVDPQGNHHKRLNKSLSVTGRQAAINPEDHD

SEQ ID NO: 41179 - protein, 48 aa, Homo sapiens
  MAP TO AC016212.3; EXPRESSED IN LUNG, SIGNAL = 2.7; EXPRESSED IN PLACENTA, SIGNAL = 2.7; EXPRESSED IN ADULT LIVER, SIGNAL = 2.3; EXPRESSED IN HEART, SIGNAL = 2.3; EXPRESSED IN FETAL LIVER, SIGNAL = 1.9; EXPRESSED IN BONE MARROW, SIGNAL = 2.3; EXPRESSED IN BRAIN, SIGNAL = 2.2; SWISSPROT HIT: P23886, EVALUE 4.70e+00
LFLVPPTGQFQQEAKGKEAQQCSQWSEGRAQGGEEWTLGLEGWSEDTQ

SEQ ID NO: 41180 - protein, 40 aa, Homo sapiens
  MAP TO AC016212.3; EXPRESSED IN LUNG, SIGNAL = 2.7; EXPRESSED IN PLACENTA, SIGNAL = 2.7; EXPRESSED IN ADULT LIVER, SIGNAL = 2.3; EXPRESSED IN HEART, SIGNAL = 2.3; EXPRESSED IN FETAL LIVER, SIGNAL = 1.9; EXPRESSED IN BONE MARROW, SIGNAL = 2.3; EXPRESSED IN BRAIN, SIGNAL = 2.2; EST_HUMAN HIT: BE149368.1, EVALUE 3.20e+00
ISFWCLQLANSNRKPRARKPSNAASGLRAERRVVKSGHWV

SEQ ID NO: 41181 - protein, 49 aa, Homo sapiens
  MAP TO AC009415.2; EXPRESSED IN ADULT LIVER, SIGNAL = 3.8; EXPRESSED IN BRAIN, SIGNAL = 3.1; EXPRESSED IN LUNG, SIGNAL = 3.8; EXPRESSED IN PLACENTA, SIGNAL = 3.9; EXPRESSED IN HELA, SIGNAL = 4.7; EXPRESSED IN HEART, SIGNAL = 3.6; EXPRESSED IN FETAL LIVER, SIGNAL = 3.4; EXPRESSED IN BONE MARROW, SIGNAL = 3.2; SWISSPROT HIT: P05107, EVALUE 4.70e+00
GDQEYQTEAYAPHFPGKKLCFCGICNKIEKWEQSHDYSNNPCQCKLSLT

SEQ ID NO: 41182 - protein, 34 aa, Homo sapiens
  MAP TO AC021468.2; EXPRESSED IN ADULT LIVER, SIGNAL = 3.7; EXPRESSED IN LUNG, SIGNAL = 3.3; EXPRESSED IN BONE MARROW, SIGNAL = 3.3; EXPRESSED IN BRAIN, SIGNAL = 3.2; EXPRESSED IN FETAL LIVER, SIGNAL = 3.5; EXPRESSED IN HEART, SIGNAL = 3.4; EXPRESSED IN HELA, SIGNAL = 3.1; EXPRESSED IN PLACENTA, SIGNAL = 2.8; EST_HUMAN HIT: AV730015.1, EVALUE 5.00e-10
DLPRMRRLQKSTSLWLRWQTALTWVWMRMTLRSS

SEQ ID NO: 41183 - protein, 41 aa, Homo sapiens
  MAP TO AC018469.3; EXPRESSED IN LUNG, SIGNAL = 2.9; EXPRESSED IN PLACENTA, SIGNAL = 3.4; EXPRESSED IN BONE MARROW, SIGNAL = 3.1; EXPRESSED IN HEART, SIGNAL = 2.8; EXPRESSED IN ADULT LIVER, SIGNAL = 3.9; EXPRESSED IN FETAL LIVER, SIGNAL = 2.8; EXPRESSED IN BRAIN, SIGNAL = 3.2; EST_HUMAN HIT: AA535174.1, EVALUE 3.20e+00
MTREWRWQEAVQSSARRPGSRGRLESLNLNSGTYLSVEQPE

SEQ ID NO: 41184 - protein, 52 aa, Homo sapiens
  MAP TO AC015897.3; EXPRESSED IN LUNG, SIGNAL = 0.95; EXPRESSED IN HELA, SIGNAL =  15; EXPRESSED IN FETAL LIVER, SIGNAL = 0.98; EXPRESSED IN HEART, SIGNAL = 1.5; EXPRESSED IN PLACENTA, SIGNAL = 0.92; EXPRESSED IN ADULT LIVER, SIGNAL = 1.3; EXPRESSED IN BRAIN, SIGNAL = 1.2; EXPRESSED IN BONE MARROW, SIGNAL = 0.77; EST_HUMAN HIT: AW897760.1, EVALUE 5.70e-01
MSASLCWGASSSSIASFFSSVYVFCTNCWDSLFELIAAVSSTMKFIVGAIKI

SEQ ID NO: 41185 - protein, 36 aa, Homo sapiens
  MAP TO AC013317.4; EXPRESSED IN HELA, SIGNAL = 4.9; EXPRESSED IN HEART, SIGNAL =   6; EXPRESSED IN BRAIN, SIGNAL = 7.2; EXPRESSED IN BONE MARROW, SIGNAL = 8.4; EXPRESSED IN PLACENTA, SIGNAL = 5.1; EXPRESSED IN ADULT LIVER, SIGNAL = 7.8; EXPRESSED IN FETAL LIVER, SIGNAL = 6.8; EXPRESSED IN LUNG, SIGNAL = 5.9; EST_HUMAN HIT: AV712805.1, EVALUE 9.00e-11
NLLNGFDKNADSDMNNKVQPEVVSDGDEELVENWRK

SEQ ID NO: 41186 - protein, 37 aa, Homo sapiens
  MAP TO AL157792.2; EXPRESSED IN BONE MARROW, SIGNAL =  14; EXPRESSED IN ADULT LIVER, SIGNAL =  10; EXPRESSED IN FETAL LIVER, SIGNAL =  17; EXPRESSED IN BRAIN, SIGNAL = 7.1; EXPRESSED IN LUNG, SIGNAL =  12; EXPRESSED IN PLACENTA, SIGNAL = 8.1; EXPRESSED IN HEART, SIGNAL = 8.9; EXPRESSED IN HELA, SIGNAL =  10; EST_HUMAN HIT: AL036635.1, EVALUE 7.00e-03
PPGGPGDGLDHQAPRPAPPPSSAAAWESPFSIFIALA

SEQ ID NO: 41187 - protein, 28 aa, Homo sapiens
  MAP TO AC015578.4; EXPRESSED IN LUNG, SIGNAL = 1.5; EXPRESSED IN PLACENTA, SIGNAL = 1.3; EXPRESSED IN BRAIN, SIGNAL = 1.3; EXPRESSED IN ADULT LIVER, SIGNAL = 1.3; EXPRESSED IN HEART, SIGNAL = 1.5; EXPRESSED IN FETAL LIVER, SIGNAL = 1.3; EXPRESSED IN BONE MARROW, SIGNAL = 1.3
IQSQKSCSFEVETSNSNTRVAIKFSTYQ

SEQ ID NO: 41188 - protein, 63 aa, Homo sapiens
  MAP TO AC021356.5; EXPRESSED IN LUNG, SIGNAL = 4.9; EXPRESSED IN PLACENTA, SIGNAL = 5.2; EXPRESSED IN ADULT LIVER, SIGNAL = 5.2; EXPRESSED IN HELA, SIGNAL = 5.2; EXPRESSED IN HEART, SIGNAL = 4.7; EXPRESSED IN FETAL LIVER, SIGNAL = 4.5; EXPRESSED IN BRAIN, SIGNAL = 6.6; EXPRESSED IN BONE MARROW, SIGNAL = 4.9; SWISSPROT HIT: Q00963, EVALUE 4.50e+00; EST_HUMAN HIT: BE148673.1, EVALUE 5.00e-06
DFLSPFCVAVTECYKLGFIKNRDLFLTVLEAEKSKVKGLVSCQGLLAASSRDERPHVGKRMYV

SEQ ID NO: 41189 - protein, 49 aa, Homo sapiens
  MAP TO AL161751.1; EXPRESSED IN BONE MARROW, SIGNAL = 1.6; EXPRESSED IN PLACENTA, SIGNAL = 1.8; EXPRESSED IN ADULT LIVER, SIGNAL = 1.1; EXPRESSED IN HELA, SIGNAL = 2.5; EXPRESSED IN HEART, SIGNAL = 1.5; EXPRESSED IN LUNG, SIGNAL = 1.1; EXPRESSED IN FETAL LIVER, SIGNAL = 1.6; EXPRESSED IN BRAIN, SIGNAL = 1.5; EST_HUMAN HIT: AI276522.1, EVALUE 5.00e-11; SWISSPROT HIT: O21247, EVALUE 8.10e+00
PQAGPLGDIAGEGTVIIGDESFLHVITPEDLQVGQNMEVTNSDIDDPDP

SEQ ID NO: 41190 - protein, 32 aa, Homo sapiens
  MAP TO AC018421.3; EXPRESSED IN ADULT LIVER, SIGNAL = 1.1; EXPRESSED IN BRAIN, SIGNAL = 1.6; EXPRESSED IN PLACENTA, SIGNAL = 1.4; EXPRESSED IN HEART, SIGNAL = 1.7; EXPRESSED IN FETAL LIVER, SIGNAL = 1.9; EXPRESSED IN LUNG, SIGNAL = 1.2; EXPRESSED IN BONE MARROW, SIGNAL = 1.6; EST_HUMAN HIT: AV762869.1, EVALUE 5.00e-12; SWISSPROT HIT: P36777, EVALUE 3.80e+00
PSGGIQKKALLSKELTAPCFLLPLKNFQWDKA

SEQ ID NO: 41191 - protein, 41 aa, Homo sapiens
  MAP TO AC009298.2; EXPRESSED IN PLACENTA, SIGNAL = 0.83; EXPRESSED IN FETAL LIVER, SIGNAL = 0.77; EXPRESSED IN ADULT LIVER, SIGNAL = 0.92; EXPRESSED IN BONE MARROW, SIGNAL = 0.51; EXPRESSED IN LUNG, SIGNAL = 1.3; EXPRESSED IN HEART, SIGNAL = 1.8; EXPRESSED IN BRAIN, SIGNAL = 1.1; EST_HUMAN HIT: BE876158.1, EVALUE 2.00e-17; SWISSPROT HIT: P06026, EVALUE 2.10e+00
VEFNSPPLEYGLDKEKNGSSTVETPGQHFNQVIKVNIANYV

SEQ ID NO: 41192 - protein, 31 aa, Homo sapiens
  MAP TO AC009298.2; EXPRESSED IN PLACENTA, SIGNAL = 0.83; EXPRESSED IN FETAL LIVER, SIGNAL = 0.77; EXPRESSED IN ADULT LIVER, SIGNAL = 0.92; EXPRESSED IN BONE MARROW, SIGNAL = 0.51; EXPRESSED IN LUNG, SIGNAL = 1.3; EXPRESSED IN HEART, SIGNAL = 1.8; EXPRESSED IN BRAIN, SIGNAL = 1.1; EST_HUMAN HIT: BE876158.1, EVALUE 3.00e-12
WNLILLPLNMGWTKRKMVAQQWRHLDSTLTK

SEQ ID NO: 41193 - protein, 38 aa, Homo sapiens
  MAP TO AC015570.5; EXPRESSED IN LUNG, SIGNAL = 2.7; EXPRESSED IN HEART, SIGNAL = 2.2; EXPRESSED IN BRAIN, SIGNAL = 2.2; EXPRESSED IN BONE MARROW, SIGNAL = 2.3; EXPRESSED IN ADULT LIVER, SIGNAL = 2.6; EXPRESSED IN PLACENTA, SIGNAL = 2.3; EXPRESSED IN FETAL LIVER, SIGNAL = 2.1
INHRSNEREVKLENNQLRSHSATRLTKYESLTQEKVIV

SEQ ID NO: 41194 - protein, 27 aa, Homo sapiens
  MAP TO AC013314.4; EXPRESSED IN HELA, SIGNAL = 2.6; EXPRESSED IN LUNG, SIGNAL = 2.2; EXPRESSED IN PLACENTA, SIGNAL = 2.1; EXPRESSED IN ADULT LIVER, SIGNAL = 2.6; EXPRESSED IN BRAIN, SIGNAL = 3.1; EXPRESSED IN BONE MARROW, SIGNAL = 1.9; EXPRESSED IN FETAL LIVER, SIGNAL = 2.5; EXPRESSED IN HEART, SIGNAL = 2.1; EST_HUMAN HIT: R52570.1, EVALUE 2.10e+00
DPDVIGEGVTVAYWIVEYYVEAPQAEA

SEQ ID NO: 41195 - protein, 47 aa, Homo sapiens
  MAP TO AC007000.2; EXPRESSED IN LUNG, SIGNAL =   4; EXPRESSED IN HEART, SIGNAL = 3.2; EXPRESSED IN BONE MARROW, SIGNAL = 3.3; EXPRESSED IN BRAIN, SIGNAL = 3.3; EXPRESSED IN FETAL LIVER, SIGNAL = 2.9; EXPRESSED IN HELA, SIGNAL = 2.8; EXPRESSED IN ADULT LIVER, SIGNAL = 3.2; EXPRESSED IN PLACENTA, SIGNAL =   3; EST_HUMAN HIT: AW299353.1, EVALUE 8.00e-11
DTEKEEEEEKDEKDQEPIYAIVPTINIQDERFVDLSETPAFIFLHEV

SEQ ID NO: 41196 - protein, 38 aa, Homo sapiens
  MAP TO AC022939.2; EXPRESSED IN ADULT LIVER, SIGNAL =   2; EXPRESSED IN HEART, SIGNAL =   2; EXPRESSED IN FETAL LIVER, SIGNAL = 1.8; EXPRESSED IN BONE MARROW, SIGNAL = 1.8; EXPRESSED IN LUNG, SIGNAL = 2.2; EXPRESSED IN PLACENTA, SIGNAL = 1.9; EXPRESSED IN HELA, SIGNAL = 2.3; EXPRESSED IN BRAIN, SIGNAL = 1.7; SWISSPROT HIT: Q09746, EVALUE 3.70e+00; EST_HUMAN HIT: AL042091.1, EVALUE 2.00e-11
DQFDSLDKHTQWGIDFLERYAKFVKERIEIEQNYAKQL

SEQ ID NO: 41197 - protein, 17 aa, Homo sapiens
  MAP TO AC021677.3; EXPRESSED IN ADULT LIVER, SIGNAL = 2.2; EXPRESSED IN FETAL LIVER, SIGNAL = 2.2; EXPRESSED IN BRAIN, SIGNAL = 2.8; EXPRESSED IN BONE MARROW, SIGNAL = 2.4; EXPRESSED IN LUNG, SIGNAL = 2.2; EXPRESSED IN PLACENTA, SIGNAL = 2.2; EXPRESSED IN HELA, SIGNAL = 2.8; EXPRESSED IN HEART, SIGNAL = 2.3; EST_HUMAN HIT: AI768152.1, EVALUE 3.00e-04
SPRPRHWMPGPTLWSLA

SEQ ID NO: 41198 - protein, 77 aa, Homo sapiens
  MAP TO AC018780.3; EXPRESSED IN PLACENTA, SIGNAL = 2.7; EXPRESSED IN ADULT LIVER, SIGNAL = 2.9; EXPRESSED IN HEART, SIGNAL = 2.5; EXPRESSED IN FETAL LIVER, SIGNAL = 2.5; EXPRESSED IN BRAIN, SIGNAL = 2.6; EXPRESSED IN BONE MARROW, SIGNAL = 2.8; EXPRESSED IN LUNG, SIGNAL = 2.9; SWISSPROT HIT: P48982, EVALUE 7.00e-03; EST_HUMAN HIT: BE382579.1, EVALUE 1.00e-06
VEHAVSEFIKYEISFNVYMFHGGTNFGFMNGATYFGKHSGIVTSYGKCRWCSSLSSMGGAGALQRRLRKPVLAPLGS

SEQ ID NO: 41199 - protein, 29 aa, Homo sapiens
  MAP TO AC018780.3; EXPRESSED IN PLACENTA, SIGNAL = 2.7; EXPRESSED IN ADULT LIVER, SIGNAL = 2.9; EXPRESSED IN HEART, SIGNAL = 2.5; EXPRESSED IN FETAL LIVER, SIGNAL = 2.5; EXPRESSED IN BRAIN, SIGNAL = 2.6; EXPRESSED IN BONE MARROW, SIGNAL = 2.8; EXPRESSED IN LUNG, SIGNAL = 2.9
RLNMLCLNSSNMRSPSMYICSMVEPTLVS

SEQ ID NO: 41200 - protein, 20 aa, Homo sapiens
  MAP TO AL133320.8; EXPRESSED IN ADULT LIVER, SIGNAL =   3; EXPRESSED IN HELA, SIGNAL = 3.5; EXPRESSED IN BRAIN, SIGNAL = 2.5; EXPRESSED IN LUNG, SIGNAL = 2.7; EXPRESSED IN PLACENTA, SIGNAL = 2.6; EXPRESSED IN BONE MARROW, SIGNAL = 2.7; EXPRESSED IN FETAL LIVER, SIGNAL = 2.7; EXPRESSED IN HEART, SIGNAL = 2.7; EST_HUMAN HIT: AW450514.1, EVALUE 1.00e-04
AVEFEGWADTLFLLQFTLSC

SEQ ID NO: 41201 - protein, 79 aa, Homo sapiens
  MAP TO AC022555.2; EXPRESSED IN PLACENTA, SIGNAL = 2.6; EXPRESSED IN FETAL LIVER, SIGNAL = 1.5; EXPRESSED IN ADULT LIVER, SIGNAL = 2.2; EXPRESSED IN BONE MARROW, SIGNAL = 1.5; EXPRESSED IN LUNG, SIGNAL =   2; EXPRESSED IN HEART, SIGNAL = 1.3; EXPRESSED IN BRAIN, SIGNAL = 1.5; SWISSPROT HIT: P26808, EVALUE 7.00e-12; EST_HUMAN HIT: AU134310.1, EVALUE 1.00e-31
ALLLEGPVLRLHTCATLNPVTFLPDNEEKTERNCQQVIAQTYATRGDLLEVPLTDPYLNLYTDGSSFVEKGLRKAEYAV

SEQ ID NO: 41202 - protein, 18 aa, Homo sapiens
  MAP TO AC019214.2; EXPRESSED IN PLACENTA, SIGNAL = 2.4; EXPRESSED IN HEART, SIGNAL = 1.6; EXPRESSED IN FETAL LIVER, SIGNAL = 2.6; EXPRESSED IN BRAIN, SIGNAL = 2.2; EXPRESSED IN LUNG, SIGNAL = 2.4; EXPRESSED IN ADULT LIVER, SIGNAL = 1.9; EXPRESSED IN BONE MARROW, SIGNAL = 1.9; SWISSPROT HIT: P23634, EVALUE 6.70e+00
PRRCPRLSLEQWCWCGSA

SEQ ID NO: 41203 - protein, 33 aa, Homo sapiens
  MAP TO AC019214.2; EXPRESSED IN PLACENTA, SIGNAL = 2.4; EXPRESSED IN HEART, SIGNAL = 1.6; EXPRESSED IN FETAL LIVER, SIGNAL = 2.6; EXPRESSED IN BRAIN, SIGNAL = 2.2; EXPRESSED IN LUNG, SIGNAL = 2.4; EXPRESSED IN ADULT LIVER, SIGNAL = 1.9; EXPRESSED IN BONE MARROW, SIGNAL = 1.9; EST_HUMAN HIT: BF378496.1, EVALUE 4.40e+00; SWISSPROT HIT: P48021, EVALUE 6.50e+00
AQPWASARPWRAQTGCACSALSRGCSAADACGL

SEQ ID NO: 41204 - protein, 18 aa, Homo sapiens
  MAP TO AC013726.3; EXPRESSED IN ADULT LIVER, SIGNAL = 5.3; EXPRESSED IN LUNG, SIGNAL = 5.5; EXPRESSED IN BRAIN, SIGNAL = 4.8; EXPRESSED IN BONE MARROW, SIGNAL = 4.9; EXPRESSED IN PLACENTA, SIGNAL = 5.2; EXPRESSED IN HEART, SIGNAL = 4.9; EXPRESSED IN FETAL LIVER, SIGNAL = 4.4
RRRHRRRKKRPCGDRGRS

SEQ ID NO: 41205 - protein, 32 aa, Homo sapiens
  MAP TO AL133419.11; EXPRESSED IN LUNG, SIGNAL = 1.9; EXPRESSED IN ADULT LIVER, SIGNAL = 2.1; EXPRESSED IN HEART, SIGNAL =   2; EXPRESSED IN FETAL LIVER, SIGNAL =   2; EXPRESSED IN BRAIN, SIGNAL = 1.9; EXPRESSED IN PLACENTA, SIGNAL = 2.2; EXPRESSED IN BONE MARROW, SIGNAL = 1.8
TTVPTKRRLAMFQVQQGPKMGAQNVYILNIQT

SEQ ID NO: 41206 - protein, 27 aa, Homo sapiens
  MAP TO AL133419.11; EXPRESSED IN LUNG, SIGNAL = 1.9; EXPRESSED IN ADULT LIVER, SIGNAL = 2.1; EXPRESSED IN HEART, SIGNAL =   2; EXPRESSED IN FETAL LIVER, SIGNAL =   2; EXPRESSED IN BRAIN, SIGNAL = 1.9; EXPRESSED IN PLACENTA, SIGNAL = 2.2; EXPRESSED IN BONE MARROW, SIGNAL = 1.8
PQCQPRGDWQCSKSNRVLKWEPKMCTS

SEQ ID NO: 41207 - protein, 29 aa, Homo sapiens
  MAP TO AL121918.15; EXPRESSED IN PLACENTA, SIGNAL = 1.5; EXPRESSED IN ADULT LIVER, SIGNAL = 1.6; EXPRESSED IN BRAIN, SIGNAL = 1.3; EXPRESSED IN BONE MARROW, SIGNAL = 1.2; EXPRESSED IN LUNG, SIGNAL = 1.6; EXPRESSED IN FETAL LIVER, SIGNAL = 1.3; EXPRESSED IN HEART, SIGNAL = 1.3
MPEAKEPFVVAKALVYLVLCKKCNHREET

SEQ ID NO: 41208 - protein, 53 aa, Homo sapiens
  MAP TO AC011666.18; EXPRESSED IN LUNG, SIGNAL = 2.1; EXPRESSED IN PLACENTA, SIGNAL = 1.7; EXPRESSED IN FETAL LIVER, SIGNAL = 1.9; EXPRESSED IN ADULT LIVER, SIGNAL =   2; EXPRESSED IN HEART, SIGNAL = 1.5; EXPRESSED IN BRAIN, SIGNAL = 1.5; EXPRESSED IN BONE MARROW, SIGNAL = 6.9; SWISSPROT HIT: P41820, EVALUE 1.60e+00; EST_HUMAN HIT: BE735466.1, EVALUE 7.40e-01
CPNIIKRSAWEARETHCPKMNLPAKYVIIIHTAGTSCTVSTDCQTVVRNIQSF

SEQ ID NO: 41209 - protein, 34 aa, Homo sapiens
  MAP TO AC021677.3; EXPRESSED IN PLACENTA, SIGNAL = 2.1; EXPRESSED IN ADULT LIVER, SIGNAL = 1.8; EXPRESSED IN FETAL LIVER, SIGNAL = 1.7; EXPRESSED IN BRAIN, SIGNAL = 1.6; EXPRESSED IN BONE MARROW, SIGNAL = 1.3; EXPRESSED IN HEART, SIGNAL = 1.4; EXPRESSED IN LUNG, SIGNAL = 1.9; SWISSPROT HIT: P34434, EVALUE 8.50e+00
MGKGQCVTPEKAASSPALIHEQLTAVQSCHMGDK

SEQ ID NO: 41210 - protein, 46 aa, Homo sapiens
  MAP TO AC025749.2; EXPRESSED IN ADULT LIVER, SIGNAL = 1.5; EXPRESSED IN BONE MARROW, SIGNAL = 2.3; EXPRESSED IN PLACENTA, SIGNAL = 1.8; EXPRESSED IN HEART, SIGNAL = 2.2; EXPRESSED IN FETAL LIVER, SIGNAL = 1.8; EXPRESSED IN LUNG, SIGNAL = 1.6; EXPRESSED IN BRAIN, SIGNAL = 1.9; EST_HUMAN HIT: AV764573.1, EVALUE 3.00e-20; SWISSPROT HIT: P42701, EVALUE 3.00e-22
AKATRTLHLGKMPYLSGAAYNVAVISSNQFGPGLNQTWHIPADTHT

SEQ ID NO: 41211 - protein, 33 aa, Homo sapiens
  MAP TO AC025749.2; EXPRESSED IN ADULT LIVER, SIGNAL = 1.5; EXPRESSED IN BONE MARROW, SIGNAL = 2.3; EXPRESSED IN PLACENTA, SIGNAL = 1.8; EXPRESSED IN HEART, SIGNAL = 2.2; EXPRESSED IN FETAL LIVER, SIGNAL = 1.8; EXPRESSED IN LUNG, SIGNAL = 1.6; EXPRESSED IN BRAIN, SIGNAL = 1.9; SWISSPROT HIT: Q48919, EVALUE 2.20e+00; EST_HUMAN HIT: AV764573.1, EVALUE 6.00e-14
PRPPGPCTWGRCPISRVLPTTWLSSPRTNLVLA

SEQ ID NO: 41212 - protein, 51 aa, Homo sapiens
  MAP TO AL136528.9; EXPRESSED IN ADULT LIVER, SIGNAL = 0.81; EXPRESSED IN PLACENTA, SIGNAL = 1.1; EXPRESSED IN HEART, SIGNAL = 1.3; EXPRESSED IN FETAL LIVER, SIGNAL = 1.1; EXPRESSED IN BONE MARROW, SIGNAL = 1.1; EXPRESSED IN LUNG, SIGNAL = 0.83; EXPRESSED IN BRAIN, SIGNAL = 0.99; EST_HUMAN HIT: AA442309.1, EVALUE 2.00e-14
KSICEFDYLRKRRKSQTLSPVTSSSVASQSCLRKRMPWYLSVIHEKVLAEG

SEQ ID NO: 41213 - protein, 17 aa, Homo sapiens
  MAP TO AL136528.9; EXPRESSED IN ADULT LIVER, SIGNAL = 0.81; EXPRESSED IN PLACENTA, SIGNAL = 1.1; EXPRESSED IN HEART, SIGNAL = 1.3; EXPRESSED IN FETAL LIVER, SIGNAL = 1.1; EXPRESSED IN BONE MARROW, SIGNAL = 1.1; EXPRESSED IN LUNG, SIGNAL = 0.83; EXPRESSED IN BRAIN, SIGNAL = 0.99; EST_HUMAN HIT: AA442309.1, EVALUE 9.50e-01
RASASSITCGRGENPRL

SEQ ID NO: 41214 - protein, 56 aa, Homo sapiens
  MAP TO AC009311.2; EXPRESSED IN LUNG, SIGNAL = 1.8; EXPRESSED IN ADULT LIVER, SIGNAL = 1.3; EXPRESSED IN BRAIN, SIGNAL = 1.6; EXPRESSED IN PLACENTA, SIGNAL = 1.3; EXPRESSED IN FETAL LIVER, SIGNAL = 1.1; EXPRESSED IN HEART, SIGNAL = 1.4; EXPRESSED IN BONE MARROW, SIGNAL = 1.2
KMKREERKGEEERRRKKKKRKKRRKKKKKEEEEGKGEGKGKGKEKGKQKIPDLVTL

SEQ ID NO: 41215 - protein, 35 aa, Homo sapiens
  MAP TO AC015649.5; EXPRESSED IN ADULT LIVER, SIGNAL =   4; EXPRESSED IN LUNG, SIGNAL = 4.2; EXPRESSED IN HEART, SIGNAL = 4.7; EXPRESSED IN FETAL LIVER, SIGNAL = 3.1; EXPRESSED IN BRAIN, SIGNAL = 3.8; EXPRESSED IN BONE MARROW, SIGNAL =   4; EXPRESSED IN PLACENTA, SIGNAL = 3.5; EXPRESSED IN HELA, SIGNAL = 3.6; EST_HUMAN HIT: BF306541.1, EVALUE 1.00e-12
HIHQELDKELGESEGLSDDEETISTRVVRRRVFLK

SEQ ID NO: 41216 - protein, 36 aa, Homo sapiens
  MAP TO AL031726.11; EXPRESSED IN PLACENTA, SIGNAL = 1.3; EXPRESSED IN HEART, SIGNAL = 1.4; EXPRESSED IN FETAL LIVER, SIGNAL = 1.2; EXPRESSED IN BRAIN, SIGNAL = 1.1; EXPRESSED IN ADULT LIVER, SIGNAL = 0.9; EXPRESSED IN BONE MARROW, SIGNAL = 1.2; EST_HUMAN HIT: BE542271.1, EVALUE 9.70e+00; SWISSPROT HIT: O33120, EVALUE 4.90e+00
PALADGEEPHYLKTTHSGDVLYVIGLPCENPWLFFQ

SEQ ID NO: 41217 - protein, 116 aa, Homo sapiens
  MAP TO AC024060.2; EXPRESSED IN LUNG, SIGNAL = 1.4; EXPRESSED IN PLACENTA, SIGNAL = 1.2; EXPRESSED IN ADULT LIVER, SIGNAL = 1.3; EXPRESSED IN HEART, SIGNAL = 1.5; EXPRESSED IN FETAL LIVER, SIGNAL = 1.3; EXPRESSED IN BRAIN, SIGNAL = 1.3; EXPRESSED IN BONE MARROW, SIGNAL = 1.5; EST_HUMAN HIT: AA642438.1, EVALUE 2.30e-01
SMAGGKHSTHVGCWIHYLQYRPVSSVLSWGLEVYTTFTDDWVLTLSHHSNSTYHDCVDISWAFSSELNSVQQLFINISLCAITEHIKMSEAWFLTSTNILQSCGTGCGKIKLQNKV

SEQ ID NO: 41218 - protein, 35 aa, Homo sapiens
  MAP TO AC019058.3; EXPRESSED IN LUNG, SIGNAL = 1.6; EXPRESSED IN PLACENTA, SIGNAL = 1.2; EXPRESSED IN HEART, SIGNAL = 1.3; EXPRESSED IN FETAL LIVER, SIGNAL = 1.2; EXPRESSED IN BRAIN, SIGNAL = 1.1; EXPRESSED IN ADULT LIVER, SIGNAL = 1.5; EXPRESSED IN BONE MARROW, SIGNAL = 1.3; EST_HUMAN HIT: AA333084.1, EVALUE 9.80e+00; SWISSPROT HIT: Q99189, EVALUE 4.90e+00
MTVPEFVDYGTFRLLLIVCHCQNADMDIVEYVFLN

SEQ ID NO: 41219 - protein, 96 aa, Homo sapiens
  MAP TO AC010789.7; EXPRESSED IN ADULT LIVER, SIGNAL = 2.9; EXPRESSED IN LUNG, SIGNAL = 2.9; EXPRESSED IN BRAIN, SIGNAL = 2.2; EXPRESSED IN BONE MARROW, SIGNAL = 2.4; EXPRESSED IN PLACENTA, SIGNAL = 2.7; EXPRESSED IN HELA, SIGNAL = 2.7; EXPRESSED IN HEART, SIGNAL = 2.6; EXPRESSED IN FETAL LIVER, SIGNAL = 2.2; EST_HUMAN HIT: BE271316.1, EVALUE 2.00e-21; SWISSPROT HIT: P55075, EVALUE 9.00e-55
SNGKGKDCVFTEIVLENNYTALQNAKYEGWYMAFTRKGRPRKGSKTRQHQREVHFMKRLPRGHHTTEQSLRFEFLNYPPFTRSLRGSQRTWAPEPR

SEQ ID NO: 41220 - protein, 55 aa, Homo sapiens
  MAP TO AC010789.7; EXPRESSED IN ADULT LIVER, SIGNAL = 2.9; EXPRESSED IN LUNG, SIGNAL = 2.9; EXPRESSED IN BRAIN, SIGNAL = 2.2; EXPRESSED IN BONE MARROW, SIGNAL = 2.4; EXPRESSED IN PLACENTA, SIGNAL = 2.7; EXPRESSED IN HELA, SIGNAL = 2.7; EXPRESSED IN HEART, SIGNAL = 2.6; EXPRESSED IN FETAL LIVER, SIGNAL = 2.2
ATAKARTASSRRLCWRTTTQRCRMPSTRAGTWPSPARAGPARAPRRGSTSVRSTS

SEQ ID NO: 41221 - protein, 21 aa, Homo sapiens
  MAP TO AL118520.12; EXPRESSED IN LUNG, SIGNAL = 2.7; EXPRESSED IN HEART, SIGNAL = 2.6; EXPRESSED IN BRAIN, SIGNAL = 2.9; EXPRESSED IN BONE MARROW, SIGNAL = 3.1; EXPRESSED IN HELA, SIGNAL = 3.5; EXPRESSED IN PLACENTA, SIGNAL = 2.7; EXPRESSED IN ADULT LIVER, SIGNAL = 3.1; EXPRESSED IN FETAL LIVER, SIGNAL = 2.5; EST_HUMAN HIT: H05368.1, EVALUE 4.00e-04
MSSEGTRVVTIERTLVGRAPP

SEQ ID NO: 41222 - protein, 61 aa, Homo sapiens
  MAP TO AC010492.4; EXPRESSED IN PLACENTA, SIGNAL = 3.4; EXPRESSED IN ADULT LIVER, SIGNAL =   7; EXPRESSED IN HEART, SIGNAL = 5.6; EXPRESSED IN FETAL LIVER, SIGNAL =  13; EXPRESSED IN BONE MARROW, SIGNAL =  14; EXPRESSED IN LUNG, SIGNAL = 8.9; EXPRESSED IN BRAIN, SIGNAL = 6.2; EXPRESSED IN HELA, SIGNAL =   5; EST_HUMAN HIT: BE251678.1, EVALUE 2.00e-27; SWISSPROT HIT: P29314, EVALUE 2.00e-28
NALLRRLVRIGVLDEGKMKLDYILGLKIEDFLERRLQTQVFKLGLAKSIHHARVLIRQRHI

SEQ ID NO: 41223 - protein, 18 aa, Homo sapiens
  MAP TO AC010492.4; EXPRESSED IN PLACENTA, SIGNAL = 3.4; EXPRESSED IN ADULT LIVER, SIGNAL =   7; EXPRESSED IN HEART, SIGNAL = 5.6; EXPRESSED IN FETAL LIVER, SIGNAL =  13; EXPRESSED IN BONE MARROW, SIGNAL =  14; EXPRESSED IN LUNG, SIGNAL = 8.9; EXPRESSED IN BRAIN, SIGNAL = 6.2; EXPRESSED IN HELA, SIGNAL =   5; EST_HUMAN HIT: AA355054.1, EVALUE 2.00e-05
ATPCCGGWSALGCWMRAR

SEQ ID NO: 41224 - protein, 53 aa, Homo sapiens
  MAP TO AC007326.28; EXPRESSED IN LUNG, SIGNAL = 1.9; EXPRESSED IN ADULT LIVER, SIGNAL = 1.9; EXPRESSED IN FETAL LIVER, SIGNAL = 1.8; EXPRESSED IN BONE MARROW, SIGNAL = 1.7; EXPRESSED IN PLACENTA, SIGNAL = 1.7; EXPRESSED IN HEART, SIGNAL = 2.3; EXPRESSED IN BRAIN, SIGNAL = 2.3; EST_HUMAN HIT: AW166481.1, EVALUE 1.00e-13; SWISSPROT HIT: O35347, EVALUE 1.00e-14
SFQQRLSYTTLSDLALALLDGTVFEIVQGLLEIQHLTEKSLYNQRLRLQNEHR

SEQ ID NO: 41225 - protein, 42 aa, Homo sapiens
  MAP TO AC008812.4; EXPRESSED IN PLACENTA, SIGNAL = 4.9; EXPRESSED IN ADULT LIVER, SIGNAL = 4.2; EXPRESSED IN HEART, SIGNAL = 4.2; EXPRESSED IN BRAIN, SIGNAL = 3.8; EXPRESSED IN BONE MARROW, SIGNAL = 3.6; EXPRESSED IN LUNG, SIGNAL = 4.7; EXPRESSED IN FETAL LIVER, SIGNAL = 4.7
AALAFLGDHGVLGAGLVLQLIIALLELCPALPAIKVLVHLVA

SEQ ID NO: 41226 - protein, 29 aa, Homo sapiens
  MAP TO AL157777.3; EXPRESSED IN ADULT LIVER, SIGNAL = 5.1; EXPRESSED IN PLACENTA, SIGNAL = 6.7; EXPRESSED IN HELA, SIGNAL =  12; EXPRESSED IN FETAL LIVER, SIGNAL = 8.1; EXPRESSED IN BONE MARROW, SIGNAL = 7.3; EXPRESSED IN LUNG, SIGNAL = 2.5; EXPRESSED IN HEART, SIGNAL = 7.3; EXPRESSED IN BRAIN, SIGNAL = 8.2; EST_HUMAN HIT: BE614111.1, EVALUE 7.00e-09; SWISSPROT HIT: P18330, EVALUE 2.20e+00
SAFPRCAECSDPAYTFSQRPEARSLCGRP

SEQ ID NO: 41227 - protein, 117 aa, Homo sapiens
  MAP TO AL161646.3; EXPRESSED IN PLACENTA, SIGNAL = 2.3; EXPRESSED IN FETAL LIVER, SIGNAL = 2.2; EXPRESSED IN ADULT LIVER, SIGNAL = 2.3; EXPRESSED IN HEART, SIGNAL = 2.1; EXPRESSED IN BONE MARROW, SIGNAL = 2.4; EXPRESSED IN LUNG, SIGNAL = 2.1; EXPRESSED IN BRAIN, SIGNAL = 2.2; EST_HUMAN HIT: AA307644.1, EVALUE 4.40e+00; SWISSPROT HIT: Q91660, EVALUE 8.80e+00
MAYSSSTAPVTCDYQVVVILKAIEFVKRPRNYLVISNFFLHHRTIISNGTLTPPTAGESEVLPQMRQEGKTRAGWNPPPPHLPPLPTRLSPIPGATSSHSPPQTHPGGTHPWQPLLP

SEQ ID NO: 41228 - protein, 53 aa, Homo sapiens
  MAP TO AL132654.12; EXPRESSED IN PLACENTA, SIGNAL = 2.1; EXPRESSED IN HELA, SIGNAL = 3.3; EXPRESSED IN HEART, SIGNAL = 2.3; EXPRESSED IN FETAL LIVER, SIGNAL = 1.9; EXPRESSED IN LUNG, SIGNAL = 0.93; EXPRESSED IN BRAIN, SIGNAL = 1.9; EXPRESSED IN ADULT LIVER, SIGNAL = 1.7; EXPRESSED IN BONE MARROW, SIGNAL =   2; EST_HUMAN HIT: AL449573.1, EVALUE 1.00e-04; SWISSPROT HIT: P27816, EVALUE 8.00e+00
LVSDVWSLFTSAATARNCAGLKFWDQVTKDIGFRKRCSGEPQKWTSSTRKPKR

SEQ ID NO: 41229 - protein, 83 aa, Homo sapiens
  MAP TO AL121771.17; EXPRESSED IN PLACENTA, SIGNAL = 1.3; EXPRESSED IN FETAL LIVER, SIGNAL = 1.5; EXPRESSED IN BRAIN, SIGNAL = 1.6; EXPRESSED IN LUNG, SIGNAL = 2.7; EXPRESSED IN ADULT LIVER, SIGNAL = 1.9; EXPRESSED IN HEART, SIGNAL = 1.6; EXPRESSED IN BONE MARROW, SIGNAL = 1.4; EST_HUMAN HIT: AI637856.1, EVALUE 4.00e-47; SWISSPROT HIT: Q05481, EVALUE 5.00e-22
DKPHKCEVCGKCFSRKDKLKTHMRCHTGVKPYKCKTCDYAAADSSSLNKHLRIHSDERPFKCQICPYASRNSSQLTVHLRSHT

SEQ ID NO: 41230 - protein, 50 aa, Homo sapiens
  MAP TO AC018761.2; EXPRESSED IN LUNG, SIGNAL = 1.1; EXPRESSED IN ADULT LIVER, SIGNAL =   2; EXPRESSED IN HEART, SIGNAL = 2.6; EXPRESSED IN FETAL LIVER, SIGNAL =  14; EXPRESSED IN BRAIN, SIGNAL = 5.1; EXPRESSED IN PLACENTA, SIGNAL = 0.89; EXPRESSED IN HELA, SIGNAL = 2.9; EXPRESSED IN BONE MARROW, SIGNAL = 7.7; EST_HUMAN HIT: BE792472.1, EVALUE 5.00e-23; SWISSPROT HIT: P32119, EVALUE 4.00e-24
KYVVLFFYPLDFTFVCPTEIIAFSNRAEDFRKLGCEVLGVSVDSQFTHLA

SEQ ID NO: 41231 - protein, 51 aa, Homo sapiens
  MAP TO AC018761.2; EXPRESSED IN LUNG, SIGNAL = 1.1; EXPRESSED IN ADULT LIVER, SIGNAL =   2; EXPRESSED IN HEART, SIGNAL = 2.6; EXPRESSED IN FETAL LIVER, SIGNAL =  14; EXPRESSED IN BRAIN, SIGNAL = 5.1; EXPRESSED IN PLACENTA, SIGNAL = 0.89; EXPRESSED IN HELA, SIGNAL = 2.9; EXPRESSED IN BONE MARROW, SIGNAL = 7.7; EST_HUMAN HIT: BE958084.1, EVALUE 1.00e-15; SWISSPROT HIT: P33654, EVALUE 3.60e+00
GSTWSSFSTLWTSLLCAPPRSSRSATVQRTSASWAVKCWASRWTLSSPTWL

SEQ ID NO: 41232 - protein, 22 aa, Homo sapiens
  MAP TO AC024575.1; EXPRESSED IN LUNG, SIGNAL = 2.2; EXPRESSED IN ADULT LIVER, SIGNAL = 2.5; EXPRESSED IN HEART, SIGNAL = 2.1; EXPRESSED IN FETAL LIVER, SIGNAL =   2; EXPRESSED IN BRAIN, SIGNAL = 4.4; EXPRESSED IN BONE MARROW, SIGNAL = 2.4; EXPRESSED IN PLACENTA, SIGNAL = 2.1; EXPRESSED IN HELA, SIGNAL = 3.4; EST_HUMAN HIT: BE252751.1, EVALUE 2.00e-05
ALEHLDHRLREKVKQQNALRHQ

SEQ ID NO: 41233 - protein, 57 aa, Homo sapiens
  MAP TO AC025588.1; EXPRESSED IN ADULT LIVER, SIGNAL = 1.2; EXPRESSED IN BONE MARROW, SIGNAL = 1.2; EXPRESSED IN FETAL LIVER, SIGNAL = 1.6; EXPRESSED IN BRAIN, SIGNAL = 1.3; EXPRESSED IN PLACENTA, SIGNAL = 0.87; EXPRESSED IN HEART, SIGNAL = 1.4; EST_HUMAN HIT: BF038344.1, EVALUE 2.00e-12
LLPNLHFHLPSLVSLSLSLLLSVSLLLVNAVKLPRASFCSWLIAKSVITLWVRPSQI

SEQ ID NO: 41234 - protein, 83 aa, Homo sapiens
  MAP TO AC015599.3; EXPRESSED IN PLACENTA, SIGNAL = 1.8; EXPRESSED IN ADULT LIVER, SIGNAL = 2.4; EXPRESSED IN HEART, SIGNAL = 1.5; EXPRESSED IN FETAL LIVER, SIGNAL = 1.7; EXPRESSED IN BONE MARROW, SIGNAL = 1.7; EXPRESSED IN LUNG, SIGNAL = 2.2; EXPRESSED IN BRAIN, SIGNAL = 2.1; EST_HUMAN HIT: BE733922.1, EVALUE 2.00e-27; SWISSPROT HIT: P44221, EVALUE 2.10e-01
FLVMKRKRGRPKGSTKKSSTEEELAENIVSPTEDSPLAPEEGNSLPPSSLECSKCCRKFSNTRQLRKHICIIVLNLGEEEGEA

SEQ ID NO: 41235 - protein, 67 aa, Homo sapiens
  MAP TO AC018761.2; EXPRESSED IN PLACENTA, SIGNAL = 1.4; EXPRESSED IN ADULT LIVER, SIGNAL = 1.8; EXPRESSED IN HELA, SIGNAL = 2.5; EXPRESSED IN HEART, SIGNAL = 1.4; EXPRESSED IN BRAIN, SIGNAL =   2; EXPRESSED IN BONE MARROW, SIGNAL = 1.9; EXPRESSED IN LUNG, SIGNAL = 1.6; EXPRESSED IN FETAL LIVER, SIGNAL = 1.8; EST_HUMAN HIT: BF338491.1, EVALUE 9.00e-22; SWISSPROT HIT: O54984, EVALUE 8.00e-23
LVKGMNFSVVVFDTAPTGHTLRLLNFPTIVERGLGRLMQIKNQISPFISQAGGGGPHLHHPGSREWE

SEQ ID NO: 41236 - protein, 45 aa, Homo sapiens
  MAP TO AL160471.1; EXPRESSED IN LUNG, SIGNAL = 2.7; EXPRESSED IN BONE MARROW, SIGNAL = 8.2; EXPRESSED IN BRAIN, SIGNAL = 4.8; EXPRESSED IN FETAL LIVER, SIGNAL = 8.4; EXPRESSED IN HELA, SIGNAL = 6.3; EXPRESSED IN ADULT LIVER, SIGNAL = 1.8; EXPRESSED IN PLACENTA, SIGNAL = 0.99; EXPRESSED IN HEART, SIGNAL = 2.9; EST_HUMAN HIT: AW732258.1, EVALUE 1.00e-16; SWISSPROT HIT: P38983, EVALUE 7.00e-18
EIEKEEQPAAEKAVTKEEFQGEWTTPAPEFGAPQPEVADWSDGVQ

SEQ ID NO: 41237 - protein, 66 aa, Homo sapiens
  MAP TO AL160471.1; EXPRESSED IN LUNG, SIGNAL = 2.7; EXPRESSED IN BONE MARROW, SIGNAL = 8.2; EXPRESSED IN BRAIN, SIGNAL = 4.8; EXPRESSED IN FETAL LIVER, SIGNAL = 8.4; EXPRESSED IN HELA, SIGNAL = 6.3; EXPRESSED IN ADULT LIVER, SIGNAL = 1.8; EXPRESSED IN PLACENTA, SIGNAL = 0.99; EXPRESSED IN HEART, SIGNAL = 2.9; EST_HUMAN HIT: W19848.1, EVALUE 2.00e-12; SWISSPROT HIT: P14206, EVALUE 2.00e-10
FPLCYVDTTIPCNSKGAHSVGLMWWMPIQEVRMCGTISCGRSCLISTSTVFLRRLKKKSSLLLKRL

SEQ ID NO: 41238 - protein, 47 aa, Homo sapiens
  MAP TO AC016224.6; EXPRESSED IN PLACENTA, SIGNAL = 0.85; EXPRESSED IN ADULT LIVER, SIGNAL = 0.68; EXPRESSED IN FETAL LIVER, SIGNAL = 0.69; EXPRESSED IN BRAIN, SIGNAL = 0.69; EXPRESSED IN BONE MARROW, SIGNAL = 0.65; EXPRESSED IN HEART, SIGNAL = 7.1; EST_HUMAN HIT: AA715315.1, EVALUE 3.10e-02
RLDQEQGPEESQPETDTSDMDPLVGFTIEDVKSVLDQVTDDILIGIQ

SEQ ID NO: 41239 - protein, 22 aa, Homo sapiens
  MAP TO AC016224.6; EXPRESSED IN PLACENTA, SIGNAL = 0.85; EXPRESSED IN ADULT LIVER, SIGNAL = 0.68; EXPRESSED IN FETAL LIVER, SIGNAL = 0.69; EXPRESSED IN BRAIN, SIGNAL = 0.69; EXPRESSED IN BONE MARROW, SIGNAL = 0.65; EXPRESSED IN HEART, SIGNAL = 7.1
GWIKNKALRSLSQKLTPQTWIL

SEQ ID NO: 41240 - protein, 70 aa, Homo sapiens
  MAP TO AC022174.2; EXPRESSED IN LUNG, SIGNAL = 1.2; EXPRESSED IN PLACENTA, SIGNAL = 1.2; EXPRESSED IN FETAL LIVER, SIGNAL = 5.6; EXPRESSED IN BRAIN, SIGNAL = 1.1; EXPRESSED IN ADULT LIVER, SIGNAL = 1.3; EXPRESSED IN HEART, SIGNAL = 1.2; EXPRESSED IN BONE MARROW, SIGNAL =   1; EST_HUMAN HIT: BE087693.1, EVALUE 1.00e-04; SWISSPROT HIT: P57272, EVALUE 9.50e+00
GSNRGETSPAAGCKFGEGCLGLHLNKYVNFPETHFCLKLNFNLQAKALVRETGSEGSRGTGQWKSMDTAQ

SEQ ID NO: 41241 - protein, 23 aa, Homo sapiens
  MAP TO AC022174.2; EXPRESSED IN LUNG, SIGNAL = 1.2; EXPRESSED IN PLACENTA, SIGNAL = 1.2; EXPRESSED IN FETAL LIVER, SIGNAL = 5.6; EXPRESSED IN BRAIN, SIGNAL = 1.1; EXPRESSED IN ADULT LIVER, SIGNAL = 1.3; EXPRESSED IN HEART, SIGNAL = 1.2; EXPRESSED IN BONE MARROW, SIGNAL =   1
EATEERPRQLLAANLVRAVWDFT

SEQ ID NO: 41242 - protein, 38 aa, Homo sapiens
  MAP TO AC019275.3; EXPRESSED IN LUNG, SIGNAL = 2.2; EXPRESSED IN PLACENTA, SIGNAL = 2.7; EXPRESSED IN ADULT LIVER, SIGNAL = 2.7; EXPRESSED IN HEART, SIGNAL = 2.2; EXPRESSED IN BRAIN, SIGNAL = 2.4; EXPRESSED IN HELA, SIGNAL = 3.6; EXPRESSED IN FETAL LIVER, SIGNAL = 2.8; EXPRESSED IN BONE MARROW, SIGNAL = 2.6
MKGSKALHDGPKALDSTLFRNRLSLAFGGQRVSLTITG

SEQ ID NO: 41243 - protein, 57 aa, Homo sapiens
  MAP TO AL136124.3; EXPRESSED IN LUNG, SIGNAL = 1.3; EXPRESSED IN PLACENTA, SIGNAL = 1.3; EXPRESSED IN ADULT LIVER, SIGNAL = 1.1; EXPRESSED IN HEART, SIGNAL = 1.3; EXPRESSED IN FETAL LIVER, SIGNAL = 2.9; EXPRESSED IN BONE MARROW, SIGNAL = 1.3; EXPRESSED IN BRAIN, SIGNAL = 1.2; EST_HUMAN HIT: R50615.1, EVALUE 2.00e-10
GKQRTENVLRIFLDPLLDVLMKFSTNAYMPLLKTDRCLQLLLKLLNTCRLKGSSAQD

SEQ ID NO: 41244 - protein, 31 aa, Homo sapiens
  MAP TO AC021677.3; EXPRESSED IN LUNG, SIGNAL = 7.9; EXPRESSED IN HELA, SIGNAL = 6.2; EXPRESSED IN HEART, SIGNAL = 6.2; EXPRESSED IN FETAL LIVER, SIGNAL = 8.2; EXPRESSED IN BRAIN, SIGNAL = 6.2; EXPRESSED IN PLACENTA, SIGNAL = 4.3; EXPRESSED IN ADULT LIVER, SIGNAL = 8.8; EXPRESSED IN BONE MARROW, SIGNAL = 7.1; EST_HUMAN HIT: AA570160.1, EVALUE 2.00e+00; SWISSPROT HIT: P52193, EVALUE 8.50e+00
KERQQHPPKYNRHEEKKKGQEGDLGSKHQDQ

SEQ ID NO: 41245 - protein, 35 aa, Homo sapiens
  MAP TO AL080312.14; EXPRESSED IN ADULT LIVER, SIGNAL = 1.5; EXPRESSED IN BRAIN, SIGNAL = 0.98; EXPRESSED IN BONE MARROW, SIGNAL = 0.95; EXPRESSED IN LUNG, SIGNAL = 0.97; EXPRESSED IN PLACENTA, SIGNAL = 1.3; EXPRESSED IN HEART, SIGNAL = 1.2; EXPRESSED IN FETAL LIVER, SIGNAL = 1.1; EST_HUMAN HIT: AW992045.1, EVALUE 4.40e+00
LWFSSHMPLSTPSSPVEEKCDCILQMRKPRVGEVE

SEQ ID NO: 41246 - protein, 26 aa, Homo sapiens
  MAP TO AL080312.14; EXPRESSED IN ADULT LIVER, SIGNAL = 1.5; EXPRESSED IN BRAIN, SIGNAL = 0.98; EXPRESSED IN BONE MARROW, SIGNAL = 0.95; EXPRESSED IN LUNG, SIGNAL = 0.97; EXPRESSED IN PLACENTA, SIGNAL = 1.3; EXPRESSED IN HEART, SIGNAL = 1.2; EXPRESSED IN FETAL LIVER, SIGNAL = 1.1; SWISSPROT HIT: Q60688, EVALUE 6.60e+00; EST_HUMAN HIT: BE766852.1, EVALUE 3.60e+00
PSGFHPTCPSPRPAAQWRRSVTAFCK

SEQ ID NO: 41247 - protein, 81 aa, Homo sapiens
  MAP TO AL160404.1; EXPRESSED IN LUNG, SIGNAL = 1.4; EXPRESSED IN ADULT LIVER, SIGNAL = 1.1; EXPRESSED IN HEART, SIGNAL = 1.2; EXPRESSED IN BRAIN, SIGNAL = 1.1; EXPRESSED IN BONE MARROW, SIGNAL = 1.1; EXPRESSED IN PLACENTA, SIGNAL = 1.2; EXPRESSED IN FETAL LIVER, SIGNAL = 1.1; EST_HUMAN HIT: BF681666.1, EVALUE 2.20e+00; SWISSPROT HIT: P20434, EVALUE 1.70e+00
LQNTALTEVQVSTGKINCLSSVGKKLVTTFLLHLFSKMFSALGFFILSTASFSSLMPTLPLISIKLPAPSFIFFHSSLSSL

SEQ ID NO: 41248 - protein, 33 aa, Homo sapiens
  MAP TO AL158198.3; EXPRESSED IN PLACENTA, SIGNAL = 3.8; EXPRESSED IN FETAL LIVER, SIGNAL = 3.1; EXPRESSED IN BRAIN, SIGNAL = 3.4; EXPRESSED IN BONE MARROW, SIGNAL = 3.7; EXPRESSED IN LUNG, SIGNAL = 4.2; EXPRESSED IN HEART, SIGNAL = 3.6; EXPRESSED IN ADULT LIVER, SIGNAL = 3.9; EXPRESSED IN HELA, SIGNAL = 3.8
HFLILENGLGKEEVKVFMVIPHAFVLITIICLN

SEQ ID NO: 41249 - protein, 33 aa, Homo sapiens
  MAP TO AC012308.4; EXPRESSED IN ADULT LIVER, SIGNAL = 0.82; EXPRESSED IN BRAIN, SIGNAL = 1.2; EXPRESSED IN LUNG, SIGNAL = 1.2; EXPRESSED IN PLACENTA, SIGNAL = 1.1; EXPRESSED IN HEART, SIGNAL = 1.2; EXPRESSED IN FETAL LIVER, SIGNAL = 1.3; EXPRESSED IN BONE MARROW, SIGNAL = 1.1; EST_HUMAN HIT: BF082286.1, EVALUE 8.00e-12; SWISSPROT HIT: P07664, EVALUE 6.50e+00
MLYMAKLGPDVITEEINIDDEDSTTDTDGAAET

SEQ ID NO: 41250 - protein, 77 aa, Homo sapiens
  MAP TO AL109824.21; EXPRESSED IN LUNG, SIGNAL = 2.3; EXPRESSED IN PLACENTA, SIGNAL = 4.5; EXPRESSED IN ADULT LIVER, SIGNAL = 2.5; EXPRESSED IN FETAL LIVER, SIGNAL = 2.4; EXPRESSED IN BRAIN, SIGNAL = 2.6; EXPRESSED IN HEART, SIGNAL = 2.2; EXPRESSED IN BONE MARROW, SIGNAL = 2.6; EXPRESSED IN HELA, SIGNAL = 2.4; EST_HUMAN HIT: AU132349.1, EVALUE 1.00e-31; SWISSPROT HIT: Q15428, EVALUE 4.00e+00
TNAALLQNVELPRNVLVSPTPLANPPVPGSFPNNSGLNPQNSTVSVAAVGGVVEDNKESLNVPQDSDCQNSQSRKEQ

SEQ ID NO: 41251 - protein, 36 aa, Homo sapiens
  MAP TO AL109824.21; EXPRESSED IN LUNG, SIGNAL = 2.3; EXPRESSED IN PLACENTA, SIGNAL = 4.5; EXPRESSED IN ADULT LIVER, SIGNAL = 2.5; EXPRESSED IN FETAL LIVER, SIGNAL = 2.4; EXPRESSED IN BRAIN, SIGNAL = 2.6; EXPRESSED IN HEART, SIGNAL = 2.2; EXPRESSED IN BONE MARROW, SIGNAL = 2.6; EXPRESSED IN HELA, SIGNAL = 2.4; EST_HUMAN HIT: AU132349.1, EVALUE 6.00e-17
QMQPYCRMWSCREMYWSVPLLWPIPLYLGAFLTTVG

SEQ ID NO: 41252 - protein, 41 aa, Homo sapiens
  MAP TO AC016790.3; EXPRESSED IN LUNG, SIGNAL =   2; EXPRESSED IN PLACENTA, SIGNAL = 1.9; EXPRESSED IN ADULT LIVER, SIGNAL =   2; EXPRESSED IN FETAL LIVER, SIGNAL = 1.7; EXPRESSED IN BONE MARROW, SIGNAL = 1.6; EXPRESSED IN HEART, SIGNAL = 1.8; EXPRESSED IN BRAIN, SIGNAL = 1.7
ANMFFIRIGVLMKCTKYFEGIRNKKNWVIYSQSVFLTVHKE

SEQ ID NO: 41253 - protein, 33 aa, Homo sapiens
  MAP TO AL121881.25; EXPRESSED IN HELA, SIGNAL = 3.8; EXPRESSED IN LUNG, SIGNAL = 2.2; EXPRESSED IN ADULT LIVER, SIGNAL = 2.7; EXPRESSED IN HEART, SIGNAL = 2.6; EXPRESSED IN FETAL LIVER, SIGNAL = 3.3; EXPRESSED IN BRAIN, SIGNAL = 2.6; EXPRESSED IN BONE MARROW, SIGNAL = 2.5; EXPRESSED IN PLACENTA, SIGNAL = 2.2; EST_HUMAN HIT: R42861.1, EVALUE 3.40e-02
MVEGKAGTSYMVAVERASKRMRNLPNTYNTIGS

SEQ ID NO: 41254 - protein, 20 aa, Homo sapiens
  MAP TO AL121881.25; EXPRESSED IN HELA, SIGNAL = 3.8; EXPRESSED IN LUNG, SIGNAL = 2.2; EXPRESSED IN ADULT LIVER, SIGNAL = 2.7; EXPRESSED IN HEART, SIGNAL = 2.6; EXPRESSED IN FETAL LIVER, SIGNAL = 3.3; EXPRESSED IN BRAIN, SIGNAL = 2.6; EXPRESSED IN BONE MARROW, SIGNAL = 2.5; EXPRESSED IN PLACENTA, SIGNAL = 2.2; EST_HUMAN HIT: AI057146.1, EVALUE 3.70e-02
WWKGKQAHLTWWQLREPASG

SEQ ID NO: 41255 - protein, 82 aa, Homo sapiens
  MAP TO AL078646.29; EXPRESSED IN ADULT LIVER, SIGNAL = 1.8; EXPRESSED IN HELA, SIGNAL = 2.7; EXPRESSED IN HEART, SIGNAL = 1.7; EXPRESSED IN BRAIN, SIGNAL = 1.6; EXPRESSED IN BONE MARROW, SIGNAL = 1.8; EXPRESSED IN LUNG, SIGNAL = 1.9; EXPRESSED IN PLACENTA, SIGNAL = 1.6; EXPRESSED IN FETAL LIVER, SIGNAL = 2.2; EST_HUMAN HIT: AA642505.1, EVALUE 2.30e+00; SWISSPROT HIT: P44044, EVALUE 5.70e+00
DCLMWPHFGDYHSWGCRGHKNPDYCFNSISCLGSSYFGEESGICIKYTTQVAVPAGSHGMGARTITWEHGIWVRNKDDGREL

SEQ ID NO: 41256 - protein, 58 aa, Homo sapiens
  MAP TO AC013746.4; EXPRESSED IN BONE MARROW, SIGNAL =   4; EXPRESSED IN LUNG, SIGNAL =   6; EXPRESSED IN ADULT LIVER, SIGNAL = 5.6; EXPRESSED IN FETAL LIVER, SIGNAL = 5.2; EXPRESSED IN PLACENTA, SIGNAL =   4; EXPRESSED IN HEART, SIGNAL = 3.8; EXPRESSED IN BRAIN, SIGNAL = 3.2; EST_HUMAN HIT: BE044282.1, EVALUE 7.00e-29; SWISSPROT HIT: P15586, EVALUE 4.00e-13
LYNMLVETGELENTYIIYTADHGYHIGQFGLVKGKSMPYDFDIRVPFFIRGPSVEPGS

SEQ ID NO: 41257 - protein, 53 aa, Homo sapiens
  MAP TO AC013746.4; EXPRESSED IN BONE MARROW, SIGNAL =   4; EXPRESSED IN LUNG, SIGNAL =   6; EXPRESSED IN ADULT LIVER, SIGNAL = 5.6; EXPRESSED IN FETAL LIVER, SIGNAL = 5.2; EXPRESSED IN PLACENTA, SIGNAL =   4; EXPRESSED IN HEART, SIGNAL = 3.8; EXPRESSED IN BRAIN, SIGNAL = 3.2; EST_HUMAN HIT: BE044282.1, EVALUE 5.00e-27; SWISSPROT HIT: P04488, EVALUE 6.10e+00
CITCSWRRGSWRILTSFTPPTMVTILGSLDWSRGNPCHMTLIFVCLFLFVVQV

SEQ ID NO: 41258 - protein, 57 aa, Homo sapiens
  MAP TO AC019101.3; EXPRESSED IN LUNG, SIGNAL = 1.2; EXPRESSED IN PLACENTA, SIGNAL = 1.3; EXPRESSED IN FETAL LIVER, SIGNAL = 0.97; EXPRESSED IN BONE MARROW, SIGNAL = 1.1; EXPRESSED IN HEART, SIGNAL = 1.2; EXPRESSED IN ADULT LIVER, SIGNAL = 1.6; EXPRESSED IN BRAIN, SIGNAL = 1.2; SWISSPROT HIT: P09182, EVALUE 4.60e+00; EST_HUMAN HIT: AV734056.1, EVALUE 2.80e+00
GACVIPDDAQGPLSLFPNFKPVPSPEVLTPFAIIYLLSLWTHLAHSCVLRTSMVPDT

SEQ ID NO: 41259 - protein, 69 aa, Homo sapiens
  MAP TO AL161732.1; EXPRESSED IN BONE MARROW, SIGNAL = 1.3; EXPRESSED IN ADULT LIVER, SIGNAL = 1.2; EXPRESSED IN BRAIN, SIGNAL = 1.4; EXPRESSED IN LUNG, SIGNAL = 1.3; EXPRESSED IN PLACENTA, SIGNAL = 1.3; EXPRESSED IN HEART, SIGNAL = 1.3; EXPRESSED IN FETAL LIVER, SIGNAL = 1.2; EST_HUMAN HIT: BF368819.1, EVALUE 5.00e-09
IKDTIGFDTLGHCFFLEDGIEQRNTLFHNLGLLTKPGTLLPTDRNNSMCTTMRDKVFGNYIPVPATDCM

SEQ ID NO: 41260 - protein, 35 aa, Homo sapiens
  MAP TO AC013771.3; EXPRESSED IN PLACENTA, SIGNAL = 1.6; EXPRESSED IN FETAL LIVER, SIGNAL = 1.2; EXPRESSED IN BONE MARROW, SIGNAL = 1.4; EXPRESSED IN LUNG, SIGNAL = 1.3; EXPRESSED IN ADULT LIVER, SIGNAL = 1.5; EXPRESSED IN HEART, SIGNAL = 1.4; EXPRESSED IN BRAIN, SIGNAL =   1; SWISSPROT HIT: P19701, EVALUE 4.90e+00
GKKTSVISEDEGYRFVAEEFQWTLGKDKVSSSKDH

SEQ ID NO: 41261 - protein, 41 aa, Homo sapiens
  MAP TO AL121673.27; EXPRESSED IN LUNG, SIGNAL = 1.5; EXPRESSED IN FETAL LIVER, SIGNAL = 1.6; EXPRESSED IN BONE MARROW, SIGNAL = 1.4; EXPRESSED IN PLACENTA, SIGNAL = 1.8; EXPRESSED IN ADULT LIVER, SIGNAL = 2.2; EXPRESSED IN HEART, SIGNAL = 1.6; EXPRESSED IN BRAIN, SIGNAL = 1.4; EST_HUMAN HIT: BE396032.1, EVALUE 3.20e+00
ERPPVEVEPGSMGGLARLRGGPHRHSHLGTQEHSGRACVQM

SEQ ID NO: 41262 - protein, 83 aa, Homo sapiens
  MAP TO AC015649.5; EXPRESSED IN BONE MARROW, SIGNAL =  16; EXPRESSED IN ADULT LIVER, SIGNAL =  20; EXPRESSED IN HEART, SIGNAL = 7.7; EXPRESSED IN LUNG, SIGNAL =  14; EXPRESSED IN HELA, SIGNAL =  16; EXPRESSED IN FETAL LIVER, SIGNAL =  20; EXPRESSED IN BRAIN, SIGNAL = 9.1; EXPRESSED IN PLACENTA, SIGNAL =  13; EST_HUMAN HIT: BE740490.1, EVALUE 1.00e-41; SWISSPROT HIT: P38797, EVALUE 1.80e+00
IIAKDPTSLEEEIKEIRRSGSSKALDNTPEFELSDIFYFCRKGMETIMDDEVTKRFSAEELESWNLLSRTNYNFQYISLRLTV

SEQ ID NO: 41263 - protein, 42 aa, Homo sapiens
  MAP TO AC015649.5; EXPRESSED IN BONE MARROW, SIGNAL =  16; EXPRESSED IN ADULT LIVER, SIGNAL =  20; EXPRESSED IN HEART, SIGNAL = 7.7; EXPRESSED IN LUNG, SIGNAL =  14; EXPRESSED IN HELA, SIGNAL =  16; EXPRESSED IN FETAL LIVER, SIGNAL =  20; EXPRESSED IN BRAIN, SIGNAL = 9.1; EXPRESSED IN PLACENTA, SIGNAL =  13; EST_HUMAN HIT: BF374128.1, EVALUE 2.00e-09
KKRSKRFVEVVVVRLWTTLQSSSSLTFSTFAGKEWRPLWMMR

SEQ ID NO: 41264 - protein, 90 aa, Homo sapiens
  MAP TO AC010229.4; EXPRESSED IN HELA, SIGNAL =   4; EXPRESSED IN LUNG, SIGNAL = 4.4; EXPRESSED IN PLACENTA, SIGNAL = 4.9; EXPRESSED IN HEART, SIGNAL = 4.6; EXPRESSED IN BRAIN, SIGNAL = 3.9; EXPRESSED IN BONE MARROW, SIGNAL = 3.8; EXPRESSED IN ADULT LIVER, SIGNAL =   5; EXPRESSED IN FETAL LIVER, SIGNAL =   6; EST_HUMAN HIT: H93907.1, EVALUE 1.70e-02; SWISSPROT HIT: P38080, EVALUE 5.60e-02
QKRQKSQSEEAGKTRSMRGTRPTIAGFGNEGAMSQEYGKPQKVKNNPDQKTSKKTRPKPHIHMQLNSASNLNDPESRFPLDLGETEDMAK

SEQ ID NO: 41265 - protein, 35 aa, Homo sapiens
  MAP TO AL121914.16; EXPRESSED IN LUNG, SIGNAL = 3.8; EXPRESSED IN HEART, SIGNAL = 3.1; EXPRESSED IN FETAL LIVER, SIGNAL = 3.1; EXPRESSED IN BRAIN, SIGNAL = 2.8; EXPRESSED IN BONE MARROW, SIGNAL = 3.2; EXPRESSED IN ADULT LIVER, SIGNAL = 3.2; EXPRESSED IN PLACENTA, SIGNAL = 3.3; EXPRESSED IN HELA, SIGNAL = 4.1
QKSLPEEVSVDTLIFPQVVLPPSLSSLFGECRWEK

SEQ ID NO: 41266 - protein, 35 aa, Homo sapiens
  MAP TO AL121914.16; EXPRESSED IN LUNG, SIGNAL = 3.8; EXPRESSED IN HEART, SIGNAL = 3.1; EXPRESSED IN FETAL LIVER, SIGNAL = 3.1; EXPRESSED IN BRAIN, SIGNAL = 2.8; EXPRESSED IN BONE MARROW, SIGNAL = 3.2; EXPRESSED IN ADULT LIVER, SIGNAL = 3.2; EXPRESSED IN PLACENTA, SIGNAL = 3.3; EXPRESSED IN HELA, SIGNAL = 4.1
FFPPTFSKKGRQRRRKDNLRKNQSIYRHFFWEGFL

SEQ ID NO: 41267 - protein, 32 aa, Homo sapiens
  MAP TO AL162311.1; EXPRESSED IN LUNG, SIGNAL = 1.1; EXPRESSED IN PLACENTA, SIGNAL = 1.3; EXPRESSED IN ADULT LIVER, SIGNAL = 1.3; EXPRESSED IN HEART, SIGNAL = 1.3; EXPRESSED IN FETAL LIVER, SIGNAL = 1.1; EXPRESSED IN BRAIN, SIGNAL = 1.3; EXPRESSED IN BONE MARROW, SIGNAL = 1.2; EST_HUMAN HIT: BE538919.1, EVALUE 1.00e-07; SWISSPROT HIT: P29315, EVALUE 2.90e+00
SEKLLLYDTVQSELEEKIRRLEEDRHSIDITS

SEQ ID NO: 41268 - protein, 43 aa, Homo sapiens
  MAP TO AL133295.11; EXPRESSED IN BONE MARROW, SIGNAL = 1.5; EXPRESSED IN LUNG, SIGNAL = 1.7; EXPRESSED IN PLACENTA, SIGNAL = 1.8; EXPRESSED IN ADULT LIVER, SIGNAL = 1.6; EXPRESSED IN FETAL LIVER, SIGNAL = 1.8; EXPRESSED IN BRAIN, SIGNAL = 1.7; EXPRESSED IN HEART, SIGNAL = 1.7; EST_HUMAN HIT: AV749560.1, EVALUE 5.40e+00
MDTSRGPLSLVTLALGPLLWKLVTLLLLAVATADPVLAATLPQ

SEQ ID NO: 41269 - protein, 37 aa, Homo sapiens
  MAP TO AL133295.11; EXPRESSED IN BONE MARROW, SIGNAL = 1.5; EXPRESSED IN LUNG, SIGNAL = 1.7; EXPRESSED IN PLACENTA, SIGNAL = 1.8; EXPRESSED IN ADULT LIVER, SIGNAL = 1.6; EXPRESSED IN FETAL LIVER, SIGNAL = 1.8; EXPRESSED IN BRAIN, SIGNAL = 1.7; EXPRESSED IN HEART, SIGNAL = 1.7; EST_HUMAN HIT: AW630487.1, EVALUE 1.00e-15
WRQWQPAVVLPRVLGLQWRQPARATSPVSRGGVLEPA

SEQ ID NO: 41270 - protein, 35 aa, Homo sapiens
  MAP TO AC008597.3; EXPRESSED IN PLACENTA, SIGNAL = 1.1; EXPRESSED IN FETAL LIVER, SIGNAL = 2.6; EXPRESSED IN BONE MARROW, SIGNAL = 1.6; EXPRESSED IN HEART, SIGNAL = 1.7; EXPRESSED IN BRAIN, SIGNAL = 1.9; EXPRESSED IN LUNG, SIGNAL = 2.3; EXPRESSED IN ADULT LIVER, SIGNAL = 2.2; SWISSPROT HIT: P51659, EVALUE 4.00e-14; EST_HUMAN HIT: BE312992.1, EVALUE 6.00e-13
NDLGGDFKGVGKGSLAADKVVEEIRRRGGKAVANY

SEQ ID NO: 41271 - protein, 115 aa, Homo sapiens
  MAP TO AC008468.4; EXPRESSED IN LUNG, SIGNAL = 1.4; EXPRESSED IN ADULT LIVER, SIGNAL =   2; EXPRESSED IN HEART, SIGNAL = 1.8; EXPRESSED IN FETAL LIVER, SIGNAL = 2.3; EXPRESSED IN BRAIN, SIGNAL = 1.7; EXPRESSED IN PLACENTA, SIGNAL = 1.6; EXPRESSED IN HELA, SIGNAL = 2.7; EXPRESSED IN BONE MARROW, SIGNAL = 1.8; SWISSPROT HIT: P34616, EVALUE 2.00e-10; EST_HUMAN HIT: BE159027.1, EVALUE 2.00e-23
VEVKDINDNPPVFPATQKNLFIAESRPLDSRFPLEGASDADIGENALLTYRLSPNEYFFLDVPTSNQQVKPLGLVLRKLLDREETPELHLLLTATDGGKPELTGTVQLLITVLDN

SEQ ID NO: 41272 - protein, 58 aa, Homo sapiens
  MAP TO AC008103.27; EXPRESSED IN LUNG, SIGNAL = 2.8; EXPRESSED IN PLACENTA, SIGNAL = 2.4; EXPRESSED IN HELA, SIGNAL = 2.5; EXPRESSED IN HEART, SIGNAL = 2.8; EXPRESSED IN FETAL LIVER, SIGNAL = 3.4; EXPRESSED IN BRAIN, SIGNAL = 3.1; EXPRESSED IN ADULT LIVER, SIGNAL = 3.1; EXPRESSED IN BONE MARROW, SIGNAL = 2.7; SWISSPROT HIT: O43272, EVALUE 1.00e-29; EST_HUMAN HIT: AI823488.1, EVALUE 6.00e-09
DAYDNVTLDVELARREGWCFGAKLVRGAYLAQERARAAEIGYEDPINPTYEATNAMYH

SEQ ID NO: 41273 - protein, 35 aa, Homo sapiens
  MAP TO AC021846.3; EXPRESSED IN BRAIN, SIGNAL = 2.2; EXPRESSED IN LUNG, SIGNAL = 2.2; EXPRESSED IN ADULT LIVER, SIGNAL = 2.3; EXPRESSED IN BONE MARROW, SIGNAL = 2.3; EXPRESSED IN PLACENTA, SIGNAL = 1.8; EXPRESSED IN HEART, SIGNAL = 1.8; EXPRESSED IN FETAL LIVER, SIGNAL = 2.2; EST_HUMAN HIT: AV752619.1, EVALUE 2.00e-03
ASVTGFDIAPDDTEDVILNGVVRVTGVVAAVEVWH

SEQ ID NO: 41274 - protein, 19 aa, Homo sapiens
  MAP TO AC025601.2; EXPRESSED IN LUNG, SIGNAL = 1.5; EXPRESSED IN PLACENTA, SIGNAL = 1.6; EXPRESSED IN HEART, SIGNAL = 2.2; EXPRESSED IN BRAIN, SIGNAL = 1.4; EXPRESSED IN FETAL LIVER, SIGNAL = 1.5; EXPRESSED IN ADULT LIVER, SIGNAL = 1.6; EXPRESSED IN BONE MARROW, SIGNAL = 1.3
PSSLFAACSAHFLAILLMH

SEQ ID NO: 41275 - protein, 40 aa, Homo sapiens
  MAP TO AC019184.2; EXPRESSED IN HELA, SIGNAL =  11; EXPRESSED IN LUNG, SIGNAL = 6.5; EXPRESSED IN ADULT LIVER, SIGNAL = 7.8; EXPRESSED IN FETAL LIVER, SIGNAL =   6; EXPRESSED IN BRAIN, SIGNAL = 6.4; EXPRESSED IN BONE MARROW, SIGNAL = 6.1; EXPRESSED IN PLACENTA, SIGNAL = 6.5; EXPRESSED IN HEART, SIGNAL = 7.6
STYPRLTSCKKNPTLTAVFLNSIMTKSEGKGIKWKTRVFL

SEQ ID NO: 41276 - protein, 50 aa, Homo sapiens
  MAP TO AL157396.2; EXPRESSED IN LUNG, SIGNAL = 1.7; EXPRESSED IN ADULT LIVER, SIGNAL = 1.9; EXPRESSED IN HEART, SIGNAL = 1.7; EXPRESSED IN BRAIN, SIGNAL = 1.5; EXPRESSED IN PLACENTA, SIGNAL = 1.8; EXPRESSED IN FETAL LIVER, SIGNAL = 1.5; EXPRESSED IN BONE MARROW, SIGNAL = 1.5; EST_HUMAN HIT: AI221148.1, EVALUE 2.00e-11; SWISSPROT HIT: P51160, EVALUE 7.00e-16
EFSRFHKEITPMLSGLQNNRVEWKSLADEYDAKMKVIEEEAKKQEGGAEK

SEQ ID NO: 41277 - protein, 109 aa, Homo sapiens
  MAP TO AL137026.10; EXPRESSED IN LUNG, SIGNAL = 1.6; EXPRESSED IN PLACENTA, SIGNAL = 1.5; EXPRESSED IN ADULT LIVER, SIGNAL = 1.7; EXPRESSED IN HEART, SIGNAL = 1.5; EXPRESSED IN FETAL LIVER, SIGNAL = 1.3; EXPRESSED IN BRAIN, SIGNAL = 1.4; EXPRESSED IN BONE MARROW, SIGNAL = 1.4; SWISSPROT HIT: P20908, EVALUE 9.00e-03; EST_HUMAN HIT: BE886357.1, EVALUE 1.60e-01
AWEGNRDFPFALSAGTAVPALRGRGDAALWGKSGWQEVAGLLEEVLGCAAVAAEKGPEDATRPFPRTAKEPRGEDGQGLPEGGTGEPGVSGLRGAEAFWVVNVPSLPSL

SEQ ID NO: 41278 - protein, 43 aa, Homo sapiens
  MAP TO AC018529.4; EXPRESSED IN BONE MARROW, SIGNAL =  17; EXPRESSED IN PLACENTA, SIGNAL =  17; EXPRESSED IN ADULT LIVER, SIGNAL =  20; EXPRESSED IN HELA, SIGNAL =  25; EXPRESSED IN FETAL LIVER, SIGNAL =  16; EXPRESSED IN BRAIN, SIGNAL =  15; EXPRESSED IN LUNG, SIGNAL =  18; EXPRESSED IN HEART, SIGNAL =  15; SWISSPROT HIT: P21133, EVALUE 2.80e+00; EST_HUMAN HIT: BE545690.1, EVALUE 1.10e+00
RNALSATLCGCCGWKAAFVGGWHGEDTSPRSVCCCGKEPGVIS

SEQ ID NO: 41279 - protein, 27 aa, Homo sapiens
  MAP TO AC020919.3; EXPRESSED IN LUNG, SIGNAL = 3.7; EXPRESSED IN ADULT LIVER, SIGNAL = 3.8; EXPRESSED IN FETAL LIVER, SIGNAL = 3.9; EXPRESSED IN BRAIN, SIGNAL = 4.5; EXPRESSED IN PLACENTA, SIGNAL = 3.9; EXPRESSED IN HELA, SIGNAL = 5.8; EXPRESSED IN HEART, SIGNAL = 4.9; EXPRESSED IN BONE MARROW, SIGNAL = 3.7
AHWMAHFWTLTMMMMMMMMMMIKQGRQ

SEQ ID NO: 41280 - protein, 90 aa, Homo sapiens
  MAP TO AL160281.2; EXPRESSED IN LUNG, SIGNAL = 1.5; EXPRESSED IN PLACENTA, SIGNAL = 1.5; EXPRESSED IN FETAL LIVER, SIGNAL = 1.7; EXPRESSED IN BRAIN, SIGNAL = 1.6; EXPRESSED IN ADULT LIVER, SIGNAL = 1.7; EXPRESSED IN HEART, SIGNAL = 1.3; EXPRESSED IN BONE MARROW, SIGNAL = 1.7; EST_HUMAN HIT: AW503755.1, EVALUE 1.00e-43; SWISSPROT HIT: P14148, EVALUE 4.00e-16
QAKVKNKTIPLTDSTVIEEHLGKFGVICLEDLIHEIAFPGKHFEEISWFLSPFHLSVARHATKNRVGFLKETGTPGYRGEHINLLIHQLN

SEQ ID NO: 41281 - protein, 55 aa, Homo sapiens
  MAP TO AC007981.43; EXPRESSED IN ADULT LIVER, SIGNAL = 5.7; EXPRESSED IN HEART, SIGNAL = 5.2; EXPRESSED IN BONE MARROW, SIGNAL = 6.5; EXPRESSED IN LUNG, SIGNAL = 4.8; EXPRESSED IN PLACENTA, SIGNAL = 5.9; EXPRESSED IN HELA, SIGNAL = 3.3; EXPRESSED IN FETAL LIVER, SIGNAL = 9.7; EXPRESSED IN BRAIN, SIGNAL = 8.7
YGAMGDLVLLGLGLGLALAVIVLAVVLSRHQAPFDPRPLPTPLLLLTPRSSQILY

SEQ ID NO: 41282 - protein, 45 aa, Homo sapiens
  MAP TO AC007981.43; EXPRESSED IN ADULT LIVER, SIGNAL = 5.7; EXPRESSED IN HEART, SIGNAL = 5.2; EXPRESSED IN BONE MARROW, SIGNAL = 6.5; EXPRESSED IN LUNG, SIGNAL = 4.8; EXPRESSED IN PLACENTA, SIGNAL = 5.9; EXPRESSED IN HELA, SIGNAL = 3.3; EXPRESSED IN FETAL LIVER, SIGNAL = 9.7; EXPRESSED IN BRAIN, SIGNAL = 8.7
TEPWVTWSCWGWGWGWRWLSLCWLWSSLDTRPHLTPGLCPRRCCC

SEQ ID NO: 41283 - protein, 64 aa, Homo sapiens
  MAP TO AC026407.1; EXPRESSED IN HELA, SIGNAL = 3.5; EXPRESSED IN BRAIN, SIGNAL =   3; EXPRESSED IN LUNG, SIGNAL = 2.9; EXPRESSED IN ADULT LIVER, SIGNAL = 3.5; EXPRESSED IN BONE MARROW, SIGNAL =   3; EXPRESSED IN PLACENTA, SIGNAL = 2.9; EXPRESSED IN FETAL LIVER, SIGNAL = 3.7; EXPRESSED IN HEART, SIGNAL =   3
FLIILEKPLIGSKRARLLYKCQKDLGRLENQNVKKWESSHSFSFFAHEPDDYFNYKSFRKGLHA

SEQ ID NO: 41284 - protein, 31 aa, Homo sapiens
  MAP TO AL118520.12; EXPRESSED IN LUNG, SIGNAL =   3; EXPRESSED IN PLACENTA, SIGNAL = 2.3; EXPRESSED IN ADULT LIVER, SIGNAL = 3.1; EXPRESSED IN HEART, SIGNAL = 2.2; EXPRESSED IN FETAL LIVER, SIGNAL = 2.3; EXPRESSED IN BRAIN, SIGNAL = 2.5; EXPRESSED IN BONE MARROW, SIGNAL = 2.6; EXPRESSED IN HELA, SIGNAL = 3.3; EST_HUMAN HIT: AU132349.1, EVALUE 1.00e-13
CRMWSCREMYWSVPLLWPIPLYLGAFLTTVG

SEQ ID NO: 41285 - protein, 155 aa, Homo sapiens
  MAP TO AC008468.4; EXPRESSED IN ADULT LIVER, SIGNAL = 2.3; EXPRESSED IN HEART, SIGNAL = 1.9; EXPRESSED IN BONE MARROW, SIGNAL = 2.4; EXPRESSED IN LUNG, SIGNAL = 2.2; EXPRESSED IN PLACENTA, SIGNAL = 2.2; EXPRESSED IN FETAL LIVER, SIGNAL = 2.5; EXPRESSED IN BRAIN, SIGNAL = 2.4; SWISSPROT HIT: O02840, EVALUE 1.70e-01; EST_HUMAN HIT: AA382839.1, EVALUE 3.00e-16
TTRILDEADAPRHRLLVLVKDHGEPALTSTATVLVSLVENGQAPKTSSRASVGAVDPEAALVDINVYLIIAICAVSSLLVLTLLLYTALRCSAPPTVSRCAPGKPTLVCSSAVGSWSYSQQRRQRVCSAESPPKTDLMAFSPSLQLSREDCLNPP

SEQ ID NO: 41286 - protein, 57 aa, Homo sapiens
  MAP TO AL157381.7; EXPRESSED IN BONE MARROW, SIGNAL = 1.4; EXPRESSED IN PLACENTA, SIGNAL = 1.5; EXPRESSED IN ADULT LIVER, SIGNAL = 1.4; EXPRESSED IN FETAL LIVER, SIGNAL = 1.2; EXPRESSED IN BRAIN, SIGNAL = 1.2; EXPRESSED IN LUNG, SIGNAL = 1.1; EXPRESSED IN HEART, SIGNAL = 1.3
KRKRKKKKRKKKKKEEEEGRRRRRRRRRRRRRRRRRRRRRRRRRGRRRRRGRRRRRK

SEQ ID NO: 41287 - protein, 62 aa, Homo sapiens; identical to SEQ ID NO: 35445
  MAP TO AL137225.7; EXPRESSED IN LUNG, SIGNAL = 1.4; EXPRESSED IN PLACENTA, SIGNAL = 1.8; EXPRESSED IN ADULT LIVER, SIGNAL = 1.5; EXPRESSED IN FETAL LIVER, SIGNAL = 1.8; EXPRESSED IN BRAIN, SIGNAL = 1.4; EXPRESSED IN HEART, SIGNAL = 1.6; EXPRESSED IN HELA, SIGNAL = 2.7; EXPRESSED IN BONE MARROW, SIGNAL = 1.5; EST_HUMAN HIT: AJ403124.1, EVALUE 7.00e-20

SEQ ID NO: 41288 - protein, 61 aa, Homo sapiens
  MAP TO AL137225.7; EXPRESSED IN LUNG, SIGNAL = 1.4; EXPRESSED IN PLACENTA, SIGNAL = 1.8; EXPRESSED IN ADULT LIVER, SIGNAL = 1.5; EXPRESSED IN FETAL LIVER, SIGNAL = 1.8; EXPRESSED IN BRAIN, SIGNAL = 1.4; EXPRESSED IN HEART, SIGNAL = 1.6; EXPRESSED IN HELA, SIGNAL = 2.7; EXPRESSED IN BONE MARROW, SIGNAL = 1.5; EST_HUMAN HIT: AJ403122.1, EVALUE 1.00e-15
LFSSCWASPSSCPRMPPLLCCQGMWVPRAPWPPWASPSSCLTLRSCCCRRPVPSTWTSQGS

SEQ ID NO: 41289 - protein, 55 aa, Homo sapiens
  MAP TO AC024196.2; EXPRESSED IN PLACENTA, SIGNAL = 1.6; EXPRESSED IN ADULT LIVER, SIGNAL = 1.6; EXPRESSED IN FETAL LIVER, SIGNAL = 2.9; EXPRESSED IN HEART, SIGNAL = 1.5; EXPRESSED IN LUNG, SIGNAL = 1.5; EXPRESSED IN BRAIN, SIGNAL = 1.5; EXPRESSED IN BONE MARROW, SIGNAL = 1.4; EST_HUMAN HIT: BE747524.1, EVALUE 2.00e-18; SWISSPROT HIT: P19013, EVALUE 2.00e-19
EITQIQSHISDMSVILSMDNNRNLDLDSIIDEVRTQYEEIALKSKAEAEALYQTK

SEQ ID NO: 41290 - protein, 23 aa, Homo sapiens
  MAP TO AC024196.2; EXPRESSED IN PLACENTA, SIGNAL = 1.6; EXPRESSED IN ADULT LIVER, SIGNAL = 1.6; EXPRESSED IN FETAL LIVER, SIGNAL = 2.9; EXPRESSED IN HEART, SIGNAL = 1.5; EXPRESSED IN LUNG, SIGNAL = 1.5; EXPRESSED IN BRAIN, SIGNAL = 1.5; EXPRESSED IN BONE MARROW, SIGNAL = 1.4; EST_HUMAN HIT: AW275792.1, EVALUE 1.60e+00
RSLRSSPTSVTCLSSCPWTTTGT

SEQ ID NO: 41291 - protein, 42 aa, Homo sapiens
  MAP TO AL139248.2; EXPRESSED IN LUNG, SIGNAL = 1.2; EXPRESSED IN ADULT LIVER, SIGNAL = 1.5; EXPRESSED IN HEART, SIGNAL = 1.3; EXPRESSED IN BRAIN, SIGNAL = 1.1; EXPRESSED IN PLACENTA, SIGNAL = 1.3; EXPRESSED IN FETAL LIVER, SIGNAL = 1.4; EXPRESSED IN BONE MARROW, SIGNAL = 1.3; EST_HUMAN HIT: BF439310.1, EVALUE 7.00e-21; SWISSPROT HIT: P81694, EVALUE 7.30e-01
GSPFTVTVRRKHRPHSGVFHCCTFCSSGGQKTARCACGGTMP

SEQ ID NO: 41292 - protein, 31 aa, Homo sapiens
  MAP TO AL121917.12; EXPRESSED IN LUNG, SIGNAL = 5.6; EXPRESSED IN PLACENTA, SIGNAL = 4.8; EXPRESSED IN ADULT LIVER, SIGNAL = 5.1; EXPRESSED IN HEART, SIGNAL =   5; EXPRESSED IN FETAL LIVER, SIGNAL = 4.9; EXPRESSED IN BRAIN, SIGNAL = 5.6; EXPRESSED IN BONE MARROW, SIGNAL = 5.5
WIQQPAIFLIFLKSGTTKQYLFSPLLILVWK

SEQ ID NO: 41293 - protein, 34 aa, Homo sapiens
  MAP TO AC010802.4; EXPRESSED IN LUNG, SIGNAL =   2; EXPRESSED IN PLACENTA, SIGNAL =   2; EXPRESSED IN ADULT LIVER, SIGNAL = 2.3; EXPRESSED IN FETAL LIVER, SIGNAL = 2.1; EXPRESSED IN BRAIN, SIGNAL = 1.9; EXPRESSED IN HEART, SIGNAL = 1.7; EXPRESSED IN HELA, SIGNAL = 2.9; EXPRESSED IN BONE MARROW, SIGNAL = 2.2; EST_HUMAN HIT: AL044588.1, EVALUE 2.00e-04; SWISSPROT HIT: P47156, EVALUE 4.90e+00
YTCYHLFLSYCISQNFQHDVEKEWWEDISLHCSQ

SEQ ID NO: 41294 - protein, 50 aa, Homo sapiens
  MAP TO AL135937.22; EXPRESSED IN ADULT LIVER, SIGNAL = 1.5; EXPRESSED IN HELA, SIGNAL = 3.2; EXPRESSED IN BRAIN, SIGNAL = 1.9; EXPRESSED IN BONE MARROW, SIGNAL = 2.1; EXPRESSED IN LUNG, SIGNAL = 1.5; EXPRESSED IN PLACENTA, SIGNAL = 2.4; EXPRESSED IN FETAL LIVER, SIGNAL =   2; EXPRESSED IN HEART, SIGNAL = 2.2
KLSALREAAQEIGKLEEALLYPVLLLGDLGSPCVERGRRVGGHGGLVGKL

SEQ ID NO: 41295 - protein, 76 aa, Homo sapiens
  MAP TO AC013291.4; EXPRESSED IN PLACENTA, SIGNAL = 2.4; EXPRESSED IN FETAL LIVER, SIGNAL = 2.1; EXPRESSED IN BONE MARROW, SIGNAL = 2.2; EXPRESSED IN LUNG, SIGNAL = 2.6; EXPRESSED IN ADULT LIVER, SIGNAL = 2.2; EXPRESSED IN HEART, SIGNAL = 2.1; EXPRESSED IN BRAIN, SIGNAL = 2.2; EST_HUMAN HIT: BF111413.1, EVALUE 1.00e-30
MADPEVVVSSCSSHEEENRCNFNQQTSPSEELLLEDQMRRKLKFFFMNPCEKFWARGRKPWKLAIQILKIAMVTIQ

SEQ ID NO: 41296 - protein, 40 aa, Homo sapiens
  MAP TO AL139245.2; EXPRESSED IN HEART, SIGNAL = 1.3; EXPRESSED IN ADULT LIVER, SIGNAL = 1.6; EXPRESSED IN BRAIN, SIGNAL = 1.3; EXPRESSED IN BONE MARROW, SIGNAL = 1.6; EXPRESSED IN LUNG, SIGNAL = 1.3; EXPRESSED IN PLACENTA, SIGNAL = 2.3; EXPRESSED IN FETAL LIVER, SIGNAL = 1.6; EST_HUMAN HIT: W92842.1, EVALUE 4.80e-01
MQESKSLMTYPTGMTVKSQRLACIVSKNAEWYNPYGTFLQ

SEQ ID NO: 41297 - protein, 32 aa, Homo sapiens
  MAP TO AL137022.6; EXPRESSED IN BONE MARROW, SIGNAL = 4.3; EXPRESSED IN ADULT LIVER, SIGNAL = 3.1; EXPRESSED IN HELA, SIGNAL = 6.9; EXPRESSED IN HEART, SIGNAL = 4.4; EXPRESSED IN BRAIN, SIGNAL = 4.2; EXPRESSED IN LUNG, SIGNAL =   3; EXPRESSED IN PLACENTA, SIGNAL = 4.9; EXPRESSED IN FETAL LIVER, SIGNAL = 4.5; EST_HUMAN HIT: AA456954.1, EVALUE 3.50e-02
LTLNSCVRSKNPLLGSGSRPLSVTLALGRILT

SEQ ID NO: 41298 - protein, 24 aa, Homo sapiens
  MAP TO AC006054.2; EXPRESSED IN HELA, SIGNAL =  55; EXPRESSED IN LUNG, SIGNAL =  29; EXPRESSED IN PLACENTA, SIGNAL = 5.4; EXPRESSED IN HEART, SIGNAL =  24; EXPRESSED IN FETAL LIVER, SIGNAL =  62; EXPRESSED IN BONE MARROW, SIGNAL =  37; EXPRESSED IN ADULT LIVER, SIGNAL =  13; EXPRESSED IN BRAIN, SIGNAL =  44; EST_HUMAN HIT: AU150849.1, EVALUE 3.00e-08
HWNCTNWPLTKMTPICVTSLRHIT

SEQ ID NO: 41299 - protein, 24 aa, Homo sapiens
  MAP TO AC025738.1; EXPRESSED IN ADULT LIVER, SIGNAL = 2.8; EXPRESSED IN BONE MARROW, SIGNAL =   3; EXPRESSED IN PLACENTA, SIGNAL =   3; EXPRESSED IN HEART, SIGNAL = 2.7; EXPRESSED IN FETAL LIVER, SIGNAL = 2.4; EXPRESSED IN LUNG, SIGNAL = 3.2; EXPRESSED IN BRAIN, SIGNAL = 3.2
VSLLLGFSLMGQHQTYCSLVIRSF

SEQ ID NO: 41300 - protein, 34 aa, Homo sapiens
  MAP TO AL161441.2; EXPRESSED IN HELA, SIGNAL = 3.5; EXPRESSED IN LUNG, SIGNAL = 3.7; EXPRESSED IN PLACENTA, SIGNAL = 3.5; EXPRESSED IN ADULT LIVER, SIGNAL = 3.3; EXPRESSED IN FETAL LIVER, SIGNAL = 3.4; EXPRESSED IN BRAIN, SIGNAL = 3.2; EXPRESSED IN HEART, SIGNAL = 2.7; EXPRESSED IN BONE MARROW, SIGNAL = 2.8; EST_HUMAN HIT: AA372563.1, EVALUE 5.00e-07; SWISSPROT HIT: Q14028, EVALUE 6.50e+00
CLQAEEQGNQPQSQSRRTWSSMFENRKHLAWEKQ

SEQ ID NO: 41301 - protein, 29 aa, Homo sapiens
  MAP TO AL161441.2; EXPRESSED IN HELA, SIGNAL = 3.5; EXPRESSED IN LUNG, SIGNAL = 3.7; EXPRESSED IN PLACENTA, SIGNAL = 3.5; EXPRESSED IN ADULT LIVER, SIGNAL = 3.3; EXPRESSED IN FETAL LIVER, SIGNAL = 3.4; EXPRESSED IN BRAIN, SIGNAL = 3.2; EXPRESSED IN HEART, SIGNAL = 2.7; EXPRESSED IN BONE MARROW, SIGNAL = 2.8; EST_HUMAN HIT: AA807128.1, EVALUE 3.00e-06
AVCKLRSKETSPSPKAEELGVQCSRTGSI

SEQ ID NO: 41302 - protein, 54 aa, Homo sapiens
  MAP TO AC020919.3; EXPRESSED IN ADULT LIVER, SIGNAL = 0.99; EXPRESSED IN HEART, SIGNAL = 1.3; EXPRESSED IN BONE MARROW, SIGNAL = 1.1; EXPRESSED IN LUNG, SIGNAL = 1.1; EXPRESSED IN PLACENTA, SIGNAL = 1.1; EXPRESSED IN FETAL LIVER, SIGNAL =   1; EXPRESSED IN BRAIN, SIGNAL = 0.94; SWISSPROT HIT: Q91191, EVALUE 3.50e+00; EST_HUMAN HIT: AI792243.1, EVALUE 3.00e-09
VLLQEPQASPSGDIPKEGIIIIEDDSSMHVIALEELPVGQDVGWKTTILMILTM

SEQ ID NO: 41303 - protein, 21 aa, Homo sapiens
  MAP TO AC020919.3; EXPRESSED IN ADULT LIVER, SIGNAL = 0.99; EXPRESSED IN HEART, SIGNAL = 1.3; EXPRESSED IN BONE MARROW, SIGNAL = 1.1; EXPRESSED IN LUNG, SIGNAL = 1.1; EXPRESSED IN PLACENTA, SIGNAL = 1.1; EXPRESSED IN FETAL LIVER, SIGNAL =   1; EXPRESSED IN BRAIN, SIGNAL = 0.94; EST_HUMAN HIT: BE172688.1, EVALUE 5.60e-01
CSFRSLRQVLQEIFQKKALLS

SEQ ID NO: 41304 - protein, 100 aa, Homo sapiens
  MAP TO AL139117.3; EXPRESSED IN LUNG, SIGNAL = 4.4; EXPRESSED IN PLACENTA, SIGNAL = 2.8; EXPRESSED IN ADULT LIVER, SIGNAL = 2.3; EXPRESSED IN FETAL LIVER, SIGNAL = 2.6; EXPRESSED IN BRAIN, SIGNAL = 2.6; EXPRESSED IN BONE MARROW, SIGNAL = 5.5; EXPRESSED IN HEART, SIGNAL = 2.7; SWISSPROT HIT: P43629, EVALUE 6.00e-18; EST_HUMAN HIT: AW467285.1, EVALUE 4.00e-39
QFYDRVSLSVQPGPTVASGENVTLLCQSQGWMQTFLLTKEGAADDPWRLRSTYQSQKYQAEFPMGPVTSAHAGTYRCYGSQSSKPYLLTHPSDPLELVVS

SEQ ID NO: 41305 - protein, 22 aa, Homo sapiens
  MAP TO AL139117.3; EXPRESSED IN LUNG, SIGNAL = 4.4; EXPRESSED IN PLACENTA, SIGNAL = 2.8; EXPRESSED IN ADULT LIVER, SIGNAL = 2.3; EXPRESSED IN FETAL LIVER, SIGNAL = 2.6; EXPRESSED IN BRAIN, SIGNAL = 2.6; EXPRESSED IN BONE MARROW, SIGNAL = 5.5; EXPRESSED IN HEART, SIGNAL = 2.7; EST_HUMAN HIT: T39575.1, EVALUE 1.00e-03
DSSMTESPSRCSRAPRWPQERT

SEQ ID NO: 41306 - protein, 57 aa, Homo sapiens
  MAP TO AC022860.3; EXPRESSED IN LUNG, SIGNAL = 1.3; EXPRESSED IN ADULT LIVER, SIGNAL = 2.6; EXPRESSED IN HEART, SIGNAL = 1.2; EXPRESSED IN BRAIN, SIGNAL = 1.2; EXPRESSED IN PLACENTA, SIGNAL = 1.2; EXPRESSED IN FETAL LIVER, SIGNAL = 1.6; EXPRESSED IN BONE MARROW, SIGNAL = 1.1; EST_HUMAN HIT: BF507595.1, EVALUE 3.00e-10; SWISSPROT HIT: Q9RQJ9, EVALUE 7.00e-01
SLTPGDQAGDPPGAHGPWSPMSLHLLLAAPRRQHTGALLSSAQHPGAARGLSAVQGG

SEQ ID NO: 41307 - protein, 34 aa, Homo sapiens
  MAP TO AC022860.3; EXPRESSED IN LUNG, SIGNAL = 1.3; EXPRESSED IN ADULT LIVER, SIGNAL = 2.6; EXPRESSED IN HEART, SIGNAL = 1.2; EXPRESSED IN BRAIN, SIGNAL = 1.2; EXPRESSED IN PLACENTA, SIGNAL = 1.2; EXPRESSED IN FETAL LIVER, SIGNAL = 1.6; EXPRESSED IN BONE MARROW, SIGNAL = 1.1; EST_HUMAN HIT: BE297853.1, EVALUE 2.00e+00
RSSRRSTRCSWTMESHVITPASCCTQKTAHWSAS

SEQ ID NO: 41308 - protein, 32 aa, Homo sapiens
  MAP TO AC013691.3; EXPRESSED IN LUNG, SIGNAL = 1.3; EXPRESSED IN PLACENTA, SIGNAL = 1.3; EXPRESSED IN ADULT LIVER, SIGNAL = 1.2; EXPRESSED IN HEART, SIGNAL = 1.4; EXPRESSED IN FETAL LIVER, SIGNAL = 1.5; EXPRESSED IN BRAIN, SIGNAL = 1.3; EXPRESSED IN BONE MARROW, SIGNAL = 1.4
SLAGTHFCSNSCWPLSLCPASLSPPQPHCLWR

SEQ ID NO: 41309 - protein, 24 aa, Homo sapiens
  MAP TO AC010363.3; EXPRESSED IN HELA, SIGNAL = 6.9; EXPRESSED IN BRAIN, SIGNAL = 7.5; EXPRESSED IN LUNG, SIGNAL = 8.9; EXPRESSED IN PLACENTA, SIGNAL = 7.8; EXPRESSED IN ADULT LIVER, SIGNAL = 7.8; EXPRESSED IN FETAL LIVER, SIGNAL = 8.5; EXPRESSED IN HEART, SIGNAL =   7; EXPRESSED IN BONE MARROW, SIGNAL = 6.2; SWISSPROT HIT: P15309, EVALUE 6.60e+00
ESNCDWSHHCPSTGSHAGNEGSPL

SEQ ID NO: 41310 - protein, 24 aa, Homo sapiens
  MAP TO AC010363.3; EXPRESSED IN HELA, SIGNAL = 6.9; EXPRESSED IN BRAIN, SIGNAL = 7.5; EXPRESSED IN LUNG, SIGNAL = 8.9; EXPRESSED IN PLACENTA, SIGNAL = 7.8; EXPRESSED IN ADULT LIVER, SIGNAL = 7.8; EXPRESSED IN FETAL LIVER, SIGNAL = 8.5; EXPRESSED IN HEART, SIGNAL =   7; EXPRESSED IN BONE MARROW, SIGNAL = 6.2
QWTSFISCVAASTWAVMRPVTITL

SEQ ID NO: 41311 - protein, 39 aa, Homo sapiens
  MAP TO AC025747.3; EXPRESSED IN HELA, SIGNAL = 2.7; EXPRESSED IN PLACENTA, SIGNAL = 1.3; EXPRESSED IN ADULT LIVER, SIGNAL =   2; EXPRESSED IN FETAL LIVER, SIGNAL = 1.6; EXPRESSED IN BRAIN, SIGNAL = 1.7; EXPRESSED IN BONE MARROW, SIGNAL = 1.6; EXPRESSED IN LUNG, SIGNAL = 1.7; EXPRESSED IN HEART, SIGNAL = 1.6; EST_HUMAN HIT: BE888582.1, EVALUE 3.00e-16; SWISSPROT HIT: P38129, EVALUE 1.10e-01
EAEITNGNAVAQAPVTKGCYLATGSKDQTIRIWSCSRGR

SEQ ID NO: 41312 - protein, 28 aa, Homo sapiens
  MAP TO AL136306.2; EXPRESSED IN HEART, SIGNAL = 1.6; EXPRESSED IN BONE MARROW, SIGNAL = 2.5; EXPRESSED IN PLACENTA, SIGNAL = 1.1; EXPRESSED IN ADULT LIVER, SIGNAL = 1.1; EXPRESSED IN BRAIN, SIGNAL = 1.8; EXPRESSED IN LUNG, SIGNAL = 1.5; EXPRESSED IN FETAL LIVER, SIGNAL = 3.2; EST_HUMAN HIT: AA315245.1, EVALUE 7.00e-09
LIIPRQIVLRGVNGNAGFVKICLIPRNM

SEQ ID NO: 41313 - protein, 19 aa, Homo sapiens
  MAP TO AC009874.5; EXPRESSED IN ADULT LIVER, SIGNAL = 2.3; EXPRESSED IN HELA, SIGNAL = 2.8; EXPRESSED IN FETAL LIVER, SIGNAL = 2.1; EXPRESSED IN BRAIN, SIGNAL =   2; EXPRESSED IN PLACENTA, SIGNAL =   2; EXPRESSED IN HEART, SIGNAL = 2.3; EXPRESSED IN BONE MARROW, SIGNAL = 2.1; EXPRESSED IN LUNG, SIGNAL = 2.2
WAVLLRRWGGSRTWVDGPI

SEQ ID NO: 41314 - protein, 45 aa, Homo sapiens
  MAP TO AC019284.4; EXPRESSED IN HELA, SIGNAL = 4.5; EXPRESSED IN LUNG, SIGNAL = 3.7; EXPRESSED IN ADULT LIVER, SIGNAL = 3.6; EXPRESSED IN BRAIN, SIGNAL = 2.9; EXPRESSED IN PLACENTA, SIGNAL = 3.6; EXPRESSED IN HEART, SIGNAL = 3.3; EXPRESSED IN FETAL LIVER, SIGNAL = 3.5; EXPRESSED IN BONE MARROW, SIGNAL = 3.5
YSSMQTEELPLINLLPYFKSHRGKDEPFDMCNPFTGYQLKTQLQQ

SEQ ID NO: 41315 - protein, 34 aa, Homo sapiens
  MAP TO AC019276.3; EXPRESSED IN HELA, SIGNAL = 3.3; EXPRESSED IN PLACENTA, SIGNAL = 2.6; EXPRESSED IN LUNG, SIGNAL = 2.9; EXPRESSED IN HEART, SIGNAL = 2.5; EXPRESSED IN FETAL LIVER, SIGNAL = 2.6; EXPRESSED IN BONE MARROW, SIGNAL = 2.8; EXPRESSED IN ADULT LIVER, SIGNAL = 3.1; EXPRESSED IN BRAIN, SIGNAL = 2.4
CTRGCTYKMCSSGLRTRAKLEAASSPSIGNGQEY

SEQ ID NO: 41316 - protein, 57 aa, Homo sapiens
  MAP TO AC021237.3; EXPRESSED IN HEART, SIGNAL = 9.1; EXPRESSED IN PLACENTA, SIGNAL = 8.9; EXPRESSED IN ADULT LIVER, SIGNAL = 9.8; EXPRESSED IN HELA, SIGNAL =  13; EXPRESSED IN BRAIN, SIGNAL = 8.1; EXPRESSED IN BONE MARROW, SIGNAL = 9.1; EXPRESSED IN LUNG, SIGNAL = 9.8; EXPRESSED IN FETAL LIVER, SIGNAL = 8.2; SWISSPROT HIT: O60152, EVALUE 5.30e-01; EST_HUMAN HIT: BE546467.1, EVALUE 1.60e+00
LWTNKQTSTTGVISSLGQNSKTLSSLIASEIPKSLYQPDHLNSYYTDLLNIKIWIND

SEQ ID NO: 41317 - protein, 26 aa, Homo sapiens
  MAP TO AC021237.3; EXPRESSED IN HEART, SIGNAL = 9.1; EXPRESSED IN PLACENTA, SIGNAL = 8.9; EXPRESSED IN ADULT LIVER, SIGNAL = 9.8; EXPRESSED IN HELA, SIGNAL =  13; EXPRESSED IN BRAIN, SIGNAL = 8.1; EXPRESSED IN BONE MARROW, SIGNAL = 9.1; EXPRESSED IN LUNG, SIGNAL = 9.8; EXPRESSED IN FETAL LIVER, SIGNAL = 8.2
LYGQTNKQAPLELFLHLARIVKLCPL

SEQ ID NO: 41318 - protein, 42 aa, Homo sapiens
  MAP TO AC024193.2; EXPRESSED IN HELA, SIGNAL = 4.2; EXPRESSED IN PLACENTA, SIGNAL = 2.3; EXPRESSED IN FETAL LIVER, SIGNAL = 2.5; EXPRESSED IN BONE MARROW, SIGNAL = 2.5; EXPRESSED IN LUNG, SIGNAL = 2.8; EXPRESSED IN ADULT LIVER, SIGNAL = 3.5; EXPRESSED IN BRAIN, SIGNAL = 2.8; EXPRESSED IN HEART, SIGNAL = 2.4; EST_HUMAN HIT: AI267343.1, EVALUE 1.10e+00
RLFLCLGILVGTSLCLGVILSSKINKMHKNVKNHGTKWTMEG

SEQ ID NO: 41319 - protein, 41 aa, Homo sapiens
  MAP TO AC018390.3; EXPRESSED IN HELA, SIGNAL = 7.1; EXPRESSED IN LUNG, SIGNAL = 5.3; EXPRESSED IN BONE MARROW, SIGNAL = 5.5; EXPRESSED IN BRAIN, SIGNAL = 4.6; EXPRESSED IN FETAL LIVER, SIGNAL = 4.8; EXPRESSED IN ADULT LIVER, SIGNAL =   6; EXPRESSED IN PLACENTA, SIGNAL = 4.1; EXPRESSED IN HEART, SIGNAL = 4.4; SWISSPROT HIT: O75311, EVALUE 8.30e+00
KKLWLTFWNSLRVFQQLNIIISLRYLLPLSLMSIKTIPMLP

SEQ ID NO: 41320 - protein, 24 aa, Homo sapiens
  MAP TO AL136146.5; EXPRESSED IN BONE MARROW, SIGNAL = 1.3; EXPRESSED IN LUNG, SIGNAL = 1.2; EXPRESSED IN PLACENTA, SIGNAL = 1.2; EXPRESSED IN ADULT LIVER, SIGNAL = 1.3; EXPRESSED IN HEART, SIGNAL = 1.3; EXPRESSED IN FETAL LIVER, SIGNAL = 1.2; EXPRESSED IN BRAIN, SIGNAL = 1.2
ITMRVTSQTFLRSSQKTFTVCSST

SEQ ID NO: 41321 - protein, 66 aa, Homo sapiens
  MAP TO AL139423.2; EXPRESSED IN LUNG, SIGNAL = 4.3; EXPRESSED IN PLACENTA, SIGNAL = 4.2; EXPRESSED IN ADULT LIVER, SIGNAL = 4.3; EXPRESSED IN HEART, SIGNAL = 4.4; EXPRESSED IN BRAIN, SIGNAL = 4.6; EXPRESSED IN FETAL LIVER, SIGNAL = 5.9; EXPRESSED IN HELA, SIGNAL = 5.3; EXPRESSED IN BONE MARROW, SIGNAL = 4.6; SWISSPROT HIT: P27393, EVALUE 5.20e-01; EST_HUMAN HIT: AW386971.1, EVALUE 2.50e+00
PQPQLWKLHFRFSILQPRVSPQGPAQPGLQLIKDLQQDVGITVKPGSGSAGAAGQVPALGLPSPTL

SEQ ID NO: 41322 - protein, 79 aa, Homo sapiens
  MAP TO AL139250.2; EXPRESSED IN BONE MARROW, SIGNAL = 1.8; EXPRESSED IN PLACENTA, SIGNAL = 1.5; EXPRESSED IN HELA, SIGNAL = 2.7; EXPRESSED IN HEART, SIGNAL = 2.2; EXPRESSED IN FETAL LIVER, SIGNAL = 2.2; EXPRESSED IN LUNG, SIGNAL = 1.6; EXPRESSED IN ADULT LIVER, SIGNAL = 2.1; EXPRESSED IN BRAIN, SIGNAL = 1.9; EST_HUMAN HIT: AA376809.1, EVALUE 1.70e+00; SWISSPROT HIT: P16818, EVALUE 3.90e+00
MTTKPKEQADTEQFPFLLLRGMAEEEAVLRQGRKRGGPSSRLWGVPTRGPEQVRLSDGTTQSSPALAPPSALSCPAHHS

SEQ ID NO: 41323 - protein, 52 aa, Homo sapiens
  MAP TO AL121586.28; EXPRESSED IN ADULT LIVER, SIGNAL = 2.9; EXPRESSED IN LUNG, SIGNAL = 2.7; EXPRESSED IN BONE MARROW, SIGNAL = 2.7; EXPRESSED IN BRAIN, SIGNAL = 2.4; EXPRESSED IN FETAL LIVER, SIGNAL = 2.7; EXPRESSED IN HEART, SIGNAL = 2.4; EXPRESSED IN HELA, SIGNAL = 3.3; EXPRESSED IN PLACENTA, SIGNAL = 2.7; EST_HUMAN HIT: AU143768.1, EVALUE 7.00e-12
MKPQSLQLVLEEQVLALQQQMAENQAASWRKLKNSQEAQQRQATLVRKLQAK

SEQ ID NO: 41324 - protein, 56 aa, Homo sapiens
  MAP TO AC016326.4; EXPRESSED IN PLACENTA, SIGNAL = 1.5; EXPRESSED IN BONE MARROW, SIGNAL = 1.3; EXPRESSED IN HEART, SIGNAL = 1.6; EXPRESSED IN FETAL LIVER, SIGNAL = 0.92; EXPRESSED IN LUNG, SIGNAL = 1.7; EXPRESSED IN ADULT LIVER, SIGNAL = 0.88; EXPRESSED IN BRAIN, SIGNAL = 1.4; EST_HUMAN HIT: AU118985.1, EVALUE 4.00e-26; SWISSPROT HIT: P15442, EVALUE 3.50e+00
VQLSLYTYLSAEFIGTATIYTTIRRVGTVLQLMHTLKYYYWVINPADSSGITPKGL

SEQ ID NO: 41325 - protein, 25 aa, Homo sapiens
  MAP TO AC016326.4; EXPRESSED IN PLACENTA, SIGNAL = 1.5; EXPRESSED IN BONE MARROW, SIGNAL = 1.3; EXPRESSED IN HEART, SIGNAL = 1.6; EXPRESSED IN FETAL LIVER, SIGNAL = 0.92; EXPRESSED IN LUNG, SIGNAL = 1.7; EXPRESSED IN ADULT LIVER, SIGNAL = 0.88; EXPRESSED IN BRAIN, SIGNAL = 1.4; EST_HUMAN HIT: AU118985.1, EVALUE 4.00e-03
FSFPYTHICLLNLLELLPSTPPYAE

SEQ ID NO: 41326 - protein, 43 aa, Homo sapiens
  MAP TO AC022658.3; EXPRESSED IN LUNG, SIGNAL = 2.2; EXPRESSED IN HEART, SIGNAL =   2; EXPRESSED IN FETAL LIVER, SIGNAL = 1.7; EXPRESSED IN ADULT LIVER, SIGNAL = 2.1; EXPRESSED IN BRAIN, SIGNAL = 2.2; EXPRESSED IN PLACENTA, SIGNAL = 1.9; EXPRESSED IN BONE MARROW, SIGNAL = 2.1
MSNEETGAKPGNEHVLVNDQEKIGVKICNCYGARKLPALFERT

SEQ ID NO: 41327 - protein, 52 aa, Homo sapiens
  MAP TO AC015662.4; EXPRESSED IN HEART, SIGNAL = 4.8; EXPRESSED IN BRAIN, SIGNAL = 5.1; EXPRESSED IN BONE MARROW, SIGNAL = 4.6; EXPRESSED IN PLACENTA, SIGNAL = 5.1; EXPRESSED IN ADULT LIVER, SIGNAL = 6.8; EXPRESSED IN HELA, SIGNAL = 6.1; EXPRESSED IN FETAL LIVER, SIGNAL = 4.1; EXPRESSED IN LUNG, SIGNAL = 5.7; EST_HUMAN HIT: BE564367.1, EVALUE 2.00e-15
MDQDGEIEDSTNHPLHTNTNLTTIYMHTHKSFINLTTIYMHTHKTFVRTQNQ

SEQ ID NO: 41328 - protein, 49 aa, Homo sapiens
  MAP TO AC009334.3; EXPRESSED IN BONE MARROW, SIGNAL = 3.6; EXPRESSED IN BRAIN, SIGNAL =   3; EXPRESSED IN FETAL LIVER, SIGNAL =   9; EXPRESSED IN HEART, SIGNAL = 1.7; EXPRESSED IN HELA, SIGNAL = 6.8; EXPRESSED IN ADULT LIVER, SIGNAL = 2.5; EXPRESSED IN PLACENTA, SIGNAL = 0.87; EXPRESSED IN LUNG, SIGNAL = 3.7; EST_HUMAN HIT: AA581866.1, EVALUE 2.00e-13
RRCWSRCRRVWISLPRAPTPAGRAFSIPFVSKSNILSSIRSRISLFTVF

SEQ ID NO: 41329 - protein, 72 aa, Homo sapiens
  MAP TO AC013317.4; EXPRESSED IN LUNG, SIGNAL = 0.99; EXPRESSED IN PLACENTA, SIGNAL = 1.2; EXPRESSED IN HEART, SIGNAL = 1.5; EXPRESSED IN FETAL LIVER, SIGNAL = 1.4; EXPRESSED IN BONE MARROW, SIGNAL = 1.2; EXPRESSED IN ADULT LIVER, SIGNAL = 0.97; EXPRESSED IN BRAIN, SIGNAL = 1.2; EST_HUMAN HIT: BF671315.1, EVALUE 7.10e-02; SWISSPROT HIT: P49657, EVALUE 3.40e+00
EIKIKTMMSYHFTPIRMAIIIIVITIRIDGDVGKWNSYTLLVEMQTGLATVENCQFLKKLNKIIMTQQVRSQ

SEQ ID NO: 41330 - protein, 46 aa, Homo sapiens
  MAP TO AC015592.4; EXPRESSED IN ADULT LIVER, SIGNAL = 1.6; EXPRESSED IN HEART, SIGNAL = 1.3; EXPRESSED IN BRAIN, SIGNAL = 1.6; EXPRESSED IN BONE MARROW, SIGNAL = 1.6; EXPRESSED IN PLACENTA, SIGNAL = 1.2; EXPRESSED IN HELA, SIGNAL = 3.4; EXPRESSED IN FETAL LIVER, SIGNAL = 2.6; EXPRESSED IN LUNG, SIGNAL = 1.8; EST_HUMAN HIT: AW166303.1, EVALUE 1.00e-08; SWISSPROT HIT: P97245, EVALUE 2.10e+00
GKSWIVKRSYEDFRVLDKHLHLCIYDRRFSQLSELPRSDTLKDSPE

SEQ ID NO: 41331 - protein, 40 aa, Homo sapiens
  MAP TO AC015592.4; EXPRESSED IN ADULT LIVER, SIGNAL = 1.6; EXPRESSED IN HEART, SIGNAL = 1.3; EXPRESSED IN BRAIN, SIGNAL = 1.6; EXPRESSED IN BONE MARROW, SIGNAL = 1.6; EXPRESSED IN PLACENTA, SIGNAL = 1.2; EXPRESSED IN HELA, SIGNAL = 3.4; EXPRESSED IN FETAL LIVER, SIGNAL = 2.6; EXPRESSED IN LUNG, SIGNAL = 1.8
EKVGLLKEVMKIFGYLINIFICVFMTEDFPSSQNFPVLTP

SEQ ID NO: 41332 - protein, 122 aa, Homo sapiens [sequence omitted]

SEQ ID NO: 41333 - protein, 58 aa, Homo sapiens
  MAP TO AC027343.1; EXPRESSED IN LUNG, SIGNAL = 7.1; EXPRESSED IN BONE MARROW, SIGNAL = 9.5; EXPRESSED IN BRAIN, SIGNAL =  10; EXPRESSED IN FETAL LIVER, SIGNAL = 8.7; EXPRESSED IN HEART, SIGNAL = 6.8; EXPRESSED IN HELA, SIGNAL =  11; EXPRESSED IN ADULT LIVER, SIGNAL = 9.8; EXPRESSED IN PLACENTA, SIGNAL = 6.1; EST_HUMAN HIT: BE548542.1, EVALUE 6.00e-03; SWISSPROT HIT: Q26768, EVALUE 8.00e-02
CREEQRTERKKDRPTTRRIEAGTQSRPQGRQERTRAKQTERTREGSTTPQPPRSEDGG

SEQ ID NO: 41334 - protein, 38 aa, Homo sapiens
  MAP TO AC027304.1; EXPRESSED IN LUNG, SIGNAL = 2.5; EXPRESSED IN HEART, SIGNAL = 1.9; EXPRESSED IN BONE MARROW, SIGNAL = 2.2; EXPRESSED IN BRAIN, SIGNAL = 2.3; EXPRESSED IN FETAL LIVER, SIGNAL = 2.7; EXPRESSED IN HELA, SIGNAL = 4.1; EXPRESSED IN ADULT LIVER, SIGNAL = 2.5; EXPRESSED IN PLACENTA, SIGNAL = 1.8; EST_HUMAN HIT: AI384100.1, EVALUE 1.00e-15; SWISSPROT HIT: O35464, EVALUE 9.00e-16
TKQYPVFVGHKPGRNTTQRHRLDIQMIMIMNGTLYIAA

SEQ ID NO: 41335 - protein, 26 aa, Homo sapiens
  MAP TO AC027304.1; EXPRESSED IN LUNG, SIGNAL = 2.5; EXPRESSED IN HEART, SIGNAL = 1.9; EXPRESSED IN BONE MARROW, SIGNAL = 2.2; EXPRESSED IN BRAIN, SIGNAL = 2.3; EXPRESSED IN FETAL LIVER, SIGNAL = 2.7; EXPRESSED IN HELA, SIGNAL = 4.1; EXPRESSED IN ADULT LIVER, SIGNAL = 2.5; EXPRESSED IN PLACENTA, SIGNAL = 1.8; EST_HUMAN HIT: AI384100.1, EVALUE 1.00e-09
IQNSIRCLWATSQDGTPHRGTGWTSR

SEQ ID NO: 41336 - protein, 38 aa, Homo sapiens
  MAP TO AC013657.3; EXPRESSED IN PLACENTA, SIGNAL = 2.8; EXPRESSED IN HEART, SIGNAL =   3; EXPRESSED IN FETAL LIVER, SIGNAL = 2.9; EXPRESSED IN BONE MARROW, SIGNAL = 2.8; EXPRESSED IN LUNG, SIGNAL = 3.3; EXPRESSED IN ADULT LIVER, SIGNAL = 3.3; EXPRESSED IN HELA, SIGNAL =   4; EXPRESSED IN BRAIN, SIGNAL = 2.7
SPTSISGITTQLGPGPLAASATPSHSASPTHQQILSAL

SEQ ID NO: 41337 - protein, 42 aa, Homo sapiens
  MAP TO AC012571.3; EXPRESSED IN LUNG, SIGNAL =   3; EXPRESSED IN ADULT LIVER, SIGNAL = 2.6; EXPRESSED IN HELA, SIGNAL = 3.3; EXPRESSED IN HEART, SIGNAL =   3; EXPRESSED IN BRAIN, SIGNAL = 3.4; EXPRESSED IN PLACENTA, SIGNAL = 2.8; EXPRESSED IN FETAL LIVER, SIGNAL = 3.3; EXPRESSED IN BONE MARROW, SIGNAL = 3.4; SWISSPROT HIT: Q27535, EVALUE 3.70e+00
QKKEYYHGSFKILDPQINNNFGQSNTYQLKDLRETTENLVSQ

SEQ ID NO: 41338 - protein, 82 aa, Homo sapiens
  MAP TO AC009334.3; EXPRESSED IN HEART, SIGNAL = 1.9; EXPRESSED IN BONE MARROW, SIGNAL = 0.63; EXPRESSED IN PLACENTA, SIGNAL = 0.59; EXPRESSED IN FETAL LIVER, SIGNAL = 0.5; SWISSPROT HIT: Q99698, EVALUE 9.00e-43; EST_HUMAN HIT: AI524891.1, EVALUE 4.40e+00
ESLSVVYTTYCPAQYTIYEPVIRLKGQMKTQLSQRPFSSKEVQSILLEPHHLKNLQPTEYKTIQGILHEIGGTGIFVFLFAR

SEQ ID NO: 41339 - protein, 32 aa, Homo sapiens
  MAP TO AC025539.2; EXPRESSED IN ADULT LIVER, SIGNAL = 2.6; EXPRESSED IN FETAL LIVER, SIGNAL = 1.9; EXPRESSED IN BRAIN, SIGNAL = 2.8; EXPRESSED IN BONE MARROW, SIGNAL = 2.3; EXPRESSED IN LUNG, SIGNAL = 2.7; EXPRESSED IN PLACENTA, SIGNAL = 2.5; EXPRESSED IN HEART, SIGNAL = 2.3
SRVMTSAALGHCGTLATWRGGSARRQRWTGRQ

SEQ ID NO: 41340 - protein, 46 aa, Homo sapiens
  MAP TO AC006319.3; EXPRESSED IN ADULT LIVER, SIGNAL = 3.2; EXPRESSED IN FETAL LIVER, SIGNAL = 3.2; EXPRESSED IN BRAIN, SIGNAL = 3.3; EXPRESSED IN BONE MARROW, SIGNAL = 3.4; EXPRESSED IN LUNG, SIGNAL =   4; EXPRESSED IN PLACENTA, SIGNAL = 4.3; EXPRESSED IN HELA, SIGNAL = 2.7; EXPRESSED IN HEART, SIGNAL =   3; SWISSPROT HIT: O14400, EVALUE 8.20e+00
IGEGDLFESLMQNKVVVVIPWQSKKISKTWDVNLQQELYGREQCGV

SEQ ID NO: 41341 - protein, 103 aa, Homo sapiens
  MAP TO AL121901.10; EXPRESSED IN PLACENTA, SIGNAL = 1.4; EXPRESSED IN ADULT LIVER, SIGNAL = 1.4; EXPRESSED IN BRAIN, SIGNAL = 1.3; EXPRESSED IN BONE MARROW, SIGNAL = 1.2; EXPRESSED IN LUNG, SIGNAL = 1.3; EXPRESSED IN HEART, SIGNAL = 1.5; EXPRESSED IN FETAL LIVER, SIGNAL = 1.3; SWISSPROT HIT: P51989, EVALUE 2.00e-03; EST_HUMAN HIT: W26876.1, EVALUE 6.30e-02
SMNSQTGNRFPSGYGQTEAGQSGGYDQFGTGSFGRYGQSEAGSINVQSGSRPSNGMGQLGAESMNSQPGAKPSGSHGQFGTGSLGAYSQSGSGSSGSLGRSGA

SEQ ID NO: 41342 - protein, 30 aa, Homo sapiens [sequence omitted]

SEQ ID NO: 41343 - protein, 46 aa, Homo sapiens
  MAP TO AL133417.9; EXPRESSED IN PLACENTA, SIGNAL =  21; EXPRESSED IN HELA, SIGNAL =  23; EXPRESSED IN LUNG, SIGNAL =  22; EXPRESSED IN ADULT LIVER, SIGNAL =  20; EXPRESSED IN BRAIN, SIGNAL =  18; EXPRESSED IN BONE MARROW, SIGNAL =  21; EXPRESSED IN HEART, SIGNAL =  20; EXPRESSED IN FETAL LIVER, SIGNAL =  19; EST_HUMAN HIT: BE965963.2, EVALUE 5.20e+00
DDTVIQSHGLNAKYRFVIPNFVFLARTSPHPFRLPTPPAAYMTFLP

SEQ ID NO: 41344 - protein, 69 aa, Homo sapiens
  MAP TO AL121895.18; EXPRESSED IN LUNG, SIGNAL = 2.1; EXPRESSED IN HEART, SIGNAL = 1.9; EXPRESSED IN BONE MARROW, SIGNAL = 1.7; EXPRESSED IN FETAL LIVER, SIGNAL = 2.1; EXPRESSED IN PLACENTA, SIGNAL = 2.1; EXPRESSED IN ADULT LIVER, SIGNAL = 2.1; EXPRESSED IN BRAIN, SIGNAL = 2.2; SWISSPROT HIT: P48193, EVALUE 2.00e-24; EST_HUMAN HIT: BF347885.1, EVALUE 7.00e-34
CLQLRADIITGRLPCSFVTHALLGSYAVQAELGDYDAEEHVGNYVSELRFAPNQTRELEERIMELHKTY

SEQ ID NO: 41345 - protein, 66 aa, Homo sapiens
  MAP TO AL121895.18; EXPRESSED IN LUNG, SIGNAL = 2.1; EXPRESSED IN HEART, SIGNAL = 1.9; EXPRESSED IN BONE MARROW, SIGNAL = 1.7; EXPRESSED IN FETAL LIVER, SIGNAL = 2.1; EXPRESSED IN PLACENTA, SIGNAL = 2.1; EXPRESSED IN ADULT LIVER, SIGNAL = 2.1; EXPRESSED IN BRAIN, SIGNAL = 2.2; EST_HUMAN HIT: BF347885.1, EVALUE 2.00e-27; SWISSPROT HIT: P40682, EVALUE 1.80e+00
CGQTSSRAGCHAPLSRMPYWAPTLCRLSWVTMMLRSMWATMSASSASPLTRPGSWRRGSWSCIRHI

SEQ ID NO: 41346 - protein, 29 aa, Homo sapiens
  MAP TO AL162171.1; EXPRESSED IN PLACENTA, SIGNAL = 2.3; EXPRESSED IN HELA, SIGNAL = 2.4; EXPRESSED IN LUNG, SIGNAL = 2.5; EXPRESSED IN ADULT LIVER, SIGNAL = 2.4; EXPRESSED IN BRAIN, SIGNAL = 2.5; EXPRESSED IN BONE MARROW, SIGNAL = 2.3; EXPRESSED IN HEART, SIGNAL = 2.6; EXPRESSED IN FETAL LIVER, SIGNAL = 2.7
TLLGTIITIPLLMKVWRLTEVKCLALPHN

SEQ ID NO: 41347 - protein, 48 aa, Homo sapiens
  MAP TO AL121772.12; EXPRESSED IN LUNG, SIGNAL = 1.6; EXPRESSED IN PLACENTA, SIGNAL = 0.9; EXPRESSED IN FETAL LIVER, SIGNAL = 2.7; EXPRESSED IN BRAIN, SIGNAL = 1.6; EXPRESSED IN BONE MARROW, SIGNAL = 1.6; EXPRESSED IN ADULT LIVER, SIGNAL = 1.5; EXPRESSED IN HELA, SIGNAL = 2.3; EXPRESSED IN HEART, SIGNAL = 1.5
RRCTVPTLRLRIQSLTTQRTVQSASCLTHSKHSINTTTVIHLQLRKKE

SEQ ID NO: 41348 - protein, 44 aa, Homo sapiens
  MAP TO AC006038.2; EXPRESSED IN PLACENTA, SIGNAL = 6.2; EXPRESSED IN ADULT LIVER, SIGNAL = 7.8; EXPRESSED IN FETAL LIVER, SIGNAL = 7.1; EXPRESSED IN BRAIN, SIGNAL = 7.9; EXPRESSED IN LUNG, SIGNAL = 7.1; EXPRESSED IN HELA, SIGNAL = 6.3; EXPRESSED IN HEART, SIGNAL = 6.5; EXPRESSED IN BONE MARROW, SIGNAL = 9.5; SWISSPROT HIT: O14548, EVALUE 2.00e-19; EST_HUMAN HIT: AW206727.1, EVALUE 2.00e-18
DGVPVYLKRGLPDQMLYRTTMALTVGGTIYCLIALYMASQPKNK

SEQ ID NO: 41349 - protein, 35 aa, Homo sapiens
  MAP TO AL161450.2; EXPRESSED IN ADULT LIVER, SIGNAL = 1.2; EXPRESSED IN PLACENTA, SIGNAL = 1.1; EXPRESSED IN FETAL LIVER, SIGNAL = 1.4; EXPRESSED IN BRAIN, SIGNAL = 0.79; EXPRESSED IN LUNG, SIGNAL = 1.3; EXPRESSED IN HEART, SIGNAL = 1.3; EXPRESSED IN BONE MARROW, SIGNAL = 1.6; SWISSPROT HIT: O60674, EVALUE 2.00e-15; EST_HUMAN HIT: AV729875.1, EVALUE 3.00e-14
IYMIMTECWNNNVNQRPSFRDLALRVDQIRDNMAG

SEQ ID NO: 41350 - protein, 37 aa, Homo sapiens
  MAP TO AC012429.4; EXPRESSED IN HEART, SIGNAL = 1.2; EXPRESSED IN LUNG, SIGNAL = 1.3; EXPRESSED IN ADULT LIVER, SIGNAL = 1.6; EXPRESSED IN BRAIN, SIGNAL = 1.1; EXPRESSED IN BONE MARROW, SIGNAL = 1.7; EXPRESSED IN PLACENTA, SIGNAL =   2; EXPRESSED IN FETAL LIVER, SIGNAL = 1.7; SWISSPROT HIT: P40645, EVALUE 4.00e-14; EST_HUMAN HIT: BE892494.1, EVALUE 1.00e-07
MTSVTFGTPERRKGSLADVVDTLKQKKLEEMTRTEQE

SEQ ID NO: 41351 - protein, 36 aa, Homo sapiens
  MAP TO AC012429.4; EXPRESSED IN HEART, SIGNAL = 1.2; EXPRESSED IN LUNG, SIGNAL = 1.3; EXPRESSED IN ADULT LIVER, SIGNAL = 1.6; EXPRESSED IN BRAIN, SIGNAL = 1.1; EXPRESSED IN BONE MARROW, SIGNAL = 1.7; EXPRESSED IN PLACENTA, SIGNAL =   2; EXPRESSED IN FETAL LIVER, SIGNAL = 1.7
SCSVRVISSSFFCFSVSTTSARLPLRRSGVPKVTLV

SEQ ID NO: 41352 - protein, 49 aa, Homo sapiens
  MAP TO AL158049.2; EXPRESSED IN LUNG, SIGNAL = 1.5; EXPRESSED IN BRAIN, SIGNAL = 1.1; EXPRESSED IN BONE MARROW, SIGNAL =   1; EXPRESSED IN HEART, SIGNAL = 1.3; EXPRESSED IN PLACENTA, SIGNAL = 1.3; EXPRESSED IN ADULT LIVER, SIGNAL = 1.2; EXPRESSED IN FETAL LIVER, SIGNAL = 1.3; EST_HUMAN HIT: R15413.1, EVALUE 2.00e-22; SWISSPROT HIT: Q03712, EVALUE 4.80e-02
RRMKRVWDRAVEFLASNESRIQTESHRVAGEDMLVWRWTKPSSFSDSER

SEQ ID NO: 41353 - protein, 38 aa, Homo sapiens
  MAP TO AC026213.2; EXPRESSED IN HELA, SIGNAL = 5.2; EXPRESSED IN BONE MARROW, SIGNAL =   3; EXPRESSED IN BRAIN, SIGNAL = 2.6; EXPRESSED IN FETAL LIVER, SIGNAL = 2.9; EXPRESSED IN HEART, SIGNAL = 3.1; EXPRESSED IN ADULT LIVER, SIGNAL = 3.8; EXPRESSED IN PLACENTA, SIGNAL = 3.5; EXPRESSED IN LUNG, SIGNAL = 3.8; SWISSPROT HIT: Q9T1W1, EVALUE 6.40e+00
QNHIDVIMKDGLEMEQGWKQGNLLESFCGNSGKKTKIL

SEQ ID NO: 41354 - protein, 88 aa, Homo sapiens
  MAP TO AL133284.7; EXPRESSED IN ADULT LIVER, SIGNAL = 6.1; EXPRESSED IN FETAL LIVER, SIGNAL = 6.8; EXPRESSED IN BRAIN, SIGNAL =   7; EXPRESSED IN PLACENTA, SIGNAL =   6; EXPRESSED IN BONE MARROW, SIGNAL = 7.1; EXPRESSED IN LUNG, SIGNAL = 6.9; EXPRESSED IN HELA, SIGNAL = 3.3; EXPRESSED IN HEART, SIGNAL =   6; EST_HUMAN HIT: AU143673.1, EVALUE 1.00e-45; SWISSPROT HIT: Q61137, EVALUE 2.00e-09
TTELGSKKELKSMPFITYLSGLLTAQMLSDDQLISGVEIRCEEKGRCPSTCHLCRRPGKEQLSPTPVLLEINRVVPLYTLIQDNGTKE

SEQ ID NO: 41355 - protein, 23 aa, Homo sapiens
  MAP TO AL133284.7; EXPRESSED IN ADULT LIVER, SIGNAL = 6.1; EXPRESSED IN FETAL LIVER, SIGNAL = 6.8; EXPRESSED IN BRAIN, SIGNAL =   7; EXPRESSED IN PLACENTA, SIGNAL =   6; EXPRESSED IN BONE MARROW, SIGNAL = 7.1; EXPRESSED IN LUNG, SIGNAL = 6.9; EXPRESSED IN HELA, SIGNAL = 3.3; EXPRESSED IN HEART, SIGNAL =   6
RPQSWAARRSSSPCPSSPTSQVC

SEQ ID NO: 41356 - protein, 69 aa, Homo sapiens
  MAP TO AC007595.3; EXPRESSED IN LUNG, SIGNAL = 2.2; EXPRESSED IN PLACENTA, SIGNAL = 2.1; EXPRESSED IN ADULT LIVER, SIGNAL = 2.1; EXPRESSED IN BRAIN, SIGNAL = 1.8; EXPRESSED IN FETAL LIVER, SIGNAL = 2.4; EXPRESSED IN HEART, SIGNAL = 1.7; EXPRESSED IN BONE MARROW, SIGNAL = 2.7; EST_HUMAN HIT: AI804160.1, EVALUE 1.90e-02; SWISSPROT HIT: O02697, EVALUE 3.70e-01
WGVISSSSPLDIMKYVTRGCIHSAIHSSTLDITDNIAGDCTPTAIWRVTSSSSFLNITDNIARGVQPLW

SEQ ID NO: 41357 - protein, 76 aa, Homo sapiens
  MAP TO AC008065.3; EXPRESSED IN ADULT LIVER, SIGNAL = 1.7; EXPRESSED IN HEART, SIGNAL = 1.7; EXPRESSED IN FETAL LIVER, SIGNAL = 2.4; EXPRESSED IN BRAIN, SIGNAL = 1.5; EXPRESSED IN BONE MARROW, SIGNAL =   2; EXPRESSED IN LUNG, SIGNAL = 1.3; EXPRESSED IN PLACENTA, SIGNAL = 0.94; SWISSPROT HIT: P14351, EVALUE 7.30e+00; EST_HUMAN HIT: BE769492.1, EVALUE 1.30e-01
NTDSLMWNIGRQKEQRHIRVKVVVGGAFHFICLHQRACIYWRRKTNKKQEHLHLLLKVSFLITVKSHLNGTITVLL

SEQ ID NO: 41358 - protein, 87 aa, Homo sapiens
  MAP TO AL133414.3; EXPRESSED IN LUNG, SIGNAL = 6.6; EXPRESSED IN ADULT LIVER, SIGNAL = 4.2; EXPRESSED IN HEART, SIGNAL = 7.5; EXPRESSED IN BRAIN, SIGNAL =   3; EXPRESSED IN BONE MARROW, SIGNAL =  13; EXPRESSED IN PLACENTA, SIGNAL = 3.3; EXPRESSED IN HELA, SIGNAL = 3.6; EXPRESSED IN FETAL LIVER, SIGNAL = 3.4; SWISSPROT HIT: P43630, EVALUE 1.00e-35; EST_HUMAN HIT: AW951147.1, EVALUE 1.00e-34
PLVKSGETVILQCWSDVRFERFLLHREGITEDPLRLIGQLHDAGSQVNYSMGPMTPALAGTYRCFGSVTHLPYELSAPSDPLDIVVV

SEQ ID NO: 41359 - protein, 32 aa, Homo sapiens
  MAP TO AL135936.10; EXPRESSED IN FETAL LIVER, SIGNAL = 4.3; EXPRESSED IN PLACENTA, SIGNAL = 4.4; EXPRESSED IN ADULT LIVER, SIGNAL = 4.8; EXPRESSED IN HEART, SIGNAL = 4.6; EXPRESSED IN BONE MARROW, SIGNAL = 5.3; EXPRESSED IN BRAIN, SIGNAL = 4.9; EXPRESSED IN LUNG, SIGNAL = 4.6; EXPRESSED IN HELA, SIGNAL = 3.3
FFLLAVLESSAVSSLGISPSTKKLSNDVCILL

SEQ ID NO: 41360 - protein, 128 aa, Homo sapiens
  MAP TO AL121914.16; EXPRESSED IN FETAL LIVER, SIGNAL = 2.5; EXPRESSED IN PLACENTA, SIGNAL = 2.8; EXPRESSED IN ADULT LIVER, SIGNAL = 2.4; EXPRESSED IN BRAIN, SIGNAL = 2.7; EXPRESSED IN BONE MARROW, SIGNAL = 2.8; EXPRESSED IN HEART, SIGNAL = 2.5; EXPRESSED IN LUNG, SIGNAL = 2.9; EXPRESSED IN HELA, SIGNAL = 2.5; SWISSPROT HIT: Q14511, EVALUE 2.00e-13; EST_HUMAN HIT: AI925674.1, EVALUE 2.00e-12
NPGPLIPQPSSQQTPERKPRLSEHCRLYFGALFKAISAFHGSLSSSQPAEIITQSKLVIMVGQKLVDTLCMETQERDVRNEILRGSSHLCSLLKDVALATKNAVLTYPSPAALGHLQAEAEKLEQHTR

SEQ ID NO: 41361 - protein, 95 aa, Homo sapiens
  MAP TO AL121914.16; EXPRESSED IN FETAL LIVER, SIGNAL = 2.5; EXPRESSED IN PLACENTA, SIGNAL = 2.8; EXPRESSED IN ADULT LIVER, SIGNAL = 2.4; EXPRESSED IN BRAIN, SIGNAL = 2.7; EXPRESSED IN BONE MARROW, SIGNAL = 2.8; EXPRESSED IN HEART, SIGNAL = 2.5; EXPRESSED IN LUNG, SIGNAL = 2.9; EXPRESSED IN HELA, SIGNAL = 2.5
ILALLYLSLRVNRLLRGNPAYLNTAGSTLGRSSKPSAHFTAASAAASPRRSSLRASWSSWWDRSWWTRCAWRPRRGTCATRSSVAAVTSAACSRT

SEQ ID NO: 41362 - protein, 60 aa, Homo sapiens
  MAP TO AL133395.14; EXPRESSED IN PLACENTA, SIGNAL = 5.5; EXPRESSED IN BONE MARROW, SIGNAL = 6.7; EXPRESSED IN LUNG, SIGNAL = 6.5; EXPRESSED IN HELA, SIGNAL =   4; EXPRESSED IN ADULT LIVER, SIGNAL = 5.9; EXPRESSED IN HEART, SIGNAL = 5.6; EXPRESSED IN FETAL LIVER, SIGNAL = 5.8; EXPRESSED IN BRAIN, SIGNAL = 6.4; SWISSPROT HIT: O31500, EVALUE 6.10e-02; EST_HUMAN HIT: D81625.1, EVALUE 2.00e-20
GDVQRTLIQVDFGDGIAVSYVNLSSMEDGIKHVYQNVGIFRVTVQVDNSLGSDSAVLYLH

SEQ ID NO: 41363 - protein, 41 aa, Homo sapiens
  MAP TO AL133395.14; EXPRESSED IN PLACENTA, SIGNAL = 5.5; EXPRESSED IN BONE MARROW, SIGNAL = 6.7; EXPRESSED IN LUNG, SIGNAL = 6.5; EXPRESSED IN HELA, SIGNAL =   4; EXPRESSED IN ADULT LIVER, SIGNAL = 5.9; EXPRESSED IN HEART, SIGNAL = 5.6; EXPRESSED IN FETAL LIVER, SIGNAL = 5.8; EXPRESSED IN BRAIN, SIGNAL = 6.4; EST_HUMAN HIT: D81625.1, EVALUE 9.00e-13
VMFSGHSSKWTLAMVSRCLTSISAPWKMGSNTSIRTWAFSV

SEQ ID NO: 41364 - protein, 57 aa, Homo sapiens
  MAP TO AC011859.4; EXPRESSED IN HEART, SIGNAL = 1.3; EXPRESSED IN BRAIN, SIGNAL = 1.2; EXPRESSED IN BONE MARROW, SIGNAL = 1.9; EXPRESSED IN LUNG, SIGNAL = 1.2; EXPRESSED IN PLACENTA, SIGNAL = 0.91; EXPRESSED IN ADULT LIVER, SIGNAL = 1.1; EXPRESSED IN FETAL LIVER, SIGNAL = 1.8; EST_HUMAN HIT: D30846.1, EVALUE 5.00e-13
GRCSRENCKYLHPPPHLKTQLEINGRNNLIQQKNMAMLAQQMQLANAMMPGAPLQPV

SEQ ID NO: 41365 - protein, 72 aa, Homo sapiens
  MAP TO AL121935.12; EXPRESSED IN LUNG, SIGNAL = 1.3; EXPRESSED IN PLACENTA, SIGNAL = 1.3; EXPRESSED IN HEART, SIGNAL = 1.3; EXPRESSED IN BONE MARROW, SIGNAL = 1.8; EXPRESSED IN ADULT LIVER, SIGNAL = 1.3; EXPRESSED IN FETAL LIVER, SIGNAL = 1.7; EXPRESSED IN BRAIN, SIGNAL = 1.4; SWISSPROT HIT: P75870, EVALUE 3.20e+00; EST_HUMAN HIT: BE079744.1, EVALUE 4.10e+00
MARTATNSSTRNYGKSWKSFPVFGSSARVLFPWRWLLLPQKESGFILSAQQSAQSFCRTTSGSRAGCSSVRG

SEQ ID NO: 41366 - protein, 113 aa, Homo sapiens
  MAP TO AL121895.18; EXPRESSED IN BONE MARROW, SIGNAL = 4.9; EXPRESSED IN LUNG, SIGNAL =   6; EXPRESSED IN ADULT LIVER, SIGNAL = 6.1; EXPRESSED IN HEART, SIGNAL = 5.7; EXPRESSED IN BRAIN, SIGNAL = 4.2; EXPRESSED IN PLACENTA, SIGNAL = 5.6; EXPRESSED IN HELA, SIGNAL = 7.7; EXPRESSED IN FETAL LIVER, SIGNAL = 4.7; SWISSPROT HIT: Q55286, EVALUE 5.00e+00; EST_HUMAN HIT: BF216479.1, EVALUE 1.50e+00
MWPRLAGPGRAFLCPSWFLVSTASPTPLKLWALLLSSGTETGLAGLATPMSSAMAGSWGGAGLRRQCCPVLTPIPPNPSLTSAAFSTFLKGGFLGNWKAEATQTSSPGSTAYS

SEQ ID NO: 41367 - protein, 19 aa, Homo sapiens
  MAP TO AL121895.18; EXPRESSED IN BONE MARROW, SIGNAL = 4.9; EXPRESSED IN LUNG, SIGNAL =   6; EXPRESSED IN ADULT LIVER, SIGNAL = 6.1; EXPRESSED IN HEART, SIGNAL = 5.7; EXPRESSED IN BRAIN, SIGNAL = 4.2; EXPRESSED IN PLACENTA, SIGNAL = 5.6; EXPRESSED IN HELA, SIGNAL = 7.7; EXPRESSED IN FETAL LIVER, SIGNAL = 4.7
PSHCSWVWPNLPNQSLCQS

SEQ ID NO: 41368 - protein, 40 aa, Homo sapiens
  MAP TO AC008269.3; EXPRESSED IN ADULT LIVER, SIGNAL = 5.1; EXPRESSED IN LUNG, SIGNAL = 5.8; EXPRESSED IN PLACENTA, SIGNAL = 4.8; EXPRESSED IN HELA, SIGNAL =  12; EXPRESSED IN FETAL LIVER, SIGNAL = 5.8; EXPRESSED IN BRAIN, SIGNAL = 5.2; EXPRESSED IN HEART, SIGNAL = 6.3; EXPRESSED IN BONE MARROW, SIGNAL = 5.6; EST_HUMAN HIT: AW754010.1, EVALUE 2.00e-14
MKALRELDRFSVLNSQHMFEVLAAMNHRSLILLDECSKVV

SEQ ID NO: 41369 - protein, 26 aa, Homo sapiens
  MAP TO AC022918.2; EXPRESSED IN PLACENTA, SIGNAL = 1.4; EXPRESSED IN FETAL LIVER, SIGNAL = 1.4; EXPRESSED IN HELA, SIGNAL = 2.2; EXPRESSED IN HEART, SIGNAL = 1.5; EXPRESSED IN BRAIN, SIGNAL = 1.3; EXPRESSED IN BONE MARROW, SIGNAL = 1.5; EXPRESSED IN ADULT LIVER, SIGNAL = 1.6; EXPRESSED IN LUNG, SIGNAL = 1.4
KIDFRHTDASTKALSVSLIAPLERHL

SEQ ID NO: 41370 - protein, 22 aa, Homo sapiens
  MAP TO AC022918.2; EXPRESSED IN PLACENTA, SIGNAL = 1.4; EXPRESSED IN FETAL LIVER, SIGNAL = 1.4; EXPRESSED IN HELA, SIGNAL = 2.2; EXPRESSED IN HEART, SIGNAL = 1.5; EXPRESSED IN BRAIN, SIGNAL = 1.3; EXPRESSED IN BONE MARROW, SIGNAL = 1.5; EXPRESSED IN ADULT LIVER, SIGNAL = 1.6; EXPRESSED IN LUNG, SIGNAL = 1.4
IRLILDTQMLLPRRCQLVSLHH

SEQ ID NO: 41371 - protein, 66 aa, Homo sapiens
  MAP TO AL136300.5; EXPRESSED IN ADULT LIVER, SIGNAL = 2.6; EXPRESSED IN BRAIN, SIGNAL = 2.9; EXPRESSED IN LUNG, SIGNAL =   3; EXPRESSED IN PLACENTA, SIGNAL = 2.7; EXPRESSED IN FETAL LIVER, SIGNAL = 3.6; EXPRESSED IN HEART, SIGNAL = 2.6; EXPRESSED IN BONE MARROW, SIGNAL = 2.5; EST_HUMAN HIT: BF382615.1, EVALUE 3.80e-01; SWISSPROT HIT: P23504, EVALUE 8.90e-01
NRWFPHILIFPNSSLHLDPSWPLLAPDVREPNTPVKITKEDHKPLINKFLTKFLTILNVQIDDILG

SEQ ID NO: 41372 - protein, 37 aa, Homo sapiens
  MAP TO AL162311.1; EXPRESSED IN FETAL LIVER, SIGNAL = 4.5; EXPRESSED IN LUNG, SIGNAL = 2.5; EXPRESSED IN PLACENTA, SIGNAL = 2.6; EXPRESSED IN ADULT LIVER, SIGNAL = 2.8; EXPRESSED IN BRAIN, SIGNAL = 3.4; EXPRESSED IN BONE MARROW, SIGNAL = 4.8; EXPRESSED IN HELA, SIGNAL = 4.7; EXPRESSED IN HEART, SIGNAL = 2.1; EST_HUMAN HIT: BF306599.1, EVALUE 2.00e-08
CSGCWLLPIGWVSRLSAICRLSSLEAWVVVTVAVVVS

SEQ ID NO: 41373 - protein, 52 aa, Homo sapiens
  MAP TO AC009466.2; EXPRESSED IN PLACENTA, SIGNAL = 3.2; EXPRESSED IN HEART, SIGNAL = 3.3; EXPRESSED IN BONE MARROW, SIGNAL = 2.5; EXPRESSED IN LUNG, SIGNAL = 2.4; EXPRESSED IN ADULT LIVER, SIGNAL = 2.2; EXPRESSED IN FETAL LIVER, SIGNAL = 2.4; EXPRESSED IN BRAIN, SIGNAL =   4; EST_HUMAN HIT: AA984078.1, EVALUE 1.00e-25; SWISSPROT HIT: P13591, EVALUE 1.00e-26
PSIDQVEPYSSTAQVQFDEPEATGGVPILKYKAEWRAVGEEVWHSKWYDAKE

SEQ ID NO: 41374 - protein, 47 aa, Homo sapiens
  MAP TO AC009466.2; EXPRESSED IN PLACENTA, SIGNAL = 3.2; EXPRESSED IN HEART, SIGNAL = 3.3; EXPRESSED IN BONE MARROW, SIGNAL = 2.5; EXPRESSED IN LUNG, SIGNAL = 2.4; EXPRESSED IN ADULT LIVER, SIGNAL = 2.2; EXPRESSED IN FETAL LIVER, SIGNAL = 2.4; EXPRESSED IN BRAIN, SIGNAL =   4; EST_HUMAN HIT: AA984078.1, EVALUE 8.00e-22; SWISSPROT HIT: P71528, EVALUE 8.10e+00
WSHTPAQPRCSLMNQRPQVGCPSSNTKLSGEQLVKKYGIPSGMMPRK

SEQ ID NO: 41375 - protein, 35 aa, Homo sapiens
  MAP TO AC025826.1; EXPRESSED IN PLACENTA, SIGNAL = 1.4; EXPRESSED IN ADULT LIVER, SIGNAL = 1.1; EXPRESSED IN HEART, SIGNAL = 1.2; EXPRESSED IN FETAL LIVER, SIGNAL =   1; EXPRESSED IN BRAIN, SIGNAL = 1.3; EXPRESSED IN BONE MARROW, SIGNAL = 1.3; EXPRESSED IN LUNG, SIGNAL = 1.2; EST_HUMAN HIT: AU141077.1, EVALUE 3.00e-07
QEEARRKKMPSLSSCVWNWWVLGLTDFKNEAVDPR

SEQ ID NO: 41376 - protein, 35 aa, Homo sapiens
  MAP TO AC025826.1; EXPRESSED IN PLACENTA, SIGNAL = 1.4; EXPRESSED IN ADULT LIVER, SIGNAL = 1.1; EXPRESSED IN HEART, SIGNAL = 1.2; EXPRESSED IN FETAL LIVER, SIGNAL =   1; EXPRESSED IN BRAIN, SIGNAL = 1.3; EXPRESSED IN BONE MARROW, SIGNAL = 1.3; EXPRESSED IN LUNG, SIGNAL = 1.2; EST_HUMAN HIT: BE819162.1, EVALUE 1.00e-05
RKKQEGRKCHRCHLVSGIGGFLVSLTSRMKPWTLA

SEQ ID NO: 41377 - protein, 40 aa, Homo sapiens
  MAP TO AC013591.3; EXPRESSED IN PLACENTA, SIGNAL = 1.5; EXPRESSED IN ADULT LIVER, SIGNAL = 1.4; EXPRESSED IN HEART, SIGNAL = 1.4; EXPRESSED IN FETAL LIVER, SIGNAL = 1.3; EXPRESSED IN BRAIN, SIGNAL = 1.8; EXPRESSED IN BONE MARROW, SIGNAL = 1.4; EXPRESSED IN LUNG, SIGNAL = 1.5
MLPSLIVPPLAELLGPQDQARYTQPRGFTLRAGHHRVPGQ

SEQ ID NO: 41378 - protein, 17 aa, Homo sapiens
  MAP TO AC013591.3; EXPRESSED IN PLACENTA, SIGNAL = 1.5; EXPRESSED IN ADULT LIVER, SIGNAL = 1.4; EXPRESSED IN HEART, SIGNAL = 1.4; EXPRESSED IN FETAL LIVER, SIGNAL = 1.3; EXPRESSED IN BRAIN, SIGNAL = 1.8; EXPRESSED IN BONE MARROW, SIGNAL = 1.4; EXPRESSED IN LUNG, SIGNAL = 1.5
GCPGTLWCPALSVKPLG

SEQ ID NO: 41379 - protein, 36 aa, Homo sapiens
  MAP TO AL138807.7; EXPRESSED IN LUNG, SIGNAL = 1.6; EXPRESSED IN BONE MARROW, SIGNAL = 1.3; EXPRESSED IN HEART, SIGNAL = 1.9; EXPRESSED IN PLACENTA, SIGNAL = 1.5; EXPRESSED IN ADULT LIVER, SIGNAL = 1.6; EXPRESSED IN FETAL LIVER, SIGNAL = 1.6; EXPRESSED IN BRAIN, SIGNAL = 1.8; SWISSPROT HIT: O75110, EVALUE 7.00e-14; EST_HUMAN HIT: BF061308.1, EVALUE 5.00e-12
GFVLAVTVIREAVEEIRCYVRDKEVNSQVYSRLTAR

SEQ ID NO: 41380 - protein, 36 aa, Homo sapiens
  MAP TO AL138807.7; EXPRESSED IN LUNG, SIGNAL = 1.6; EXPRESSED IN BONE MARROW, SIGNAL = 1.3; EXPRESSED IN HEART, SIGNAL = 1.9; EXPRESSED IN PLACENTA, SIGNAL = 1.5; EXPRESSED IN ADULT LIVER, SIGNAL = 1.6; EXPRESSED IN FETAL LIVER, SIGNAL = 1.6; EXPRESSED IN BRAIN, SIGNAL = 1.8; EST_HUMAN HIT: BF061308.1, EVALUE 3.00e-14
ASCWPSLSSVRRWRRSDATCGTRKSTPRSTAGSQHE

SEQ ID NO: 41381 - protein, 44 aa, Homo sapiens
  MAP TO AC009301.3; EXPRESSED IN LUNG, SIGNAL = 2.5; EXPRESSED IN HEART, SIGNAL = 2.5; EXPRESSED IN BRAIN, SIGNAL = 2.6; EXPRESSED IN BONE MARROW, SIGNAL = 2.3; EXPRESSED IN PLACENTA, SIGNAL = 2.3; EXPRESSED IN ADULT LIVER, SIGNAL = 2.6; EXPRESSED IN FETAL LIVER, SIGNAL = 2.6; SWISSPROT HIT: P13673, EVALUE 2.10e+00; EST_HUMAN HIT: AI360182.1, EVALUE 8.00e-01
VVALQEPCGRLEGGRPGNEGQSLGLQTVIVFETGPWPVGILHDT

SEQ ID NO: 41382 - protein, 17 aa, Homo sapiens
  MAP TO AC009301.3; EXPRESSED IN LUNG, SIGNAL = 2.5; EXPRESSED IN HEART, SIGNAL = 2.5; EXPRESSED IN BRAIN, SIGNAL = 2.6; EXPRESSED IN BONE MARROW, SIGNAL = 2.3; EXPRESSED IN PLACENTA, SIGNAL = 2.3; EXPRESSED IN ADULT LIVER, SIGNAL = 2.6; EXPRESSED IN FETAL LIVER, SIGNAL = 2.6
GGSAGAMWPPGGGPAWK

SEQ ID NO: 41383 - protein, 54 aa, Homo sapiens
  MAP TO AC010338.3; EXPRESSED IN HEART, SIGNAL = 1.7; EXPRESSED IN FETAL LIVER, SIGNAL = 1.2; EXPRESSED IN BRAIN, SIGNAL = 1.3; EXPRESSED IN BONE MARROW, SIGNAL = 1.3; EXPRESSED IN ADULT LIVER, SIGNAL = 1.7; EXPRESSED IN LUNG, SIGNAL = 1.3; EXPRESSED IN PLACENTA, SIGNAL =   1; SWISSPROT HIT: P12973, EVALUE 6.10e+00; EST_HUMAN HIT: BF683680.1, EVALUE 3.70e+00
TPTKVSKEKGHHSRGRKKKALVSLRPPQESLGDGEGSYRDVSAPAEEQKDGSNL

SEQ ID NO: 41384 - protein, 21 aa, Homo sapiens
  MAP TO AC010338.3; EXPRESSED IN HEART, SIGNAL = 1.7; EXPRESSED IN FETAL LIVER, SIGNAL = 1.2; EXPRESSED IN BRAIN, SIGNAL = 1.3; EXPRESSED IN BONE MARROW, SIGNAL = 1.3; EXPRESSED IN ADULT LIVER, SIGNAL = 1.7; EXPRESSED IN LUNG, SIGNAL = 1.3; EXPRESSED IN PLACENTA, SIGNAL =   1
LQLKCPRRRDTTQEEGRKRLW

SEQ ID NO: 41385 - protein, 32 aa, Homo sapiens
  MAP TO AC022206.2; EXPRESSED IN LUNG, SIGNAL = 2.1; EXPRESSED IN PLACENTA, SIGNAL = 1.9; EXPRESSED IN ADULT LIVER, SIGNAL = 2.1; EXPRESSED IN HEART, SIGNAL = 1.9; EXPRESSED IN BRAIN, SIGNAL =   2; EXPRESSED IN FETAL LIVER, SIGNAL = 1.8; EXPRESSED IN BONE MARROW, SIGNAL = 1.9
MQSRGVVHFRLDAGLEMKGQPLAMKSLAGLTH

SEQ ID NO: 41386 - protein, 24 aa, Homo sapiens
  MAP TO AC022206.2; EXPRESSED IN LUNG, SIGNAL = 2.1; EXPRESSED IN PLACENTA, SIGNAL = 1.9; EXPRESSED IN ADULT LIVER, SIGNAL = 2.1; EXPRESSED IN HEART, SIGNAL = 1.9; EXPRESSED IN BRAIN, SIGNAL =   2; EXPRESSED IN FETAL LIVER, SIGNAL = 1.8; EXPRESSED IN BONE MARROW, SIGNAL = 1.9
CVRPARLFMARGCPFISRPASSLK

SEQ ID NO: 41387 - protein, 31 aa, Homo sapiens
  MAP TO AL133293.14; EXPRESSED IN LUNG, SIGNAL = 1.4; EXPRESSED IN PLACENTA, SIGNAL = 1.2; EXPRESSED IN BRAIN, SIGNAL = 1.1; EXPRESSED IN ADULT LIVER, SIGNAL = 1.2; EXPRESSED IN HEART, SIGNAL = 1.3; EXPRESSED IN FETAL LIVER, SIGNAL =   1; EXPRESSED IN BONE MARROW, SIGNAL = 1.1
GISPYTPEALHMAVIQEDTCRFLELFFFLQS

SEQ ID NO: 41388 - protein, 25 aa, Homo sapiens
  MAP TO AC011272.3; EXPRESSED IN PLACENTA, SIGNAL = 0.92; EXPRESSED IN ADULT LIVER, SIGNAL = 1.5; EXPRESSED IN FETAL LIVER, SIGNAL = 1.8; EXPRESSED IN BONE MARROW, SIGNAL = 1.5; EXPRESSED IN HEART, SIGNAL = 1.6; EXPRESSED IN BRAIN, SIGNAL = 1.1; EXPRESSED IN LUNG, SIGNAL = 1.4
QDYISRAVERVIQYREEGALAQDVA

SEQ ID NO: 41389 - protein, 35 aa, Homo sapiens
  MAP TO AC009298.2; EXPRESSED IN ADULT LIVER, SIGNAL = 1.3; EXPRESSED IN LUNG, SIGNAL = 1.1; EXPRESSED IN PLACENTA, SIGNAL = 0.95; EXPRESSED IN HEART, SIGNAL = 1.5; EXPRESSED IN FETAL LIVER, SIGNAL = 1.4; EXPRESSED IN BRAIN, SIGNAL = 1.7; EXPRESSED IN BONE MARROW, SIGNAL = 1.3; EST_HUMAN HIT: W20176.1, EVALUE 2.00e-08
TGSVVLASASGEGLRNLPIMPEDEGGAGVSHGESG

SEQ ID NO: 41390 - protein, 36 aa, Homo sapiens
  MAP TO AC009298.2; EXPRESSED IN ADULT LIVER, SIGNAL = 1.3; EXPRESSED IN LUNG, SIGNAL = 1.1; EXPRESSED IN PLACENTA, SIGNAL = 0.95; EXPRESSED IN HEART, SIGNAL = 1.5; EXPRESSED IN FETAL LIVER, SIGNAL = 1.4; EXPRESSED IN BRAIN, SIGNAL = 1.7; EXPRESSED IN BONE MARROW, SIGNAL = 1.3; EST_HUMAN HIT: H69958.1, EVALUE 2.00e-08
VQEAWCWHLLLARASGTSQSCQKMKEEQACHMARVG

SEQ ID NO: 41391 - protein, 36 aa, Homo sapiens
  MAP TO AC015525.3; EXPRESSED IN ADULT LIVER, SIGNAL = 1.8; EXPRESSED IN BONE MARROW, SIGNAL = 1.8; EXPRESSED IN HEART, SIGNAL = 1.9; EXPRESSED IN FETAL LIVER, SIGNAL = 1.6; EXPRESSED IN LUNG, SIGNAL = 1.8; EXPRESSED IN PLACENTA, SIGNAL = 1.5; EXPRESSED IN BRAIN, SIGNAL = 1.7; EST_HUMAN HIT: AW845987.1, EVALUE 1.00e-14
YHYFVDIITWNKNVRRGDITIKLRDKAGNTTESKIN

SEQ ID NO: 41392 - protein, 48 aa, Homo sapiens
  MAP TO AL136442.10; EXPRESSED IN PLACENTA, SIGNAL = 5.4; EXPRESSED IN HEART, SIGNAL =   4; EXPRESSED IN BONE MARROW, SIGNAL = 4.3; EXPRESSED IN HELA, SIGNAL =   3; EXPRESSED IN LUNG, SIGNAL = 5.1; EXPRESSED IN ADULT LIVER, SIGNAL = 4.9; EXPRESSED IN FETAL LIVER, SIGNAL = 4.3; EXPRESSED IN BRAIN, SIGNAL = 4.5; SWISSPROT HIT: P75590, EVALUE 8.10e+00; EST_HUMAN HIT: BF316043.1, EVALUE 3.00e+00
RETEVPVSQCESGSSSGDVWTHCQDIRVYHHSLHLVSPVGGKCKRRQQ

SEQ ID NO: 41393 - protein, 53 aa, Homo sapiens
  MAP TO AC018535.3; EXPRESSED IN HELA, SIGNAL = 2.5; EXPRESSED IN BONE MARROW, SIGNAL = 1.6; EXPRESSED IN LUNG, SIGNAL = 1.4; EXPRESSED IN HEART, SIGNAL = 1.6; EXPRESSED IN PLACENTA, SIGNAL = 1.1; EXPRESSED IN ADULT LIVER, SIGNAL = 1.9; EXPRESSED IN FETAL LIVER, SIGNAL =   2; EXPRESSED IN BRAIN, SIGNAL = 1.1
AIEESSEEIPMVYDRYKMIQESTVVQSAIRNIGVMFILVVLTFLSTLVTQLSM

SEQ ID NO: 41394 - protein, 18 aa, Homo sapiens
  MAP TO AC018535.3; EXPRESSED IN HELA, SIGNAL = 2.5; EXPRESSED IN BONE MARROW, SIGNAL = 1.6; EXPRESSED IN LUNG, SIGNAL = 1.4; EXPRESSED IN HEART, SIGNAL = 1.6; EXPRESSED IN PLACENTA, SIGNAL = 1.1; EXPRESSED IN ADULT LIVER, SIGNAL = 1.9; EXPRESSED IN FETAL LIVER, SIGNAL =   2; EXPRESSED IN BRAIN, SIGNAL = 1.1
RLLKNPQRKSQWCTTDIR

SEQ ID NO: 41395 - protein, 58 aa, Homo sapiens
  MAP TO AC010767.3; EXPRESSED IN HEART, SIGNAL = 1.7; EXPRESSED IN BRAIN, SIGNAL = 0.54; EXPRESSED IN BONE MARROW, SIGNAL = 0.48; EST_HUMAN HIT: AA053822.1, EVALUE 1.00e-03
LLDSRTYASDLTGGSQAFGHRLMAALSASLLLGFWGLELASWLLILLTAYYETSPCDH

SEQ ID NO: 41396 - protein, 59 aa, Homo sapiens
  MAP TO AC007000.2; EXPRESSED IN LUNG, SIGNAL = 3.4; EXPRESSED IN ADULT LIVER, SIGNAL = 3.2; EXPRESSED IN HELA, SIGNAL = 2.8; EXPRESSED IN HEART, SIGNAL =   3; EXPRESSED IN BRAIN, SIGNAL =   3; EXPRESSED IN PLACENTA, SIGNAL = 3.1; EXPRESSED IN FETAL LIVER, SIGNAL = 3.6; EXPRESSED IN BONE MARROW, SIGNAL = 3.4; EST_HUMAN HIT: AU136637.1, EVALUE 2.00e-27; SWISSPROT HIT: P12804, EVALUE 7.00e-22
NAKEEINVLHGRLEKLNLVNMNNIENYVDSKVANLTFVVNSLDGKCSKCPSQEQIQSRP

SEQ ID NO: 41397 - protein, 23 aa, Homo sapiens
  MAP TO AC007000.2; EXPRESSED IN LUNG, SIGNAL = 3.4; EXPRESSED IN ADULT LIVER, SIGNAL = 3.2; EXPRESSED IN HELA, SIGNAL = 2.8; EXPRESSED IN HEART, SIGNAL =   3; EXPRESSED IN BRAIN, SIGNAL =   3; EXPRESSED IN PLACENTA, SIGNAL = 3.1; EXPRESSED IN FETAL LIVER, SIGNAL = 3.6; EXPRESSED IN BONE MARROW, SIGNAL = 3.4; EST_HUMAN HIT: AV748422.1, EVALUE 3.00e-06
APEAIQQDRGGVQRSPKPQGNRK

SEQ ID NO: 41398 - protein, 63 aa, Homo sapiens
  MAP TO AC013451.7; EXPRESSED IN HELA, SIGNAL = 2.5; EXPRESSED IN LUNG, SIGNAL =   2; EXPRESSED IN PLACENTA, SIGNAL =   2; EXPRESSED IN ADULT LIVER, SIGNAL = 1.8; EXPRESSED IN FETAL LIVER, SIGNAL = 1.6; EXPRESSED IN BRAIN, SIGNAL = 1.4; EXPRESSED IN BONE MARROW, SIGNAL = 1.3; EXPRESSED IN HEART, SIGNAL =   2; EST_HUMAN HIT: AW580424.1, EVALUE 3.00e-20; SWISSPROT HIT: Q15428, EVALUE 8.90e-01
TLSGLSQTHPSQQHVGLSRTVRLHPTATASSQLSSNALPPGPGLEQRDGTQQAVPLEHPSSPW

SEQ ID NO: 41399 - protein, 32 aa, Homo sapiens
  MAP TO AC021641.4; EXPRESSED IN HELA, SIGNAL = 2.4; EXPRESSED IN HEART, SIGNAL = 1.5; EXPRESSED IN BONE MARROW, SIGNAL = 1.6; EXPRESSED IN BRAIN, SIGNAL = 1.4; EXPRESSED IN FETAL LIVER, SIGNAL = 1.7; EXPRESSED IN ADULT LIVER, SIGNAL = 2.2; EXPRESSED IN PLACENTA, SIGNAL = 1.5; EXPRESSED IN LUNG, SIGNAL = 1.6; EST_HUMAN HIT: BF125810.1, EVALUE 5.80e+00
KLILTVQKTKSTPCTSCSALKRTYPGAGDLEM

SEQ ID NO: 41400 - protein, 42 aa, Homo sapiens
  MAP TO AC027273.2; EXPRESSED IN ADULT LIVER, SIGNAL = 5.2; EXPRESSED IN FETAL LIVER, SIGNAL = 1.9; EXPRESSED IN BONE MARROW, SIGNAL =   5; EXPRESSED IN LUNG, SIGNAL = 3.3; EXPRESSED IN PLACENTA, SIGNAL = 3.8; EXPRESSED IN HELA, SIGNAL = 4.3; EXPRESSED IN HEART, SIGNAL = 2.8; EXPRESSED IN BRAIN, SIGNAL = 3.3
MCHFFLDLEILKKKALLNCLACYAIQGYGLLAEGQTQQQKCE

SEQ ID NO: 41401 - protein, 30 aa, Homo sapiens [sequence omitted]

SEQ ID NO: 41402 - protein, 33 aa, Homo sapiens
  MAP TO AC011181.5; EXPRESSED IN ADULT LIVER, SIGNAL = 1.2; EXPRESSED IN HEART, SIGNAL = 7.8; EXPRESSED IN FETAL LIVER, SIGNAL = 0.81; EXPRESSED IN BONE MARROW, SIGNAL =   1; EXPRESSED IN LUNG, SIGNAL = 0.92; EXPRESSED IN PLACENTA, SIGNAL =   1; EXPRESSED IN BRAIN, SIGNAL =   1
ARLIQYGSILHKGTNTKKVGISEDHLEDWLLDL

SEQ ID NO: 41403 - protein, 20 aa, Homo sapiens
  MAP TO AC011181.5; EXPRESSED IN ADULT LIVER, SIGNAL = 1.2; EXPRESSED IN HEART, SIGNAL = 7.8; EXPRESSED IN FETAL LIVER, SIGNAL = 0.81; EXPRESSED IN BONE MARROW, SIGNAL =   1; EXPRESSED IN LUNG, SIGNAL = 0.92; EXPRESSED IN PLACENTA, SIGNAL =   1; EXPRESSED IN BRAIN, SIGNAL =   1
PDLFNMEVYCTRAQTPKRWG

SEQ ID NO: 41404 - protein, 66 aa, Homo sapiens
  MAP TO AL132874.14; EXPRESSED IN LUNG, SIGNAL = 1.7; EXPRESSED IN PLACENTA, SIGNAL = 1.6; EXPRESSED IN FETAL LIVER, SIGNAL = 1.4; EXPRESSED IN HEART, SIGNAL = 1.4; EXPRESSED IN ADULT LIVER, SIGNAL = 1.6; EXPRESSED IN BRAIN, SIGNAL = 1.4; EXPRESSED IN BONE MARROW, SIGNAL = 1.4; SWISSPROT HIT: P45894, EVALUE 5.90e+00; EST_HUMAN HIT: BE787366.1, EVALUE 5.00e-18
DDLTIYGIVMQRWKPFQQDVRCEVEIVLKANYIQVNNEQSSGIIMDEEVQKEFEDFWEYYKSDPFA

SEQ ID NO: 41405 - protein, 49 aa, Homo sapiens
  MAP TO AC007981.43; EXPRESSED IN PLACENTA, SIGNAL = 3.4; EXPRESSED IN HEART, SIGNAL = 3.4; EXPRESSED IN FETAL LIVER, SIGNAL = 3.7; EXPRESSED IN BONE MARROW, SIGNAL = 3.4; EXPRESSED IN HELA, SIGNAL = 3.8; EXPRESSED IN LUNG, SIGNAL = 4.2; EXPRESSED IN ADULT LIVER, SIGNAL = 4.1; EXPRESSED IN BRAIN, SIGNAL = 3.9; SWISSPROT HIT: P11274, EVALUE 4.00e-22; EST_HUMAN HIT: AL043314.2, EVALUE 1.00e-21
AVNKMSLHNLGTVFGPTLLRPSEKESKLPANPSQPITMTDSWSLEVMSQ

SEQ ID NO: 41406 - protein, 37 aa, Homo sapiens
  MAP TO AC007981.43; EXPRESSED IN PLACENTA, SIGNAL = 3.4; EXPRESSED IN HEART, SIGNAL = 3.4; EXPRESSED IN FETAL LIVER, SIGNAL = 3.7; EXPRESSED IN BONE MARROW, SIGNAL = 3.4; EXPRESSED IN HELA, SIGNAL = 3.8; EXPRESSED IN LUNG, SIGNAL = 4.2; EXPRESSED IN ADULT LIVER, SIGNAL = 4.1; EXPRESSED IN BRAIN, SIGNAL = 3.9; EST_HUMAN HIT: AL043314.2, EVALUE 2.00e-05
QSIRCPCTTLARCLAPRCSGPPRRRASSLPTPASPSP

SEQ ID NO: 41407 - protein, 75 aa, Homo sapiens
  MAP TO AC019126.3; EXPRESSED IN LUNG, SIGNAL = 2.3; EXPRESSED IN ADULT LIVER, SIGNAL =   2; EXPRESSED IN HEART, SIGNAL = 2.1; EXPRESSED IN BRAIN, SIGNAL = 2.1; EXPRESSED IN BONE MARROW, SIGNAL = 2.2; EXPRESSED IN PLACENTA, SIGNAL =   2; EXPRESSED IN FETAL LIVER, SIGNAL = 2.1; SWISSPROT HIT: P52747, EVALUE 7.00e-34; EST_HUMAN HIT: BF369434.1, EVALUE 6.00e-33
EKPYVCTVPGCDKRFTEYSSLYKHHVVHTHSKPYNCNHCGKTYKQISTLAMHKRTAHNDTEPIEEEQEAFFEPPP

SEQ ID NO: 41408 - protein, 84 aa, Homo sapiens
  MAP TO AC019126.3; EXPRESSED IN LUNG, SIGNAL = 2.3; EXPRESSED IN ADULT LIVER, SIGNAL =   2; EXPRESSED IN HEART, SIGNAL = 2.1; EXPRESSED IN BRAIN, SIGNAL = 2.1; EXPRESSED IN BONE MARROW, SIGNAL = 2.2; EXPRESSED IN PLACENTA, SIGNAL =   2; EXPRESSED IN FETAL LIVER, SIGNAL = 2.1; SWISSPROT HIT: Q05241, EVALUE 6.30e+00; EST_HUMAN HIT: BF369434.1, EVALUE 2.00e-27
EKSHMFVQFLGVTKGLQNIPVCTNIMLSTLIPNLTTVTTVGRHTSRSPRWPCTNGQPTTTLSPSRRSRKPSLSRPQVRVLSTIF

SEQ ID NO: 41409 - protein, 59 aa, Homo sapiens
  MAP TO AC018377.4; EXPRESSED IN LUNG, SIGNAL = 2.4; EXPRESSED IN HELA, SIGNAL = 2.9; EXPRESSED IN BONE MARROW, SIGNAL = 1.9; EXPRESSED IN HEART, SIGNAL = 2.1; EXPRESSED IN PLACENTA, SIGNAL = 2.1; EXPRESSED IN ADULT LIVER, SIGNAL = 2.6; EXPRESSED IN FETAL LIVER, SIGNAL = 1.9; EXPRESSED IN BRAIN, SIGNAL = 2.4; EST_HUMAN HIT: AW264367.1, EVALUE 4.70e+00; SWISSPROT HIT: Q9X284, EVALUE 7.90e+00
LFLYLDIIIQNILEANKHIVDINMQSILEKESRFSYGVLKSSGSNSASEVWTSTFSFRQ

SEQ ID NO: 41410 - protein, 39 aa, Homo sapiens; identical to SEQ ID NO: 41089
  MAP TO AC018377.4; EXPRESSED IN LUNG, SIGNAL = 2.4; EXPRESSED IN HELA, SIGNAL = 2.9; EXPRESSED IN BONE MARROW, SIGNAL = 1.9; EXPRESSED IN HEART, SIGNAL = 2.1; EXPRESSED IN PLACENTA, SIGNAL = 2.1; EXPRESSED IN ADULT LIVER, SIGNAL = 2.6; EXPRESSED IN FETAL LIVER, SIGNAL = 1.9; EXPRESSED IN BRAIN, SIGNAL = 2.4; EST_HUMAN HIT: AI056885.1, EVALUE 7.20e+00; SWISSPROT HIT: P11531, EVALUE 8.30e+00

SEQ ID NO: 41411 - protein, 49 aa, Homo sapiens
  MAP TO AC019233.3; EXPRESSED IN PLACENTA, SIGNAL = 2.7; EXPRESSED IN HEART, SIGNAL = 2.2; EXPRESSED IN LUNG, SIGNAL = 2.5; EXPRESSED IN HELA, SIGNAL =   3; EXPRESSED IN BRAIN, SIGNAL = 2.3; EXPRESSED IN ADULT LIVER, SIGNAL = 3.4; EXPRESSED IN FETAL LIVER, SIGNAL = 1.7; EXPRESSED IN BONE MARROW, SIGNAL = 2.6; EST_HUMAN HIT: AV691379.1, EVALUE 9.00e-15; SWISSPROT HIT: Q24270, EVALUE 3.60e+00
SNKNICDSWKEVKISTLKGVWKKLIPTFMDDFEGFKTSDEEVTEAVVES

SEQ ID NO: 41412 - protein, 17 aa, Homo sapiens
  MAP TO AC019233.3; EXPRESSED IN PLACENTA, SIGNAL = 2.7; EXPRESSED IN HEART, SIGNAL = 2.2; EXPRESSED IN LUNG, SIGNAL = 2.5; EXPRESSED IN HELA, SIGNAL =   3; EXPRESSED IN BRAIN, SIGNAL = 2.3; EXPRESSED IN ADULT LIVER, SIGNAL = 3.4; EXPRESSED IN FETAL LIVER, SIGNAL = 1.7; EXPRESSED IN BONE MARROW, SIGNAL = 2.6; EST_HUMAN HIT: AW880885.1, EVALUE 1.10e-01
IPIRTFVIHGRRSKYQR

SEQ ID NO: 41413 - protein, 79 aa, Homo sapiens
  MAP TO AC013746.4; EXPRESSED IN LUNG, SIGNAL = 3.2; EXPRESSED IN HEART, SIGNAL = 2.5; EXPRESSED IN BONE MARROW, SIGNAL =   3; EXPRESSED IN BRAIN, SIGNAL = 2.6; EXPRESSED IN FETAL LIVER, SIGNAL = 2.9; EXPRESSED IN HELA, SIGNAL = 2.6; EXPRESSED IN ADULT LIVER, SIGNAL = 3.2; EXPRESSED IN PLACENTA, SIGNAL = 3.4; SWISSPROT HIT: P50426, EVALUE 8.00e-16; EST_HUMAN HIT: BE930340.1, EVALUE 2.00e-21
SLQVMNKTRKIMEHGGATFINAFVTTPMCCPSRSSMLTGKYVHNHNVYTNNENCSSPSWQAMHEPRTFAVYLNNTGYRT

SEQ ID NO: 41414 - protein, 26 aa, Homo sapiens
  MAP TO AC012611.4; EXPRESSED IN ADULT LIVER, SIGNAL = 7.5; EXPRESSED IN HELA, SIGNAL =  10; EXPRESSED IN HEART, SIGNAL = 7.1; EXPRESSED IN FETAL LIVER, SIGNAL = 5.9; EXPRESSED IN BONE MARROW, SIGNAL =   7; EXPRESSED IN LUNG, SIGNAL = 7.2; EXPRESSED IN PLACENTA, SIGNAL = 6.8; EXPRESSED IN BRAIN, SIGNAL = 6.2
VMILQGILTTSLGIYSTQKLCLVKVN

SEQ ID NO: 41415 - protein, 29 aa, Homo sapiens
  MAP TO AL121908.7; EXPRESSED IN ADULT LIVER, SIGNAL = 2.4; EXPRESSED IN HELA, SIGNAL = 2.6; EXPRESSED IN BRAIN, SIGNAL = 2.3; EXPRESSED IN LUNG, SIGNAL = 2.6; EXPRESSED IN PLACENTA, SIGNAL = 2.3; EXPRESSED IN FETAL LIVER, SIGNAL = 2.2; EXPRESSED IN BONE MARROW, SIGNAL = 2.2; EXPRESSED IN HEART, SIGNAL = 2.2; EST_HUMAN HIT: AW452379.1, EVALUE 2.00e+00
LLCIFTCTFLCGHLFSVLRDLLRSQMVIW

SEQ ID NO: 41416 - protein, 40 aa, Homo sapiens
  MAP TO AC022038.2; EXPRESSED IN PLACENTA, SIGNAL = 0.9; EXPRESSED IN FETAL LIVER, SIGNAL = 0.91; EXPRESSED IN ADULT LIVER, SIGNAL = 1.1; EXPRESSED IN BRAIN, SIGNAL = 0.74; EXPRESSED IN BONE MARROW, SIGNAL = 0.85; EXPRESSED IN HEART, SIGNAL = 1.3
KMETIRQKLSLHHLTLKDPLSVAISGFISNTPPSYVLGEK

SEQ ID NO: 41417 - protein, 37 aa, Homo sapiens
  MAP TO AC021855.3; EXPRESSED IN ADULT LIVER, SIGNAL = 9.1; EXPRESSED IN BRAIN, SIGNAL = 7.4; EXPRESSED IN HEART, SIGNAL = 4.5; EXPRESSED IN FETAL LIVER, SIGNAL = 6.1; EXPRESSED IN BONE MARROW, SIGNAL = 8.6; EXPRESSED IN LUNG, SIGNAL = 5.4; EXPRESSED IN PLACENTA, SIGNAL = 6.3; EXPRESSED IN HELA, SIGNAL = 5.6; SWISSPROT HIT: P74435, EVALUE 6.40e+00; EST_HUMAN HIT: AV732736.1, EVALUE 5.00e-09
MAKRGQGIALAIASEGATPKPWWLPHGVEPAGEQKAE

SEQ ID NO: 41418 - protein, 65 aa, Homo sapiens
  MAP TO AL133324.7; EXPRESSED IN LUNG, SIGNAL = 1.4; EXPRESSED IN PLACENTA, SIGNAL = 1.1; EXPRESSED IN FETAL LIVER, SIGNAL = 1.5; EXPRESSED IN BONE MARROW, SIGNAL = 0.92; EXPRESSED IN HEART, SIGNAL = 1.3; EXPRESSED IN ADULT LIVER, SIGNAL = 1.4; EXPRESSED IN BRAIN, SIGNAL = 1.1; EST_HUMAN HIT: AV658543.1, EVALUE 6.00e-30; SWISSPROT HIT: P48637, EVALUE 7.00e-32
NWEARLLLERSHAAKCPDIATQLAGTKKVQQELSRPGMLEMLLPGQPEAVARLRATFAGLYSLDV

SEQ ID NO: 41419 - protein, 32 aa, Homo sapiens
  MAP TO AL133324.7; EXPRESSED IN LUNG, SIGNAL = 1.4; EXPRESSED IN PLACENTA, SIGNAL = 1.1; EXPRESSED IN FETAL LIVER, SIGNAL = 1.5; EXPRESSED IN BONE MARROW, SIGNAL = 0.92; EXPRESSED IN HEART, SIGNAL = 1.3; EXPRESSED IN ADULT LIVER, SIGNAL = 1.4; EXPRESSED IN BRAIN, SIGNAL = 1.1; EST_HUMAN HIT: AV658543.1, EVALUE 4.00e-13
IGKHVYCWRGHMLPSAQTLPPSWLGLRRCSRS

SEQ ID NO: 41420 - protein, 118 aa, Homo sapiens
  MAP TO AC021287.4; EXPRESSED IN LUNG, SIGNAL = 1.3; EXPRESSED IN ADULT LIVER, SIGNAL = 2.5; EXPRESSED IN HELA, SIGNAL =   3; EXPRESSED IN BRAIN, SIGNAL = 3.1; EXPRESSED IN BONE MARROW, SIGNAL = 2.6; EXPRESSED IN HEART, SIGNAL =   4; EXPRESSED IN PLACENTA, SIGNAL = 2.4; EXPRESSED IN FETAL LIVER, SIGNAL = 2.8; EST_HUMAN HIT: AA196387.1, EVALUE 2.00e-39; SWISSPROT HIT: P24152, EVALUE 3.00e-03
FMQSSSAKQKTPPPVAPKPAVKSSSSQPVTPVSPVWSPGVAPTQPPAFPTSNPSKGTVVSSIKIAQPSYPPARPASTLNVAGPFKGPQAAVASQNYTPKPTVSTPTVNAVQPGAVGPS

SEQ ID NO: 41421 - protein, 35 aa, Homo sapiens
  MAP TO AC018389.3; EXPRESSED IN HEART, SIGNAL = 3.9; EXPRESSED IN FETAL LIVER, SIGNAL = 3.4; EXPRESSED IN LUNG, SIGNAL = 4.8; EXPRESSED IN PLACENTA, SIGNAL = 6.2; EXPRESSED IN HELA, SIGNAL = 6.3; EXPRESSED IN ADULT LIVER, SIGNAL = 5.1; EXPRESSED IN BRAIN, SIGNAL =   4; EXPRESSED IN BONE MARROW, SIGNAL = 4.2; EST_HUMAN HIT: BE782401.1, EVALUE 4.00e-04
RLANTMSLKTASCLLLPRSSGKTQLHLSLAGRILT

SEQ ID NO: 41422 - protein, 39 aa, Homo sapiens
  MAP TO AC013497.4; EXPRESSED IN LUNG, SIGNAL = 1.5; EXPRESSED IN PLACENTA, SIGNAL = 1.5; EXPRESSED IN ADULT LIVER, SIGNAL = 1.4; EXPRESSED IN BRAIN, SIGNAL = 1.7; EXPRESSED IN HEART, SIGNAL = 1.4; EXPRESSED IN FETAL LIVER, SIGNAL = 1.5; EXPRESSED IN BONE MARROW, SIGNAL = 1.7
EEPADRSGWSISYEGSVMGKEAKEEVGARSFITQGLEGK

SEQ ID NO: 41423 - protein, 26 aa, Homo sapiens
  MAP TO AC025588.1; EXPRESSED IN LUNG, SIGNAL = 7.6; EXPRESSED IN HEART, SIGNAL =  14; EXPRESSED IN HELA, SIGNAL = 9.9; EXPRESSED IN BONE MARROW, SIGNAL = 6.9; EXPRESSED IN BRAIN, SIGNAL = 8.6; EXPRESSED IN FETAL LIVER, SIGNAL = 8.3; EXPRESSED IN ADULT LIVER, SIGNAL =  11; EXPRESSED IN PLACENTA, SIGNAL = 7.3
MHVLHYSIIGAKRGEVGPMEIAKMGV

SEQ ID NO: 41424 - protein, 50 aa, Homo sapiens
  MAP TO AC016457.3; EXPRESSED IN LUNG, SIGNAL = 1.9; EXPRESSED IN ADULT LIVER, SIGNAL = 1.7; EXPRESSED IN HEART, SIGNAL = 1.4; EXPRESSED IN BRAIN, SIGNAL = 1.4; EXPRESSED IN BONE MARROW, SIGNAL = 3.1; EXPRESSED IN PLACENTA, SIGNAL =   2; EXPRESSED IN FETAL LIVER, SIGNAL = 1.9; SWISSPROT HIT: Q16204, EVALUE 1.00e-21; EST_HUMAN HIT: BE814014.1, EVALUE 9.00e-12
QARAEQEEEFISNTLFKKIQALQKEKETLAVNYEKEEEFLTNELSRKLMQ

SEQ ID NO: 41425 - protein, 30 aa, Homo sapiens
  MAP TO AC016457.3; EXPRESSED IN LUNG, SIGNAL = 1.9; EXPRESSED IN ADULT LIVER, SIGNAL = 1.7; EXPRESSED IN HEART, SIGNAL = 1.4; EXPRESSED IN BRAIN, SIGNAL = 1.4; EXPRESSED IN BONE MARROW, SIGNAL = 3.1; EXPRESSED IN PLACENTA, SIGNAL =   2; EXPRESSED IN FETAL LIVER, SIGNAL = 1.9; EST_HUMAN HIT: BE814014.1, EVALUE 5.90e+00
KPGLSRKKNSLVTLYSRKFRLCRRRKKPLL

SEQ ID NO: 41426 - protein, 78 aa, Homo sapiens
  MAP TO AL162261.1; EXPRESSED IN LUNG, SIGNAL = 2.5; EXPRESSED IN PLACENTA, SIGNAL = 3.2; EXPRESSED IN HEART, SIGNAL = 3.1; EXPRESSED IN BRAIN, SIGNAL = 2.8; EXPRESSED IN BONE MARROW, SIGNAL = 3.4; EXPRESSED IN ADULT LIVER, SIGNAL = 3.7; EXPRESSED IN HELA, SIGNAL = 5.1; EXPRESSED IN FETAL LIVER, SIGNAL = 3.9; EST_HUMAN HIT: AI927458.1, EVALUE 6.00e-20
PDSPLPSVSPALLPVQSPTPPAAGFQPLLNGSLVPVPPTTPAPGVQLDVEALIPTHDEQGRPKPEWKRQVMVGKMQLK

SEQ ID NO: 41427 - protein, 69 aa, Homo sapiens [sequence omitted]

SEQ ID NO: 41428 - protein, 17 aa, Homo sapiens
  MAP TO AC022995.2; EXPRESSED IN PLACENTA, SIGNAL = 4.1; EXPRESSED IN ADULT LIVER, SIGNAL = 5.3; EXPRESSED IN FETAL LIVER, SIGNAL = 3.8; EXPRESSED IN BRAIN, SIGNAL = 3.6; EXPRESSED IN LUNG, SIGNAL = 2.4; EXPRESSED IN HELA, SIGNAL =   6; EXPRESSED IN HEART, SIGNAL = 4.1; EXPRESSED IN BONE MARROW, SIGNAL = 3.8
GFPFWPQMCLMPLGSRF

SEQ ID NO: 41429 - protein, 33 aa, Homo sapiens
  MAP TO AC016706.2; EXPRESSED IN LUNG, SIGNAL = 2.8; EXPRESSED IN ADULT LIVER, SIGNAL = 3.2; EXPRESSED IN FETAL LIVER, SIGNAL = 2.3; EXPRESSED IN BRAIN, SIGNAL = 2.2; EXPRESSED IN BONE MARROW, SIGNAL = 2.5; EXPRESSED IN PLACENTA, SIGNAL = 3.2; EXPRESSED IN HELA, SIGNAL = 2.6; EXPRESSED IN HEART, SIGNAL = 2.7; EST_HUMAN HIT: AA768841.1, EVALUE 2.00e-02
KKTAVYELRKQALTQCLDLGLPNLQDCEKRIFD

SEQ ID NO: 41430 - protein, 53 aa, Homo sapiens
  MAP TO AL121931.9; EXPRESSED IN HELA, SIGNAL = 2.4; EXPRESSED IN LUNG, SIGNAL = 2.6; EXPRESSED IN PLACENTA, SIGNAL =   3; EXPRESSED IN ADULT LIVER, SIGNAL = 2.2; EXPRESSED IN FETAL LIVER, SIGNAL = 3.7; EXPRESSED IN BRAIN, SIGNAL = 2.7; EXPRESSED IN BONE MARROW, SIGNAL = 2.2; EXPRESSED IN HEART, SIGNAL = 2.3
SKSTVRSNCRRYRQRIIKIRCQNTLTVIIDINGITIEFINSAMIYDNCSFMNS

SEQ ID NO: 41431 - protein, 64 aa, Homo sapiens
  MAP TO AC015649.5; EXPRESSED IN LUNG, SIGNAL = 5.4; EXPRESSED IN ADULT LIVER, SIGNAL = 4.9; EXPRESSED IN BRAIN, SIGNAL = 4.3; EXPRESSED IN PLACENTA, SIGNAL = 4.9; EXPRESSED IN HELA, SIGNAL = 4.9; EXPRESSED IN FETAL LIVER, SIGNAL = 4.5; EXPRESSED IN HEART, SIGNAL = 4.7; EXPRESSED IN BONE MARROW, SIGNAL = 5.1; SWISSPROT HIT: P57273, EVALUE 2.00e+00; EST_HUMAN HIT: AI920829.1, EVALUE 2.60e+00
VKTPCAFDISGISPFFLLSNHMFWNPRSLLHALQSPQPRIYNRKIQGKSKFPTATVPSSPETQS

SEQ ID NO: 41432 - protein, 27 aa, Homo sapiens
  MAP TO AL162260.1; EXPRESSED IN FETAL LIVER, SIGNAL = 1.7; EXPRESSED IN PLACENTA, SIGNAL = 1.3; EXPRESSED IN ADULT LIVER, SIGNAL = 1.7; EXPRESSED IN HELA, SIGNAL = 2.7; EXPRESSED IN HEART, SIGNAL = 1.5; EXPRESSED IN BONE MARROW, SIGNAL = 1.7; EXPRESSED IN LUNG, SIGNAL = 1.3; EXPRESSED IN BRAIN, SIGNAL = 1.4
ADMPLYLEVGVEMETFQVVDAIEPCEF

SEQ ID NO: 41433 - protein, 63 aa, Homo sapiens
  MAP TO AC013612.3; EXPRESSED IN ADULT LIVER, SIGNAL = 2.3; EXPRESSED IN BRAIN, SIGNAL = 1.9; EXPRESSED IN LUNG, SIGNAL = 2.4; EXPRESSED IN FETAL LIVER, SIGNAL = 1.6; EXPRESSED IN BONE MARROW, SIGNAL = 1.8; EXPRESSED IN PLACENTA, SIGNAL = 2.1; EXPRESSED IN HELA, SIGNAL =   3; EXPRESSED IN HEART, SIGNAL = 2.1; SWISSPROT HIT: Q15034, EVALUE 7.00e-05; EST_HUMAN HIT: AW963676.1, EVALUE 1.00e-31
ITTCLEDDLLRALPCHSPHQEALSVFLLLPECPVMHDSKNWKNLVVPFAKAVCEMSKQSLQVL

SEQ ID NO: 41434 - protein, 51 aa, Homo sapiens
  MAP TO AC010458.2; EXPRESSED IN LUNG, SIGNAL = 1.7; EXPRESSED IN PLACENTA, SIGNAL = 1.4; EXPRESSED IN ADULT LIVER, SIGNAL = 1.3; EXPRESSED IN HEART, SIGNAL = 1.5; EXPRESSED IN FETAL LIVER, SIGNAL = 1.8; EXPRESSED IN BRAIN, SIGNAL = 1.5; EXPRESSED IN BONE MARROW, SIGNAL = 1.8; SWISSPROT HIT: P18858, EVALUE 4.00e-24; EST_HUMAN HIT: BE873444.1, EVALUE 5.00e-23
LKKDYLDGVGDTLDLVVIGAYLGRGKRAGRYGGFLLASYDEDSEELQAICK

SEQ ID NO: 41435 - protein, 32 aa, Homo sapiens
  MAP TO AC022918.2; EXPRESSED IN LUNG, SIGNAL =   4; EXPRESSED IN ADULT LIVER, SIGNAL =   9; EXPRESSED IN BRAIN, SIGNAL = 6.2; EXPRESSED IN HEART, SIGNAL = 6.9; EXPRESSED IN PLACENTA, SIGNAL =   7; EXPRESSED IN HELA, SIGNAL =  10; EXPRESSED IN FETAL LIVER, SIGNAL = 6.6; EXPRESSED IN BONE MARROW, SIGNAL = 7.1; EST_HUMAN HIT: AA056029.1, EVALUE 2.60e+00; SWISSPROT HIT: O13066, EVALUE 2.90e+00
LSTHLAQDLEELKEGMWHKLKELNFSFCPTAK

SEQ ID NO: 41436 - protein, 52 aa, Homo sapiens
  MAP TO AC018389.3; EXPRESSED IN LUNG, SIGNAL = 1.3; EXPRESSED IN ADULT LIVER, SIGNAL = 1.3; EXPRESSED IN BRAIN, SIGNAL = 1.2; EXPRESSED IN BONE MARROW, SIGNAL = 1.2; EXPRESSED IN HEART, SIGNAL = 1.4; EXPRESSED IN PLACENTA, SIGNAL = 1.3; EXPRESSED IN FETAL LIVER, SIGNAL = 1.2; EST_HUMAN HIT: AA218715.1, EVALUE 2.90e+00
AVHQSTCSLSVLELPLSPWLLSRSLCSCTSAWSGFALLAQPAHRCVASPTLH

SEQ ID NO: 41437 - protein, 51 aa, Homo sapiens
  MAP TO AC015525.3; EXPRESSED IN LUNG, SIGNAL =   3; EXPRESSED IN ADULT LIVER, SIGNAL = 3.5; EXPRESSED IN HEART, SIGNAL = 2.9; EXPRESSED IN BRAIN, SIGNAL = 3.3; EXPRESSED IN PLACENTA, SIGNAL = 3.7; EXPRESSED IN FETAL LIVER, SIGNAL = 2.6; EXPRESSED IN BONE MARROW, SIGNAL =   3; EST_HUMAN HIT: BE789681.1, EVALUE 1.00e-23; SWISSPROT HIT: P48848, EVALUE 7.10e-01
SLWFPSDLAELRELSEVLREYRKEHQAYVFLLFCGAYLYKQGFAIPGSSFL

SEQ ID NO: 41438 - protein, 41 aa, Homo sapiens
  MAP TO AC015525.3; EXPRESSED IN LUNG, SIGNAL =   3; EXPRESSED IN ADULT LIVER, SIGNAL = 3.5; EXPRESSED IN HEART, SIGNAL = 2.9; EXPRESSED IN BRAIN, SIGNAL = 3.3; EXPRESSED IN PLACENTA, SIGNAL = 3.7; EXPRESSED IN FETAL LIVER, SIGNAL = 2.6; EXPRESSED IN BONE MARROW, SIGNAL =   3; EST_HUMAN HIT: BE789681.1, EVALUE 1.00e-07
SCGSSLRSFESTGRSTRPTCSCSSAAPTSTNRALPSPAPAS

SEQ ID NO: 41439 - protein, 28 aa, Homo sapiens
  MAP TO AC018525.4; EXPRESSED IN LUNG, SIGNAL = 2.3; EXPRESSED IN BONE MARROW, SIGNAL = 2.1; EXPRESSED IN PLACENTA, SIGNAL = 2.3; EXPRESSED IN ADULT LIVER, SIGNAL = 2.5; EXPRESSED IN HEART, SIGNAL = 2.2; EXPRESSED IN FETAL LIVER, SIGNAL = 1.6; EXPRESSED IN BRAIN, SIGNAL = 1.9
INEMNQEIITIIIIVIIIIIYYICPGFI

SEQ ID NO: 41440 - protein, 25 aa, Homo sapiens
  MAP TO AC007326.28; EXPRESSED IN LUNG, SIGNAL = 1.8; EXPRESSED IN PLACENTA, SIGNAL = 1.2; EXPRESSED IN ADULT LIVER, SIGNAL = 2.1; EXPRESSED IN FETAL LIVER, SIGNAL = 1.5; EXPRESSED IN BRAIN, SIGNAL = 1.8; EXPRESSED IN BONE MARROW, SIGNAL = 1.7; EXPRESSED IN HEART, SIGNAL = 1.2; EST_HUMAN HIT: BF431465.1, EVALUE 7.00e-07
VKVRSSVVIEDKSTRDPEYVYSQPY

SEQ ID NO: 41441 - protein, 30 aa, Homo sapiens
  MAP TO AC007326.28; EXPRESSED IN LUNG, SIGNAL = 1.8; EXPRESSED IN PLACENTA, SIGNAL = 1.2; EXPRESSED IN ADULT LIVER, SIGNAL = 2.1; EXPRESSED IN FETAL LIVER, SIGNAL = 1.5; EXPRESSED IN BRAIN, SIGNAL = 1.8; EXPRESSED IN BONE MARROW, SIGNAL = 1.7; EXPRESSED IN HEART, SIGNAL = 1.2; EST_HUMAN HIT: AW298218.1, EVALUE 2.00e-03
AWSLRTSRREIPSTSTVSLTVSLCARKKLG

SEQ ID NO: 41442 - protein, 32 aa, Homo sapiens
  MAP TO AL139187.4; EXPRESSED IN PLACENTA, SIGNAL = 1.3; EXPRESSED IN FETAL LIVER, SIGNAL = 1.1; EXPRESSED IN LUNG, SIGNAL = 1.5; EXPRESSED IN ADULT LIVER, SIGNAL = 1.4; EXPRESSED IN HEART, SIGNAL = 1.2; EXPRESSED IN BRAIN, SIGNAL = 1.3; EXPRESSED IN BONE MARROW, SIGNAL = 1.1; EST_HUMAN HIT: BF577184.1, EVALUE 3.40e+00
CRAWERSPCWRTVGKCRFWRAEMDILMPKRQF

SEQ ID NO: 41443 - protein, 86 aa, Homo sapiens
  MAP TO AC011859.4; EXPRESSED IN PLACENTA, SIGNAL = 0.76; EXPRESSED IN ADULT LIVER, SIGNAL = 0.96; EXPRESSED IN FETAL LIVER, SIGNAL = 1.6; EXPRESSED IN BRAIN, SIGNAL =   1; EXPRESSED IN BONE MARROW, SIGNAL = 1.8; EXPRESSED IN HEART, SIGNAL = 1.2; SWISSPROT HIT: Q94131, EVALUE 1.50e+00; EST_HUMAN HIT: AI917113.1, EVALUE 3.00e-32
VCREYQRGNCNRGENDCRFAHPADSTMIDTNDNTVTVCMDYIKGRCSREKCKYFHPPAHLQAKIKAAQYQVNQAAAAQAAATAAAM

SEQ ID NO: 41444 - protein, 26 aa, Homo sapiens
  MAP TO AC011859.4; EXPRESSED IN PLACENTA, SIGNAL = 0.76; EXPRESSED IN ADULT LIVER, SIGNAL = 0.96; EXPRESSED IN FETAL LIVER, SIGNAL = 1.6; EXPRESSED IN BRAIN, SIGNAL =   1; EXPRESSED IN BONE MARROW, SIGNAL = 1.8; EXPRESSED IN HEART, SIGNAL = 1.2; EST_HUMAN HIT: AA131248.1, EVALUE 4.00e-06
YVESTNVAIATEEKMIVGLLILLTAQ

SEQ ID NO: 41445 - protein, 25 aa, Homo sapiens
  MAP TO AC021824.2; EXPRESSED IN BONE MARROW, SIGNAL = 3.9; EXPRESSED IN PLACENTA, SIGNAL = 3.8; EXPRESSED IN ADULT LIVER, SIGNAL = 4.8; EXPRESSED IN HELA, SIGNAL = 5.5; EXPRESSED IN FETAL LIVER, SIGNAL = 3.9; EXPRESSED IN BRAIN, SIGNAL = 3.9; EXPRESSED IN LUNG, SIGNAL = 2.5; EXPRESSED IN HEART, SIGNAL = 4.1; EST_HUMAN HIT: BF364169.1, EVALUE 3.00e-07
KRTAGLGPCLGQEQRKLGSIVSTCV

SEQ ID NO: 41446 - protein, 64 aa, Homo sapiens
  MAP TO AL121917.12; EXPRESSED IN PLACENTA, SIGNAL = 4.6; EXPRESSED IN HELA, SIGNAL = 5.5; EXPRESSED IN FETAL LIVER, SIGNAL = 5.6; EXPRESSED IN ADULT LIVER, SIGNAL = 5.8; EXPRESSED IN HEART, SIGNAL = 4.5; EXPRESSED IN BONE MARROW, SIGNAL = 6.2; EXPRESSED IN LUNG, SIGNAL = 4.8; EXPRESSED IN BRAIN, SIGNAL = 5.5; SWISSPROT HIT: O02609, EVALUE 4.50e+00; EST_HUMAN HIT: AW962016.1, EVALUE 8.00e-21
LRQMPNDRRKVDVEFFSSFWCSCKRTSFRDCSQLVVVNFRRLAATLLIFKALLSFAKLLEPPLH

SEQ ID NO: 41447 - protein, 64 aa, Homo sapiens
  MAP TO AL121917.12; EXPRESSED IN PLACENTA, SIGNAL = 4.6; EXPRESSED IN HELA, SIGNAL = 5.5; EXPRESSED IN FETAL LIVER, SIGNAL = 5.6; EXPRESSED IN ADULT LIVER, SIGNAL = 5.8; EXPRESSED IN HEART, SIGNAL = 4.5; EXPRESSED IN BONE MARROW, SIGNAL = 6.2; EXPRESSED IN LUNG, SIGNAL = 4.8; EXPRESSED IN BRAIN, SIGNAL = 5.5; EST_HUMAN HIT: AW962016.1, EVALUE 1.00e-06
CVKCRMTVERWTLSSSAASGVVVRGPASVIALSWWLSTSDDWPLRSSSSRLSSLLQNFLNPHCT

SEQ ID NO: 41448 - protein, 91 aa, Homo sapiens
  MAP TO AC015908.4; EXPRESSED IN ADULT LIVER, SIGNAL = 1.6; EXPRESSED IN BRAIN, SIGNAL = 1.4; EXPRESSED IN LUNG, SIGNAL = 1.6; EXPRESSED IN FETAL LIVER, SIGNAL = 1.1; EXPRESSED IN BONE MARROW, SIGNAL = 1.2; EXPRESSED IN PLACENTA, SIGNAL = 1.3; EXPRESSED IN HEART, SIGNAL = 1.2; SWISSPROT HIT: Q00362, EVALUE 8.80e+00; EST_HUMAN HIT: AU117659.1, EVALUE 9.00e-25
MTMETLPKVLEVDEKSPEAKDLLPSQTASSLCISSRSESVWTTTPRSNWEIYRKPIVIMSVGGAILLFGVVITCLAYTLKLSDKSLSILKM

SEQ ID NO: 41449 - protein, 40 aa, Homo sapiens
  MAP TO AL121920.7; EXPRESSED IN ADULT LIVER, SIGNAL = 0.86; EXPRESSED IN HELA, SIGNAL = 3.7; EXPRESSED IN HEART, SIGNAL = 1.9; EXPRESSED IN FETAL LIVER, SIGNAL = 2.5; EXPRESSED IN BRAIN, SIGNAL = 3.1; EXPRESSED IN BONE MARROW, SIGNAL = 2.8; EXPRESSED IN LUNG, SIGNAL = 1.5; EXPRESSED IN PLACENTA, SIGNAL = 2.1; EST_HUMAN HIT: AW833909.1, EVALUE 9.40e+00
PCGILRAGAKQIVLFHELGDKHVTQSNPKTHKETDTGIPG

SEQ ID NO: 41450 - protein, 20 aa, Homo sapiens
  MAP TO AL139340.3; EXPRESSED IN PLACENTA, SIGNAL = 2.6; EXPRESSED IN ADULT LIVER, SIGNAL = 4.4; EXPRESSED IN HEART, SIGNAL = 3.1; EXPRESSED IN BRAIN, SIGNAL = 5.6; EXPRESSED IN BONE MARROW, SIGNAL = 5.8; EXPRESSED IN LUNG, SIGNAL = 4.6; EXPRESSED IN HELA, SIGNAL = 6.6; EXPRESSED IN FETAL LIVER, SIGNAL = 5.2; EST_HUMAN HIT: AU125072.1, EVALUE 2.10e+00
LRTCSPPCLSPAFSVGSCVA

SEQ ID NO: 41451 - protein, 35 aa, Homo sapiens
  MAP TO AP001537.1; EXPRESSED IN ADULT LIVER, SIGNAL =   2; EXPRESSED IN HEART, SIGNAL = 1.6; EXPRESSED IN BRAIN, SIGNAL = 1.8; EXPRESSED IN LUNG, SIGNAL = 1.6; EXPRESSED IN PLACENTA, SIGNAL = 1.8; EXPRESSED IN FETAL LIVER, SIGNAL = 1.4; EXPRESSED IN BONE MARROW, SIGNAL = 1.7
ASCISMQCSSAASPEAQAGTGAAQPTAVDGASWKP

SEQ ID NO: 41452 - protein, 33 aa, Homo sapiens
  MAP TO AL121904.13; EXPRESSED IN BONE MARROW, SIGNAL = 1.2; EXPRESSED IN LUNG, SIGNAL = 1.4; EXPRESSED IN ADULT LIVER, SIGNAL = 1.3; EXPRESSED IN BRAIN, SIGNAL = 1.6; EXPRESSED IN PLACENTA, SIGNAL = 1.2; EXPRESSED IN HEART, SIGNAL = 1.2; EXPRESSED IN FETAL LIVER, SIGNAL = 1.3; EST_HUMAN HIT: AL043129.2, EVALUE 3.00e-14
CLLCAGTPFGAYNYYLLCHVVTIFSMCQKFYIQ

SEQ ID NO: 41453 - protein, 35 aa, Homo sapiens
  MAP TO AC010290.4; EXPRESSED IN PLACENTA, SIGNAL = 2.1; EXPRESSED IN FETAL LIVER, SIGNAL = 2.3; EXPRESSED IN BRAIN, SIGNAL = 2.1; EXPRESSED IN LUNG, SIGNAL = 2.4; EXPRESSED IN ADULT LIVER, SIGNAL = 2.4; EXPRESSED IN HEART, SIGNAL = 2.2; EXPRESSED IN BONE MARROW, SIGNAL = 1.9; EST_HUMAN HIT: BE910167.1, EVALUE 7.00e-15
ILWNLVRVEMAMARASWRIASWEAPELVCPRTFWR

SEQ ID NO: 41454 - protein, 32 aa, Homo sapiens
  MAP TO AC021567.2; EXPRESSED IN LUNG, SIGNAL = 1.5; EXPRESSED IN BONE MARROW, SIGNAL = 1.7; EXPRESSED IN BRAIN, SIGNAL = 1.7; EXPRESSED IN FETAL LIVER, SIGNAL = 1.7; EXPRESSED IN HELA, SIGNAL = 2.9; EXPRESSED IN ADULT LIVER, SIGNAL = 2.3; EXPRESSED IN PLACENTA, SIGNAL = 1.7; EXPRESSED IN HEART, SIGNAL =   2; EST_HUMAN HIT: AL043655.1, EVALUE 8.00e-04
SLFSSHWRAACITLWCSSISNNDRRSCLQSTQ

SEQ ID NO: 41455 - protein, 59 aa, Homo sapiens
  MAP TO AL133260.7; EXPRESSED IN LUNG, SIGNAL = 2.4; EXPRESSED IN PLACENTA, SIGNAL = 4.2; EXPRESSED IN FETAL LIVER, SIGNAL = 2.1; EXPRESSED IN BRAIN, SIGNAL = 1.9; EXPRESSED IN ADULT LIVER, SIGNAL =   2; EXPRESSED IN HEART, SIGNAL =   2; EXPRESSED IN BONE MARROW, SIGNAL = 2.1; EST_HUMAN HIT: AA127445.1, EVALUE 1.00e-18; SWISSPROT HIT: P11586, EVALUE 1.00e-13
TDTRAEIDLVCELAKRAGAFDAVPCYHWSVGGKGSVDLARAVREAASKRSRFQFLYDVQ

SEQ ID NO: 41456 - protein, 41 aa, Homo sapiens [sequence omitted]

SEQ ID NO: 41457 - protein, 77 aa, Homo sapiens
  MAP TO AL133174.9; EXPRESSED IN PLACENTA, SIGNAL = 1.3; EXPRESSED IN ADULT LIVER, SIGNAL = 0.77; EXPRESSED IN HELA, SIGNAL = 3.4; EXPRESSED IN HEART, SIGNAL = 1.3; EXPRESSED IN BRAIN, SIGNAL = 1.6; EXPRESSED IN BONE MARROW, SIGNAL = 1.7; EXPRESSED IN FETAL LIVER, SIGNAL = 1.6; SWISSPROT HIT: P55060, EVALUE 2.00e-40; EST_HUMAN HIT: AI963800.1, EVALUE 4.00e-40
TPLLQSLIGLFELPEDDTIPDEEHFIDIEDTPGYQTAFSQLAFAGKKEHDPVGQMVNNPKIHLAQSLHKLSTACPGR

SEQ ID NO: 41458 - protein, 53 aa, Homo sapiens
  MAP TO AC013627.3; EXPRESSED IN PLACENTA, SIGNAL = 1.3; EXPRESSED IN ADULT LIVER, SIGNAL = 1.6; EXPRESSED IN FETAL LIVER, SIGNAL = 1.3; EXPRESSED IN BRAIN, SIGNAL = 1.5; EXPRESSED IN BONE MARROW, SIGNAL = 1.4; EXPRESSED IN LUNG, SIGNAL =   1; EXPRESSED IN HEART, SIGNAL = 1.3; SWISSPROT HIT: Q01888, EVALUE 6.00e-05; EST_HUMAN HIT: BE018270.1, EVALUE 4.00e-16
GIDIGDSLTIPDEFTEDEKKSGQWWRQLLAGGIAGAVSRTSTAPLDRLKIMMQ

SEQ ID NO: 41459 - protein, 28 aa, Homo sapiens
  MAP TO AC009924.4; EXPRESSED IN HELA, SIGNAL = 5.8; EXPRESSED IN PLACENTA, SIGNAL = 3.9; EXPRESSED IN ADULT LIVER, SIGNAL = 4.3; EXPRESSED IN HEART, SIGNAL =   4; EXPRESSED IN FETAL LIVER, SIGNAL =   4; EXPRESSED IN BONE MARROW, SIGNAL = 4.4; EXPRESSED IN LUNG, SIGNAL = 3.7; EXPRESSED IN BRAIN, SIGNAL =   4; EST_HUMAN HIT: BE172085.1, EVALUE 3.10e-01
MKYSKYSAFKKKDILAYGTIWMNSKYIT

SEQ ID NO: 41460 - protein, 31 aa, Homo sapiens
  MAP TO AC013584.3; EXPRESSED IN BONE MARROW, SIGNAL =   2; EXPRESSED IN LUNG, SIGNAL = 2.1; EXPRESSED IN ADULT LIVER, SIGNAL = 2.4; EXPRESSED IN HELA, SIGNAL = 3.2; EXPRESSED IN FETAL LIVER, SIGNAL = 1.9; EXPRESSED IN BRAIN, SIGNAL =   2; EXPRESSED IN PLACENTA, SIGNAL = 2.1; EXPRESSED IN HEART, SIGNAL = 1.7
DAEMMKMQFLPSRFQSLVREEGIQINSYSTV

SEQ ID NO: 41461 - protein, 54 aa, Homo sapiens
  MAP TO AC025644.2; EXPRESSED IN PLACENTA, SIGNAL = 1.6; EXPRESSED IN ADULT LIVER, SIGNAL =   2; EXPRESSED IN FETAL LIVER, SIGNAL = 1.3; EXPRESSED IN BRAIN, SIGNAL = 1.5; EXPRESSED IN BONE MARROW, SIGNAL = 1.4; EXPRESSED IN LUNG, SIGNAL = 1.7; EXPRESSED IN HEART, SIGNAL = 1.6; EST_HUMAN HIT: F37794.1, EVALUE 6.40e+00; SWISSPROT HIT: P49371, EVALUE 6.10e+00
VAIDSLIEFDGVKHNKKDDLMGLKCSLLLKPFCNFHYQEKSLLQCYSVDFPNAS

SEQ ID NO: 41462 - protein, 20 aa, Homo sapiens
  MAP TO AC025644.2; EXPRESSED IN PLACENTA, SIGNAL = 1.6; EXPRESSED IN ADULT LIVER, SIGNAL =   2; EXPRESSED IN FETAL LIVER, SIGNAL = 1.3; EXPRESSED IN BRAIN, SIGNAL = 1.5; EXPRESSED IN BONE MARROW, SIGNAL = 1.4; EXPRESSED IN LUNG, SIGNAL = 1.7; EXPRESSED IN HEART, SIGNAL = 1.6
LWPLIHSLNLMVLSTIRKMT

SEQ ID NO: 41463 - protein, 68 aa, Homo sapiens
  MAP TO AC011022.4; EXPRESSED IN HELA, SIGNAL = 2.6; EXPRESSED IN PLACENTA, SIGNAL = 1.6; EXPRESSED IN ADULT LIVER, SIGNAL = 2.7; EXPRESSED IN FETAL LIVER, SIGNAL =   2; EXPRESSED IN BRAIN, SIGNAL = 3.2; EXPRESSED IN LUNG, SIGNAL = 1.6; EXPRESSED IN HEART, SIGNAL = 1.5; EXPRESSED IN BONE MARROW, SIGNAL =   2; SWISSPROT HIT: Q29048, EVALUE 3.00e-35; EST_HUMAN HIT: AL120990.1, EVALUE 3.00e-34
VFWGLDKKLAQRKHFPSVNWLISYSKYMRALDEYYDKHFTEFVPLRTKAKEILQEEEDLAEIVQLVGK

SEQ ID NO: 41464 - protein, 49 aa, Homo sapiens
  MAP TO AC011686.3; EXPRESSED IN PLACENTA, SIGNAL = 2.2; EXPRESSED IN ADULT LIVER, SIGNAL = 2.3; EXPRESSED IN HEART, SIGNAL = 2.1; EXPRESSED IN FETAL LIVER, SIGNAL = 2.1; EXPRESSED IN BRAIN, SIGNAL =   2; EXPRESSED IN BONE MARROW, SIGNAL = 2.1; EXPRESSED IN LUNG, SIGNAL = 1.9; SWISSPROT HIT: Q07283, EVALUE 1.10e-01; EST_HUMAN HIT: BE081653.1, EVALUE 2.00e-21
LREEKLQEEKPSEDQIHKLLPEDTETGKRKMDEQKKRDEPLVLKTNLER

SEQ ID NO: 41465 - protein, 40 aa, Homo sapiens
  MAP TO AC025747.3; EXPRESSED IN BONE MARROW, SIGNAL = 1.8; EXPRESSED IN LUNG, SIGNAL = 1.6; EXPRESSED IN ADULT LIVER, SIGNAL = 1.9; EXPRESSED IN HELA, SIGNAL = 2.3; EXPRESSED IN FETAL LIVER, SIGNAL = 1.6; EXPRESSED IN BRAIN, SIGNAL = 1.4; EXPRESSED IN PLACENTA, SIGNAL = 1.6; EXPRESSED IN HEART, SIGNAL = 1.5; EST_HUMAN HIT: AU131731.1, EVALUE 4.20e+00
WNSGVLRLLTYSRSCWMQKVKIGQNNAGRILPPFWKPSVP

SEQ ID NO: 41466 - protein, 53 aa, Homo sapiens
  MAP TO AC012683.3; EXPRESSED IN PLACENTA, SIGNAL = 0.68; EXPRESSED IN ADULT LIVER, SIGNAL = 1.6; EXPRESSED IN FETAL LIVER, SIGNAL = 0.87; EXPRESSED IN BRAIN, SIGNAL = 1.2; EXPRESSED IN HEART, SIGNAL = 1.6; EXPRESSED IN BONE MARROW, SIGNAL = 0.91; EST_HUMAN HIT: F08083.1, EVALUE 1.00e-23; SWISSPROT HIT: Q02218, EVALUE 8.00e-25
MASPNALVLWEAQFGDFHNTAQCIIDQFISTGQAKWVRHNGIVLLLPHGMEGM

SEQ ID NO: 41467 - protein, 59 aa, Homo sapiens
  MAP TO AC012683.3; EXPRESSED IN PLACENTA, SIGNAL = 0.68; EXPRESSED IN ADULT LIVER, SIGNAL = 1.6; EXPRESSED IN FETAL LIVER, SIGNAL = 0.87; EXPRESSED IN BRAIN, SIGNAL = 1.2; EXPRESSED IN HEART, SIGNAL = 1.6; EXPRESSED IN BONE MARROW, SIGNAL = 0.91; EST_HUMAN HIT: BE883595.1, EVALUE 5.00e-05
ALSWAMPWPAPMPWSSGRPSLGTSTTRPSASSTSSSAPARPSGCGIMALCCCCPMAWKA

SEQ ID NO: 41468 - protein, 69 aa, Homo sapiens
  MAP TO AF241725.1; EXPRESSED IN LUNG, SIGNAL = 1.2; EXPRESSED IN ADULT LIVER, SIGNAL = 1.7; EXPRESSED IN HEART, SIGNAL = 1.3; EXPRESSED IN FETAL LIVER, SIGNAL = 1.3; EXPRESSED IN PLACENTA, SIGNAL = 1.1; EXPRESSED IN BRAIN, SIGNAL = 1.5; EXPRESSED IN BONE MARROW, SIGNAL = 1.4; EST_HUMAN HIT: BE389158.1, EVALUE 3.00e-21; SWISSPROT HIT: P57042, EVALUE 1.50e+00
EKILGNVEETFELGNREWLEQFGGLRRRQQNVESLELPRDLLSGFDQDADNNIDNKIQAEVVSDGDEEL

SEQ ID NO: 41469 - protein, 39 aa, Homo sapiens
  MAP TO AL121910.19; EXPRESSED IN PLACENTA, SIGNAL = 1.5; EXPRESSED IN FETAL LIVER, SIGNAL = 1.2; EXPRESSED IN BONE MARROW, SIGNAL = 1.2; EXPRESSED IN LUNG, SIGNAL = 1.3; EXPRESSED IN ADULT LIVER, SIGNAL = 1.7; EXPRESSED IN HEART, SIGNAL = 1.3; EXPRESSED IN BRAIN, SIGNAL = 1.2
LTVAGTAEGGSEFPVDAMLPDKWKETVSICSHHRPADAL

SEQ ID NO: 41470 - protein, 44 aa, Homo sapiens
  MAP TO AL133295.11; EXPRESSED IN HELA, SIGNAL = 4.8; EXPRESSED IN LUNG, SIGNAL = 4.7; EXPRESSED IN ADULT LIVER, SIGNAL = 4.3; EXPRESSED IN HEART, SIGNAL = 5.3; EXPRESSED IN FETAL LIVER, SIGNAL = 5.1; EXPRESSED IN BRAIN, SIGNAL = 4.9; EXPRESSED IN BONE MARROW, SIGNAL = 4.3; EXPRESSED IN PLACENTA, SIGNAL =   5; EST_HUMAN HIT: BE245070.1, EVALUE 5.00e-21; SWISSPROT HIT: Q05650, EVALUE 8.20e+00
QWWQSLHRTMLRGVLGKTFRLVGYTIQYGCIAHCAFEYVGGVVM

SEQ ID NO: 41471 - protein, 31 aa, Homo sapiens
  MAP TO AL133295.11; EXPRESSED IN HELA, SIGNAL = 4.8; EXPRESSED IN LUNG, SIGNAL = 4.7; EXPRESSED IN ADULT LIVER, SIGNAL = 4.3; EXPRESSED IN HEART, SIGNAL = 5.3; EXPRESSED IN FETAL LIVER, SIGNAL = 5.1; EXPRESSED IN BRAIN, SIGNAL = 4.9; EXPRESSED IN BONE MARROW, SIGNAL = 4.3; EXPRESSED IN PLACENTA, SIGNAL =   5; EST_HUMAN HIT: BE245229.1, EVALUE 1.00e-11
ANGGRVYIELCFVVFWGKPFDLLAILFNMAV

SEQ ID NO: 41472 - protein, 63 aa, Homo sapiens
  MAP TO AC019276.3; EXPRESSED IN LUNG, SIGNAL =   2; EXPRESSED IN ADULT LIVER, SIGNAL = 2.9; EXPRESSED IN HEART, SIGNAL = 2.4; EXPRESSED IN BRAIN, SIGNAL = 1.9; EXPRESSED IN BONE MARROW, SIGNAL = 1.7; EXPRESSED IN PLACENTA, SIGNAL = 1.9; EXPRESSED IN FETAL LIVER, SIGNAL = 1.8; EST_HUMAN HIT: T79843.1, EVALUE 1.20e+00; SWISSPROT HIT: P78325, EVALUE 1.20e+00
HMKLKWENMVCEHYWGWGAEQALALVEVCKGKHPHCQAAQEWLPPSTAGKCWNPPHEGNLSWA

SEQ ID NO: 41473 - protein, 39 aa, Homo sapiens
  MAP TO AC023134.3; EXPRESSED IN LUNG, SIGNAL = 1.7; EXPRESSED IN FETAL LIVER, SIGNAL = 1.3; EXPRESSED IN PLACENTA, SIGNAL =   2; EXPRESSED IN HEART, SIGNAL = 1.8; EXPRESSED IN ADULT LIVER, SIGNAL = 1.7; EXPRESSED IN BRAIN, SIGNAL = 1.4; EXPRESSED IN BONE MARROW, SIGNAL = 1.2
KKIKERTEKEGKKKGRKAGRKQQGRKRRRKTDNHKADFS
